United States Patent Application Publication US 2021/0254056 A1 - sequence listing, part 19

SEQ ID NO: 39001 - DNA, 8076 bp, Homo sapiens
tgtggcagaaaggaactctgaagccccagcacgtagaacagtgcctggcactgaggggtcctaagcccagggggtaggtgctccagagatatgtattggtaagatggctggatggttacatggatggacagaccctccctcaaatcccaagcctactggcaaacagagaagctagctgtttagaaagaggggctcaggagaagcccatcacccggcaacatcgggtacttaaatcaggagcaagcaccgagggcagcctggggagaaacacagaccaagaatccactcctgacccagccctgccactgcgagctgtgtgaccatgaacaaggcacccagtttgctccatgtacagtttgttcctgtcttctcagggtgggcttgggcctgccaggcttccacacaggtcactgtgaggtcccaatggccccacgtcatggaaaaggctttgaaaacggcaagtgctatgcaagtgacagtgacgtcagttattattcatgcttaggagggtgaactctggtgccagaccaccgtgtcagaatcccagctcccccttttcatagctctgtggccttcagcttcagttcttcatctgtgacattgggatcatcacagcacctccctcattgcactgtaatcaggattaaatcagtttatttttgtaaagtgtttagaacgaagctcggcagatatgaagttccagtaaagggttaatctctcactgttgctattactattatgagtgaaaccagcctcctcgggctcccatggtgtccccctgcaatccaagcatgatttcctactgggcaattcctattcccccattcacctcctcccctccagaccccccaccctgacctgcagacctccaagtcattctacagggacgttccaagcccctgtgctgggcctgcctgggcaagtagaagcaatgtgcacatcattccacccccagtgcagctctcccgcacacagaagacctgacatccgccgaccttggtggccaacccatttggcgatcacccttgaaaaattcttttgacttatttttcagaagttgagaaaagctgcttcagctctttgcaaggatcaggagtgtccgtggcaaacaagccctcttgcctctccatcctgccccaccagtgccccacaggagggtggtgaccctaggtcccttctacccaaggccttgggcaacatctgttgagtaagatgaaaacatggttgaagattaagccactttaccctggctggcccgggcacaggttgggaaatgtatttggctggcagggcctgaagccgggcagaaattctatgtctgggatgagaggtcctaatcccaggggttggaatttaagcaagatcagtgagaagtccagacagagagctggaactcaactgagacatgaagaaaacacaacacacagaaggacagacacaccatgagggacagagaatgggcagggaggccggagagcagcctaccgaggctgaagggcaggcaacaaatggaaaaggaaggaaaaatacaaacccgccctttcctccctcttgtgaacctgttcaaagcacttgcctcgcccgcccgtgaggaaacaggtgctgagtgctcctggggaagccaaactttctcccggtttcccctgggccactttcccactccccagggacagtagcagagcttccagctgaaggcagctgccaccttcccccatggccccccacctttaggactcaacagccccacccattcaccagctagggaacatggagtcatagcagtcctgtttattgagtacctaatctgccagacatcgggctgaatgccttccttccagccattcaagaaacatatatagagcacctaccgtgtgcaaggcagcggggacacagcaccgaacaaaatagataaaaattccttgtcctaatggagtttacatgctggcatgggcaaaaccccttaaacaagataaataagtaaaatgcatagtgtatcggggcgatgcatgctgaggggcagtggaagcatggaagggagactgggtgctggggaaagggaaatgctgacacttcaataaaaatttgaggttcggccgggcgcgcagtagctcacgcctgtaatcccagcactttgagaggccgaggcgggaggatcatttgaggtcaggagttcaagccaacctagccaacctaatgaaaccccatctctactaaaaatgcaaaaatcagcaaggtgtggtgccgtgcgcctgtagtcccagctactcaggaggctgaggcgggagaaatgcttgaacccaggaggtggaggttgcagtgagccaagatcacaccactgcactccagcctgggcaacacagtgagactgttctcaaaaaaaaaaaaaaaaaaagacttgcgactgggggaaaagccttgtgggtatctgtgggaagagcattccaggcagggggaatagtaagtgcaaaggcctggaggcatcatatatgttcaagaaccagcaggaaggccgggcggctgaaacagaatgagtgaggtgctgagaaggagatgaggtgagagaggaaaatgacaagacacgggtgaacgagaaggagctgaggcaaaaggaaacctgtcacgtagggctgcttgggccaacggaagaacctgagcttttgctccagtgaggtgggccagcattgaaggacttggaaaacatgaattaaatggattaatgtgctcactttggtcttttggcaggcttacagcataggtaccgtcactaacgtccattatgaagaagagaaacggaggtccagggaggttagcaatgtcagggtcgtacaccagggagcgggggagctgggatgcagaaggaggtggtctaactccctcgctctttaccgctggggaggcgggttgtgactcaggcaggggagcctctgggagcaccgtctggtgacacagccatttcaccaccaggtggctgatccagcctcctcgaagggcagagccccctgcacaggcggggcacctcacagagacacgcagccttgctcaggcacgagtctcttctggattctaactgcagtccccccagctggaatgccaacctattcccttttgtcctaacctctgaccgctcttcatgtaaacaaagctcatgagactcccagcagccagacatctagcttctgcctggtggtccctaaaccctgaacccccagcctcataaagcagccaaggacattctgttcttagccacaaggtgggagttcagctggaataaggagaaatggacactcacccctccccgcccgccctcctcggactcccatggtgtccctctgcaatccaagcgcgatttcttgctggcagttccaagcccgactgcactccaccccccagcccccgctgttgccagatgaccctccactgggctccgtatgaataacactccacatctgcagcagcagggctgggcagcactgaggcccgggagagcctggccctagtgagaccagggaaggagggaccactgcaaagaaggtaaacaaccccagcaggcctgagcccgagcgtgcagagcagtgacacttagagtcccaagcacttctgtgcacttcatttcactccatcaccaccctgaatagggagggagggagagggaacactcatcaacatggaggggccccttggagcatctccacagcaaggaaaattgaggtccagaaagaaacaggatgggaccagccccttgtcatacagcaagtggatattgatgaaaggaaggagactctggcctgactgagcacccagtgtctgggctgagcaagtcacaacagaggtgtgtgaggtacctacaactgcctgggccccaggacagccacgccccgccccaggctcctgccgacattagtactgccacaggcaactccacagcctgatccgattgtgcccgcaaggtgtccttccgggacacacccacacacctgtacacaggcacacaggtgcatgcaggcagcccccttccttccccagcagcgcccagagccttgtctgcttctagggccatggtggggaggaagaagacctctgaagggtgagaaggtggcgagaggcaggaaggaagagtgcccagtgtgccaaatcagcccagctggcatcagggtggagcagggccctctctacagcccacaactcacagggatcccaccccagtccaggctatggtgcaaggctgattcgggggtgacgggaagaggagtgggggaaatggaaagggagcagaaaagcaaagtcaagccaaggggcttagaggcagaacagaggtcgcctgtagggaaaaactgcccaggtgaatggactctgagggtcatcccccgcctccagccccagggtgcctgacccgggaccaggcaggcagaaggagatgccgtggcagcccctggtcctctgagtcccgggacaacaggcacctggccaggcctggagacacacaagatgcccttttatgggtttttctaaggacgcaagtctcaaggttggaaatagcaggcactgcatctcatcagaagggacctcatgactcatttcctcccaggcccgcttcggcccagggaggtcgaccctcctcctccacctaattgtccgacaccccagttaccaacatatttgggtctaaagaaagctgcagctgggagctgcggagggagaggaggcagggcttgcagggcaaggaagggctgtcactcaccaccagctcatggttggatggaggaacgcagggggcagccacctgtggaaggaacagagaacgggcaggtgagcatatcttgtctctagagacagccagcacctcctgaggtcaccccacacctccccctgcttcattccctcacacgggctgacaccttctgggttgagagttcttcagcagactatggagcaacacagaaaaactactccagcaataacgcctgggaaagggagcgggggccgcagaaggcaaaaatgaaatgagcgtcacaattaaaattctgtgacaaatatgcacatgctgggagactggagatcactgcaccggcatttcaataacagaagcttcaggtaataagaagaaggattttttttttttttttttgctctatgtcctgaattttctacaatatggtaaaattcattttacatttttaaaaactgtgattaggaccatcatcagaaaagggagagtcacctccttggttctccccattgctaagggatctcacccaaaggtcagagctgcagaaggctcctaccagctctggcactttcccggagcatgcatgaaatgggttggtaaaagggacccaccagcccttccaaagaaagccatgagtgtggctaacacatgtggaaggcttggagaggcagaagcactctctgggagtgagctatgatcttcaccagtttcatgatcctcatcttcctctctgatccagagaaggagatggcaacttgaacttccagacagagggaagaagggagagggggagagtagaggggagggagggagagggaagaggagagtggaggggagggagcgagagggaggaggagagtagaggggagggagggaaggctccatcgctcccttccctgagataacattcccctggccaggcctggcaggcgagccattaccctgacaattagcaggggcatttatcagagactgaatgtgctccttttttctagccaggacacgtttttcttggagctcagtcctcaaccttggctccgattcccaacctgaacaccaggcaaggggcccacagtgggcacagagtgggagactgtccctcgggcatgaggttatctgggaacaagccatggatgtccaaagagggggtagctgcctcccccagacagtgggcaacccctccccacccaccagcccggtggagtggtggcagcaagagccctcagcccagccccagctggtactgactgggcattgggcaccctagctgagcccttcctccagctgaccgcatgctgtcatcccagcagcccagggattccccaggcttgacacagcagcccagataaggtcagcacctgtgggacagtgtgctccaagctctggaaggggcagaggtggctgggagttggcattcctgggtttttgacacagtcgggctacagactccctgcccaactcattctccagcaaagaggcccaaatggagtcctagcatttattcctctttgctccacagaattctaggactggtgggagaagaacagggggccgaacagaaccaacaacaataatacccaatactattgagtgtgtactagatgacaggcatgattataaatgctttacctctgttaacatttttaatcctttcaataacccagtaaggtgggttactattgttattcccacagttgcggtgcgcggggcatggatgggttaaattgcctaaggtcacacagctgataagtggccgagatttgaacccaggcagtctaagtcccaagatgacatgtgaagggaagcttatcactcgtggccccaatttcggaagaatgaggagacacagggggaacagaactgcccccagaagcccggggtccttaatccacaccagcacggggctatgagtgattgttttagaagaggcctctgagagacagagcccagggctgggggagagggtgccagggtaacagactgggcgggaaggggaggtccccagagctggctgtggcctgcagggctctctgcttaccctgcccacgagaccaggtctcagctacgggggacactgctgtccctgccaagcacagcaccaaaccctgctctggggactgggagttttcaaggtcaggggccagggccccagggtgccttctcccaacccactctgtcaccatgggtccctcagtcctgggggagggagtacaattcccaggacagcacccttgctgtgttctttttctgagcttgggctgggcagggaccgcgagccaggccaagctgccagaggacgggctgatgcctgccactgccagggccccaggttccaccagtcccctccctcacaggaggtgtgtttctgctctccatttagaagctggggattggaaaagggagggagggggttatggctacattttgaaccagcagcagaagagacaggtgttctctgagacgaagaggaaggtctccctcccagacctactctcaggcagtggacaggagggggcccaggtatcctgaccgcaggtcccttccctggcctcccgaggcagaggcaccccctaagaacctggccctgcgggggagctgtcaagccccagcccaagggcctgatgccttggtgccccctcgtggcctgccacccccgacggcgtcctccatcctccgcccacagccgtgcattccaggcccactggccggccagcccactgactttgttgtgtgtttcagtgtttcttgtctctctctttttttttaagcaaagaaatgtttccttaaaaggctctcgccttctctccggcaccctggcccctggccaccctctcaggagcccggaatgtgccagggagagccagggccccctgccactctatggcccatgccctgtggccccacagtcctggagtccccagggggcccaggtaaggaagcctccctctgcagggggcagactctgggggtggctatagggggtcttggtgccagcgctgtcataggctcacctcccagagctgtcagtgcaggattccagggctcagacccagaaagtcagcctcaggtaagcccccttcccccagtggacctcaagcaaaccatttagacattgggaactgacagggtgtcctgctcaatcttttcactctcaataacatagcaataaaaatcacagcagcaaataaactcccatcacccttgctctgtgccaggcactgttctcagcagtttgcattaattaactcatttaattcacgtaacaatgctgagcgttgtcattattatccccattttgtggatgagaagactgaggcacatagaggctaatgagttggccaacaggaggc

SEQ ID NO: 39002 - DNA, 4402 bp, Homo sapiens
tttagccattggcactggggagccagtaaaggcacttgtgtaggagaaggaccaggctgaaactatgctccagataaagatgtccaggagtagggtctgggggagctgaagggtgggaagtttaaggcaagcaaggatgtatagtcacattactaataacaataaggggaaggagaaagtgggggagaagaggaccctataacccagagacaagaggccatcaggcaccctgaagcctaggggccctcatctccactctaacaaaacacacatttgcagtgacccccatccccacccttgacttctcttcctcacccagagcacgggagggtgccactacccactcttagagcagacctggcatgcccacagctctgcctgctgttcaccctctgggccctgccccaggaacctgtggccaggaggcaggcagcttctgagccctgttctctgaaatgataccagagcggtccagaaaaaatccagacaataatcccagaaggccccagtctccatgcccatatgaagaaataggcaggtgaccctcctatctgtggacagtccagcacttcagggctcacaccatgagtccactagaactcaggaaggccccagacagcccccattcaacctggtaaggcaagctgggaggcccaggggagagggccagttgttagcctgccaaccaggagggaggcaggcctccttcaggacctgaggatgctcaacagacaaggagctgcaagaatgccaaggccatggagggagggtgtggggacaagattacaaggcttgcctgaaagggccagaggtctcaagggtcccagcacagctcaaagacactggcctcccaggctgagcctcaggccctcaggaggagggatcctggagagaaggtggccactgccccggcccatttcctccccaggcctgtgccctccccaccaggcagctggccttcaccggggcttgctccagcctctccaggctccctggcctgctagtctgtttccttcccttttatagagttctgtttggaccaggaaatgaagtgcatcaagttcctggaggcaagaaggggcctgttcccagcaacaccaagccagggcacacacacccaagccctgagtgtccctccaaagacagtggggacagggagtgggcctggccctttccccaaacccagcacaggctgggacccagaacctgaagcagacaggacacaggggagtcccagagggctgactcaccaaggccccaggccccacccctccccaaatcctcctgagctgagctcctcttaaatcactggccccatcaacctatccccaaagctccagctgcccactgcttcctcttccatttcctcttcttgtctcaggatcctcttccccagccccactcactgaccccccagcccactgctaggctccctgtcctgcaagccactcgagatgggctctccagacaggggagttcctcttcagacaagaacctccccacctctaaccacacccacacacagagcagctgccaggtccacataagggccactcaacaaccagacctgaacgaggcagggaagagcaggtgtgcctgacccttcaggagcctgcggaatgtggagttctgggcagcttcagtcagaagctgacaacaacaaggggaactcggggggaccagcaggccaagctgtgggaccatgggcctcccagccactgaagccaggccctcccaagccagcctggaagaaggcacgacaccatggcacccagatgggcctaccccaggtgaaggcagggagtcttctctggagattagcctccagacaacccaagcggggatctcaagggtcccggctcaggggccacactcacccacacccctaatcagggaagctgggagaggtgaggctgcacactaggccggacttcttaggagcatgtgctgatgagcaggggggtcagagacatggggttcagcagagctgcactgagtacctatggagtgccaggcccagggagcacaagacagcaagcctaccggggcagggtgagagggtccccgcaatagccaggacaaaaggccgggacaggcaaggccacagggaagcaccagcaggggtcagagggcacggaggggcccagggcatgacccgtcagcatcctggtttcatgatcctgcccacactcggccacctcctggccttcctgcatggcactgacaacacctgccaccacccccatctccacccaccacccctccctcagccctccaccccccacccgccccggccaccaaagtcgttcaagccagaggcccatgtgtctgtcttccttcattctttcccctcccttccaccaagcctaggcaactcctcctcctaaatacctctctgagccacatacaccccttctcaggtcctattaatcatagagatgattgcaacagcctacaacactggtctccctgccctccgccttgtcccctccaccccattctccatttggcagccagggagctatttctaaaatgcacatccagcagtgtcacttctctgcctaaagttcttgcatagctcccagctcacgggagaaagtccaaatgtcctaatatggccatcaggcccttcgggacctggctatgcctccctctccactcccatttctcacctctccacctcaaagcccttgctctggccagagaaaattacgttcaggtccgctttcattcaatacggcgcactctgagctaggggctatcagtccatttcacagatgaggaaatgaggcactaagaggttgcattctcagcctaaggtcacacaaccagtaaataatggaaattgaaccaagttctgccgcggctgtgtccgaagcctcagctctgcccaggaccacaccacctttcccagtcgggggtcacagaaagtttcatggagaacatggcctttgagatgggtagggaggagagatgccaggggtcagagaacacaaagagaccagttggctgtgcccagggcacacagggccaaacagagaaaggcggtcagagaggcaacccatgccacactgcacatgacctggagggccaggctgaggccaatgtccaggaccctggagtggcctcatgcccccagagccagtgagaagccatgggtgaggtgtagggctggagcccgagagtccagcctggaagaggctctgagctggtcagggagcagaggagagagattaaagaggggatccgaggaacataagaagatggaggggcaggaaagtggggcagtcagagctgctgaggcacgcggccggaggactagggggaagccagccgccatgctagaagaggaggtgtgaacaggcaatatggaatgcaggcttcagagtcgccttctccagcaacccaaaaagcaggaaaaccccaccccttctccctgacctattctgaagcagggaggctgggggacagggccggcagcacagagaacagagcttctaggaagttcctagaagagctgctcaaggaaagggctgtggtctgtggtcatggttctagtggaactggtgtgaaaggaggtgacaggcgtggggagcgagaccacgtgttcactcaacaatgcccactgagtgcccctccatgccaggttcccagctctggagacagatgaatgaggatggccccgcccgggagggaaacttgtggcccggtgggggagacaggcatgtaaacagagaattgtaaaacagccccagtaatgctataatggaggtatgaagagggctaggatttcactgggattcaagtccatctgtttttccacccagagcgaggctgcccaccccaacccctcactttccaccaagggtttctgtttctagatggaaacttgaagggacaaaagtctttgaccttagctgtgctagaacagtaaggcaggaagggtgcatgggaaaaaaatctaagagcagtgggaaaacccaaagagccaaaggtctcaggcagtgctgaggaccatgccaaccaccacggggacatgtgagggtaggtgcggggggctaagccaggcccaaaatagagaattctgaggctggggccacactcaaatccacacagacatcagagacccacacagacatcagcccctgtcttctgaagctaggccatcgtctgtttgccagccaggacaagggcgtagagacctctccactttcaacacctgtagaattacttgcaaaccacaggtgttcacctccctgtttcctaatttcaaggatgctgttgattgtatgtagcatcatcaactgagtaacagtttttgaggaggagggaaggctacttgaattgtacacatcgatcctaaggtgcattccattttcggaaacgttaaaatgttttttaa

SEQ ID NO: 39003 - DNA, 5607 bp, Homo sapiens
gtcaaagaaagcatgggacactgtacaatgtgagaactttccatcaaaaaaatccaccgtttttcctgagctctgaattcttccatgcataagcttcagttatctgaaaattcactcatgtggaaaactcctggcccctagatggcagcgacaggaggcagtgcaattattctgcacaattagcgcgcatcggggactggtgttctggaaccccatctgctctgatggacgaggctgcaccaggagcccccgcaagcagaaagtcccgagggcaggacagcccagctctctgttgctccttgaaatccatctggggccgagtggcgggaagccccctctcatttccaattatcaggcagcagaggcttgacgcacagccagcactgaaggccagagtaggcctggctgtcaccagcattgtttggctccatttgacgcatatccacccttcgtaatgcttccttgctcccaggcagacctcagagatgcacgtatctgaaaccaggtctggaggggaaggaggagggcaaacggaggggcggaagaagacctggctctctgactcggaaaacactgagagattttaaacggatagaagacaaagctggcatcagctaaagacccggtgacccagacactgcagccctgcatacacacagctcaaaacagcccaaggcacacacagcgcacatgcctgaccactgccggacccagatacaaagtcaccccctggtgcttgggccccaccccaaccagagccacacaaacagaaacacatcagcaccgccaacacatccactggcagggacactctgcatggccccaagcacagccaattccaggaagccagaaggggaaaggagcccatatgtacagactggaacagggggagcatgagccagcagagatggggggaacaagagcagcccagggcccctgaagcacacccagacctcccagctcctttcaaagtgcccactgcagccttggcaagcagcaaattctcctcacacttgcctgtcccatctgagccccacccatccttctggaagagcaggtgaaaggataaggcacacgggcagaagctgggtgggaggtgtcagaaatggaagagcaggtgcacaaacaatagggtggagtagataggaggatacgcagcctgaacattatggggtggaagcacaggtagctggaattttagggacagaggtggtgaggaagggcaaaacagagtttagggctcgggacaaccatattatttgaacacatacaaagaacatgtacttcatacagattatcccatttaatccttccaacaagagattcaacaagcagtagcctcttttcacatatgaggctactgaaccttacagcggagaaatgtgttggccaaggtcacacagcgatgagtggttgagctgggactcaaacccaggacagccagactgcaaattctacactccttgaggcaagccaagtcacctggatgcttggaagacaagacagagcatcgatggagctgagggggtgtgaaggcataggtgatgggaggggctgatccagagaagcacagagaggcagaggggatgaggtgtggcaccctgctggccgggacccccagctcctaaggaggacagggagggaggagctcaggctgctgtgattcagtggctgggcctccggggagaatttccggagccccagacagctctgtgcagtctaggagccacctacccagtggagacactgagccattactcacaactgttactcactttgcctctgcacccccatccccagcacatcacttcctcccactctgttccctttgggtggccaaggcaggcagcagatcttccccagtcccctcctttgcttcattggctccaatcctgccaagcgtatccccacctgagtcactgggacagagacgggagattctggccagcccaaccctgacagctgttgccctctgctctgttccaagaaatcaagctgcctggaggagtggtcactgggcaaagaacgttccaattccagtgctggaaggacctccccagcatttcagatggcatcccagcagatgcctgaagagccaacaggatcccacctcgatgctggacagctctgccaaaggccccaagactaggagcctctctgttcagaaagatccatgcacttacagaatttcagcactgctgaaaagagagaacgcccctaactcgaacttctcatttcgcaattgaggaaaccaaagcccaaaaagtggaagcaatttgcctgaagtcacacagtgccaaaagggactagcaggtcacctgacgcccctgccacaggtccttccgcggcactacacagacctctctctctgccccaagtcagagcaggcccctgaagttgactctgtcaccctcctgttgcaaagcagtgctgaagacgggagatctgaaggcagggtgaggagggggaggaaggagttgcagccagacagcggttactggggaggaatcactttccaacagtgaaggggcactggactccaggccacctactcagaacagtctgcccaggaggcagggagatggactgcaggccctccggaggctctggagctcaagggccaggccctctggcaggagatgatgggaggaattcttagggtcccagctgggaacttgggagagtcatggcctcctctccaatcacctctcctcccccagcccccacccctcaccctggctcgcctctgctctcccagggctccagcctggaatccagacctgaccactgcctccactcccacgcttggcctagctcagccggccacagcagaggcagccacatgtgtggtggtggaagcagttcgtgagccaccgaattccttctaagcctccagaggagcctcatctatctcttgtgctctcccctcccactctgggcagttgcactcatcccagccaagaaacccctgctgccagccccactctctcccactgtatcaataatagtaataaccataacaaaaacagcaataacaatcaccaaggtttatgcagaacagcctgcatgccagacccgctctatttgtttcctgcattttacaggtgagcaaagggaagcactggcaggtcaggtaagttgttcatagtcatatagcctgcaagagatggggtcaggattcacatgcagaccgtgtggctgcagacactgtgaaggtgacccccacatcacactgcctcatgagaggtcattgctctaggaaataaacgctgctgaaattccctcttcttcatcaacacacagtccctgaccacctgcgacatgccaggcacctggcctttgagacactcaacattccatctagctctggacaggcagccactctctgcactcaccaggccacgtagagccaggctgggcatggctgcctccgagcaatcaggctcctccaccctgaccagggaacactcctgttcgttcattcattcattcattcaacaaacagtaaggggctactgtgttccaggtcagatggtaaaggaggcccccaaaggatcctctcggtgccttaaaaatataagctgcctacagtctaccctcactcctgcctgctgcagttcatccatcccagggctgcgtgtgaagacttgccaaggatggctctctcctggcctgaaagatctcccaggaaggagatttcaggggcctccttggcctcccaatccaggaggggaggatggtatgctggaaggaagcccagagggatcagggagatgaagtgacttgggagaggattttccagccccagggctgaggaatttgaacataggattccaggaacccaggccctggcttgaggcctgcccctaggactcccctgcccagtacagccgtcacagtggcccaaatgcccttcctaaatcacagtctcatcatgtcttccctgtattaaaatcccctgccgctcccctctttaacctgcctcagaatatccccccatcttgagccccaagcaacagtttcaggctctccccaaagccatcctttcccacacatgccattttaagcctccatatactgtgggtttgctccatgccaggcactgggctgagaactttacaaatagcatctcatttcatacccacgctagcactacaaggttggaaatatgaatcctattttacagatgcagacactaaggctcagacccatgtagcagagctgggagggagacccacgcttgttatttctccttacctgcatgccactgggcctctgcacatgccttcccctgtgcctgaagaagtctttgccccttttcctccccgcaaaactccttgccaaacttcaaaatccatctcaaatggtacctcttctccaaagcttcctccgctctgccagctcacatgagctgcctcctgcttgacattcccactgcgttttgcagcaacactctgtctactcccctactcccctactccccccactagatcgtgtctcccggtctttccagcctcatacccagcaccttaactggcatagggtggatgccctcaaaggcttttaaagtgaacaatccagcggccccgtgtgcccagctggactcagctgctgccgcacagcgtccacagtgggtccacaggcactgccccggacccaaggagccaacccctggggctggcccatctctgccacccccaaatcatagcccgaaccccagctcatgtccctgggtggaggcttctccccatgccagccccccttcctggcttggcggcccctctcactcaaccagctctgccatttctgggagtctcagccggtgattagggccctaatcagcaggacttcctgccagcgactgccagagttgggggcagggcggggagggaagcaaggtcaatccaaggtgaagttccacagcgttgggactgggggacgcccagcagaggccccggggagatggactcacagaccccccacccctgcacctttcagcccttcatttacagttgagggcactgaggcccagcgagagaagggactcaggtgggactcctccagaggctagggacagagccaggcctagactcagatctgctcacttgaggagcactgctctcccacccagatggacccagggtggagcccctctttccgcttcccctgaagccctcttccccacccctatcccctaacccagcaccaagcccaggactgaacacaaaaactgctcccatacagggtggctggagaccagctgattgtccaggtctggtcaaggtcaaggggtaaagataaggcccacctctacatgagaaatggcctagaaattgggcagaggtgagcaggggccaaggaagggaagcaagatagggccaggctgagctcaggaacactccccagctgtcatcatcatcaacccaagcccattctttctccaaaaaaaagcttaatgccttttgcagctgcaactgggcgggccaggggtccggaaatggagttcacccccgacccagagcaaccccagcctccctgggtgggaactgcgttgggtggagaatacagcttggcaggccttgagggctgacccctgctaatgaggaa

SEQ ID NO: 39004 - DNA, 3105 bp, Homo sapiens
ccacgggtgtgagggaggggcacagtgccagggcagagcgtcgggctcttggttccttacacattggcaggaaggagggggcccctgcgagtggtctgcgcccacgccccaggccagaggacacagcttcctgatcccccattctggtgtcagagaactccccgactccaagtatcccaggccctcagcatcccaagagaccatccaggtcatcgcctctaaccacatcccagcccaggaatccttccaagcccttattcggcctctgtctaaactccccccagtacaagatgctctccaccttacaagatagcccatcctcctgctgacccaccagggtccttaggaagctcttccttcacctgagccaagattccacctctgaggctcctctcccttagaccaaacaaaagttctttctggccccccttgactcctgctcctatctgggtagaaacaggagcctgagggtccccaaactccaaggcttcagccacagcccatcagaggccagaagttggtctgcaaaacaataacatcttctctgaacccataagcatcccaacccagccccgctccacctggccaccaggttctctgtgcttatacttcctggacaccaccacctccctgggaaattcttcactggggccttgcgggaagtgaagtgtgaagaagcatgggatgagggatggggaagcagagccagaagggctcaaggccaggcgcctggaagcagagggtcccaggttgcctcctccaccgccaagaaccctcagctcctggttacagtgctggctcccagccctggtgctcggccggactggccgagaccctccccagcctggtccagcccactgctctccaaatccctgccctccatgggcagcagagtccaagccaaccccaagttgggtctccagtgctgatcccattcgggtctctccccccaacctctccatctcaatccacatcctccctcactcccttccacaaccctgggccagaggtttcaggcaaggggtgccccagctatagcaagtactgaggtccaaggagagctgtattcaggcttacaggagtggccaccagctggcaggggcaggtgcaacttgaggtcacatgtgagccaccatggtctccacccaccccaggcagcttcaggaggggaagagagggtgctccccctacaccttccccactgctgccacattgaagaggcagctgggacttccagaagagaagcccttgtctccaaagaccctggcaccctagtttccaggtccccctcctattctcacccccacaaccgcctgcctgcctgccctcctcctccatctcctccccacccagcacccatcctatcccccaaccccatcccctcccctgcagggagcccagcctgggagcacagcaggcttctccgggtcccccctatcacccccacccagtttcctcttctagaacagtagccagcctaaaacatctgggcaggcagtcctggcccaagtcctggattgggggttgggggactgacactgaggtcagctctgtatggattctccagcctgggaacgggtggcaggcagggcatcagagtcagaggacaggaggggtggggggagagggaggagcagggggaaggcagctgcccctgtctgttcattaaccacctggattagccatttctgcccagaggggtgaggaaggagtaagggctagtggttggagagggcagagggggcacttctgccagtctgtgcccatgggcaagggagcagggcccacactgaggagtggagatgggaaaagtgctttgaaccctaaccttgccaggcctgccagcccctccctgcagccaaggtcagacctcagggagctaagtgagcccctagaagaaaggtgccctcacagcagctcaagtgggtggcagggaaagagatgaagaagaaaaaatactcatccccctgcaatgggcaggcaagtagcagaagagactcccaagcttccccctcccttggtccctgtgtccctccctactcctgtagctggcctcagtcccaagcagccactgacaccagcaacttccccagcaaacgaaactccttctgactggttgctctctcagagcagggacaagccgcaccccagacatccctgccagaaccacagaaacatctgaagacaggggactgacaaggttggcctctgaacagcttgcctgacccagagacatgggaacaggcaggctgacctcaccttctcctaatctgatctgtggtcttgacagcatcagtatcaacagcccagcagccctggccggctccatttccctctacacacaaatataacacgcacactcacacacacgtacaccatcacacacgcacattcattcactcacctttcctgcagaggagccactaagtcaggtgggtgtctgggccaagggactcccaggacaggggcggtggccagtggcggaggcagcagctgtggctggcaagaagctggtttcccccagaagaaggcagcgagtgagcctgtgtccaggcagggagcggggtgcaaggagcagagctggtcccagggccactgctgggagcaactgagcagagggctctgctagtcgggttccctcccaggccagcccagggggcgggccaacagtgcaccgcctccttcccggagccagccagcagtgggccccctccgccagccatggcctcctttaacccctgcagtgctctgctggctgcactctagctggctctgggaaggccgtgtcagggcacagacacctggggcaggagatcaccagggaatgtggctgcccctccttcagccactggcccagcagcttccctggggacaggacgggaagggccagaaggcttgggggacaggggtggggaagcgggcagggaggggtcaagactctatagaaaagacgcaggtgcagagaaatggccaaagggcttctgggtggagaagaatgtttgctgagatggtgatgatgataataataataatatagcaactctcagcttttctacagcactctgctttccgctgtttccaactcattttgtgactggaggccag

SEQ ID NO: 39005 - DNA, 1079 bp, Homo sapiens
tcctgccctcggggtcctgtggctgtggacactgaggttttctaggttggccaaattgagccaactggggttgtgcgcggcccggggtaattgaaatggatcccctccccctttccctctcccccttgagaactagcagaaacaccttcaaaggccgctctctgggagctcggtccccatcagccacccccggtaaccgcccagattgcgctccgcgccccccacccagatcccccgattccccagcccgcccctgcccccgcccccgggccttcgccttcaccttgacctgcgcccgctcccaggcccaggcgctttgcataaacaaagagaggaggagggacgccccgggcaccgcccccgccccgccggcgcccccgctccaatctgggaccccgagccaggcctgtcccaagtcctcccgggcccgccagcccgcggccccttaccttggcctggcatttccgatgacaggagaagctgcagactgcaagagggcgagacacagaaagaaagttttagccgcgaggtatgaaatggaaactccgcgaaatctcctcccaccccagcccgcaatccgcgctcgggaaggaaggagggaaggagggacggagggaaggagagagggagagagggaggggacggaggggagcggctgccgggcctgcggggcgggagtgcccgggactgaggacccgcggccggggaggcagggggctcccagagccagagcccctccgggtgcgggaaggtggggggagcaaaggggggggtcccccactggacccctgccaggggcagaggtagcccggacccgggccccacgccagccccaccaaggaataaggggggccttctccccttacacacacaccaggcaggcagacgacatcgcaaaccacaatcacacttactctgccccagagacagacacacagacacaattcagagtccaggagcgggcccacgcatatacacattacacccacacccacacactcacccagaaccactcccacccatccacacagccatccacgcacacacacacagtctcacacacacagattcatccagga

SEQ ID NO: 39006 - DNA, 1332 bp, Homo sapiens
ccccaccccacctatcacccagagccactcatcaagagagttgccatgttgtagccaagacttgaaggctgggagcagagtaaacccactgagtcaggctcagtgaacagacatgagctggagtttggtccacacatgccccctcagccagggaaaaacccatacaaccatatcgggtggccctggttgggtgggtgaatggatggatgaggggaactatcaacctcatgccatcatgagctcctgactccaaagcacagacagtggcttcactcctgcatctcccaccagtgaacccagtagccccagcctcctcccaggcctggagatcccagtccctttgctgaggctgcacacatgacctatagagtcaggagtcttcctcccttctccctatctgggcctggcccctgcaccttccatgtcccagtcctgacacctgctggtcctgctacagtgtagccctggctttcttcccaccaaactccccaccctccagagcccagccagagctgccaaaccagtctgtccactcaccctcccctccggttcacaccagcagggccaggctgagatctaggtgaaaccagggccatgtcttgctcaccctgggagccttctgttcacatggggtcaaatcctctcctcaacccaagccctcaggccaggtcagctggggaacctagagccatggaatgtgagggccaccggagactgcagccagagaaatgcccaaggtcacacagtgaatgttggcaggacttccttctgcccccacccccagactgcctcgtatcaccatattgggagtccctggagtgacgggaagacactagggaaggaaggaaccgtggggaagggccaggggctaatttatgcatcttcgcagggcagggtgtggggctgttatgcaaacaaaatgcaaaacttcacctctagcaattcttctgtgacttctcccctggctccaaccctaaactgcccgcaagccccagccagacctcttgggaggagggtgacaccgcgtggctgattttggtattgcaaaagtcctggttagccactttccctccccctgagagcccacgtcctgaaatccccactcgggccccactcctgggtgccttgacaagcgacgtgaccactgccaacctcagtttcctcctctgtaaaacggggatgacacaagcaccttttggggggtgtgaccatcagatgaggtcatgcctttgagtgcttggtatgcagtaagcgctttagaaattgttcagtgggctctgaggcccagcctcccagcctgctgggactttgacatggagggaggggcaagag

SEQ ID NO: 39007 - DNA, 2353 bp, Homo sapiens
agtttattatattctccccggaggagggaaaacacaaaacaaggcacaaaggcagaaggtgcagatgtagcacaacgatgagttaagattccgcacgcaggtaacaaggagggtatggtatatctctgccagaggtactggaaggtttcaaaggcagaaaaaaatgtgttccggacacctggacgcagaattggaggcatgacaggaacacagggaggcccatctaagttgcctattcacccaggtgacctctctttcatttctttaattgtccttttaacaatatggggaatttcacccaaggaaagggtcctcttctcgccccagcaggcaaggggtgttcctccagcgcaagttccggccccagctgcccccacgtcccacaggtctcctgccttttggcacgcacactcctgaccactcgctgcttccgcatccctactctgatcctctccccatgcatctctgcctccttagacaactgagaattttattgtctgtttcctttgccagactgtaagttccacgagggcagggcctcgtccatttcatttaccactacatccccagtatagagcaagagcccatgaaaatgtttgttggagaaatgaatgcatgatggtgtcgctggacagctatacctggaaagaaaaagaggcacccccatcaaacaagctgggagctaagaagcccgctgggagacgacaagggcgagcttcttgcgaggtttctgaaatgacaagaccggaagaatggagttggatctctgggacaagcgggagagagaagctgaacagtcaggcaagcctcggggaatgacagctccgcgggggacgcactggtaggcggtagacgtaagcggggtcggtgggaaagtagacggtggggcggcggcatcacacatacgcaagcgcagcctccgtttcctccggcgcgcctgcgctcgcgttcacgagtggttgaagcggaaatggcgccgcggggccgcgcgtccaggcggcgagcggaagtgggtgtgagagcggaagtggccggctagagccgggggctgggcggggaccgggcttgtcggtgaagcggcagtggcggcggcggcggcggctcggcaggcgggttcaggcttcgggggccaggtcggttgggtgggtgggtgtctccacagtctgcgtgcgtgggccagcgcgttcgtcttacccttccctccaccccggcccctctccccttctcccctaacctcctaccccacccagccccactcagggggcagcagggccgctccctccgtccttgcctcccttacccaccctcaccggcccttgtttctccttcccctgggggcagccgccgccatgatcctgctggaggtgaacaaccgcatcatcgaggagacgctcgcgctcaagttcgagaacgcggccgccgggtgagcgcgcgcccggggccgggggtggcgggggaagcagagttgaccccagctaatccccaatgttgtccagtcccccagacctggaggagagaaatggggtgcctggcagggtgtaggggctgccccagcggggtagacgtgggaggcgattgggcgcggccgggcgaggggcagagatgcgtggggagaggctcagaggagggatgcggaagcagcgagtggtgagggctgtgcgtgccaaagggcaggagacctgtgggacgtgggggaccctggagccggaactcgctccggagtagccccctgccctctggggcgagaaggggaccccttccctgcgtgaaattccccggcattgttctgaacccagagagagcctgtttggaattgggttggaaggagttttcaggaattcccaggactggaggagggaaggagatgcaggcccacatcgccaccagcattctcgttccccacccccatctcctttaaaaggagcagaagagaagactaaaagccgacccagtcttagagccggaaaaacgcgatctctggtttcccttccccgaacccttctgtgagagacactgggccattttgttacatatttttaaagcaaagccaattgtccctcgctccacaccccttccttatctctcctttgaggttctaatgctctctcctcacccactagcctttatctggttatcttgtaaattcttacatcaagaccctaggtctgtgatttcttctgtggtagccctggcccagttacacacttcaaagactccagaatctataaagttcttagataacctgtctttacgattggactttttaaaagatgggcttagggcatctttccaaggcagcctctctgccaaacacaagaatcagtagaagacaatctgctcctccaaagctgct

SEQ ID NO: 39008 - DNA, 2037 bp, Homo sapiens
taaaagaaaactaagaggttaatcaaggttaactggcaaagtagagggtgtctcgactgatgccagaagccaagcaatcatccattctgccacactttcccacctgtgggctcctccagcgcaaggccagcatcttgcccatctctgtgtcccccataacgttctgtccatggctgatgtttaatgcttacacgcccacctaaactgatttgaggtggatcgcctcaaagacctacctgagtgcaatgcaaaggtgacctcgctatcgtcggggccctccatgctgccgaccaccccttcctggggttctagaacccagccctcttcgttgccctcttcctcctcttcttcctcaaagtccacatcttccatctcctgggccaggtcatctgctttggggagagggttagaagatggggctcgggaggcggtaagaggtacggagagaagcatgaggaggcctgaggctggggcgggtcatgtggcgagaagggaaggtggagtcagacacaccggggtccgcgggggcgcgcgggacacaggacgggaggccacggctggccagagaccgtgcggtaagggagggccaaggggatgatgggaagggggtgtgtgaggggaagggccagaggaggcgtcagggaacccccaccccagccaggcctgagaactaagtgtgagggtgggagtgggggaggaggggaagagggatatcggtaggaatgaccagtcgggtgtggaggggagcggggaaaagcaggagtcagaggccaggggtgagcgtctcctgtcccatggcctgaggagcggcagttctcacctgggtccggcggaccgggatcaagttctaccacctcgataatctcttcatcaccatggaagcttagggtctccagtgggggggtgtcagcagcagccccgctttccgattcggactccatgcggcgcaagcggcggatccacttctctgggcccaaacgcctcccagagtcagctctgcgcgacgacgcggaactcgagcccctcctcccggcaggaagtaggcgtaggcgactccccagcaggaagagcgacggccgttcggccaatagctacgaaggttggctggccgcctcaccaatcacagagcggcattggaagatggggccggggcgtggcggagagaacccaaactccgccccacctgactccgcccccaactggagggaaacaagcgagcgcgcgcgcctccggggtctcctgggaagagtagttctcctgggtccgctctgcgggcttctgggagatgtagtttctggtctgtaggcaggacggaaggagcgggggaggccccttacgcaaactacaattcccggcggggagcgcggtgaagcgggggtgggatctgaacatggcggcggtggtagctgctacggcgctgaagggccggggggcgagaaatgcccgcgtcctccggggtaaggagagggaccccggggagggcaggactgcagaagatcccttttctttcacgtccagcccgacgatagcaggaggtcagggctcttggttcctccccacacttttctgcaagatcttagagtctgggggtgcagagatgctctttagaggtcacccagtgcatccccccgccttcgggttgctcgacacctccggggtcttgctgcaagagggagctcctaggaagcctgttggactcccgcgctccaggtgtttcacactcaccgcagtgcagaggaaagagccccgggcttctggaggtttgagttccagccccggataattagcagtttgaccttgggcaaagcagtttttctctcagggcttcagtttcctcttccgtacagtgcaagggatggagtagactatctttaaggtcccttccagtgctaacatttgcagtttcaaaaccttttcccggatttccttcatacgtcttatgtgagtcccactgcagtccttcccatgctgtcgtctgaggaagaacagcgaagcttttcgtcctggcaccagggtgatgagcccgcagtgacgtgg

SEQ ID NO: 39009 - DNA, 660 bp, Homo sapiens
cgcgccaccgtactccagcctgggcaacagagtgagactccatctcaaaagaaaaaaaaaaaaaagcactggccggaaaggctctgtgggcagaaaccccaaccgtgatgtcaccatgacgtgtcccagcacctcctcagggtgcacctctgtgaaataaggtgggggcgacacgacctctaagcccactgccccctctaacaacagactatgattctgggaactcggctctgcagggcctgacctttgctcggccagagagctgcccctgctccctcctctgagccaagcagggcaaacagctaactttccagaccaagggactgtggcagccaccgggtgaaaggtgcctcagagagaagggtcagcctcggatgggccacggggactccaaggttctggtgcagctcagcgggtgctgactcagagcttcactcctgcctctcttgcccctccctttcaggcttttggtttcagaagcatgtgctagtaggcctgcctgcactgcacacagcagtttccaggccagtccttcgggtacctcagccaccagcccatccacaccagaaactaccatgaccatttcaactcactatgcctcagtttcttcacctggaaaatgggtctcacactagtaatagtaccctccacggggttgct

SEQ ID NO: 39010 - DNA, 2628 bp, Homo sapiens
caacctgggaggcggagattccagtgagccacaatcgtgccactgcactccagcctgggtgacagagtgagactttgtctcgaagaaaataaaaaagaaaatacacataaagtgcttagaatgaaacccgacccctgatcaatggggataaaggttggttattttcattaaatccttacaacagtccagcaagttaatactgttattattattcccatttacaaatgaagagattgaggcacagaagaattaaatcacttggccaagataacctagctagagtgtgatgaagtcaaaatgagccccaagactgactcccaagcccctgctcttaatccctaacctgaaaacaccctgtctatccaaccttctcatcacttctgccatagcttccatctaaaaccctctcatgggttttagcctcaacaggaggctgacacaagtggaagccaaactactcaggccctccacaccaccacagggctcacagcctggccaacggccccaggagaagagggtggcccaggcttggagatacataaaggtcagagctggaaagaaactcacccaaggacagccaacccctcactttaccaactagacagccacagcacaggaacctgtccttggttaccgagctggtcctggggacaggacgagatcctagctgtctacatagagagacctgggcacaggagaggaaaccccagcattaacgctagccaggggagttgctaaactcagccacactcacctctgagcagtgccaagaacactgtcagactggcaagagcctccggggaccagggctgccgggtttggcagctttagagcctgctcttgggcttctgcccagcctccatgagggccctggccacttccacatcagcaaggcctccactagggatgaggtttggggctggcatctgcctaggtagcagcaaagggggaaagggtcagtgtttactttcgtagctatgtctaagggtggaggctagagaagaatggagggtaagggaaggagggagaaggggagagagatcacgagactgacacagagtgaggactagaaatcagatctgggttctgccagcagctactagaggggctcacagtctgcagggactttaaggtccccactggaagcctgaattttcccaaaatacagtaggcattcaccttctgcttgtttttgtttttctttttgttttggtagaaacggggtttcaccatgttggccaggctggcaaactcctggcctcaagtgatccacccaccgaggcctcccaaagtgctgggattacaggcatgagccactgtgtctggcccaccttctgcttgaaggaactccagcaacatggagcaagccccttgtctgcagacagctcgattagaacattcttccttgcctcacaatgcctgttatcaaggcattcagactgtgccctatccttgcccattatagatctaagtttgctcctctctcagggccccagtcccccattaggaaggaaccagagcccctgctttctaccacagcagcggcacaagtgggtgagctcagacagcaggacttgctgggtgtcaaggttttcagatgcagaggcggaagcacctcctcccctggagccctctcagtgtggtaatcctgctgtctgcctactgaggccccggctggggctctcctgggggtatttgaagggttaaggctccggaatctgcagaggaggcctgagctactggggttacagcaagaggagagtatgtgtactggagggagggatggaaaggagcagctgactggtccaggcagcctgccctcctccctgccagagacggatgcccagagtggaaaaaaatagctcagaatgcacatctcaggaaaccccacccagcaggcgcaggagcacagcccagatctgacgatttgttcccctcccttttcctttatctgcccccacaagaaaacactttatcctcctaccccagggcacagctgacctcatagccacgagagcaaatgagtaaaaagatacacccaggagtgtctgggcaagtcaccaggcctgattctgcaccaagggggcccagaatcaactaaatatccttccatcagcctggactttgggactaagaggatgaagccacagggatctaaacactaaaatatcagagctggcttagactttggatctcacctggtcatttgacagacaaggaaaccccagagccaagaaagttcctgctccaccccagaacagccctcttcttcgtcatgggtttggaacttcccttcccagccccgcccactctctgagtgatagacaccagcacacaccctctcccaaggaggggccagaacaagctaccattctctcagttctctagtgacctctcagctcagaaacagttaagaccgggccgggtgcagtggctcatgcctgtaatcccagcactttgggaggccgaggcaggtggatcacgaggtcaggagatcaagaccatcgtggccaacatggtcaaaccccatgtctactaaaaaatacaaaaaattagctgggcgtgatatcccacacctgaagtcccagctactcgggaggctgaggcagggggatcgctcgaacccga

SEQ ID NO: 39011 - DNA, 5088 bp, Homo sapiens
ctttgggactcactccactgtgagagccacatctctagacccagttttaacatcagtaagacaattcccctcaaatgaaagaatggccaggcgcggtggctcatgcctgtaatcccagcactttgggaggccgagccaggcggatcacttgaggtcaggtgttcgagaccagcctggccaacatggtgaaacctcgtctctactaaaaatacaaaaattagccgggcatggtggcacatgcctataatcccagcttctcgggaggctgaggcaggagaatcacttgaacccaggagatgtaggttgcagtgagccgagaccatgccactgcactccagcctgggcgacagaaaaaaaaaaaaaaaaaaaaactgaaagatcaaagtccactctgccagtttctgattctgaatgaacagcctaacaggaggcttcagggcagaatggcatggctccccaagaacctacaccagggggtcactactgatgtgcaactgtttccaaggacatcttcagaggcagaagtacatggcatgttctcagtatggggctgtccacaccctcccaaactgtccccataatgctgtctggaccctacggccagctcttcctgggtgatcagttacgcccgagctaaacagtatataacactctaggaaagaaagagtaggaggcaggaagtccactgacctgggttcatgaactagctgcaggaatccaggcaaatgacctcccctggcctccttttatccctaaatcagcccacgtgggggaaaggagtagggacttgtttatgggagccacagtggagaaacagaatcacctagccaggcatttcccagactgttctaaagaacacgccccaggagacgttaatgaatgagtgctggaaacagatgactcttgagaaacaatccacacccccttcttggaaattcacaatggcatattctgcccctgagaagtcctgcagtaagcaaccctgttcagctttgtttaacccagtgttccttcaaactcccttaagcctgagccacttttatcgaggcaaacctattaacaccctgtgggatgctgacccaggccacctttgtattacagacacccaaccctgagaatcattcatatcctaactcctcgtctcttataacctctgtgcgtacacccagctgcccctcagagcagtcacatgaagtactagacatgccctctcactctcagggggtcagcccagtgccaggatctctggcgagggtcctccccttcccccattccacacagctgctatcccaccgtgggatttactgccaagggccgggggacatatccagctaccacagaaccaggaaacgggcacccctaacctcacctctgtgcaacggggcaaagcacaaatcattacagacaaaagtgggagctcattaatatctcccttcccaccaatggaggtacctgccactgtagcctgtcgacttctggatatcatttctacttcaaaacaagacccaggttttggcctagaatcccagaatcttagggttggaagattctgtcaaggtcatcccttccactgtgtccccaacagaataggtccagaaggcccatgtcatgatcagacatgttgttagcagaacttcttcccagagaattgtatgagcttccactctctggtcgtcccagttcagccctctgaaaacacacaagtatgtgtgtttcccttctctgtggcttctgctttttctgaaaggcccagggtgaggcctgcggttggaggtgctctgaggtagacagcgtctggctgaggcacccattcccaggggaggaggctgagcccaggtggctattaccccagctcatgacatgaggctctcccaacacttacaggataacccatcattacctctctgaagggctcatttttacaagtgaggccttgaggtcatagcacagaaagacagggcccctgacactgtggtcctgcctcttccatttaagctataaactggttctctggatcctcatgactggagagacagagagaggaggcaggtgagaaggaagtatggctccccctttgcgccaataaagcagccccaggaggcacctggctcccctgccaccactggccagcccaaagtcgccagcttggaaaccaaagctcactaatgagatgaatatttcagagcccagagaactggacacctgagggcccttccatgacatctggctctgacctgcgttcccaggcctacttatcccatgtccagggtgctcaggtagaaccccaaactcctgggtaccacgtagaggccacagaggagggagaggagatggagaccccataggacaagaattggtgccgaccccacaaggccagggcctggcctcccagcagcctccctctgcttcctcccactggtccctggctcctgccccagtctctccacttgctttcccttttcccgtttctctgttttgttttcactctaacccaaagaagtcacgaggaggatgttactcccctgtagttctgtgaacccagccgggaaacagtggctggaagtgggactggcagagggcaaagtcatggtgatagaggtggccacttccccatgccaaacacttgagctgctcattggcttctgccccagctgcaagctaggacccccccttccccaccccttaaatattcacctgtctacaccgagactggcctcagcgcgtgtgggggcaacctggggtccgtgccaggccctggctgtctcccctccctcttccctcttctcaccagctgagggccatgaaagccctcatcccacacagctggccactcgggctggcatggtggataggccctgcgacagagaggccactcgtgcccgaaagagggaacacgaggacacccccagaccctggctccgctcaccagtgcccacaacacgctgctgggctcccaaggctaaccaggtgccacagacccggccgcccacccgcgcgcccagggagagcgaaacgccaagggccaggaggggagatccccatctggaacgggctccttgggcccaggagcgggcaagccgggagcgcgctccgaaaagtttaggcgccccggcgcatggccgccccagccctggaccagtccccaccgcccacagtccccaacggcgccggccccggccccctggcttgcctgcgccgttccagacggagcgttcctggcctcggagtgttgcaagtcctccggggccgggcagggctaggctcggctggggctccgcgccccgccccgtcgcgccggcctcgtggggcggggcctcagggcgccgccagggggcgcaggggtctgtcccgggcgcgcgcgcctctcagagccccgacgacgcctcactaataacacaggggtattttcggatttaaaggcaatacatgatactgataggaagctagaaaagacacagaaatgcagggaagaaagtaatttctctccacccctcctagttcccagggggaagcgttcgctttgggtccttctttggctattacatttctgtatgtattttgtttttctacagtggggtatattgtatggtgttttgtttactgcccttctttttactgttttatgatgaacatttttcttctcactaaatagtcttcaaaagcacaatcttaatgccgtgaagtattccattgcatggctatgcggattaaattaatttcctactggaggccgtttgtttcccatttttacattacaaataaatcagtaattaaaatccttgataattctgtgtttttgagataaatgcacttttcgagtttaaaactgcaaacatgcaaacctagaatctctgtttataattactcaaccaggaaagcaggtgctttcctcaagtcagaattcagaagtcctacattgagatgtagattactactgttaggtaggtcttaaccctcatctcagtgaagaatgcagtagcaaaggaggaaacagttttgaggaagttctgaaatattactggagcctgggcatggtgactcacacctgcgatcctagcacttttgggaggccaaggccagaggatggcttgagcccaggagttggagacccagcctaggcaacatagagagaccttgtctcaatttaaaaagagaaacattaccgagccttgcctgagtttctgtggttccaaagtccaagttctttccatgacaccaaggctgccagtagttgaccaactctgtttaaagtgcttatctcatgttaatagctataggtcagcaccacaccaccactgaatgtccttttttttttttttttttttttccagacagggtctcgctctgtcacccaggctggagtgcagtggcgccatctcggctcactgcatcctcctcctggtttcaagtgattctccggcctcagcctcctgagtagctgggattacaagtgtgtgccactacacccagctaattttgtttgtttgcttgtttgttttgtttggtttgtttgttttgtagagatgggttttcacgttgttgcataggctggtctcaaacccctgagctcaaagcagtcagcccactttggcctcccaaagtgctaggattacagacatgagccaccacgtccagccccaaaacagagatttaaaaaaaaaaaaaaaaaaaaaagacagatttttaaaaactgccccccatacacacactatgtatgtttatttctgtaaatatagtttaagtaggagttacttagggggactagtggccgttatggtgggctagctccccagacaccccaacccttcagtgtacttccagttcctacaggccaagaacctcattttaggaagtccccacccaaggtgtgatctcaccagagcaagtacagttctgctcagtgtctgtctcccccttgctcaaggagtagcgccctaggtgaaatgcatggcccatggaatctgtccagatccctgacattttttcatgctctctacacttgtgctgtcttagtccatctgggctgctacaacaaaaataccttagagtgggtaatttagaaacagcagaaatgtattgctcacagtt

SEQ ID NO: 39012 - DNA, 3004 bp, Homo sapiens
agtgcaatggcacgatctcgactcaccgcaacttctgcctcctgggttcaagcgattctcctgtctcagcctcccgagtagctaggattacaggcaggcgccaccatgcctggctaattttgtatttttagtaaagacgtggtttctccatgttggtcaagctggtctccaactcccgacctcacgtgatccgcccccctcggcctcccaaagtgctgggattacaggcgtgagccaccgcgcctggccgagcttgactctttagagcatttccttcccttcctgtcctgggccagagctagggctggagccaaaacaagcccagccctggctcctgtgcctaaatttgtagatttcaccaccaccacgcctgtcctcacacctgcttccattccagggaccttaacaacttctagaatccatcaggagggcagcagtgagggagctgggaacggtgatgtggaaatcgccctgggtttgggagtgggaatgccccagccctaggcccctctgtgccacccatggctacatatcctaggtcatgttgctcctccagagcttgtgtggcctcttcctatccttcagggcaggacttatgtcgtccgctggggaggccctcccccatctaagttggccctctctgtgctccatatcattgccccctccttgacttcctttcgcaatttatcacgcgcatatgtatgtgtatgcataaacagatataattttgtttgctcgcttatttggttcgtcgcctcactagattccggactgtgggctccaggaatgcagacagtgtgcctttgacccttgcatcctcctcagagcctggcagagtgccaagtacataggaggagctagaaaagtaattcggcgaatgaataaatccatgaatggcagctgaccccgatgatctctcaggtttctgccagttgagaaagtgtagcagtgccctggacggggaggcgggcggggcgaactgcgagctcctgccccttcccagggctcaggcgactgtggaccccgatcagcgcaggctcgcggcccgctgtggccccgcctcctggccgccagccgggcggagccaggccgccccccaagccgggtggccttcggggtgcttgcccggctggaggtggtgagggggcgggtccaaaggagaggtcaatgggcggggcggggccacaacgcccccacgtccagagccggcaggcaggttccccgcggggggccggggccgggccgttgcctagcaacgccgagccccgcccggccggcgcgtgcctgcccccagcatggcttggcagggctggcccgcggcgtggcagtgggtcgccggctgctggctcctcctcgtccttgtcctcgtcctacttgtgagcccccgcggctgccgagcgcggcggggcctccgcggtctgctcatggcgcacagccagcggctgctcttccgaatcgggttagtgcccgggctccgaagcgtgcgggctcgggaggcgggcgcgctgggagaggggactgggaggcgggggctggagctgggggtgggcgtggcggttaggaaggggcttggtctaagggaagagggatcgaggagacggactggagaagccactgagttggggggcctgagggatttggggggctggacaattgggataagctggggaaggaggatcggagaggcgggccagggtggccacggaaggagggcgtgagaggacatctggagcaaagtgccacagaatgggctggagaccaggaagctggacagggggatagtgcaggagccagggctgggaagaccgtccctgtccgggggtgaggtcagcagatgcccgggctccgatggcaagtgccggagagaaggaatgcctcccaccgtctgacatttaaaaccgccaactcctttcgtatgtccttgtcccactccccagcatccaactcctcaccagtcaagttaggttcttctgtcccaagcaagagtcccaaccctgttggattccagtatgtccctttccttctaaccaaagcctggcccgtgtggaagccccaggctgtgaaatctgacccaactgactctgcccacttttccagtgatttgtctccgtcgaccctcccccgctcactctgccctcctgcctccctctaccccttccttcctggccccaggggagggtggtgcctagcaagcactgttcagccccagggacactgagaggcagggaagaagacaggcctccgaggccccctgtccccttcctactaccagcctggccatgggtcaggacctcaagccccagtttagggacagtaatgttggggatgggaattgtgagagccctggccacaggccaggttgtggggagagcctaagcctgggaatttcccgagcttccgagcagacattgtgcaattcaccctctcctccccagaccaccccacacgcccagaagcttcaggcgcaggattccactcacagtctaagaaatgcagatataaaggcaggataactagaaaaacatggtgctggagggtggggtggggatcttgtgtttgtgccttttggggcattcacatctctaatatcctaaaccttggtcgcagtttagataatgtgccaagtaagttaccattgctctgcacgttgcattaaaataatgagattgaaaaatatttaggccaggtgcggtggctcacgcctgtaatcccagcactttgggaggctgaggcaggtggctctcctgaggtcaggaattcgagaccagcctggccaacatggtgaaacgccatctctactaaaaatacaaaaattagctgggcacggtggtaagcgcctgtaatcccagctactcaggaggctgaggcaggaaaattgcttgaagccgggagagggaggttgcagtaagccgagatcgcagccattgcactccagcctgggcgacagagtgagactccgtctcaaaaaacaaaaaaaagaaaaagaaaaaaaaatcccaaacat

SEQ ID NO: 39013 - DNA, 1454 bp, Homo sapiens
gtgggctccccagggtgctgcatcatcaccaagatgcccatcttgagggaagagggtgagtgaagcccaggccttgtgcaggcagggagagttaaggggagtggggaaacctgggccttccaggatgcagggggctggacccagtgtgctgtaaacgggacaggagcctggaatcagctggagaacatctgccctccagcccctgaccccaagcaataagaggaggatctttcctactggaagtcccttcctgcaactctgcccatgtgggcagaatcctggggtttcacctgagccttctgtttgggtgttctcgggatctcgctgtgtatccaaggaaggttccggggtagggacgcccagccttccttgttccccacctagatgagattgagccacgcccagtgtttgagaagaagcccctggtatgggaggaggatatggagctctattcgaagttcctggaccggaaggtgaggggaggctccaccagcctggggttcccattcccccatgggccttaaattcattactgatctctgcacctgattgaaatgcacacccgtaggggctagaaggctccagcgccccttagctctccttggagcgagcggctgggggctcctggggcgcgggggtcccgtccggctgaggctcgggctctgtcccctgccaggaggagctccggctcggccacgccagctatctgcggcagcaccccgaagcccacgcgctcatctccgacttcctgctcttcctgctgctgcgccagccggaggacgtggtcaccttcgccgccgagttcttcggccccttcgacccgtggcgtccgtcgtcaccggccttgggctcctcccaccggcccaaccctttccgctccctggagccggagggagacgcccgctcgggggcggcctaagcggggcccaggcccggacagggcaggaaaccaggggtcgggctgggacgcgggcgggacgcgccggggcgggtgcgctttccgggctgcggttttgggggaataaatggggccctcccgcttctctgcagcgcccgtcgacagcgtccctggctagcgtctagtgtctcgggctagaaataggaaccgttaccgtcgtacctcgagtagatttcagcctttcctcctagatgctgttttcatcattatccccattctacagataagaacacagaggcacagaaagtttaacttttggagttggcaggtggggaggcagaatttgaacctcaacgttggacttgaaagcccacactcggccgggcgcggtggcttaaacctgtattgtcggcactttgggaggccgaggcgggcggatcaccaggtcaggagatcgagaccagcctggccaacacggtgaaaccccatctttactaaaaatacaaaaaatagccgggcatggtggcgcgcgcctgtaatcccagttaggaggctg

SEQ ID NO: 39014 - DNA, 6181 bp, Homo sapiens
agacagggaaagggtctccctctgttgccaaggctggagtgcagtggcgcaatcttaactcattgcaacctccaccttctgggttcaagcgattctctttattcagccccgggagtggcgcgcgccaccacgcccagctaatttgtgtattttcagcagagacggggtttgccatgctggccaggctggtctcgaactgctggattcaagtgatccgcccatctccgtctcccaaagtgctgggaattacaggcgtgagccaccaaacccggcctgattaaagttaaataaatactagttcccttctcgtccaaaggagcagggaatgggaaccgggaaggcacgaagtctctaaagcatccagaagacccctacaccagggtctggtccgctcctattcgccgcagcctttctgttccgcctgcaacccattttccagacagtaaaacggcggcgcacttctttctccgtcaggcaccaggtcataaggaacccaagagtctgtgcctctgaggcccaaattatttgctgtttcctcaggggagccggcggccgcgactcccacgccgcgccgttaccgctccctctctgctgactgctccccctaggggcagagacggtcccgacgcccgccatcccgccccggcctcacccctccccgccaggcggaacgacgcggggaggcgggcgctcggggctcgcgccaggggccccagaatccttcggggagagtgggtgggaggaagctgtgtgggcggggagccccctctgccttagggagcggctgggcacccattcgccccattcaggggctgcactttatagacgttccctaggctgtttctaggctcccccaagtccctcctccagcctcgtcgggtccctcagaccccagcccaggacctgcggagggccgcagcgaggagaggccaacaggcctttccctagagttgaacctgggccgggtgttgcacctggaagaacccccgatttcctggggacccagcagggcaggcggcctggctccgcgctcaggtccggacgcttgtttatgagaagaatttcctctttcttaaaagggcaacgatgcgagtgggtccctcaaggagagaagagatgggaccggtctggtgcgacctgggcaagcgctgcagagggtacctgggcaagagggccgcccgcctcctctgggtttggcactggagaagatgggtccatgccagctgaaggaggagatggatgggggacgtttagcgaagaaaggcatctcccagatcctttagcctcctggaagtgcccccgttgtaccccctacacacccctcttggcattgagtgccagtcctctgccaggctctgtgttacaagttggggagggcggcaaagtcccgaattaaagatgtcagttctcaaggaccccacactccagcggcgggagacagctgtgcaaacaagtccctgtggcaggatgcggtgaagggcgctgcccgtgacgccagccagggaaggggactgaatcttgctgaagggggggtcggcggtaggggggagtgttgacaggacagcccaggaggaatgagagtgccaggagcatgggggcacgtgtgtgcacatctgccaagacctgaagctttctggggacgtcttagatcttgtggggcaggacgggggacggcagagtaatgggcaggttggtcaagaagacacggagacccggctaaagggctacccaggacctgggcaaagggctagtgatgaggtcgcgccaaggtcagtcatttggacactggaaggcgtctacttagagctgcccccattccccccatagtagctctggttcttccagcctggcctcaaatcgaccctccaggaagaggggtgcagagttgctcttctggaagctccctttaggcctcccagggagggcgtggtcgcacttggcactccccaagagcctgctgaatgcaccccgactttgtgcacggctccccgcctccccctgggttgggcttttaccagccctgtttggcagatggggaaactgagggactgtgttggaagagacgcttccaaatccacaggtgccagacagcaccttgctgaatcccgttcctgcccctccccgtttctgacttgtggcccccatgattttatttttcctggggtgcgaatgataaaacagacaaaaaatagagtgcataaagcgacctccacctgtagagacagagggcagctgggtgtagacaacccctacagtgaggacactcgaaggacccccctccccccacgcaatcctggcctctcgctcactccgtaactaactacccgccccaggcgtggggagataagtccagggctccaggcagaaggcgcggctacctctgccgctttgggagcctgggaggaggagttaggtctccctgggaaaagaactgcacgggcaacggcttgaagtggcgataagatggggtggaggaggtgggggattcctgaggaatcctgtgagctcaggatggcgcgtctgggaatggtgggtgtggggacagccggccaggtaccagcccccttcacagagggagaggaaagcgcgccacccaacccaggccaagggcgaggccacgactccactcagtccctcgccacacgcttccttttggggtcatgagggccccgcatccggagataaagccgaggccccacccagggggccggaccgcaggggagacagatgtcccgctcccaggctggaatcccgcctttgcccttgccggtagacccgaagcacgtcgcttcctttcttgaaactcagtttcctcatctgtgaaatgggttaagaaggaggccgttctaaggggtaaatgagattagggggcgcagccagagcaggcctaggaaaacgccagcagcgtgtggcgatcacggtgatgaagcgcaatggtggccgccccgtgggctacccaggagcaggaggagggccgagggatccagcccggggaccggggtatcagtccccgacagtcccctcccgcccctactcccagcctcagcgcacgaagccgccgcgccttctggcagacgccgctcccctcccttcccctcccggcccccgcgcggggcctcccctccccggctccccctcggcagggcctggcggacgtgcgccgcgtcgcacccggcggccggacgggacaggacgcgcccgccccgccccgccacggaggcccgcgggagagggggaggggaggaagtgccgaggggtgtttgtcgggcttggcattattaatttttaaatggtgaacttacaaaatagtaacgacgagtgaaaagaacttcataaacgaggaaaaagaccaacccgcagacccacggcgcgcaccacggaggggcttgcagcgagaagacagggacctccgttcccaagtgcccagcactgcgccacaggccgggtggaacgggccttgagggcctctggtttgaggtcccccacggtcgggctttgggcccaccgcgtgcggcgccgtgctgggctcctaggatcggcagcgagtccagtgactcccaccgcacccccagtaatcacagggcggccgtcgaccgcgggcaggggagggggtctgggaaggcccctggagaaggtggcatttcctcgaggtcggtggaatttggctacgcgaaaggaacagcgcgtacgaaaacttcaggcgggaacgcgcggtggcccgtgcgcggcgggtagacgtgcggggccccgggtggggccgtggggagaggtcggcagggggctttcccagggcagagagttagaatttcacgtcctacagaccgggggcacctcgccctggggctgcggggggcggcgaccgtcccattcaagagcgtgattctgaggtttgcacagctgtttcgggccagcagagccttcgctggctcttgacgtccttgcgaggtgatctctgcgaccaccagacaggagagaagacccattttacagatgaggtagtgctatctccaagtcctcaacgaggaaaccgagaagcctctagtcccgggtcttcagaaaacgcagaggtggagccgcgccgcactcgggcactccccggcgtgggcgctcccggcgggcgggccttggccgagggcgctcggcggcctggaacggtgagccgggtgccgggcctgccacgcagccgcagagactcagccccgccggcgggcggcaggaagggaggcgacgccccctggagcgcggcaggaacccggcccggcccgcctcccagtccgcctagccgcgccggtcccagaagtggcgaaagccgcagccgagtccaggtcacgccgaagccgttgcccttttaagggggagccttgaaacggcgcctgggttccatgtttgcatccgcctcgcgggaaggaaactccatgttgtaacaaagtttcctccgcgccccctccctccccctcccccctagaacctggctcccctcccctccggagctcgcggggatccctccctcccacccctcccctcccccccgcgccccgattccggccccagccgggggggaggccgggcgcccgggccagagtccggccggagcggagcgcgcccggccccatggacagctcggccgtcattactcagatcagcaaggaggaggctcggggcccgctgcggggcaaaggtaccggggctgcggggagggggccgaagccggggcgccgtgggaggagagaaggggccgggatcttccccaggggagccgccgccgccgccccgggcggccgccttagctgtgcccgaagctcccagcccgagagggagcagggagagagtttgaactcagaggaggctcagagacgcggggcggggcctggcgcctttggggcgctcctgttcgctcgaggtgaggaaactgaggcaggaatagagagggaactcttcgggggtttcctggcaggcattgcgtggtgcatgggcgcccccccaccattggcgccaatggggctgggagatgggggagctgaggagggcgcctatgggccacccgctgagactccgccccaccccccacccccacccccccgggctgcggtccggtagggtcttgggagggggcgccgaggtgacagcaggctggggaggcttggagggatctcccgccaacacacagctacgttccccacaaacttcgcgtcacgcgtggaggcgccgaccccctcggaggcacagagaggacggccggcacttccaagagtcgcttggcgcccgcggggagagtcgtgcgcctagtgggcacgcaccaccccgcaaagcctcgccgccccgacgaggctgcgtcccccagcgtggctgggccggggtgggggggtctgtcttctccttttccccgtgtggacctcaggatctggacgctgcccccaggtctgcccaccctcgcctgggtctggctgccccggaactgagggcaaggtggaaaggctagttgcagggggccggaggggggtggggtgggaggggtatctgtcaatcaggctgctgggctccaggtcggaggtctgggcggggcagggcaaacagatggccactggacactggccccaggccgcgggactgcacccctgcctctgggcccagccgcagtgaggacttcgtacccacgggggtggagaggatggagggagggcaggggtggactgccctgggtcccaggccctggctgtcctgagcaggggtgctcaggtaaggtggggtcaggaggcaccgcaatggggctgatcagcagcagtcatggaggctgtgagaggcagggagagagcaccccaggacctccttctccaggccacgcactccctatgtgggcgccttaatacctgctagacctatttgtctgggagctgcaggagccttgcagttgattgtggagccctgacaggggcgtttcagagaaagtcaggagctgccttcgtgtgtctggatgaaggggccacggcaagatcctcctggctcaggggttcacacctgggcacacatgcaggattctgcaggccagtgtgcaccgagcctccaacttgtgcctccctacttcaggtgaccagaagtcagcagcttcccagaagccccgaagccggggcatcctccactcactcttctgctgtgtctgccgggatgatggggaggccctgcc

SEQ ID NO: 39015 - DNA, 1937 bp, Homo sapiens
ctgggggcagctcccaggatatcctgccttccaactgtttctgaagcccctcctcctaacatggcgattccggaggtcaaggccttgggctctccccagggtctaacggttaaggggacccacataccagtgccaagggggatgtcaagtggtgatgtcgttgtgctcccctcccccagagcgggtgggcggggggtgaatatggttggcctgcatcaggtggccttcccatttaagtgccttctctgtgactgagagccctagtgtgatgagaactaaagagaaagccagacccctatcctgcttctgtggttattgcgggggacttcagcaagtggggtgtgtgccttgcacctgcggctgccgtgggcccccccccccccgcttcagcacacctagagggctgttggtggagggaggggctgcccggccctcgacacttcaggtgggaagggcagcgtcagagcacaaatttgagcctccaggctgtgctcgtctacgtcttcccgcctcgggtatgtggtctgcaaaatggagatgtgccctattggcaggactaattaagtgcctggacacagacgacaggatactagtagctggaaagcaaaattcgaaggcctgggtaggggcagtcctggaatgcggcgggggagggggcgtggcctctgccctggagcagaggggcggggcttgtgcggctccgaaggcagaggcggggagcggggcgaggctctgggtggaggctccagcggcagaacttgttggcctgggtgcggcgggctccggcgcctggctctgccgggcggcctgggtggggccggcgccggggctcggccccccccgcccctctgcggcctctgagcagccattggccgcgcccccgccccacttcccgccccgccccgcgtccgggaggcacttcctttgcgaaaccgcgcggccccaggcgccggcaggaaatgccctcccgccgtccccagccagcctttgcttgcttcccacgccagccgctagaggcctccctgtcctcgcggacgcaggaactccccgggggctggaaagatggggcccacctcactcacccctttcccgggggtcgggcgtttctggagcccccaccgcacacacccagggaagaagggggaaatgcctctcaggtgttggtgcctgcgccccagctccacctccccatcgtgtctgctcaacaccttacctcctgaatccagcccccaggcggcctcttggtgccccagacgctgatcggtccccaagtctgtgtgagggggagtcagcgctgtgtgaagccgccctttgtcctccttccactacttttctctggtaaaaaagattcaagaagcaccctggaaaaacctgcagttaccctagtctcagttttggcctgggctggaccacaagagcccttggctatataaattcacagtcctctccggtctctgccctcatcctcgggtcctgctcttatttcctgctctccatgcaaacactgatcctcccagatgtgcatcgcagaggccagataaacacgcaaaggagctccagactttgagaccacagtgaggcttccccaccaccaccacctacacaccctgtacccacatgaagttcaagtcaaccacatgtatcgggtgcgtactgtgtgccaggcaccgtgccaggaccaggctgtgcctctgctctcagggaactcacatcctagggtggagagaaagaaacgtgaacagatggtcactgcaattctgcaaatgcagcacgggagaaccatggaaggcgggtgaggacaggggacacctagccctacttgggcagccctggaggattggaaaacactccctgcagtagcgaggctcagaggagtttggaaatgaggaaatgaggccgcagaatgcaggagggggtagattatgcagatctatggc

SEQ ID NO: 39016 - DNA, 1061 bp, Homo sapiens
tacaaaaattagccaggcatggtggcacatgtctgtagtcccagttacttgggaagctgaggcaggagaatcacttgaacttgggaggcggaggttgcagtgagtcgaattcataccactgcactccagcctgaatgacagagtgaggctcaaaaaaaaaaaaaagccaagggtggggcacatcagctctcattgtcaggctgtggagggctctgggctcccagggacctggcagcacctgcctccccaccccctcacctctctggggccctatcttcccttatatggtgaaggcagttcctagaggagggggggtggggacaaaggtcgctcttctgcagccagcttgccacaattccctgagatctcccaggtggcagctgcctccccaagacaggtaaggcaacctggtgggaacacatggagaccttaggtggtgcgaggggacggggtcctctgcttttctcgggcaacttggggcctcctggagcaccttggtacgggctcgaaggggaggcttgacactctggatagcgtgagaagtgctgggagcccagtgtgtctgccctgggcctccagggagagacttttgcaggccctgccccagacaatggctctctcagtctcctacctgtggctagccccatcccactttgggtgtcaccatcccaattgccctggaacttctagagttaaaaccaggacagtgctgggcagaccgggactagttggtctccctgacctcactccccgagccccctccccaccagctcatctctttgcccgtgcgttcttcatctgaagtgtttttttctttgtgtcaccattcctctgacactcctgggacctccgggtcctgcctcctggctcctagcatatgagcaacagccaccagcaattgaatgggcacacacagaggcaagggcagaggcaaggggctggaggtggcagggccttaggtcctgggccatgccgggccaccctagcatgcacctctgccccatctcccctctacccggagctgccccattggcctccccagccactgtgggcccattcag

SEQ ID NO: 39017 - DNA, 711 bp, Homo sapiens
tacaggcgtgagccaccgtgcccggccggcctgtagctgattttttaatcatggaagtagtatacattcttgtgggagagctgagttcagtgtcatgtgggagtgtaggagaggttttcagatctctctgtctgctccaatcttgcaaggtgagccagtgacaacagtggggtggtgggtctggctgcaggcagagcaagatagtaatctaagtatttgtgcactgatgagtaaacaacagggaggcggatgtaggcatgggtgaggctggtaatcagctggcaggactgcagagttcaagaacaggaccaatggaaagatacaagtccactaggatgggtagtccctgctatctagcctgaggggtcagagtccagcagtcttgacaaagcggaagagccagcctggctggaccagagagagcaaagacctaggacatagcagccacagctgtgaggaacctggggggagggtgctacaaacagatttggggtatggcagcttctccccatccactgatccccaaatcatttatatttactctcttcttccaaaaccaagtactcagccgagtgcggtggctcatgcctgtaatcccaggcactttgggaggccaaggcgggcagattgcttgagcccaggagtttgagaccagcctgggcaacaaagtgagaccctgtctctacaaaaaatacaaaaattagcccggtg

SEQ ID NO: 39018 - DNA, 800 bp, Homo sapiens
taaaatcccgtctctactaaaaacacaaaagttaccagggcatggtggcgcatgcctctaatctcagctacttgggaggctgaggcaggagaatcacttgaaaccaggaggcggaggttgcagtgaattgagttcatgccactacactccagcctgggcaacagaacaagacatggtctggaaaaaaaaaaaaatcagggataaacctctggaataccaaaataccatactctcctcctctccatccctttcctggctctcctgacactgcttctgtttactcttcatttatttgattatataccacatctatgactcatcagagcaaacggtgcctgagggtgagggaggaaggaaggatatgtgacctttgccctctggtccctctcttcttctaggaacacctgtccattgaagatttcactcaggcctttgggatgactccagctgccttctctgctctgcctcgatggaagcaacaaaacctcaagaaagaaaaaggactattttgagaagagtagctgtggttgtaaagcagtaccctaccctgattgtagggtctcattttctcaccgatattagtcctacaccaattgaagtgaaattttgcagatgtgcctatgagcacaaacttctgtggcaaatgccagttttgtttaataatgtacctattccttcagaaagatgataccccaaaaggagcctatggtcctcatttcaacttctaaggtcgctagattgtttctatcctgaggtattgcatcaattttaatactcctatagttttctcttcttagaag

SEQ ID NO: 39019 - DNA, 754 bp, Homo sapiens
aattggacccttgtttggcaatggcaacagaaattctgttgctgatagtaatacctctgacatcttatagtgttacaattgctaagattttcacctatggtgaattaggatgaaataaggtagagaaggatagggctcacgcagtatctccagtattttagaaatgtggtagaatgattacacaatagatcgtattggggtaatggaaatgttctgaaactagataatgatgacgtaatataactaaaaaaatttactaaaaatcattgacttatatacccttaaaatgggtcaattacatggtatgtaaattgtagcttaataaagttgtttttaaaatgtcgcaaattatttcactccctatattcaagcttctaatcaataaattcagtctatttcttcatcccttaatggggctagtcctgtgatttccttttcccaaaacaatgtgacagaagttaacagtgtgtgagttctgaccctaagtctaaaggtgccctgcaggtttccactcactctcttggaaccctgccactgctatgtgaataatcccaggctagcctgttaacagtggaagacacatggcccaatcacgcccaccactcaatggccagttatatgagtgaggccatcctagaccagtcaaactctagccaaaccatctactgactacagaggcgtaacaaaattagaatccaggtactatgagccaaactgggcccagataaacagaaccacccaggtgaccataaat

SEQ ID NO: 39020 - DNA, 2379 bp, Homo sapiens
agagtgaatgagtatcatgtccaaggcctggtggatgtgccgtaacgaaagtcacctgaagagacagcaggccctgttagaaggtaagaggcgaacgacaacagccccagagaaaaggggccaggtttgagtttcggagggagcgagtggcagtggagaccaagtcaaaggagaggtggaagccggggcagtgcacccaaaggtagtacctgtgaggctgggggtgcatcgaggggttgtgggcgggctgagtagcagcagggcgaactccagaggagtgaacgccgagtgggcggatcgcacagaaggaggaggaggtagggaaaacggctcaattgagaagctaccccggcccgccttacctgcgccgagggtccggagcccccggacagacccgcggaaagcacggagcccgcgaggagtgggaggagccgagggtaatggaagtagggataccgaacccaaaggagggaggccgctagctacccctagtcagggagagcggctgatggcgggaactgtgaccacacgcaaacacgcacgcacgcacgcacactcgacgcgaccagacaggcgcgtgcgcgtcagtcgaaaactccgcccctcacacgccctcgccccgccccgccagtacctagagcggcctagcccgggcagccccgcccctgccgtgactgtagtaggcacgcgcactttccacctcacccgatttcgacgcccccccaccatttccctcctacgcaacccagtcgggcatgcgcaatagttgtcttgccgggactgtccatcttttcccgccgttcactggcttttggaggagggtcagagttcacgccgctctctggaaataactgctcaaagccagaagttgcggggactagtggtcgcggacgtccttccggtcctaaatcttaaggggcaaaggacatactctgggactgttaactaggccctggaggcgggaagaggatgtgtgggtggggtcaggggtgagaggtcagagggccgcgaagtgggcggagcgagccggagtcggatggcggctacggcggctcattgttttccgctgcaggggtgctgaaggggggacgcgggtcggacgcgtccggctgtggaagagagcggcggccgctcacaacatgcacagcctggcgacggctgcggtgagtggctgggcccccaggcttggaaccagaatcctttctcagacccacgtttcggccttctctcctaattcccggtgtcgggtccctagtctgatttttttctgccctcaatctccaaggccccggttcccctcctcggcacgctttggttgtggtggagccggcccctatttccttgccggacgcctctcgcggccttcagcgcgacccatcgcgttctttgcgggcgccggggcctggtcccacgcccgtagcaggccattcattgatttattgcgctgaccaacagtttcagggcgccagttgtgttctgggcgccggcgtcgatgaggggaattccatggtcaatctgacgcggcccctgctcttagaactcaccacgtcgcagcgggaaggaaatggcttctagttcaaaccacttgctttatttatggaaaacctgaggcccggaaaagtgcataatttttgcatctgacttaggttctctgcatttaaaacttttcctcgacacatctcgttttacccgcgtgatcttttaacaaaaaagaaagatagtgtaattcagctatccgaagtaatcctacttctcttggcatttaaataaaatctagactccttgccatagcctgcacggccctgtatgatgtggtacttaacccacgtttataatctcgttttatgtctcttgctcctaaagcttcagctactctggccacctaaccctctgcaacgcgcttatttttctccaagatgcactttgtggtctctatgcctggagtgaatgttcttcttatccctcctcctttacatacacagcatgagtgtaattggtacctcttccttgaactctccttcctctccttaaactgtttatccaaatccatctttcttcaggtctctgcctaaatcggtctcagagtggccttccctgactatcctcttcaaattagttccgcagcctctaactttagtagagtaccctttacagccctgatccccgtgtaattattgtattcgtttatttgttgtctgtctccttgagggcagggacagggatcatgtgagccctgttgacgtggtttccccggtgccaggacagttcctagtacaagattaaagactcagatactttgctgcatgaaagaatattgaagggaaggtgaccactgaaagaacattgccatgatggggaaaggagatcatttgatttgag

SEQ ID NO: 39021 - DNA, 1847 bp, Homo sapiens
cgtctcaaaaaaaaaacaaacaaaaaccaagatcctgcaatctgatagtccctatttccagaatcccatggactcaaaacaacagatcacagggattcacaaggtggctggaaagtgcactcccgtggtcagagggattctctggaaactgcagcctccacttactgaatattatcgctgttctggggaatcttcaagcttgaccatacatggcctccggggggagccaaggaggacgctgagccgtcaagattaagaaccttcacctgcgggagggcagggtgaggtaggagacaggtgggcaccagagaagaaatacgcttatcttccgggcaggagggctgaggaagagaaaggacagactaaggcagagagaaggcctggagaaacaacgggccccggcctagcgacccaggttcccacctgcctctggctctgactcaccgcgtggtcttggacagacacagtcgcttcgcttctctgggcctcagctttcctatctgtaaaatggaggtgatgacagtgtccacatcgtcgggcaggagctggatcataagagccagcgaactggaaaggcggtttgtaacctggaaggcttgggatggagcatcgtcatgattttgtcctgagagcagcaggtacccgggcggggtccagaaccgtgacgcgactgcagcgccggggcccagctcgtctgggtgctcccttcagtacctccttccgagagttcccagcgcccaggcccaccctgatcccggggctcgaaaaactttgcctccagctcgctccacccgcattcccttcccagttccgccccgcagccgctcactcacctccagacccagagccggcgggagccgcatctctatggtcggccgcggctggaacggcccccggggcccgctttgtgcgaccgcctccggctcagccgcctctaggatattggggatgtggaagccactctctcttcctcttgccggctgccggggtactctatgttttgtctctgtggtttttcccgccctccacccccactccagccctgaagccggagaagcaccatcgagagctctggggtagagtggcgtgggcttctctgtgggtgtggcgggaagtagatgaaaggacccggggcggggccgaacgcagcttccccaaggtgcaggcgcggtgaaaccatcgagacggagggccagagagtcacggcggtgagagggctgagtgacgggttaccccaaaccatgtggctggaggcgcgagctggggtgtgggcgaggttcaggagggggttcctgggtgtcgcggaggggccggggacgggagagctttgtctgtggccttccatgcataggtgttttggaattctggatcccagttctgaggctcagccgaggtcactgctgtcagctcacctccctgcatgccaggcgcagggcaaagtggccggggttcggggttggaggagaggtgtactagaaacaactttgctcttgtccctcaggatcttattgtctacgatgtgacgatccgtggagaaagtagcagatgggcagattttcatttggggagaatgagggagaaaagaacgggcattccgagccaagagcactgcatgagcaaggagttgggaggttgcttacttgttgaacatatttgttgcgtatttgcatatttgctaaacaggtagtgttaggagctaatccatgaaaggtaggtgggcgccgtattgtagagagccttgagtaccaggctgagtttatacccaattcaggggtctgctgggagccagccattgaaggtgctggagcagagagagatatggtattggagctgatccctatgatgaa

SEQ ID NO: 39022 - DNA, 1457 bp, Homo sapiens
gaatgcttgagagaaggactagagggactttatatgaagtgtaaagctttattcatacaatagtcctcactagtgctgtgtgagagagagaaggctgaggaaagcgtcggcggaaaaaggctgatccaaggggaaagggggccggaactggagggcactggttctgagaggagaaagggagatggggaggtctgatgggcaggcatcccccaaagcccctgagaaaattcatttgaggaggagagaaagggatggcgtgaagctggaggaaaagggatcgaaccggatgcggcgaggcctgaactggcctggcgggcgccgacccgttctcctctcactcagatcagcgcccctccaccctcccgttccccagtccagctttcccagagatgtcagcatctctgccatccctcatccctcgctccaccccacacgcccgccgtacggaccgtctgcgacagctgctaggcctctggactagatccaggctgtcagccaaagcccatgcccccaaagttaccagtcctcctcccctgcagctgcagacgcagacgccgccatatcttcaccggcccgcagccggaaccggaaatgcccttagggaagtcggaggcggaaaactaagaggggtgggcagctagcgtcgtttctaggcaaccgcagactccgggtccttagccgggcctgatggccctgaggcagttcggatgtgtcccaggaagtgcccatgtgtggtccgccgtccattccacacctctgagcgcctttgtcctctgaacttctcaccagttctagcgagtaaaattgtaagaaagggagccgaaagagaccggagggagaggcgggtggagaagaattataagtcaggcaacgtatgcaggcagccagaagagatggggctaaacgccagggaatccgtcccttggcctgaggagcttggagctcctaggctgggggtgagagaggggctctggcctgcgaagcgcacgggccagggggtctgagagcgggtgctgaggagtctgggagtggcaggaacttgggggagactcaaaggagcagggttggttgggcgaggctaggttgaaagagtagggtcgagtgagccaggctgggtgagggagaaggggaaccaggtgttagttgggcatggggccgggttggggacaggaggatgaaagtggggaggaactacaaagagaagctctgtttgttccaagagcgcatcatctttgcatgcattccaccctcccatgttttttgaggctttattgtgaaaaagaggaaaaggcaaggtggctaacatttttcctttcccgtgccccaactaggcgtcccagatgttgtggaactgtccctggatctatagctcttcaccgtctctactttcttccttctaagagatcctgaaacctctgtcatggaaaagtaccacgtgttggagatgattggagaag

SEQ ID NO: 39023 - DNA, 1379 bp, Homo sapiens
ctgagaaaaaaaatttaaaaatagcccagcatggtggcgtgcctgtagtcccagctactcggaaggctgggggcgggcggatcgcttgagcaggagttcaagttcgcagtgagctatgatcacgtcgctgcactccagcctgggcgacagagcgagattctgtctctaaaaaagaaaacagtccatagggagtaggtggaattagagtagaaagagagagtcctggatgctccgaatggagcctttcagagctttaaccacgggactacatctcccagaattccgctcgccggatcccaccgcactgaagggactgcgcgtgcgcgagtcaggtgacgacccgcccctacaggccccagaacccccgagattccccgcgcttgcctcccgccctcttcttccagactctcggtctgtccgctgggggcgcgcgcggtgtgtggcaggcggcagcggcgctggcggccgagtgcgcttgtcacgcgtggcggtgcgtggttgctaggggcgcctgaggctgccgggtagcccagcaggccgagggaggaagtagcgtggagccggtgccgagccggggcgaagctggatcccctaggtgagtgcggctgcggagccaggggagccgaccccagacactccgccggtcccacgctcccgacctccctctacctgagtcctttcgcgcgggtccccagccctccggccactctcaccctagccccgcttcctcccgccacctctcatcccccgggaggccagggagccgcggcctcctacccggccgggacttcgcgcctcctcggagcccttctcctctccgccacgccccgcgaacttagtcggcctcgcctccgggtgcccgaacactgcctcatcccctagttatggcctccgagcttcctctgtcctgccgcgctgaggtttaaattccctctgggtgtgagcccaagctcctcgcaggctccagggccgaatttaacatggatatctgctttttcacttctccatcctcagtatctgtagaagaatacgttcctaaactccacagattcaaacaggatctgagatcctgtggaatttaattcttcattcatcaattcctttatttaatcattcactaaacaatttttagtaaacattgacaaatatttaatgagcctgggtacaatgggagggattgaggggatagagtggctaataggacaagcatgttttcacggaatttacagtctaggagattattaatcaagtaaacgagcatttgccatactgtggtgtgtgctgtgatagaacaggaaatacttaatccggacttacttagaaaacgacattattgccattcctcctggtcttcacattcccattctggatctcggaaa

SEQ ID NO: 39024 - DNA, 3664 bp, Homo sapiens
gagactctgtttccaaaaaaaaaaaaaatttcacaaaagctcccaaataacaagacggttctgttttacaaaagaacattgcttgtcctcgctgaagttttgtagtggaataattgttgcctattccttgtatttttctgccttcatcacagcttatgaaggggcagaggggagatagatcatttggtgccagtgagaatgagagttgtaactaccttgctgcaaacgtttactgggagccactgtgctttttgtgtgctttatgcgaatttttaaacttcacctcccacaacttcagtcggggtatggtacttcctttctcttgtctttccctgaacattccagctgtgcggtttcagagttgcatgtgattcactactgatcagtgctctgattgtcatgagtcaccacaaggccgtagctgctcatgcagcctggctgtgaggaggacctagattgaggaatttagctacagaaataggcttgttttcttctaaacttgaactctgcctgctatagcttagtgtttataccctgtttgccccttaagccctcctgttccctagggatcctgtgtaggaacaagaaacacattagatcattgctccataaaatgttagattattcaaaatatcatttttcaggtgaggtcaatttattggcccctaaagtaagttccttgcaagctgctgattggagggtcagctgatggtagatcctttggacttagtaacagagagtaagtatgaatgtcttgagctatctttaagtagtataaatatgtagttaatcctttataatttacatagtcagcaattactctttataagtttagatttgtttaagttgggagtttttgaaatgggcttccagtagtagccagtacatagccttctacatatgtaaataccttttctcctgttgtctttcttttgatgtttcttcctaaaatacttcctgggagatgagcagtctgccttttggatcctagaggcgcacatatacacaaagtgtgcattatcacagtacacttagaaatataagggacactgggagaaaggtcttccaggtgtcatcgtaggagggcagagtatatcacagggaatgggcttgatgactttgctgaaaattgcccttcgagtatgtgctgtcggtagggtctgggtgccagacattatttgcctctctggactttgactttatggcagaactcactatgttagcttttaaaacaaggttctcacttccttcacttcttagattttgggtcttcagaagctttttaaagtttgtcacttgcattcctgtagggcagtgggcaggatgcgggaaaagatgacctgtggcagtgattgggggtctgggacccaagctgcctgaatgctttagttaggcctctgcctcccaaccatttgaggttttgatctcatcaggaatctctataaggagaaggaaggaagttgtttttagcaaccatcatttccctgtcttaacgtgacactacttctgaacctcaaacactgaaactaggttggagcatttgtatgtgatactgtcgtgagtgatactgtttacttggcattcttgaagttactctctgcagagtatctgatgcaacaaatttgtctttgcttggtaattcctaacacagccatcttatccaaccttggatatctcttactaactttggagctatttcccagaaagagagttacagaaacatcctctcacctgcttggcccttgagtccagacatatttctttaggaagacagtggcccttatccaacttgctatactacacatcatggggactgtattagttcgttctcgtactgctataaagaaatacctgagactgggtgatttataaagaaaagaggtttaattggctcatggttctgcaggctgtatgggtagcatggctgcggaggcctcaggaaacattcagttgtggcggaaggggaagcaggcacgtcttcacatggccagagcaggagagagagaaagcagggtggtgctacacacttttaaacaaccagatctcatgagaactcactatcatgagaacagcaagggggaaatccgcctccatgatccagtcacctcctccaacattggggattacaactcaacatgagatttggtggggacacaaatgcaaaccatatagggactatgagaggagacaagaagtgggaaatgaccattgcagagatatgagatctggaataccttagagagaagagaatccactctactctagtacctgcccaggtgtgttgtttaacactttgtctgggagcaggccacctgcagcttctgaggagggtaggcatgtatccttgtcctccctcttcctcttttggattaaaagccaagccagctgggtgttgggctatttgtgttcatgtgcttggcactgagggttcatgtggtgggatgtagcaaggcaaacattgagcaatgtgtgtgcaaaaggaagtgttgtgcagtgagtgcctgtggctacaagggagagtgggattggctgtggtgttgatgagaagtcagtgatgtgcttttagggactttccacaaagggccttggtataaacatggaggagtgtttccaacctggcttttgtctggtacctaaagattaaagataatggaggggatggagtctaaatatgtgtttcattctgtttaataggcattgtagactcagacagatttgagttttaatctaggcactgctacttattggttatttaattataggaaagttacttaacttttctgagtcttggattcatcatcagtaaactgaatgtaaggttttttttaggattaaatgagataatatggataaaatgcctagcatggtaccagacattcattaggtgcccaaactagtattcaagtttgtttccccttcatttactgtgcttttccagtttgtttactcaacagaatattgagcacttcctgtgtatcagtcactgtgttggggacatcagctggaggagaatgtgctccttgctcctagtgtgatgagttagttcattgttgaagctaatgttctgtgagcagtgatggtggcatgcgcagaggtgaggcatcctgttcaaactcaggagtcagggaagactgcctaggtcatgttgcagctgattttttaagttgggtgaagaagaagaaagggctccaggaacagcacttgtaagggaatgaagagctgagctagcatgatgcacgtgggaatcaatagtggggctgtttttcagggggaccagcctgagttttcatttccctaggcattctcctaccactttggtatgtctgttgtgttgcattggtggggaaaatgtggcttcccgaaagaggattaagtgacgggattatgaattattttgagtgtacttaatacacatgcatgcgtgcttgtagtctcgtaaagtgaatggcaggatttgacttttccctttgtctctatgcttctctaccacaaacacacgctgtaattgttccaagcacggtatttccatagtttggatttgtgtggtggtccattttctgtaacctcattttgaggtgactggcctcaaaatccagttttagcatttatgctgtttttagctcattatcattttgaatattggcagtgctgcattgtgattttt

SEQ ID NO: 39025 - DNA, 966 bp, Homo sapiens
tggtttctcaatgttctgctgtgcagcaagcagggtctggcggcttggtaggtgggtttcaggagcagtcactattgtaggatgggcttccaatcaaacctcagactaaactcttgtactgaactgattctacctccctcctctagactcagtaaacagtgactattcaataaatgttgactgagtgaactgtatttacagagatctcaaaggaccccagcacttgaaccagaagttctaattgtctctcatctaggtatgagaaagtggaacctgggaacagcacaagcggaagagttcggatcagaaaggttttctctgaagccgtgctccttcctaaccctgcacttagtggttgctgcttgcctcctccccagcccctgtagtccctttacttagttttttctagcagtggcacatataagaagccaattggccccgtgtccctgctactcaagttttctctttgcacatcaggcagaaagctcagctacttggtctcaccctggactgtagctgcccccattctctctgagctttggaaagatagagacttctgtgtttcatggctcctggagttctgtggcgaggtggggtggggccctggaaagatcactgagaggcctgattgggttcaaggccacagagtaggtgggtgtttggccggtcctaaggccatgttgacagttgtgaaagtttggtgacaaagtcctgggcatcattggctgctcaatagtaaggactttaaagtcgggccataatgggagaggtccttgacactcctattggatcttttctgatgtaattgaagtgacccgcctcttctccccgctggctgcagtattctagtgcagacatgacatggggaatctgctgccttcctaagagaaaatgagctgcctgcctggcagttttgttgtggctgggccttcacggcaaggacctaggcacggagtcctggttgag

SEQ ID NO: 39026 - DNA, 2354 bp, Homo sapiens
caaaaccctatctctactaaaaatacaaaaattagccgggcgtggtggcgggcacctctaattccagctactctggaggctgagaccggagaattgcttgaaccgggaggcggaggttgcagcgagccaggattgcaccactgcactccagcctggacgacagggtgagactctggggagtggggaggagagaattaacaaactatatgacacaaaggaacaaaaatacacaagacaggataagagagaggaaggatacagggagagctaacatacatatagcagtttgaagtcccgggaaaggagaaaaaaatggggaggagcaatatttgaacagataatatctgagaaactccccagactgatcaaagacatccagtcacagagtcaagaaactaggagtcctagaataaataagtagaaagccacacctagcaactcagctgtcagcctaattgaacttaatatgccctttcttctctggctgcctgtaaatcaccaatttttcaaatgctgttagaaccagctgtaccatcctgctgggtccttcattcctggcttgaatgtgatctttgaccctgtatttattttatacttgcgtgagttatgtttttaaactttttgacaactatactttgaatatacatgaaacataggattcataagacaatactttttttttcttcttgctgtacgttttccgtactatgttactctttccattttattaaaaataattctggccatcatctacgaaatctggtctcaacctgcagtttgaaatatcctgccttggcagacgcggcagggaggtgcgtggagggagaattgaattaaaaaaaaaaacaacaaaacacgaatatttagatttctttgttcagcggcccccctccagggatcagatgactggcccccctcgctccgaactgactccgggatcaatccggaaggccattgggagaagccgagggcagcttagccacggccggttcccgttccctccaggacgcgagggtcgccttgggtggggaaccgcgaccgggcgaggacctatcccggtgtggggcttcccgatttcgaaagaatctcgctgcacccccgcccagagttcagaccaagcgaaaagttatttgagaggcctcgggggcgcggggtgaggagtcgtggcggaggccttggtcggggcgccgtggatatccccgagtcaccgcgtccctctcctgcagctcccgcgtcgctgggaggagcgagggagcgagcgggaaggggtctagctggcctttgctcggccctccccagcgcccggctttgaacccgccctgcactgctgtctgggcgggtccggggactcagcactcgacccaaaggtgcaggcgcgcgagcacaacccatggctgcgctgggctgcgcgaggctgaggtgggcgctgcgaggggccggccgtggcctctgcccccacggggccagagccaaggccgcgatccctgccgccctcccctcggacaaggccaccggagctcccggagccgggcctggtgtccggcggcggcaacggagcttagaggagattccacgtctaggacagctgcgcttcttctttcagctgttcgttcaaggctatgccctgcaactgcaccagttacaggtaacccgcgggggcatcgcgtcctggggatgggagtgggcaccggaacagagaggctagaggtgagaagacgttggacagaaagtgaaggctgcaggaactcagctggggacccactgaggctatggtcataaactggaaatcagtagggagaatgggcaaagtgcagacagagccctttgagctgagataaacaggacgaggaagggcttaaatcaggacggcaccagtaagggggggatctggacgccggacttacagtgagcagaggttgaggagggagctgtcttgggaagagagtggcagaggcaaatgtgtaagctaacggatattatggaatcactaattctgggctgatattggctaccacagacttcttccaaacgaaataacttcaggaggattatagaaacctcttggttatttgcaaggtaaatttcctcttaggggaaaacacaatgctgcatctcagatcgtggaagcaaactcacagacagtaaggaaaaggtactttttgttattaagaaatcagtctgaggccgggtgcagtggctcacacctgtaatctcagcaccttgggaggctgaggtgggcagattacctgaagtcaggagtttgagaccagcctggccaacatggtgaaaccccatctctactaaaaatacaaacattagccgggcatggtggcacatgcctgtaatcccagcta

SEQ ID NO: 39027 - DNA, 878 bp, Homo sapiens
gaaatgtcccagaaacctccatactgacagccaggaagtagtctcagaggctttggattccaggaaagaagctggtattgtttttctactttaaaaatataactttttttctgctgattccaagaacgtggcaaaaaatttttgaaaaataaatcacagtatagagaagaaagtaagttaatttgtaaagcactgtttaccaccattgagataactgctgttcagatttttattaaaatgttatacataagtttacttcaacttaacagaaggataagaaaccaaactttagaaaaatatttcttcaaaatggtatatatttgttttaaacaggtcttctaaaattaaagaattaggagacatattaagaggctggacttattgcagtagttctcaatctatggtgatttcatcccccaggggacattttggaaatgtctagagacatctgtggtagccacaactcagagggggtgcggtacttgtggggagaggccaggaatgctgctaggcacccggcaacgcacaccactgtcggctacaacatagaattatccactccgagtattaacagtgccacagttgagtaatcctgggttgttattgcataatattgtggttttaaaatagtacacgcttttcaagggcctacgtttgtttccagttagaaggacatagttgttttctcagggatccgtggagtaagtggttcagagcatggcctccagccaggtgtttggagtttgaatcctgactctgctacttaatgataaagtgaccttgagcaacttctttgggcctcagtttcctcatcggcaaaattgtggtaatattaaacctaccccaaacagctgtagtgaggattgaatgagctaata

SEQ ID NO: 39028 - DNA, 591 bp, Homo sapiens
tgggtttcagaagcaggccaggctaagcgctgggaggggagtggggctgcgcgccgtgtcacccctcacggtgcctccctccgcaggcagtgatggagaacatgcggcggaagtgcaagtgccacggcacgtcaggcagctgccagctcaagacgtgctggcaggtgacgcccgagttccgcaccgtgggggcgctgctgcgcagccgcttccaccgcgccacgctcatccggccgcacaaccgcaacggcggccagctggagccgggcccagcgggggcaccctcgccggctccgggcgctcccgggccgcgccgacgggccagccccgccgacctggtctacttcgaaaagtctcccgacttctgcgagcgcgagccgcgcctggactcggcgggcaccgtgggccgcctgtgcaacaagagcagcgccggctcggatggctgcggcagcatgtgctgcggccgcggccacaacatcctgcgccagacgcgcagcgagcgctgccactgccgcttccactggtgctgtttcgtggtctgcgaagagtgccgcatcaccgagtgggtcagcgtctgcaagtgagcggccc

SEQ ID NO: 39029 - DNA, 639 bp, Homo sapiens
ctgtcacctgatggatgctaggttacctccttgcaggagggaaaagtaggaggaggaagggcactaacagaatgagggtggtggacagattagaaggcagtggtggggttaagggtcagggagaggcagccaggctggggtgagatcagaacgcaggcatcccgctttgcagtcactcaaggtccagggtagaggcactcaaaggtagacttggagttgtaggagtgccccggccggtgagaaacaaggtcagggtcatcccggagctccccctacttcccccaaattaatgtgcccccagctagcccctggcagggggccttccacgttggagtgtggccaggctctagtcacagcccccttctctcctcctccccccacttctcatgtggttgccggcagctgcctgcggtcgccccagcccctgccctcaaggcacagggactttccaacaggggaaaaaatgacttaatgagagtgagagctgggggcgggagggacaggtccctgtaatcaccgctcggctgtggggcctgcgctcctccgggcccttccccggcttcctgctgccagcgcctccctcgggctccggttggggaggaggacaagctggcgactggggtatcccttttcaggtgc

SEQ ID NO: 39030 - DNA, 753 bp, Homo sapiens
gccttagagctgcagccagactgacttcgagtttcggccgcatccttttctgtgaccctcagcaggttccttcactcttttgagcctcagtttccccaattgtataacgagggtaaaaaaccacgcctttctctcagggttattgtgggtattcattgagaagacgtgtgtggagcccggtgtccggcacccagtgagagcctggaacaatcattaggatgtctgagtccttatcactcgtgcgcagcacaacacgaccgtgggcacagggttgaaggcggttccctacgcctagcctctcgataggaaccttcagggacgggtggacttaaaggagccggtggccttaagagtccagtcgatgctgccacgtgatgggcctgggggaaagccccgatcccaagcgccaacagagcagccgacctcagccaacctcaaccaacacgtaggcgaggatgcccagggtgagcgccagcggcgagaagacgcgctatcgcgagatcggtgggacctacgcgtttacaggccggaagtgaggggcgggcctaagggggcgcgctccttttgaaacctgagacggagacctgcggagggcgagggctggttggaggtcgctgtcctttctgggaaccaagcaggggtcgcaggagggcggggatgggtcagcggggatctctgagtggggttcggctgagagaggccacagtttcatctttgggaagctaccctgggccggccacgcgccgtgagccg

SEQ ID NO: 39031 - DNA, 568 bp, Homo sapiens
tttaggcaccttccccagtgttgttttcctctaagcgaaggcgtttaaaaacgaatagaacttaagggcagtggccctggtgggagggcgcagtattcagaagggcctctaggtggtgaggaaaggggcccagccaggagaataatccactcgacccgcttcccaggcttccagaggtcagacctgggatgcagcgttccccttttcaccctcctctctgagggccaaaggagacctggagacgactgggtcctgcagtcctcagtctggccaggcacttgcggtttgcactgcgcggcgcacaaaatcctccccggcttaggtacaaagctctccccagcgtaccctcctccgaccagcagagggcgcgcaccgcccgcgagaaggaggtgcaggagctagactccgaggggaggctgcgagccgcaagcgcaggagccgggtgggagagagaccccttcttctgcaaatgaggaggccgagcagaagaaagacggcgacagatgttggggggaggggacggtttgtgagggatagggagagaaagtctaagtgagagcaggacgag

SEQ ID NO: 39032 - DNA, 1613 bp, Homo sapiens
ggccaccgcaggtgcgcacctggcccgcccctcctttcccagccaccctccgcccggctttcctggcccctccgcccggcccagcctagcttggcttcgtccccagcccacgccttggagcttgtcccggagcccgggctccgtgtgctcttatactgcctgttcagtccccgcccccagacacacacactcacacctgtccaggcgcccgtttgctcggggcaaatattgactcatggaggcggagcgctcccccctcccccgcccgggctctgagaccggagcttctccgaggccttggtggcgggggcggaggggagggtgctggggaccctgggcgcctctggaacaacaccagatgtcacttttccacccacctgcctctgggagggaggagccgagaagcagaggacagaagctcccgggcgggggttaggaggaaccgagaggtgggtatccatcctcgtctgaggactgattcacagtgggagtcgcttagcagggtctgtggcccgaaatccagtggtgacctcgacccgccccagcctagttcctggccctccgcggcgtgcctcagttcttcctccccagcctcttgggcactcggagctcggcaaatgctaaggggctggccctgggggtgctaagcctccgagcaggcgcggcgcggaaaggtgaggggtggccgccctgcccagtggacacctgcttcgctggccaggcctggcactcagttactgtgcaccaaggtgcgctggggcaaaggccagccaggccccgtccggagcgccctccactggccagacccggtccagcggccggcagctagcggccaggtctcagtccagctgcagtgtgggcggagaggtgcatcctcccgggccctaagttcccgccgcgcctctgcagtccgcccgggctgctccctgccatccttccctctcagagctcgcgcgcgcgttccccctcgtcggggaaataaagtcaaggtagatacagaaaaaagactagatgcttttactggcggtggagagggggccaggcgtgacccctagcggcatgtcggagaggctgggcgcgggcatttacggaaggtcggtaggaagtggcaccaccgggtggagtacctctgcttgctgcgtcggcagcagcgtgtccggggtcagactcctggaagacaaaaagtcccaggtaggcgtgggggcgaggcttcgggcagagcctggctgcccccgtggcccctctcgcgcggtctgcgcggccgctggtcccggcgcccttacctgggcacgcagaacggcggcagggcgatgacgcgtggccgcgaggtgagtaccacctccccgcggctcgcctccaccaggatgttctggatcatgttctccagcagcgcctcctgcaggttggcgaaggccgggagcctgcgagggggcgggggctagcatgagggcggccgcagtgcccgcgcgcctcctcgctcgcctgtccgtgcggtacattgtgccgcgagctctacggagattcccattcgactcccctcatccactacactatggggcattcttgtttcaatgttacggacgttccaagtgtggctaaaagattccaagttg

SEQ ID NO: 39033 - DNA, 1601 bp, Homo sapiens
cagagggccctgaagtgctccctccctagcatacagccgcccccggggatctggaccgcacggcggtatcacaaatctggaggaggcatggaggcaagcgccctggcggcgccttcactggtaggtggaggtcccctctctcctgtgctgtcttcagctccgggtatccatccctccacagacaggactacacctttcagcgcccggtccctctgtgcctccaaggcaggagggccagccagcggccgggagggaggagtggcagcagagccgactgcctgcggccggcctgcgaggcgtgcaaggcccgaggtgcccagtaggtgtcaccgcagcctcagggctgaggcctggggacgacaggctctggaggcgcggcaggtgcagagcgtctcggtagcttcagggggtgtgttggaggggaatcgccggcctgcctggatccctcgagcaccaccgaggattcccgccgggaccctcttataatcttaaaccggcccacaaccccgccagagatgacagggccagggaaccagaaaccggcggattagcgccagggccgcccaatggggggccacatgcaacgtcttcctctgcaaggcgcaaaaggggctgacaatcccagacctccaggacctctgcaccggtgccccgcccctataccgtaggaaggaactccataaaccaagcttctgatctcagggagccagctccaccatcctcctcacgtggagttggggtagagccgcgccctgggggaaggaccgaagcggtcatccttggttgctgcctcctggtgtgcctgggtcctgagagcccaagagactgtgcagctgactctgagaagaagctggggccagggccttggtctgaggggaaaggcccttccaccagtcctcgactctgagactctgagattcgaggcgccaacaagtgtgggcagcccaagtctcaacctacccccaccctgcagagcccgggcctcacagacccttggactcagccttcctaggagccaatagcagctacaacccagggcctcgcaggtcctcgctggtgcacagcctggctgggggtgcttactgcccagggagggagctccgcttgctccttcgtagaccctgccgtcaggcttctagccccgcacctatgcccgcctgcagccctggttccccgcctctctccctcactgccaccgccccctctcgggtccagagcccgggcgtgcgctgtcaatgattgcccagcccgtggcccggatccttatctgcattcctcggcgcccggcccggcccggccaccagccaaccttcggccccgacactggccggccagccccggcgccagggtgcatgctgagggccctgagtctagctgctcttcccaacggatctagaaagccaggggcctgctttcagggggaagcctcgggagaccccgaaggaagggggtgaaggtctctcccctcgcggacctggctgctgggaaggaatttgcgcctctaagcttgggtggagcgcgggtcctactccagcatgcagagactagcgtcagccctggtccctgcctccctcggcatctcagcccctcttttccactcc

SEQ ID NO: 39034 - DNA, 773 bp, Homo sapiens
ccgggtggctccggggggctccaggcgggggcgccatgggcggcgtggtgcggccagggccggcgggactcaagtgcggggcgggggcccagggcccgagctggtggcggcgcgctgtccccctcggcgcctcgactctgagctgccgggctcgccggccgccaataaataggccggcccgtttgttttggcaacgcggcggcggcggggggcggcgggcggcggggctgcgggccgccgggctgggctgggctggccgggccggcgggctgcagggccccgcggttagcaccccggcccggcggtcaggcggctcgggcggagcgggagctgctgccgtctgcggcgcagcccggggccgagtgagaggggaaatggaagagatccgggctcgggccccgcgcagaccgcaccctacccatgtccctgcctcctgtgcgctcgacagcgaacctgcagcaagggcagcacagcctcctccccctcgggcgggcggccccggcactagccagccctcgtcccgctcgcgcctccgccgcgcgtccgcccgcccgctgccctctgcgccccctgcgctgcccgagtttgccctccccgcctggacgcgccccaccccgccctggcctcgcctaccggctcttcgcggctctggggtgccccgccaggcgcaaacctcccggacaggagctgccacccccacggagaccgcaacccacggcgcggccggacgcgaggggcggggggcagtggccggaccgcacagccgcctacgg

SEQ ID NO: 39035 - DNA, 855 bp, Homo sapiens
tagaaaaaatctagttatcccacacgcttggcccactccccttatctagatccctttagccccaaatgtctttcatgagacagtgtggccaagccagtgggctgcaggttctgaagaccagaattaagtctacagtgtgaatacagacacacacacacacacacacacacacacacacacagagagatacatacagtcagtgggaaagaaggggaaaggaaagcacacacaacacaacacaccagggcagctgcagaaaacaactgcttgttaagttaaaattaaactctgtacaaatattgacctttggaggggacagaaaccggtcccatatttaccagctttataaatgggactgaccacagctgccccacgcgcttggccagcatcatggcaggatggggcgaggccatgctttaggggtggggggatgaatgagaggggcaggagacattttaaacactctcttaaatgtagttactactggtaggtcaaagttcccaaaagccttaaaaggggaatttctaggaaagcaaataaggcagtctctgaaagtgggggtcagagaaataggaatagagtggaaaaggaaagcttcggcaaggaaaaattgctaaaaagaatgagaaatacaacagagattgtaactaaatggtgaaagcactggggagcttatccttttgaaccctggcccttggtcaaagcaagagtcataaggtagaagaccaggtgaccaatttaagtaacctaatggaacaatttaaactgacctggtttgagttttggctctgttgcttacttgctatgttaccttgggaagctcaaggaaccccagtttcctcatctataaaatag

SEQ ID NO: 39036 - DNA, 623 bp, Homo sapiens
gaaagaaaatggggatgggcacccttgtatatggctataggaaggaaaggatcagctggttccattccacatttgcaataaacaaaccagtttgattgggagaggcatggaatactttctaccccttgctctggggtaccctctcctttgttgatttagttcaggcaacttggaggagggacaggaagggctagggcaaacatgtcacagcctgcagtgaatagagccaacagaaaggagaggcaaagaacagagctgagaggagaggaaaagaggagaggcctctcttcccatcccacaacctgggctccatccaacacaaagttaattcctaacctcggcttcaccaccctgcccactgcttgcatgatttatccccctatctgcctgcatcgcctttacaagcctcccagccctgcagaccattataaaagctgtctgtgctactggctcgacctggcctggcccaggctcctgccacggtaacccttctccaccccttcattttacaagccttccaccatcatggaaatctgaaatcccacgaaagaacagtaaacatcgcagggaaaagaaaatacctagccaggctactctggacagcagagtcccaaacagactga

SEQ ID NO: 39037 - DNA, 3442 bp, Homo sapiens
caccatccagcatatctgaccgttttgaaatttgcccaaacagggttttccattactgcactggccccttctgcacacctctcatacacccactccaaccacactctctactcaccaccaccaccacgagaggagtgcaccccacacctactccaaccacatgacacacacccacaccttctcccacaccgcccctcctcacacatggtcctcacagccacagtgcacacacatacaacacactcaccacagcacactccttcttaaggctaccagctgcctgcatttcctgggcatcttcccaacttaagacacatcctagataaaaacattttcggagtctacaacactctttaacattttaaaattttctattacccagaaaatctccccaaagagagagagaagtgagggctgtgacattattacagagaagactataaacagaacaaatatagtgctgctttattacaaggcagtgtggggttggtggctggctgattacagggccactccccagagctctctgcagtcccagacctcaataaaggccagacttgagctgccttcaactgaggggcccccttcagattccagtccaggatgtgctatctgccttggttgaagataaggaggaaagcaaacacaatctaagaacaaccatgcttggcaaagagccacttgaccatcttctcaaaggcaaacacaattaagatggtttgggtttcttggaatcaatagattccaaactttggaaattaaaaaaaaaaaaacctagagagatcaagaactgatagacttaaaaacccatacacatcatagatagtgcagagtaagggggaggaatggattagaggacagaaagagaagcaacgcagcttgagtgactaaagcaacccatattacgcataaaatcatagaaggaaagagtgggaaatccacaagtcctctcttctgggctctgggcacacagcgtcccttcttgggtgactcacactgggatcaccttcacccctgcttcatgtggtaagggcctctttataaggagacacaccacgagccttctcctcctccacccctgcgagccagggcaattgcgtcactgacctccacacacactcactccctcctctttccagccggccaccacacaagggatcttgtcttgtggtccctgcgatcctttcatctgggctccaaacccactgtcaccttggccctgaatcactccccaggagacactgggaaaacagagctggacaaagagtgtctgggtcctgtatggctagaatttactgatccctgccggtgagagaacccaggctatgctcttctctgcccaaaggcagggcacaggagtaatttttaacttggccttgtggccagccctgcctacagactaggtgtccactgatttgggtgatacccagcccccaacagctaaaggataaaaagggctgagaggcagtcctaaaggttctagctcctctgccttacttgttccgtggctgaggaattgctagagttggaagagtgccagcaagtatccccccagttctgctctcatcccacttggctattctgttctgagggtagccccaaggaaaatattttggcagctgaaaatgtcactgtttcttagatccttctccaagatagaggattccctccaactgtgtcttagctcatttccatgtttcatggtcctaacatttttccttgaccttctgtgtaatgatattccactttgggactttgccatttttctgtaatttcagaacctgtggttcaatgggcagattttaggatgagttacaggaacgctatttactgagttttctcccttttcaaatatatttcattacaacaaagcctctaagatagcatgggataatggggaaaagctctgcactagaaagtcaaaggacaaggttctgttttctacctattacttgtgcaactcgaggccgttcaatttctctgagccaacccatcgtacctcctcatccttaagtggccctagtgggctttcaaaacaaacaaacaaatcctcaaaataataattatgtcaatttggtcttctttttatctgagtaggtgatcaatatatttgtgttgaactttacccaaggaagcctgctcattttaccaggcagttatgcgaatcaaatgaaatcaaaaaggcaaaagttctctgcagaattcatagtagtacaaacattcactgagtgtttacaatggatcagacaagttaaacaagacatcatatccctgcccttggggaacttaccacctagtaggaggagccagaaaaaccagtaattatagtacagtgttgatatggcctacgatagagcaaacagaatagcatataagaagggcaagtaaactgaactcagagggccagggagaattccctagaggaagtaacatattcactgaaatccaaacaatgaacaggagttacccaagtgaaaaggtggaagggggtttccagagggaacggcatgtgccaaggactagaggtaacagaatgacgggctctagcaactgatagcagttcactgtggcagaagtgtagatctaagaagcaaggtggagagtatggatggggttggggaggagggggttagtgtggcctagcagaagagtagcagacgaagctgaagatgtaagtagtggccagatcataagggccttaataatctttttaagaagtttggactttatcctaaggacagcaggaagccactgaacagttttaagcagggacacatgaccagatttacgttgatcagcaggttccatttggcttcttttactgattgtagatccctggggctagggaggtgtcaaaaagaaaagaaccagaggttcagacgtggcctacttcttttctttccatggaacccagcaggttcccactcccttcctcatgggactctccagtcctttaagtgcttagcttactttccagtcttccctctcagtcagtccccttactcctccctctttctctggcaaagaaaaaccttttatgatgtggcaagtcctttccaatcagctgtcctattgacctgggatattagcctcttttcttgaatattatcccctcaccagcaacctccaaagagggctgtcaagtaaccctgccagtaatccacatttctaatccaaggcccatttcttatctcttacttaaattccaccaactctgccaatatttacttttctcctcaatccaagatctctcaacctctaaaaacaatttggtggcctcctaacagaagaccaagatatgctgaccaaacaggtgatcaatctgaaaggcctcataagaaagaccttatatctagatgataatgataaactagcaaatgaactctatgaaaacattcattccttttctttcttccttatctcctcttaaactgcagtttaa

SEQ ID NO: 39038 - DNA, 577 bp, Homo sapiens
aataaaataaaataaaataattcaaattaataatctatctgtgactaagggaagttatcagacttcctttccctttccttaaggagatgaactaaagaaggcactaaaaagaagaaatgccctagatcagaggtcagcaaactttttctataaagggccagatagttaacatttttggctttgtggcctatccagtccctgttgcaactactggactctcctgttgtagcacaaaagcagccacagacaatatgtaaacaaatcaagtggctgtgttccaaccgagctttacaaaaacaggcagcaagccagaattggcccatggccatagtatgccaacccctgtcctagacctgaaaaaggagtacttttagacaagataccccaacaggcttgaaatgaggaaaaggtactagagtatcccataacatgtgcaagccagactcatctggatccagattagacgtctggactctttcagacctttgtgttttcattttccattcattttctaggtaaaatttactactaaaagttctaattgtgctttggctcaaattaagaggaaaagactttt

SEQ ID NO: 39039 - DNA, 3530 bp, Homo sapiens
ttcccctttctctagggcccaaacactctcatcctatcctcatttccaggctcaccgggacacatgagctacatatttcttctggagtcggcgaatagggctgggggctgccttctggagcagttcgacagcaatgtctgcaagggacagaaggaaggccgagtgagcaaacaagcacccacacccaacacaccagtccccactgctagcagaagacccagatctgtattttctgaggccttggggacaggaccatagtaacaaaatagagatcaaattctcacacactgagacaaaaagcccattccaagttcgaatttcagctcattctaacaggaaagcttattgccctgtcacatcaaactatccagatttatctgtcactgctgttcatctgtggcataaacatgccttgtttacttggggaacatatgatggatatccttcgaaaattagcttttcaatatataaatcaagagtgatttgtatagatatatgtggcagcaatgttttttattcatttgggctaaaagaatgggaaatgcaaactgccctcttgaaccaagtaccaacgagctagcaatgaagagacagtgtagccacggggcaaacctcgagccattttctgcctgatgacaatcccattttcatgcttctcacttgtccagtcacacaacactgcctaacctgccaccgggctggagagctcctccaggctacagtcggcttcccagtcccagccatagtagagcctccttcggatccgggcactcagcttctggtgtcctgggaggaactgaaacagggcaggggcagcggagggtgaagggcacggaaaggtatgatgcagatcctggctctgggctggaaggcggggcaggggacaggccggcctcgctgctagggggcccgtgccttacccagacccgcgttctgtaaatcgcttgccaatggcagcctggtccatagagggaggaatgcccccacccccatcgagggttccccgggagaagttctccgagaagggccctcgtgtggccacccctacgcccattcctatactccgcggctctccctcccggcccaagcagccgcggcctcaaggaagcactgctcgagcagctgccgcccagtcccggcacagcagtcaggcgagctcgcagcgccgctcaggccgggaggggcgcgccgggaggccggggagggggcgggacccccactcaccgtgaagtcctggaagccggcgagggagaaggtgccttcttcgtccagcaggagcccggtcaggtccatcgcgccgccagtcgccgccctgcgaaggtgaacggaaggaaacgagttgtagggggctcgcggagctgtccttgcccgcctgtccacctgccagcctgcctccccggggcgggccgccgtcctcgccctcgccctcgcagctccctccccccggcggcggaaggcggggcccgggctgaactgggcgcctcttcctgttccgccccgggcttggcgcggcgcgcgggggccctaggcccgggaagggaggtgtcaagcgtccgtgcgacgctcacctcgcggagcagaaaggagatgcggctgcgaggcgcgtactccgcctgtgccgcgtccgcccggcgtttacaagccgcgggggtgccgcctgcaagtcagcgcctggcacttcctgccgcccatctggcccagcctcccgccccgacccgcgggcaggaaccggactcgaactcctggtctcacggaacgtggccaagccccaggcgcctctgagaaatggggacaattcgtaggggggaccacgccgcactgaggatgaacaagccaggcgtagcaatggagaagttaatgtgaataagacgaaacgcacaacaggaagttgttcccagttgctttttaggagagatattatacatactcagcaatgcatatgaaaagcgtctgaaaggacacacaggaaatttagcagtgggtgaactatgaaaaggaagagaaactcagggtgttttttttttttactgtaatttgaacttttaaacctaaggctactgaggaaattctgtgatcttaagcgaatgtaaggcctcaaaacgtgtcaacacgtccacccaaaagtaaactgcatctacccaaggttttgtgttgaaacccacctcccgcctccgatctcatgcttgagtaggccgaggtgggaagaagctccgatatgtggaagtgggaaagtttaaggagataggaaagaaacaacttttctgagtagatgttgttttcgagtctgtcgagtcaagcgctggtgtgtgtttgtttacccactgaggggagggaactgggaggaccagtgcgttgagggttggttgagtaatgggacggccaccgcccttcccgagcgagcagaagcagaccctaccggggatactgggaatctggaagcccacttcctgccccacacggggataccggggcagcaccacactccctagccgccctgcctactgtgggataagaaaacgggctcgactgcctggacctagacccggactcggaacccggggtacttcgtcaaccagaaaacgaacctgtgtaggcgcagtgtcagcggcagccgccggggcgcatgcgcggcccgccctatccgggggggggggggttaggccgcgtcacgtgacgggctcagcgctccgcagtcacgtgacgctcgtccgcaacctctgctgtcctccgcggcgcccccttccgcctgacgcgcccccggcggcggccgcgcagccctggctcctcgcgggctcgggcggcggctgcggcggggctatggcgagcggcggtggcgggggtaacactggcgcgggtggggggccggggatgggcctgagcctgggcctgggtctgggtctgagcctaggcatgagtgaggccaccagtgaggcagaggaggaggcggccacggccgaggcggtgggacgcctggccacgacgctgtggctgcggctccgcggctgggaggcggtgctggcggcggcgcagcggttgctggtgtgggagaagccgctgcacagcctggtcacggcggccgcgctcaacggcctcttctggtaacggccgcggaggagggggcggggccgggatgagcgggggagggaggggtcgagagcaccattcccctttctgggttatcacttggcctgggggcatgacccatccccagtttttgcaggctgacatccgcttgaattgcccatttttttctatctctgagtcgtgagtcgcgagttaggcctggaggtgccattaccccatcagtaggcgcctttccaccttctgagatggatgcatgagcctgtctcacccactcactgctgaggtgcctgtctctccctaaggttgctgtcttcctcgtccctccggcccttcttcctactcagcgtctcacttttggcctattttctgctggatctctggcagcctcgctttctccctgacgtttcaggtgagtgtttcttcattcagtaagcacccattgggta

SEQ ID NO: 39040 - DNA, 2928 bp, Homo sapiens
ttgcagtgagccgagatcatgccactgcactccagcctgggtgacaagagtgacactgtgtctcaaaaaaaaaaaaattatattggtcaggtgtggtggctcacgtctgtaatcccagcactttgggaggccaaggcaggaggatcacttaaggccaggagttcgagaccaatctgggcaacaaagagagacccctccccaaccccatttctacaaaattaaaaattagctgagcacggtggcttgtgcctgtagtcctggctacattcaataattactaagaatattctaggctagggtttttcagagtgtggtgcatggcaatctgtgtcagaattccttcaggtgcttcctactgaattagaagctccagggcccggaaatccgcattttaaactagctccgtaggcgatttggattcacactaaagactgaggaccacactgttctaggcactgttaggtgctgggacctaacacgaaacaaggtagacgtggttcctgatttcccagtatgctcatataggggttggtcgcattagtgatatgggtgctagaatggaagaagtaagatcacatagcaggtgcgcctagttcagactgaggagggatctgcagctctagagacgtctgtacttcagagaaatacaggagctgtcagctcgtggaggcgaagggcagccgtggccgtgaacaaaatggccaggaggagggcatcgtgtgtgaagcgggctaaggaccgaattgtgaaagaccccaaaccacccagccttccatcccccaagatatccgtctttgccttcgctggccttcctctgcggagctacgcccgcgcccagggtggcggagccgcgcatcaacaccctctcgcctcgggacagtcttccgactcagccttctagagcaaggcgaggcggggcggggctcaaccgaggccctccccggctgcccggagactgcgccggacgcgccagccctgcgggatgacgtcagcgcgccgcgcgcgccgagggaggagcgggcgccgggggccggctggcgcgggggctccggtaacccgggctgggcgggggagaggaaggggcggggcagggagcccgccagagtgcggggtcgcggtgcggacttcgagcacgagccctaaagacgctcagcactcgtcgcttctcctagcagaccctgcccggcttggcgatggagtttccggacctcggcgctcactgttcggagccgagctgtcagcgcttgggtgaggggcggagcgcgcggggggcggggcccagcggacagggactttgaaccgcaggttgggagggaagggtgggctcccaggctggcaatgccggggggcggggcttgaagctgggggggggtggtcagcggcagagggggcgtggccaaggaggtaatgggcttgggaaggggcggtgtgtcgaaaatagggtggcgttttccttcccgagtggaagacttgagtgagagagaaggacatcgaggtcccgctggacctgcaatccgaccaactctttgcagattttctgccgcttaagtgtgatgcctgctcaggcatcttctgcgcagaccatgtggcctacgcccagcatcactgtggatctgcttaccaaaaggtgagggggcgatcctcagggtgaaagcaggcagatggagaatgcgtgcagaatcccccaaatctgtgtctcacgtttcttctcccttttgtccttctgaggctgtcagtgctgggaaacactgtttttttgcgtgtttgtggtgggtcatatccaagttctttcaggaccagagatttgttggactggagtgggccacagactgacccttgctccttgactacaggatatccaggtacctgtgtgccctctctgtaatgtgcctgtgcctgtggccagaggggagccccctgaccgtgctgtgggagagcacattgacagagactgtcgctctgatccagcacagcaaaaacgtaaggtaaacattgtaggggtcagccacaacccagctgggactacggatgcctggaaacccaaacagctaatcagagtctcagcagagacaaccttctcacttcacctcagatcttcaccaataagtgtgaacgcgctggctgccggcagcgagaaatgatgaaactgacctgtgaacgctgtagccgaaacttctgcatcaagcaccggcatccactggaccatgattgctctggggaggggcacccaaccagccgggcagggtaatggcagccaagtcctccacttgcttttgggaagcattcttttggaactgactcaagctctgttgttataaattggggagcttcaaccctaccctgtcggctaggggagtcttttagcttccttttcaagtgcatgtttttccagaactcccctcctgacttcctgggtaaggctagttcttggagacatgccaaaaatctctcttccctacagacttgctgccatctccagagcacaagctgtggcttctacaagcactgtccccagcccaagtcaaaccatgccttcctgtacctctcccagcaggtaggcctgcccgtttccctgctccccctttttccccttcacacctctgacctccacctcttcaatgtctgtcgtagagccacaacccgatctccgtcctggacagcccctccagtgattgctttgcagaatggcctggtgagttgggcagaggttggatggacagaaacaaacacacagagagtgaagtccaaggacgctggtcttctttctccctttgtagagtgaggatgaagctctgcagcgggccctggaaatgtccctggcagaaaccaaaccccaggttccaaggtaccttaccctcttgtgaaagagagcgcaagctgtgggcaagggcttggtctggaggcaggtaggtgggaccactctgacac

SEQ ID NO: 39041 - DNA, 1489 bp, Homo sapiens
tctccaaaaaaaaaaagaaactgaggtgtacctggctcctttccacatcttggtcctcttcatgaacctgcaatgtataggactggggacgaagtccaggggcccagagacccaggacaaacagccctccagagaccacataccgcagcacccacaggctaaactgaacctagaatgaaatataagtggagagagtatcattgaggataaaatttcattgtattactacttataatagggccggggactggtgtcatgaacacattcagcacttacaggcttaaaaaaaaaaaaaaaagcaaaaccacagtgactcagcaaagacacaccccaccagctggctatcagctcccggcaggactcagcccctcccttctccctttgcttagaggcatcctaaagcctggaagcagtgtgactggacatgcagtgctttctcccaagcccggccagcagaggcttcccccttcccacagagtccctcacctgctggcccaagtctgcccttgcccaccaccactgtgggctgttccaagacaccagggccaagttctcagctgcaaacgccacagtccagaggagcaggagaccagggctgtgcctgaacttgatccagatgcccattgccagacgctgccgtgcctggctccgctccacgacaagcagccacaggccacaggcgccggccagactctccagcacggaggccagaagtagatagcttggcagtggggccccccgggcagtgcccacccggccagccaggccggccaggggcagcgccgcctgaagtgtggccagaagcagctgcagcacgtagggagagatgcgagggccggccccccaagacagcgaatcagcaccagcgggccgctcccggcgtctgcagggaagagccagcaccaaggccagagtccccagagccatccgcgtcgagggcacgagcgtgaagaagaagcagggactcaggccatcctgcatccaggccggacccacgggcccttcggcctcgcagtagttgcccacagtcaccatggcaatgcgtggacgccggccgaggctgcgggcactgcgggaccggaggccgggactggtcactcggagaggggcgcggacatccgggtgccttggctcacgtagccgctgggcgccaagctgcgggggtcccgggaagggacgcacgtggaccaggcctcaccgcccactcccctagcgcacgcgccgccgccacgcactcacgcagggcacgtacgccgtctcagcacggccccgctggctctgggcccgggaccctcctgccaactgcaggcccacgggaatgctcggtgttggactcgcaccgcgctccacggctgtagccccgcccacagcccctacccacggctcccattggccaaatgtctccgaggggggagcggggggaatggtgcaggcaacgaatgcaaattagagaagcagagccggcttggtcacgtgcccagggcgggaa

SEQ ID NO: 39042 - DNA, 2292 bp, Homo sapiens
gagtgggcagtggggataaaaaggaacccaaccctcccagccatccacaccccaccaagaggaggccaagcatggggcaggaaggctgcagtggggaagaagcacccttccagcccaggactacgagcacttcctctggctgtgctaaaccgggccactcttccaactccagggtctcaagaagtaacttagggaccccatggagaatgagtgggtacagacctgaggccaggggcgcctctggactatttctccattgccctaccttagcctcagaaatgacatacttctcagggtccacaaaacctcaagagtctttcctgaagaggacctttctggtcaaccccttctcttacttccctagcaccaaagatccagccggtgagcaaaccttctggatgggaaaccttgactgggtcagtgtagacccccgatcctaggtgaatttgtgggttccctaggtcctgtaagccaggcatggtcgaggtggtactcacctgtccgtgcagcccctgggggccgtggatcttggcccagcctggccccggtgggattccctgggctagtgagagccctgcccctcagggaagtcaccactcacagggtcagtgtggaccagggcccgtggagccccggccggctgggcctgggctcaggggttcctgcggatgttgcagggatcgagtcagccttacagctgatagcccgggtgggttggcttgcctccccacacccagccgcggcgaccgtggaccggagtccacctcgccccagggtcgcccggccccaggccaagggctggcagctcccaacagcggacaacctcgcgcgcggccccggcgcccgcgcgcgcccccgtctgcgcgcgccagcaatcaaaacattccggctgcgcgcccccgccccgccggcggcgccccttcctccgttacccgccgcgagctcacttagggctccgcaggcacccctgggcaaggccagacacggggcctgggattccaataaccggtctcacgtcttacctcaggaacagcgacccgggtgattccagaggctccgccggctccgctcggctcggctcggctcggcgcgacccgcggcgctaggccgggtgtctgccactcactgtcacccgcagccaggctggccaataagcacggggggcggagacacaacggccaattctcggcttcagggacgggactaaagtctcgaggcgggtcttggacagtcagcggcccaatagtgtgctctacgtggggcggggctcaggtgcggacgccgccggttgtcctcttcgctgctccgtagtgacggggattgttgtgttgcagaaatccggcaatcgacctgaggacttgcgagccgctcagctcccgggacgtttggtgcgtcttctaagggcgtgggcgagtttacgcgggccagttgttgctggtcgcatgggtaacgaagaaagttcggctaggcaagctcagtgatttttaactctgttggactcgatttgggagccgaatgcctatttcattcttttgtgggctgagactgggggtttgagaaagtggacgggggccaaggtattcatctcacagttggtagcaggatgagagacgagaagtcttgcggtgcaggagaaaccaagtcaggcaggcaggagacgcagcagtaggatctcgtttgcaggagccctgtttcttacacgctttctactccaggagctgctgctaaataatttctgctcagccatgtcgccggctccagatgcagccccggctcctgcgtcgatctccctgtttgacctcagcgcggatgctccggtctttcagggcctgagcctggtgagccacgcgcctggggaggctctggcccgggctccgcgtacttcctgttcaggtatcctggaaggtttcgtgtgaaacgtgacagggctccttacagcgtattgcccgttcagggaacacattcttattggtattcccgagcttaggaggccaattgatttatctttctgcttgattaaattcacttaatctctgggtaatgtccagcacagcccttgttttcaaacaagtctttttgccattgcatgtatctcctcacgttaacaccattcccttcaaaaacactttaaactttgtagagataaaattctcagatgtattccacatttaaccaggccccactcaaattattcctttttgctgaatatgaaacaatttattatttgtttcgtatagctttattttttgagagtctcgctctgtcgcccaggctaaagtgcagtggcacgat

SEQ ID NO: 39043 - DNA, 1887 bp, Homo sapiens
ctcaagaatgggatgtgaagatcagggtaataataattacggtttattgacacgtactgaaggctatgtgtcagatattgtattaaacactgtacatctcatttaatcttcaactccatgaggtagataattatttccattttacagaggaggagaggaaaggacagaaacattaagtagcctgtccaaggtcacacaactacgttaacggagctgtcatttgaactagtcagtctggcctcacagttaagctacttaaccttatgtactattatacctattttacagctaccaaaagtaaggatccgagaggttaagtaacttgcccgaggttacacagctagcatgctattaacactcaatttagaaactggaagtctggttcacaagcctgagctcttaaccactgagactaggggtagtgggatacaggccagagcccagaaggttgtacgggatcaggagaccaggccaccagacccgcccctcactggatccccctccaggctgcagtgtagttggccgctttctgccccagagcgccagaggtatgaagcctcctacctccaacattgggagatggaggtcctgggggcctcgggccgagcccggctttgctcccctttggcgtaggtgcctgcgtcttgacccccaccgaaggccaagtagagaaccctcaccagggtcctgggacccgtccacccctacacctagctagcccggagcctctcagctccgcgtccccacatcctccggatgcccagcggttgctgagataccgcgggccgttacgccggcgcggactgatgatgtcagcactgcttccggtcggtggcgcttctctctggcccgagccaggtcagtccggcagtgcagatggcccatcccgggctctgggctcctagaccggggtgggccctgccaggagtgggcctgagcctcgcacgtcctctgaaactacgctatgctctgcttttgcggcgcgatgggcgtgggagcgggggctgcccaaagatgggctggggttggaggaagtggcccggtagccgctgtgtgtcctgaggccgtaaggcgcctgaccccacccctgaagctggcgacggagcagggcctgttttctctacactatagtgtaggttccagagacctgggcctgagctctccgcattggtacttcatgggtcgtctggattgtgccggacctgtgaccctgccgttgttttctttccagcatgatccgctgggcccccagcgcatctcctggaagagcccactcaccctggacgagctcttcggtagcctcagaccgtccttgaagaggatgactgagacattatgggccacgcgctgtgtgtctgctctcggggaactgtcatcattgacaataagcgctacctcttcatccagaaactgggggaggggtgagtgtttggaagtcagttaactagtcctcaagtttatgatcattgaaggacagcggtgtgcatatgcttggggcacaagggttttatccctatccctgtcctctctcacctgacagaacctagctacacagtatcaagaaggtggattctggagccaggcctgctaaatccacctcgtgtgaccttgataaaccatgtttttttcatcagcttaatggagatgattattatccctcactgatggagttgtgaggattaaatgagataatgtgtataaaatgtctcacccaatgcggggttgacaagtacttgataagtgttggctattatttatttagcatctgtcaagtgcagaggtctctattacgaccataggacctcaaagatttctatatctctgctcctgaggagctcacggtgtaatattcttcagatttctcttagagccacatcttgggaaggt

SEQ ID NO: 39044 - DNA, 2107 bp, Homo sapiens
caaatctgaaaaagcagcatgttgagaagatggccccttgtgccttggaaagaggttcccatccctcattggaatcaccacccattccatccaggacttctcttacacttgggggtagcggggtcaggacaatcatctcagtcctgcatcttttcttctgctttcttccctccaagagcaaaacctgggcaaggggacttactgagtgggggtgggtgggggttgggaaaagggaaactggtgggatatggaacatggctctgagcaggactgttgagctcacatagtgttctgactccaaatctgggagcaggagaatgtgtaaacaagaataaagtggaagcaggttggtgtagatcttagtctcagtgttcctggagtgagagaagaggtgcaaggggcccaaagtcaggttgccatttcaggcgaactgcctgggaaggaggaatggtgcagagtcggcaatggtgtgacttcattctacaggaggttggttagcagtggacagttctagcttgtcttagatcaaaacttaaagctgcttgggctcaagctggcatctgcctgtgtcaagaactagggccccctaaaaacactcaactagttctttccttccttcactcctggggtgagtagcttagtcaaagctgcctagccggtttgctaggcaagggcctctgggtggagacacctgaggaagctttgagacaggtagattacaggtctcccatcctcagcctaggggcgaggggagtggaggtggcagcggcagctgttttggcctgtgtctccctgatcgttcaagctcatacatggttaatgattaatgaggcagtgtggtgtggcagtatccagctgccacttcctgcctactctgctgagtaaacaggggccctgtcttagctgggcttcaaacctgttccctagggaagggctctgttccctgaatcaccagggaggaaaggcaagggcagggttggcatctcctgctcttttgtgatccaagcctcctcccccgaaccatgtctaccccacagtatgacatcagcatggggcctggggctcctgttagcaaagttgaagctttccccagggccctagcaggagtctcccactagctagcacagaggctgaggccagaaagaaatcacaaacagaggggagatgacctgacttttaatggcacagccccagctccagcaaagcagcaagacaggaagctatgcaaagctgctcagaggtgcagtggcacaaacaactctaggagatcgcctgtgttccctcccatcccccaagcttatgacgtggctccatgcccaggaactctgggccagcccagccccactcccaaaccctcataatgcacagaggagcctgggccaagccttgcttccagagttggtaaatgtagaggcagcaggaagaacagggtagcagtctaactttcaaagacagaaaccactggattatactcctacttggaaaggagctgaagactcatccttcaacagtttgtgcctggattttggtcctcatttcctccctatactgagtaaccctaggacttcaatttaaagtccctggggttatgcttcctgggcctggcaagaacccctttgcaggtctcaccttcagcgatggaagggataagggtcatgaacagcaaacagagcagcagcagcatgaaggggaaggcagcagaagctcaagcactcagagggaacaagaaaccgtgcaaggaaactgtttatttcgaaaggattttgcaataaacatagtgaataggctccaggcagctgctttattcttctccctcatcctcgtcctcataggagtcgatgcccacctcctcataatccttctccagggcagccatatcctcacgggcctcggagaactcaccctcctccatgccctcacccacataccagtgcacaaacgccctcttggcatacatcaggtcgaacttgtggtccaggcgggcccaggcctcggcgatggcggtcgtgttgctcagcatgcacacggcacgctgcaccttggccaggtcacccccaggcaccacagtgggaggctggtagttgataccaaccttgaagcctgtggg

SEQ ID NO: 39045 - DNA, 2310 bp, Homo sapiens
gcggtaatgcttgtaagctcagacagcaggggccagcaataaggtttgagggtactggggcgctcactgccttaggctccgtccctgtcagcccgaaattaacccctaaagcactaaagtccggcagggcccgcgcgctcttcccacaccgaaatggcggggtgacggtttccaaatacccagaaaggaagtggaacctgcggtgaggccccagaggtgacccgccttgtcccgggcaggatgggcgccatcctgcagcccagccctacatccgctctccctctggagtctttacagttatttcccagcccaaagcggggattgggtttcggcccccgctcctgggctataaataccaccccctacatgcacctctctcccctccccccaacctggcctcggcccgcgcagtgctcagcgccagctgtctctgcccatccgcgcacccgggcttcggctggagagggccagctcgcttcaggaggccgaaccccgttcccaccaaccctctcagctcagacgcggggtgctgagtcacggggggggggtggttctgtggatagttggaatgcatacacagaggaaagggggatgcggcaccaggtaacctgaccccttccaccttctagcgccaagcacgtgctcggtcagtgctgaggaccagggactggggatgtaagagggcagccaaacccgtcttcttttgcccgcggaaaggacggggcgcgggcccgcgtgactctcatacagagtcgggacacaaatgctcgtaaggcaggagcagagtgccaggaagggttcctctctgttactgaagagtcgcactccaccccaagccccaaccccagccaccgaaggtgaactatacggctcggccaaagtcaccaggagggggttggggagggaggatgcaaaaccctcgcacctcctggagacccggaacgcccggtggaggtccccgagcatgcctggaagaagtgtcccccaaaggagaggggcaattaggggacaggcgcgaccccggccgggccgcactcaccatggtgagtccgggcggtgcgtctcacgttgagtcggggtgacaggtctcagtgagaactgcgctagctgcagtgccgcaccgcccttataggcggggggggggcggggcccgcgttccccgctcgcccactagaggctgggcggcccgcaggccacgcctcccgggagggtaagcggcccccccgaggggcggagcctggcctggtaccctccccaagctgcgcgggggtccctcacctgtcccgctgggattaagagtcgcgattcgggctttaaccattctttcctcgttttgagcagacacgctgggctcccgagggcctccgcggagatgcagggtgctgtggcagggcgagtctcacctgcacctgcgtcctggaggcaccggtcatccaggtgttctgacttaggtcgggagcaggcgaggcggtccttcccaagcggccacagctggccttcacccctgcccttccagccctgcctcccaggagactcgggccggctgtgaggctgtggcgcgtccccggggagcccttgccagctgcctgacgcttcctggtccccggccggggcggcagcctttcgccgacgcctgtgggcggccgaggacccagaactgcacagcctgagccccagattgccaatgccttaggcgctcccgcagagtcgagccccgcagcctgtctgccggggccgaccccggaatctgccgcggctcgccggccgcccgcgggtcagtggcgctgtcatcagcgcagtcactatgatgccctcgctgagggcacctgcccactcccctgctgccagaactgcgggagcgctgaccgggggacctcaggacctggattctcctccaggctaccctgtgtgaccttgagcaagtgacttaacctcactgagtccttgacattttcgtgggtgaaaaggagacagtgatgtcatagtggaaacattgttgtaagctatcaaaatgtctgttgcctctgaagagaaaagaagaaaatcgagattctcatatcttggatgattctgactcttggtctcttctgtctctaacccaagagcaggatctgcaacccgcaccttaatggtctcagcactcagcccctggtctccgcagaagcccttctttctacatttcattccgttctctccaccccatcttttcaagctacttctgctttctctttctctctctctctctctcttttgagtcagtgtcttgctgtgtcacccaggctagagtgcagtggtgcaatctcagctcat

SEQ ID NO: 39046 - DNA, 1487 bp, Homo sapiens
gctttatctttgtactattttcccttgcttccctcaccaatggctcctaatttctttctggacactggtgggtagattatcttgcacttctagattcattcgattccttcaatgttgctcattgagacaggcactgagcaagagtctataatctcaggactgcccgcatcttctgcttcccccaatgattttggcccagcccctacagccgatgcctgttgctcctcagtgccaccagtaaatgcttagatgcaggaggcgaggcaagcagagtagagtccaggaaccttggccctcagccaaagagccactcaaggaaggcaggcaggaaccatgtccaggcatgatatgtttccctctgtgaaggccgttctctgccctttgcccactcagtgtgagtgcatctcagtccacgtggggcaggccggtgtgcagttggcaatgcctgctgggagctctactgcctggaacataggattcagtctgatgggcagatgcccagtgacaagaccatcaggggagggggatgactccttcaacaccttttttagtgaaactggggctgggaaacatgtgccccaggcggtgtttgtggatctggagcccgctgtgatgatcagtcccagccacaaccttgtccctgggtaccacagcaagtcctactccataactgcagagcatggtgtctgtggtatagcttcccaggtgctgcagccaattagaactccacatgtacagaatcactgttactcagctcctgagtctgtaggccactccacatccctttccttattgaaaaacacatccaagcagcacaaacacatccaagcaggtaatagcagcagcctgaatgcagaacctgggacccggtgaccccactcccttcaggtcccctggggctccagcagctggattgcaaagggaggtggggcccaaaactctgcccactgcagatgaactttgaacaggcacataccgccagatcttccatccagagcagctcatcacaggcaaggaagatgctgccaataactatgcctggggccactacaccattgggaaggagttcatcgacctgctactggaccggattcggaagctggtgaggaaaggactgagggctggggcagggggaatgaatctggattcctgttgtgaggtagtctggacaccagattggggaaggacagcttcagcctctgggagaaacacacaggatcaggaccaatgaggagaggccctgcactctgatcggggggccaactgtaggttccagcctggagctggtgtcccctgtatctccgaagtggctggcctgatgctaggcagggtgtccattaaggcaaacatgttgatgggctgcctggccaagctgtggggttccataagcgttcccagaataccaccttgtgttacaaggatgtgggcagaagtccctgtgaaaggcagggattcaaagaatgtcagcccaaagcctctgtgattgg

SEQ ID NO: 39047 - DNA, 3347 bp, Homo sapiens
atgtctttttctctgggggaaaaccatggggggagggcttcttctccatgagagataggaacgctggtgtcttagcctctattccccagaaagcagatctgattttagatttcattatagagtgcaattacagcaaatagaatgggggccaagggaagtaaggcacagaaggaggaaaaattcaccctagagaaaatgcagctgaataaatggcatctcagaaccatccttgggtgagtgggcaggtgagggctgggggtggggtttatgcactggctctattcttccactagttaaacttttgccccatcaagcattaattcccctgcactggtggattgcacacacttgggctgtagagtcatcaggaaaccctgggcgaggaggaggtgctattaagttgcacatatgtgaagtcagtggaaccccacatggagctgcaacaagagcccggtgaggccaggaggatccgaagtgatccttaaagtaatctagtgcccactagcccatcctgcgatctggaggcttgtcttctccaggcaggaggttggggtaatagagagccctgacactggagttggttgaggcagaagagtggtgcagtggctgccacacagggagaatggcttgtaagggtaggaggcttacctcccagtaatctctgtcaacactcaccacttttttttttttttttttgatggagttttgctcttgttgtccaggctggagtgcaatggcacgatctcggctcactgcaacccccgcctcctgggttcaagctattctcctgcctcagcctcccaagtagctgagattacaggcatgcaccaccaggcctggctaattttatgtttttagtcgagacagggtttcaccatgttggtcaggctggtctccaactcctgaccttgggtgatccaccagcctcagcctcccaaagtgctgggattacaggggtgagttaccatgcccagccctgacactcaccactttttgataaagacagttgaccttttaacagtcctgtggcatcatgcacacacagcttcccacccccacttccaaacaaatggcaaattttaaatcctgagactgagtgaggcaggagaatcgcttgagaccaggaggcagaatttgcagtgagctgagatagtgccactgtactccagcctaggtgacagagccagactccatctcaaaaaaataaacataaataaataaaaaaatacaatacaataatatttttgtaaggacaggatctcaccatgttgccctggctggtctcgaactcctgggctcaagtaattctcccaccttggcctcccaaagtgttgagattacaagcatgagccaccatgccttgctaaaagggctgacttttaaatctccatatatttgacttatgcgtctttccatcaactggtttcaaacttgggaagggaaaaggtgttactctgggagcccttcacaccccaagaaatagccatcatttagtgagcatctactatgtgctaggtcctgtatccataagatcttgtttaattctgaggttaatacagttattacacccactggaacagaagctctcagacaggccttggactgtttttcattgttctactctcaacaccccagtgttgcccggcatattagatgattaacacttgttggatgaacttgttcaatgaacacctattttatagatgtggagactgagactcaaagactcgcccaaggtggtaaatggaggagttgggattcaaacccaggttagcctgcaccaaatcatatgttgctcccccacctttttcttaggtgccctcacttcctgctcacagtggttccaggcagccctccagacaccacctcttctcagcctgccaggtcccgagtgcccagacagtgactcaggtgcctcaggggcagggagtgggtgacgcttcacaatgccctgcccaggctctgggaaggagggcatcgatgtagaggggagagtcccagcttctgggtctgaatgggggtagaggcttctttggggccagattttggggctatcagtgccctttggaaaacatcccccaacatctcctaggaggtggtgagggcctgggagaggccaggattgggggtggggagggaggtgagctcttcacctgccaagacggctagggatcgagagaggcagctcgtctcccttcctgtctgctgaaccagccagcccaccctgggcagctatatagccatctccctgaggtcttcctgctagtaatactctgctggcaggccctggcaggcctgggttggactgggtatggctgtggagaggtggcaacccagacctcctgaggcagctaggagcaccacccagcctggctcctggggactccctcagtgcaggggaaatgctttcatccctgatgattctgagccaaagtacaattgcctccttcaggcagacaaaagagacaggtttccaagctcagattctacccaacaaatttattccctgggctctgatgtgtcaggaacacgcctggcttcaaagctgtgttgtcaccattctctccttctggaacgccacctccccctgcttgtctcaatgttgccattccttccagcttaggtcacagccatccagaacctacccagccccagggagctctccctcttctgaattctttcagcacctacctcggtctctatttttcatttggcacttggtgtgggctgccttgtatgatatcacttggcttcttgtcaatgtcttatttccccaactcaatttttaacaattagtatgaatttgaacagttattaggtgcatatgcttcagaattcaaaaagtatcagagagatttaggaacaagaaaaataagtctctttcattttgttcccctcttggcagccaccactgttaatgtttttgttagtgtttccttccagagatgtctacatatatataggttgaatatcccttatcggaaatgcttgggaacagaagtgtttaggatttcagattttttcagattttgaaatattcgcatatacataatgaaatatcttggggctgaaacccaagtctaaatacgaaatttacttatgtttcatatacacctgatacacattgcatgaagggaatgttgtataatgttttaaataatttttttgttttgttttgttttgttttgttttttgagatggagtttcactattgttgcccaggctggagtgcaatagcgtgatcttggcttactgcacctccaccttccaagttcaagtgattctcctgcctcagcctcccaggtagctgggattacacgtgcctaccaccatgccagctaattttt

SEQ ID NO: 39048 - DNA, 3274 bp, Homo sapiens
caagacatacacggtaggtgctagacaaatgtctgttggcacagcagagtaagaagaaaaaggcagagatctggaaaatttggagtgacttaacccaaccactccttcctcttataccaagtctaacccttagtctttgtgtcagtcaggactcttataaacagcagaagctaactggcaaattgtttcaagtcccctgcccccaacaattatagagatatcggatagcacacagaatcaatgcaagggccagcaaacaagggtcagcaatcagacaggcacctagggaagctgggcagccagtaccacagtcaaggttgggcacaggacagcctgtgtaggagactcctgtcccctccaccctccgcagtgatcctcctactctcgtccctcacctgcggcagtagcgctgacacttcctcctccagacactagaggccgctgttggccccatcgcctccaccgccgccgcagaaatgaattcctaaaccagccttgctattccgtgacttgctccagattcaaagtcccagttggagcatccgattggcggagctcatgtcttctgcctgcaaccccagagccgagtcagggagagcaagcattggggctttgtggcaaatggtggcctgctttccattagggcccttgcgatgggaattccccaaatgtaggcaggaggttctgatggtgggcagccaggaaaccaggacactcacaccaccttcttctctcacgtccgcctcaaacccttctcgttggcgaagtattcctgggtcccccagcctaaagcacttttctggactcacataaccattattgcttgagccaatcacgatgccagcaggaccgcagtaacacctaattcgtaccatgtctcatttgactttcaaacaaccctaggcactacctatatttagtgagaaaaaaagagtgctcagagattttcccaagtctcacagtaatgccaggttgtactctgtttccaaagcctcgggtttcccagcgggctacactgatgggctggtatcttatcaagttcaagctctgcaaaggcagggcttgggccacattcttctttatacggcctggcagcatcttgaatgcagaaaaatgctcagctaacgcctttggattggcctggatgggatcaagcaggagccagttctggaaggtttcctaactctccaatgaggcctgaacccagggagcattttgaagtggaataggcctactcaggatcagtttgggaagacttgaacctggggaattccgttgtacggccccctttacctcacctcccccaaatgtgtcaaaactgtcaacaagaggtttgcaggtgttcattatttattcatcccacgggtagttttgaacccctacgactgctctaatagaccagtgagaaaaaacacacaattcctgtcctgtgaaatcgacattctagtgggggaggtgaatggtaataaaaaataatcaaaccaataaatgctaatttgtggctctaacaagcctgatgaaggaaatgccacgagatgctgtaaaaggcagttctgacctactcaggaaagccagggcagcctgctgggggacctggggctggagctgggagctgaagaagggggaggagttagaaccgtggtggggggagggagggaagagtctgagtcctcgaggtgggtgagtaagcatggatcatcgctcatgtttataagaaagtgacagaggaacctgggggccgagcggcttgtttgtgggctgccccagcctccgtgcgagcgcttctcgcttggatggaggcggggccgcagtctcccaggtcccagctggggctgacgtcgtcctggtgtgtgcccaaaatagccggctccgccctcttctcccggcagcccctgcaggcccccacccccccaggggacaggcggagccggccttctccccgtctctagtagtttccgcaccgctgacgcatgcctgcgcgcacagctgggccgggcgcgtcctacgcagcagccgcgagccgggctgcgggtgccagacggttcccggcggggggcaggggcggggcgccgcaggaggccgggactcctggcggaggaggtgcggccgggggcccgggtcaggctgggggccctggatcggactgctggagttggggggccccgatagggctcctgggcctgggcgtcgagatagctcttggccccggcctgcgggggcagataaggctgccggagggagcctagtcaccggccgcaagcagagcccggtgtgctccgcttccaactgggagcgccttccgccacccggggagggggactgctgcagccacagggtggggctcttggttctttccgcctgactccttctcttctgcagccccaaggaggcccgcctgacgactgaccagttgccatggcatcctactacgagatcctagacgtgccgcgaagtgcgtccgctgatgacatcaagaaggcgtaagtgcctccgtatgcaacagaagacctctcaccctccacccgccaccaccatggggcacttcagagtgacacctgtaggtgtctgagggaaccaggtcgttagaaagcactggggtgcttcttccgagtgacacctgcagggaggaaagagacccctggtagagtacaaggagaacgtccagagagtgaagtagttagttcctctgggagctgcactgtgttatgggttgttctccagttgatcttcccctcctcctcctcctcctcctcctttcccctcccctcccccttccccctagatttgggcattctcaggctgcagtgcaaagatgcagtgcaaagaggctctatgaggaggaggggccggtgtccctgtactcttcgaggccacatgtgccccaacctttgcagccccagtccagtgagccctagggaggggctagggaccctggcattgtatccgcttgtacatgtggtcccagcactggtggcggaggagagagggtggaacttgatgaaaatatcacagcagcggcagccctagcagctggggtggactgggacccgggggtgaaaggacagtgataggctaatgggaaaacaggtcgttcggttcctgggtgggaagtgcctgcatttgtcccccgactctctcctctgcacccactttctgcaggtatcggcgcaaggctctccagtggcacccagacaaaaacccagataataaagagtttgctgagaagaaatttaaggaggtggccgaggcatatgaagtgctgtctgacagtaag

SEQ ID NO: 39049 - DNA, 2097 bp, Homo sapiens
gcaccctctcacagcgatggaagctggtgaagggcgcatcagcctccaccctcctcccttgccctggccaccgcttaccatggaaaggagagggactccggttcacgaacttgaggagttccttagccgcagtctgcaccgcctctttgcgggccttaccgttcatggccacctaggggagggggatgctcagacttttacaaggtctgggacccctgacctttcacccaggttccgaggattctcccatccccacccccagaagtgaccactctaaggcacagacctctgcttccgcccgtccccaccgagagacccaaacccagggctgaaactccgttgaaagcttcagcccgccggcccaggatcatgagccaggcccgccccttaatccgaactttagcccgactccctaagtcccgcccccatgtccctgcccagctaggaaatcctgttctgctcccaaactccgggatcccaagcgggccccatactctgaggcggcctgcatcacgtgcgcgtacccagcccggagccaaagccctgtaccccaaggagcaccctgactcctctctcgcacccacctagtctctcgcaggactcccccttccagtcccgggaaagtcgtcaggtcaccctccgcggggctttcggtttcgctttgggtcaggcggccccactgcagcaccgcgctaagcttgggccccggagggcgccggacccggtctgggatcgaaattcaagtggggccgtcgggagccacttacctgcatggccccgcgcgtggggctgtgtccgctcatctggcctccgggctcggcccgcccccaccgcgccgcctgccccgcccctcactagctttgcaggtcccccgcgtgccccttcaggccgcgccgcactcgtaggccttcatcacgcttccccggccgcgccgccccgccccatgtttggcctccccgcccacctctccccgcccctcggcatccgccccgcccacctcggtcagccccgcccctcggcgggcttaccctgtccgctccgcccctcgctgggcaccaccacccgccttgccccgcccttgccccgcccctagcttggccgcaccgcccgccccgccccgcccctcgccaggaagcaccgcccgccctgcccctcgcagggctgcaccgcccgccccgcccctcgtcaagcttcctcgtccgccccgcctctcgccaggctgcaccgccctccccgctttgtcccgcccctcaccaggtttcccccatccgctccggccctcgctgtaccccactactcgccctgcccccgcccttgctccgccccgcccttcgtcaggcctccttgcgctccccgccccttgtcaggccgtgccgcccaccccgccccgctcctcgccaggctgctccacccgccccgccgctcgtcacgcttcctcgtccgccccgcccctcgctaggctgcaccgcccgccccgcttccgccccatccctctccaggccgcgcctccgcctccggcccgccctcgtctccgcccctgcgggggctgctcgttaggccccgccctgcacccccgtcacccacgccgcgcgacccgcagccgccgccagggccctctgctgccgcggaggtgctaggacagccgcggacggcccgcctccccgtgccccgggcctcgaggccaataaaaagctcgcccctccagctcaccgggtccgacgggtacggtacaaagtgctgtctctcgccacagccacctttgtgacaataaaagcaataaggctaatgtccatggggcgctcacggtgagctttagctttatgataaagattggcctgttacctcgtttaatcttcacaactgccccatcaactatgtactcttactgtccccagtttatgcatgaacagagaaagctgagatacggagactagtgatccgtcgaggtaataaacggcacaggtggggtttgaactccatcagtttgattgcagaggcctggaacaaccctacagccttctctcagatcttttctggacctttttctatgcgctttggtaagtgttatgttacacgggaggtccacaagggacacag

SEQ ID NO: 39050 - DNA, 775 bp, Homo sapiens
taatatgtctctagaaaacctggactttttcagaagacttttaggacatacttcttaatctttaaacatgagggttttcaggccctgtggcaggatgccaggggggtctggggtgcactcctaccacccaagggtaatgtctgcccttgcaggcccacctctgagcccccaaggaatgcagcttctgatgcaccccctccaggtggcaggcacaggccctcgccttcctctgggagccaagatggggcatttctggctctcaacctgactagaggtcatttaatcctcgctggatttgtcttgtttattttagtgaacagggctgtttactttcagttcgtatttctagggaagcttactcattttgcttcccgtttatttactccttgcaagcacttaagtttgagtaaatatgtctatgaagttccagggactgggtgattctgtgtctgctattttaatggcctttaaacagtgtctgcccaggtaggcattttatagatgggttgaaaagataggcaattctgttctcagtggcctctgactcctttccaagctgacagctggccaccagcagcttatgaatcatggcttttcatcagtaataaaaatatcaaaggccaacacctatctcaaacagaaaccgacccaccctggtccaccaggcatggggcttggaaactggcaggtgtttaaactctaaggcagtgtttagggtgcgaatcccccggagtgctatttaaaatgcagattcatgagccccatacctgaaact

SEQ ID NO: 39051 - DNA, 1265 bp, Homo sapiens
ctgtaattaccatttcacaggtgaggaaacaggctcagagaggtgaggaaactaacccaagagtgggagatccaggatctgaactctggccatggcctatcagatgcttctcaaattcctccccttgcccacacctctgcagagtccagtggaattgaggtcatgggctgcctatctggcagacgtgagaagacagaaggatgatgggctgggctataagaacatacaatgctgagggcccaaaaaagggtgttgtgtagaacccaacactcatcttcattgtgtacttggatggttcagagaataaagcatccagcacagcggcaagaacagttcagggtgccgtggtggactgggatctggagtggcagagaaggccctggggtctgagtggaccccaagctgaccgtgactcagctggttggaggaagaggaggatgagcctataaggctataaatagaagctgtgcatagtggccctgtgaggtcattgccagcctgctcaggccctgtttaaagcctcacagcctcagagggatgtaggaaacctggaaggggcccaggagggcagggatctgaccaaactggagaggctgaaccaaaaaagcctatgaggcaagatgaaaggaatggggatgaatcaggaagaagagagaatggagtgatggcactgagatcccaacagagaattccaaggaaggggtgcaaccccttttcttcatctaggttgaaatataaaaaagaaagaaggggcccaggtgcagtggctcacgcctgtaatcccagcactttgggaggccgaggcaggtagatcacttgaggtcaggagttccagaccagcctggccaacatggtgaaaccctgtctccactaaaatataaaaattagccgggtgtggtgagggggcacctgtaatcccagctacttgggaggctgaggcaagagaatcgcttgaacctgggaggtggaggttgcagtgagcggagattgcaacattgaactccagcctgggcaacaagagtgaaactttgtctcaggaaaaaaagggaaaaaaaaaaaaagaaaacagacctctttcacccctctctttggggtcagagtagggaggtatgtccaaggatatttcactttaagcaaggataaacccagacccagaacggggaggtgaccagtccaatgtcacacagcttgtctcagagctggtccaggacaggtccccagttcagccatgtgctcccaatgcatccggaagccttccctgaggt

SEQ ID NO: 39052 - DNA, 1630 bp, Homo sapiens
gcggcacggccagggcctggggctggaacctgggtgggactgagcccagaaatctggctggagtgacgggggcggggactgggcagcgaggaacagagctggctaaggagccccgcccagtgcgcccgtgtactgaccacggctccgccctcctccccgccgcccttccgcagggtgttcttcgagatcggcagcaccaccacgacgctgaccattcgccgggccacgcctcaggacagcggcaagtacgaggtgtacgtggagaacagcctgggcatggaccagagcttcgctcgcgtcgacgtggcctgaacggcacccccggaccttccgccctggcgccgagcccgggggtggtgggacccacagccctccaccagcttgcttaataaagctgctctctgaccctccgcgtctgtcctgctcttccgcgtcgccattccctctcccccgcaccagcgcccacacgtattccagacccccacgccaaggtcacagcctgttggagtcacagggaggtctggagagcgcctagcgccgtgctgcatttcagacagtcaaactgataagagttgccctcgccgtccaaggcgccctcacttcccagcggtaccgccggctgggcctgggactccgccttctccgcttttgagcgcctccagccccagccccttgtggctgtttgcccctggccccgccccttccagggctggccacacacccctgctgtccttagtcccgttttcctgtgggacccagttcctcacttcggctgctgccccgaggccgattccccaacagctcgggtcccagtcttaagttccaggctgggcttctcaggccccacccttcttcgcatttaaccccgccccgcgatcccttggtcacacccctggacttcagcacctctttcctctcccataaagttagaaagcgggtaaagggtcagactacaattcccggcagaccctgcgaatgagttctcgcgacttgcgagaagacacgtgcgcggaaggagcttgcagtagcgggcggcagagctggagtgaagggagctagtggtaaagggagctggtggaggggtggcggcaggggtaaggggcaggggacaccctctagacggagagcgggctccgaggtcctggctggccctcggtgcgcccgcccctgtgttggtcccacaatccctggcaatgagaggccagggtttattggacagagtcagttgtggggttcagagggtcagcaatcaatcaatcctccgaatccagagatttagacccagtcgtccgtattaggactggaggggggtcaataggttcagtgtttgagatgccaagggaacctgtcttttgatttggggttcaacatacagaggttagttttaggattcatgtttagcatatagaggatttttgctgggattaggggttcttcaaattcagatcagtgttagttcagtacttggggattacgttcaggatttaagttaaatatctgaggctcactcagggtttgctgtccaatattcagggttcactattggggttcagggcttaatatctagaatgaagacgcaacactttgggaatttgaggcttcagtattttgaggtttgggtctgagaagg

SEQ ID NO: 39053 - DNA, 1611 bp, Homo sapiens
tggcataggggtgtactgagtgtttttgcggggaggggcaaactgcactcaggggctctaggaacttaccttttggtaaggcagaaggtaaattgcagaaccagcatttgaacccaatgttacttagaagttatttcaactcatcagcagagacattaatgagataggtacattcctccctcccccatctcaccctgaggtggcccttgtaacccactcaggaacaagagatccaggtaaatcctagttctctcctttctcttcccctgtctctatacactcaccctatatataagtcatttctctaacaccagcagcccagccagggagctagtaggatctctggggcgccatcgggtcgagccggtttaggacacagtccagtaagttcagcccaggccgggatagggcccagagaaagtctcggactggccccacggctctcgggaaggcagggccatcggaagttatcggggcccaaagacttcctggctcgccagccccttccttccggagcctgacccgggcccgggcgacctccccgcgcgcttcccggccgctgcccagggggtagagcgggcgcagccgatcactacctgacggcctttttggcggcctggccgggctgtgcagggtggtagggcaagacgcgcggctcccaattctccccggcgccttcgccggccccgggcttctcgcgctccgctccgggctgcaccgagttgggccggcgcgccgcgttggtgttgccgcgcggcggcagctcagagtctccaggttggggcgggcctgggccgcacggctcctccacccaggtgacgctgagcaggctcagggtgaagcccagggagatgcccacggccacgggccctgcgggccgcagcaccgacagcagcagcgatgcccgcatggcgcccggaccgcgggtccccggccccggcgaacccccagagcagccagaggagtctccgagggggcgggaccggggagggggcggatccggagggctcgggccccgcgggcgggcccgctccctccccgcagagcagagccagcggcccgagccgaatccccggagccgcgcctcgattcccctccagcagctgctctgggctgcgcagggttcttgcgctcggcactggagcctcagccgcggccgcagctgtccgacgtgtcactgcaagggccccgcccccggggtggggtctcgggctctcgctaccggagagggaggagaagggggaggttaaaggggaaggacccccggaagtgccccctcctcagtgcgggagagggagacgccgggggcggagtcccctgcctcccgcggcgtggttggtgcgtcccatgtgacgtcagaagcagcccgcccctgcctggatggtgcgccctgagtgacgtcaggagcagaggccggagctgtccatcagcaccaaaggccgcgggcgggctcagggcatggggccgcggttctggggcggcccgagccccggctcctgcgccttccccttcctcaggcccagcccgagttcccggacgccgcgggactggagtgccagccggtgttggacgtggagcggcgccgccaccgcgccgacaccattctctccg

SEQ ID NO: 39054 - DNA, 1606 bp, Homo sapiens
ggcctcgtcggggtccgcgggcgggctctcggggggctggtgcacctggagcagcgcccccgcctgcgcgtggccgtgcgcgttgcgggcgtggcacacgtagacgccggaatccggcagccgagccgccaggatgcgcagtgccaggctcgcgccggggccgtcctcggcgcggcccggctggagcgcgaagtggctgctgtcccacacttcgtccagggccatcccgtccttctcccagtacagtgtgggctcggggaggccccccgcccggcacgtcagcaccacctccgccccccgcagcacccactgggatcgaggccccgtgaggaagaccggggcgccctccccggaccccggcgatggcagcgggcgctcggcgggctgcagctcggggtcggaggccggcggctccagcacggtgacggcggccgccgcgtaggcctcgccggccgcgttgcgggcgcggcacacgtagacccccgcgtcggtgggcagtgcggcggtcagcagcaggccgtgctccgcgccgtccgccgggaagctcaggcgttccgaggccgccagctgctgcccgcccttctcccacaccactacaggcggcggctcccccaggaccacgcacttgagctcggcctcggcgccacttaccacccgcacaggccgcgggaagcgcaggaagcacggggggctcccctgatcccccgagctcgccttcatcgcggcggccgaccgcctgcagcggcgaacggtgggggggcaggggggggtgcggagggcgagccgaggcccggggcggcggggtcggggcgcggctggggactgggcgcggggacccgcggagctctcccgggcctcccgctcccggctcgcctccttaccctcggccccgagctgcagctctgcggcggcggcggcggcgattcccgggcccgaagcctggcgctcagggggcagtccttcctgtttgcctctccagcgagtggccccgcagcctcccctgcccgctgcctggcttcctgctcttaggagcctctcttcccagccccctcccacagcttgggcctcttccccctcctccctcccacctccagccgccaggtccccagccgcccgccaggcttgggcctgagtggcagaggcgcctgcagctgccaatcccaaaaatattctctgatgacacagctggaggacaagagcccagactggctccactggtctaagtatagagcaggcaggaccacctgcccccggccctagccccggttctagccccggttccagccctgcccccaagggctggccggccagcagctgcttattgaaaggggccccagaaggtctgaggggtgatgcactttgtctccctgacaaataacactttctggggctggccggctacagctcccaggctcctgtcccacctgatgtcacctctggatgtgtctgtgtgtgtgtgtgtgagagagtgtgtgtgtgtgagaatttgtgtgtgtgtgagtgtgtgtgtgagtgtgtgtgtgagtgtgtgtgtgtgtagggagaaggtgttgtatgtttgcatgtgtgagtcaggtcgcttgaggcgaaatccttcccagcccct

SEQ ID NO: 39055 - DNA, 2241 bp, Homo sapiens
ggctgggagacaggagggcaggaaaaggtcggagagactgtgcctgaggccttccagtctcttttagttcaaaatagtcagcataccaaagcgccgtattttggggtattgtttttctgagctcaacactgctgcttcggatgtatctccacttactttatttaacctaaaaggctttcagctcagagcacaagtagtatgccatgaatgcgaaattgtgtggttcaaatattcaaaatatttgaaatatttgccatttcaaatattttgtcttgagaaaataaaatctttcaaatctggcaacttgggataaagatgactatgatcctatccctcctttcaactggcttaggattcattttgattttcctctgtagaaatggggcgcttcatgaaagaaactctctctgaaaaccaggaattctgttaaaagacctttttgctaatctagttcagtagttgacgttagcatttgacggggagcctggtgaaagctaccatgagaattcggaagcaagaaactggcagtcctggcgctactggttactaattgaacgaccttcgcaagtaacctagcctctgtgaacctgttctcattttcaaacgcggttgaataactacttttcaactaggatgttatgaaaggtaatagggtaaagacaaaggactaggttcgcgtggagcccagtactgctgaaggaaagatacacgagtttggagggagtctaaggaaaaggaggcaaaggaccccggaggttatatcctcggtggcctcagcttttacacgatctaagtccatcctacggcggatacgctctcctttcactggaaaatgactgtttgcgttgaaaaaatttttatctaacaaagctccatttctctaaactttgcttccccgcccagtttgcaaacgagtcagggtttcctcaccggcgcggtaggctcgccgaaagccaagcgggagccccaggctgcgcagggcgggggaataatgggtgcccagctccgggccaggaagcccagggaaccactgcagccaccaccgcggtcaggagacagcccccgcaccgccccttttcgattcgtttgcatgatctacggcgcggtttccggcggcagagacatgttttccggtcgtcccttggctcgattttcttccggggcgggacttcctttccatcattgataggcgccgggcagctgagctggtaggaggaccagacggggaggttcggtatgtctgaccaggacttatgttcctcgaaagggcggccaggaggatgctcttcctctcttttctttctcgcctttttctccgcatgacgcctcggtttgcgcggacgccctgggcttttggcactaccgcccacctgaggctcttccgcttcctctttccccccccaggctccgccccccagcgtcccgtggccatgacgaccgctcagagggactccctgttgtggaagctcgcggggttgctgcgggagtccggtgagtggacttccggttgggctgggcctcggacctcggacgaggtgggggtggtgctttctggagacacgccctgagagtcatggagttacgactggtagggtcaccaggtgtcagagttcaatttctttacttttcccaggtttgttcgcccttacagtgtcctttgcctgtgatagcctaaactctagccgtcctttgaggccaaagggcggtatccctccctccgtgccttctctgacactgtcagaaggaagtgatcattacctgactaaaagcccctcaggaccagggactgatctcggtcataatcattattgtgtagcaaggtactaaatacagtagatagaagcacgagatttggagtcggacccacttgggttggaatatcaaccctctttcaaacttgccatactgtttcctgaggctcagttttcctcacagattggcatagtgattgtacttaacatttgtggggattcgttttaattcatgtatttagtacaatgcctgcaagtatagtaactgcttacagttgggagctattgttattgtaatgatttccctgatgcttggcactgtgcctgggcataatggagccacagtagttgttgaatacttggttggcattagttgtggtagaaaaagccttggctttgagatcagataggagaagtaacttcctaccaattatatgatctccatcaagatttttcacttttttgaacctcaattttcatatctgtaaga

SEQ ID NO: 39056 - DNA, 1283 bp, Homo sapiens
gacctcctgtgtctcccattaacttctttagtttgttattggtttattgtcctgtgctattaactgtatcctcaatgtttatgttttatctttacagcttgattgagagctatttaagggtgattccttcttgggctttcttatgtctcccttttatcaggttctgggagcctcttcccctctttccaacatctctctctctttacagcaggccttgggaaactccctgtcctccaaaagcctctttcccaccattctgcttgaggtttctggctccagtcttgtaactctctgatttctttctgccttttctgcttttgcagagaaattttggttcaatcccttgcttccttctggtttgcagctttgccttcaatgaaatcctttggattccttgtgcttaaaactctggttgcaggccagtcattcctctctctcatttctccatccagtctgactctaggcttttccccaggttcttggccatgggccctggcttgtcttggaggagagtttgcccaaagtgaagcactgagtaaatatttgatacctgatgacacatgctttccatgattctttctcccattaaaagagctgttgttattagttttttaatccgaggaattttatctttatcttgaaaatatatataaatgtttattaggttatttaatttcatctagatcttaggaaagcatggattactaaaattcatatgtggtgtaatattttgccgcctccttgtgaagcatgacttggaaaaagaaatacatagttagttggctgaccctggttgctatcttgggcaaatcatttacctctctgaacttggctcttttctgtaaaatgaaaacagaaacggaggtcatagatatggcatagaagtttggtgaggcccagttgtgttaacatttgtgaaagaatttgtaaacattaaagtttaaagtttatttgttatgcatatataaacattattattcttatatgtgattaaaactgtagccaagcactctaaaagttttcctcctacccaagagatatcaaaatggaatgctgtgttttattacaactggctaaaacaactaaagaactttgaatgtgagtgactcccttacatcagtccttactgaaaactttctttacctacacacaataggacgtgttggaacactcatggacactgcacagctctattggctcgttccacactgtgcagagagcaagtttgacataaccactatcaactcatttgtgaatacaggttgaatatcccaaatgtaaaa

SEQ ID NO: 39057 - DNA, 678 bp, Homo sapiens
taatcacctcccacctcctaataaccatcactttgggtgttaggattaaaacatgaatgttgggggaggaggtgcacacattcagtctccagtacctaagaaatgaatcaacatcacctacttccattagaaccagatggccctgaacactgttaatctatacctgtaagagagccaagtaaagcactatgccactttagtgatgcaattggctcttcattagagcattagtgtgttagaatatgttgacatgaaagagagaattcagatgagaacattccagaccaaaatattgaaattatataatctgaaatagacacttggcctgaattcttctctgagaagtccaaataacagtaattgcagggtcctagagtccatctggactcttagtttttaatgctggctgtaaagcagataaacacatcagagggcagagttaggtgctttctgtgcttcagaaaaataaaagccagttagttgcacaatcgattgacaaggaattatgaaacaccttatgacttagttcagtggaaactgccagaaacctctcgcctaaaattctcatcttaccttgagaggtgaggcaattgcaaagcttttttggataacatgccttaacttttcaaattagtttactgcaaatctgtaaatcaagactatgtttcattcttcact

SEQ ID NO: 39058 - DNA, 794 bp, Homo sapiens
agaccgggactgggaagctgcccggagcggctgctgcgactctccgctccgacctagccggggcagccctccctgccccgggagaagacggcgagcaggaggacccgcagagccccgcccggctgctccggccccgggggcactggcaccatcgggctgtggtcttttcccgatgcccgagccgtggacgcggccacctaagagcggtccggcgaaggcagcgcagccggtgtcccagggaccggtccccaacgccactcggtgcatttccccaggcgctggcaggggcactgattcctagcaatgaggcctcccttccccttcccaggccgcccctcctctgactccctccagagcagggccgagttttcctggggagcctgggtcccggcggccgggcggccgctgggaggtggaggagcctctccagccccggccgcagctcatcgtgagccaaccgcgccacctgccggccagatgcgggagtgtgcggccccggaggaagggcgagcggacaaagaccgcaacccgcaatccgcaaccccgcagagaggtggtgcgtgcgtttgggcgagcttttcagccaccgccaagtctcgtgcactagggctactcctaccgtggggctgcggacagcgctcaagaggtcctggagtctgtcgtgactctcgcctgctggatttcaaaagatggaatcggaaagcgtttcaaggagaaactcctaacaaaccttccgggggttgcctgagtggctgctctcggaaaagcggatcctaaataaagcgggagggtta

SEQ ID NO: 39059 - DNA, 2842 bp, Homo sapiens
tattccataaaattaacttcaggctatgcatataaggtatatgtgaaatataaatcaatttcatgtttagacttggtcccacccccaaaatatctcattatgtatatgcaaatatcccaaaatccaaaatccaagacgcttctggtctcaagcattttggataaggaattattaacctgtaccacatcccattagtgagaatatggtttagaagggcaggtaagaaatataaataagctcattataaaataaagcgattaggcgattagagccaagtacaaagggtaagagtaatacaatacccttgtatttcctttactttcagggacttatggcagaacttacgaagaatatcacatagagaataggtactatctaaaagtacacacttaggaaagattcttaaaagccagctttattttcactgtaacagtaatcttattctgggaagcggtggctgtcattaaaccaattaggcctttgttaacacactgagccctaaaaacaaaaaaaacagctctcacgaaccagttggtccagcctttatacaagctaaaaattatggggtgggggccgggcgcggtggctcacgcctgtaatcccagcattttgggaggccgcggcaggtggatcacgaggtcaggagtttaagaccagcctggccaagatggtgaaacctggtctctctaaaaatacaaaaaaattactcgggcgcgatggcggacgcctgtaatcccagctactcgggaggctgaggcagaaaattgcttgaacagggagacggaggttgctgtcagccgagatcgcgccactgcactccagcctgggagtgcagactccgtctcaaaaaataaaaataaaaaaaaaaatagggtggggcagctgctacggctgtgaggtaactgataactgcatttaatatctccctcctttttttcaatggttgtgtttttagaactgattaaaagatgaaatgtagaatgaagtctacacccatttaatactccccattcaggtctcagatcaaatgttaccaccctatctaaagttgttcttggcacaacaccttttctttccttgatggcatttaacattatccgaaatcattttattaacgtgctggttaattgtctgcctccatcagacagaacgtggacctgacgtgtcgtgtgcacagctctagtcctaagctcttagaacagtgcctgacacataacaggcgctcaggaaacattaataaaacgaagacaggtggaatgccgttctccaccccgctgcacaaatctctcctcctacccccttataaactgagttcccacagcgctgctattgcaattaactggctacgctcgggatgcaaccccgggtttccttcctgttctatcccctggcttggatgtcggtgccaggcacgctgtaggcactcgatggcagatcgctgaatgaatgacacggcaagccgggcacaagcagtggcaccgctgcgatgccggttccgaggctaccacagcccagccggaccgccaccatcatcggccttcccgcgtaaaccccggcctcccggagccaaaaccttcaggaaggcatgaatgtcgccacattgcccttttggagggaggccctgcctccgagaagaggcgtagggcccaacgtatagggccgccactcactgtaggtgcggcccagggcttggaagagcagatcacgcttcacgctgacagtcggcatggtgtgtcgaactcactgcgcctgcgcagcgagctgacccgggcttccctagcgaagcgcgtaggacccgcctcttcttgtgcgtgttgtcttgaatatcgccattctgctggcaacagttcctgttctctttttaacctaaaaacactcatcatgccattacctcgctgattaaatgtatctttatgagactaatagcttaaaagcctgtaagaaagatataatttgatagaactggctaggatttgtcaggcattgtaatgtactgaccctgaagtcccggatgcttccagggcgctaacggccggggacgcccaccaggtgggcggggcgagagtggggcgcgtcagggagggggtggggcctccacgtgggagatcttgcctggaggtggtggaaatgcgagtggagagggttcaaggcttcctgcagagaaaggtgtgcaaatcctggcggcgggagaggggctgttaacagacctcagtttttacttcattctttaatctctcctctactcgtataagtgatatacctgtgctttgtttgaactttacggcagccctataagggaggcattgtaagagacctctttttttgtctatttgctcagtgctctctgctgtcagtgggctgtgctcagccctctgccagcattaaatttcctccttaaaacaaccctgagtgtaataggctgaataacggcccccaataatatcagaccctaatccctgcaacctctaaatgtaactttatatggaaacagcgtctttgcaggttaagttaaggattttgagatgaagattatcctggattcgaaagacgaacactaaatggaatcacagtatcctcatcaaatcataaaagggaggttgagagagacgatttagccacggtggcagagattggagtatggcagccacaacccaaggatgccagcagccaccagaaacaaagagacaagcacacactgggggtgagggggtggaggagcggggagcatcaagaatagctaatagatgctgggcttaatacttaggtgatgggatgatctgggcagcaaaccaccatggcatacatttacctatgtaacaaaccttcacatcctgcacatgta

SEQ ID NO: 39060 - DNA, 2529 bp, Homo sapiens
ttagaatctagccatccatttagcacatcgtaattgaaacccttcagtgtcttgtactgctcttggggttcaaacttgaaccctaactcagtctgcaagggtctggaccttgcccaccatttttgcctgatgtcaccccaatctcacccttgtcccccaagctctcactctttgagctcttcttggagttcagccacaggacctttgcatatgtgcttccctttgcccggatgactcctgggttaactagatttggctacagctcaagtaagggcacttcttcagacacttccctgaccgtgcagcagtcttggttttggaatcttctagtcattcacagtagggtcttacttgtaattatacaccaaattgtgtagttgttttgcttatgtctgtttccccctgtactctgagaacaagacaatgaatagcttgtgtcaggcctctgagccaaagctcagccattataacctctgtgacctgcatgtacacatccaggtggcctgcaggagccaagaagcctggagcagccaaaaaaaacgcaaagaagtaaaacagccagttcctgccttaactgattaaccaacattacaacattttaccattgtgacttgtccctgccctaccttagccgatcaatcgactttgtgacattcttcttctggacaatgagtcttatgatctccccaccctgtaccttgtgaccccttcctctgctaacaatagataaccaccttctactgtaattttccattacctagacaactcctataaagcaaccccttccccatctcccttcgctgactctttttcggactcagctgacttgcacctaagtgaataaacagccttgttgctcacacaatgcctgttggtggtctcttcacacggatgcgcttgacagcttggttatccaagcgcccggatggtgctcagcaagtggcaagtgctcaataaatgtgggttgaatgaatgaatgggtgaaagattcccggagctcctgtagggaactgaggacccaagagtgaggaagccaggtccccttccccatccgcggggaaattggaggttgcggggggacacagatcaataaactaagaaacaagtctcgctcatctctccagctggtgtgcgattcctcaaactaacccttccccaatcaccgagggttcgaatgaaggggtgggatgctgaaggcaagcgctgggtgatcgatcagctgaacaatggtcagatcctggtggagatcccaggtcctcagccaggcggcaggagcccgcgctgcccggctcgggctggctgccagttgacccctctccccgtccctcgtgtcccacgcggcgcactctcgccaacgcccggcgcgccagccaatgcgcccgggccgctgtagctgctccggggccagggcgctgggccagctctggcgcccggcgcttgtgattggctgcccccagcctcagcccagcgcgccctcccacccagggcgcagttgggtccccgctcgctgcctagcctctgccttttcctctccgcccagccagtgcccagcgcggggcccggatccggccgggcacttcccacaggcgccgcagagcagcgtgggtgcaggctgcagtggctggcgccgtcctcgcccggccaggccatgaaggtagagtttgcaccgctcaacatccagctggcgcggcggctgcagacggtggccgtgctgcagtgggtcctgaaatacctgctgctcggtaaggaccccgccccccgggccgcggggcttgggctccatatcctccctcgggacggtccggattccaggacctgcatagaaccttccaaccctcgttcccctgtcggccagagcaggcaggtcaaagagggcatttggagctaacgtggactctggtttcctcacgagaacctcatcgctaacgactgtttaattttattttctcctgcgttacttttttaaattgaggtgcaccttgcctacaataaaaggcgcagttatacggatacagctcgatgacttttggcgactgtatctaccaaaatgtaaccatgaccccatcgaacgcatgagcactttaacccctcaaaagttggcaaactcgtttctcgaactgttgattcatagatggcaaagtaatgcctcagtagttaaaaccttgttccttctccctctttgtctccccaccctcctgacaaagagcagtgttccctttcccgttttggagatttcctggatgcatagcagtacctttctgtaaagaaggctgcaccactcattgcatttggttgagcggtttctctctggaaatagtttgactcagtagcgtgtgtgttccagttggttcccaagttgagcccatgaaacatacacgagccgaatcattagatggggcaaaaacgtgggtggtttttctttttgttttttgttttttccttcatatttgttctgctcttgaagtaaataggggtgatgtgggaggagggaggaatttgggggagacccttctattgaaacataaactc

SEQ ID NO: 39061 - DNA, 1948 bp, Homo sapiens
gaaaattaaggccagagaggctggctgtggtggctcacgccgacctagcactttgagaggctgaggctggtagatcacttggagccagaagtttgaagccagcaaggccaacatagtgaaccctgtctctactaaaaatacaaaaaagttggctgggcgtggtggcacatgcctgtaatctcagctactggggaggctgaggcacaagaattgcttgaatccaggaggcggaggctgcagtgagacgagatcacaccattacagtctagcatggttgacagagcaagactccatttcagaaagaaagagagacagaaagaaaaacaaggaaggaaggaaggaagggaggggaaagaaagagaaagaaagagagagagaaagaaggagggaaggaaggaaggaaggaaaggagggaggaaggaaggaaggagaaagaaagaaaaagaaagaaagaaaaagaaagaaagagaaagaaagagaaagaaagaaaagaaaagagaaagagggagggaagggagggaagggagggaagggaggcaaggaaggggaaagggaaagggaaaggaaattaaggccagagagaaagtcacctgctcagggcacttactggtgagctgggactagacccagcccagccttgtgctttttgtgcaactcccgctcccagttccacctcatcactacattggcctctgctagtccatatttccagccacaattgacagtgagatggttgtttccagttctttgtgttgagttaaacaggacttatgtctactatgtataaatgtgacatccaagctatcaaagaaaaccacatgagcttttcaaggctatgtgtggttaaattcttagcaatttgagaatattaatgttgcagtaaggatgtgtgtatgtgtgtgtgtcctctgtgccccctcagctcccatactgatgtcatttatcacttccttctctgtgacttaacatttgttcatattttgcttagctaaccacctactcttactgacatgaatcagaacctcgtatgtgacatgggatgactcaggataggacaaaggtcgctctactgtgggtcccattcattacctagagcccacctgacctcatgcccaagctaatgaggtcagaggcagcagtttgctgcctcattgaacttcctgtacattttcttttttttgttgttgtttgtttgcttgtttgttttgagacggagtcttgctctgtcccccaggctaaagtgcagtggcgcaatccggtcttactgcaacctctgcctcctgggttctagaggttgtcctgcctcagcctcccgggtagctgggattacaggtgcccgccaccacgtccggctaatttttgtatttttagtagagacggtgtttcgccatgctggtcaggctagtatcgaactcctgacctcaggtgatccacccgcctcagcctcccaaagtgttgggattacaggcgtgagacactgcgcccggccatcctgtacattttcaacccttggcatcagtagcagcatccgaccagcaggtggcgcagcgagtgcaagagccaaagccatgggaatttttgtattttctaaaaatcagagacaagtgagatgttatataaacaccttttaaaatatgtatagaggttgccagatttgtttttaattagtgtatttggaaaaacacaaatgcattctcatttgtagaaaatttatataacacagttagagtgaaatttccccatccctacgtccttaccaaaaaggaacttttatgtttctctctctttccggacttttttccatgcactaaaaacgtataatacttctaggaatataaacattttttccaaaaatggatcatactgtattattttacaaattatttttccacttaatacattttagacatctgtgtgtatttgtgtatgtgtacacatatttatatta

SEQ ID NO: 39062 - DNA, 670 bp, Homo sapiens
ttcattgcttgccttcatttataaaggaaatgcctatgactgtgtgaccatagtcctctctttttatactacagttgaaagagatggaaaagtacatttgctttggagaggctgagagacagaaagaagccctgcagggaatatcacattacctcttccagctgggaaaaagacagctggcccaagatgggatttcagccctgttgttaaataagcaaacaatctaatcatgccatagaataataataaaatgaaagtggagagacaaatccaggtcaactccccacattcagcagctgcagatacagaggcccagggaggctgggccagttgaggtcactgaactccactacaggggtagccgatatctctaagtggtagagttgggacacagcttcacagataattagttcagggctctcaaactgctaagtacattagaatcacctggagagtgttaaaatccccatgcccaaaaccgtcctccagaccagtgaagtcatcagtggttggaaagtttcccaggtgattccaaattgcagccaagtttgagaaccactgatctaggtcactccccttgtttctgcagatactgggacctaaagaagatgagagaattttgctcaagttcctagagctagtaagtgtctgagcggggacaaaccttttc

SEQ ID NO: 39063 - DNA, 1145 bp, Homo sapiens
ccattttcaaggcaccttcattaaagattaaaaggcaaccttgcctgtcccaaattttaccacacttccccccaaatgtcaccttgtccagagggaaagggaaatacgtgattggaaaatctgctatcatatgcaaactttacctggacatgccccacttcttcaaataaagttccactgtgcaaactattctacggccctatatcctgctgtactcattgttactagaataaatatttgcagtataagcagaactttgttctgaggataaatccacaggatacttagcactctgacaaatgaaaagccagtttttagctgccctttgtttgatacaaactggatgttgtgttttcttttctgggttatgtataacgtacaaattctaggcaatctttgacaagaacttataataacaaactgccttttgacaatgactctagagagccttcctgtctccagaaaatatccctctgtggctccaaaggtctcagtctcagggtgatgtcctggctacttttcttttgcaccataaatgaaatgacagtgaagacatcaacctcgccatgttggaaaactgcctaagatgtttcttggaactgtggccagtcccaggaacagaaaggcatgatgttcacagctaaaacttcctcacagcggcctgctgtacctcctcatgcctgagaattgctctgaggaaggactcatttaccacatttgcactgcagaagtcaacacccagcgatcaaaggacatcctggaaaagtcagtatagatcctgaaccaaaaacctcagaagtgattccaggctgctgcccaagagctgacatgcatacatttgttcatcactcaacaaatatttattgagtgctatctctgttgtaaacactgtactggatgtgaatgtccagctgcagaagaaacagacccaagcctccgggagctgactgttcccaggagggggcccttggctctttgcagtgagttgtcatcctgggcactgacaggcagtggtgtgagcctgctgagccagagagacgatgagctgctcccacaatacccaataatcaggccccagggtgcctcctctgctgtacctaaaacacttcagatgaactgcagcttttcaaatctgctcttcatgt

SEQ ID NO: 39064 - DNA, 718 bp, Homo sapiens
ctgggaaccgctcccagaatccccgcttttctcttctcttttcttttcctgcactctacttccttttcctgtcctgtcaatagtatctcctgtacgttgctaattcagtccctcttctccaccctcactgtgctttagttaattcctttttatcaaaacttacccagaccactacaggagactgtgtttctctccctatctccagtcttagtcttctgcaattttttttctctaaggaatgcttaaacaaacaaacgagattacatttggtcatacttttcttctacctaaaagtgactaatgctcaaggtaaatttcacaagataaatttcaaacatccaggcttgacatggctgacaagtttattcatgttcttcatcacatgttctcgggccactttcctacacacaacttgagctgtagtcatcctggccgactcgtaattctaaaaatatgccattgcccatcttgcctatgtgcttctacacaaattgttctctctacttggaatgtctacccactcccttgtcctctacctctctgcccaacttttatgcatcctcagggacttagctcaaacatcatttcttagaggtatgttctgacaactgagctgatctggaagcttgttctttgtaactctcccaattattagcctgtgcagaactctactccttatcacatggattttcttgtatggtgccttcattaggctaat

SEQ ID NO: 39065 - DNA, 474 bp, Homo sapiens
gattatctgtctgaaagaaaacactgctttatgtttctcttttgctgtattcactcagaaacctgagcttgcatgacctagtgcaggaagaaaaggaagctctagaaatatgattcctgctttacagagacaggatgatagaatatctgcaaaacacatacaggaactagcataatgtcttgctaaatgtttgttcagtaaagacattaaccccaatttcacaatagtaacgagctacctttctaagagtcaatgaatttccttttaacattctttcattttcctgtttgtatatatcaggaagtttgagttatgaatgacctcaaactagcttaagtaaatgcaagcacacacatacctttccacagagtatactgaatcatgttacgggaaagaatacgggtaggtgttgacctcaagaagtactagatttggggatccacatacccatctctttgctgggctccactctct

SEQ ID NO: 39066 - DNA, 3292 bp, Homo sapiens
ctagaagtactacttctaaagcctgcttctctctgcagagctgcgaatgtcttttcagataagaaattctgcattccatttatcttcaggatgtatcctttgataagatttcaacagattaatgagcaactgaactgccatattttgaagtgggagaacagtttgcctgagtcaggtatccatccctttaggttctcgattggcccttggcccacggtgagtgagctctctttgcttggtgcatcatcgctccacctagttcaagttctggcggcttcctgattttgattctcttgggaaatgaggcctgctttagcctgaggctggctcaggaaggcaacctttcacctacttaaggaaaagttcacaggcaaactaaacaatatgttgggttaaaaaaagagaccaatcctactagtactgggtgagtgaaaatcttctctcttacagtacatgtagttctactacctgcactggatgctttctttcttatccttgtttagtgtctaaaacgagaaacaatggcaaactccttaaaatacagaaccactgtggattcctaagaacgttcaaaaacaataatttggagtaaactttattttttgaaaagaaatagcaaatttgcatggtgagtgcatttagaggaaaacgggttatatgctaggtcaagtgaggccaaaacaagagaaatgataatggataagctttgagtttttgaggctcttcttgccccaggcagttccaaaagccattttatttggcaggatttgacagcaatttctgcaagaacgggataactaatccagttaaaaacgaaaaagaatatgcatactatttcataatttatattgaaatttatacattacagcaataattgtgcgactgtaatttttttttttttttttttggtggaggggtgttttttcctggagggacggagctcctgcagaccctattgggctagccgctcctcccacgtcgctgccgcagatccccgctcccctcccccacccgcggtccgtccctcctggtcgaccccgttcccgcccccgccccgcgcagactgcagccaggtccggtccgcggcggctccgcggaatgacccgtagtaacctcgccccgccccgggccgccagcgccgcgctccccggcccgaattcgataggcccagccccgcacgcgccaccgctcgcgggccaatgggtggcagcctctctgcataggcaacgagtgccggccgggggtgagcgtcccaggcggttccgctcaacagacgctgctgtggctgcgccgggctgcgacactgcagttgtctacgcggccggggccgggacgaggaggcgttggacggggtcgcatacgttcgtcccctcgcattgcggccccgacagctgcgccaggatccccgggcggcggcgcggggcgtgaacgctctggggctcagccaggcctgcgcgggcccgaggccggaggaacccggactccggcgtagcggtgagtgcggcgccggttgtgggagcggcgggagccggttggcggcgcggcctccgcgtgcggttcggctgggcccgaggggctccccagcctcggggcctgggaccctgtcgtcggcgccgcacctgaccgctgggtgtgcgcgcgggcggcccgcggcaccaggagcagcggcgagcagggtgggaggcggcccgctggggtccgggaagcggctgacgtggggcctcggccctgagcccacgcgagccgggagctgcagcgcgaacggcgtggggcggcgctgaccaggcagggaggatgcactgcgtgcctcccggcgctgtggggcggggtggggaggccacccccttgaattaagagggctctgccgcggccccagcagtgcggtgtccgtggaaggagactcagccctgcgatttcggaaaacccttgtttggcggggcgggaggggctgttgctgcgtggggtgagaagaaactaggtgcgtgaggtgggtcgaccttggtgattggttctgggcactatcgtggtggtgggactgggattaagactgtcgtttggggtttgagagttgcagctttgcttttccccaagtgcgttttaatcatatactgttgataggttgggtaactcggggactgcttactaccagcagtcctgtggggtaggtgttatcaggctcgtttcacagatgaggagcccgaggcacaggttttcaaatggttttcgcaggaagtctgatactagaaagtgtgctctaagctgctgtataaaagatccctcgaaaatgaaaaggctggaggaatgtctttaaaattatatggaagctagaaaggcagtaggctttgtgaacgaaattatagctgaaaagaatgacaaatagctgacatttattgagcttttattacatgccacgcactgtttggagagctttatgtacagtgtcttcacactgttaacagtcctctggggtgggggttattcccattttacagcgggagaaactgcagattggacgacttagcttgcctcagatctcagctagtaagaagctgggattcagacaggcctgtgtaaatccagagctctgaaatctaagcactatattttgctgcctctccttggtggctggctgaatagtttccacagtggattttagtctgggtggccaggagagttgtagtttgatgataccttctttcatgtttatcaacctattttgtttccccaaattagttctgagagttaagggtgctgatgagttgctcctgaaagtgtattagaagggtattataggggacaggtggtgtgacatgggaatcttttgcacagacttgattttgttttctggcatttttctgggcagttcctcacacttggggatgagtaagccttctaattgtcgcatgcgttttctctctagacttttcctggtttctcttttgtataaaaatattggttttgtaggatgacattgggtgtggggcagagtggtccattggacctaagggtcaaggtgacaagtcacctcgtatctttggatctcagttactgaatttgtaaggctttagactcagtgacttaaagcttaaatattctgagggtctaaaatgttctccttgaaggaagaaaggaagaatgggagaaatgaagaacgcacaaattataaggggaaaatcatcctctgtctggtttggggtgagaatcagatcttaaagcctcgaggtctgtttcatttgcttttgtgtttccctgctgtttggttccagttaagtgactgtttcattcctcattt

SEQ ID NO: 39067 - DNA, 795 bp, Homo sapiens
gagtgggagaaagaggtgctaagtgattactaggtttcagacctatgcaactaaagaggtatgtgtgctattcactgagctggggcttaactggtagagaactaggttctggatatgggaagggcatgactttagttttggaagtgttcagctggagctgcctttgaggcctttattgaggtactggttttgtgctgagaattggggtggccatttaccgttttgaagacctccatgtagaggcaagagctcaaaccatgggtatgggtgagattgcctgtggggaggctatagaataagaagagaaggaggcctgggatggagctgggcagaggaggttgagcttgtcaaggagacaagagtggccaggaaggtcagaggacagccagaaacagatgttcctgcaaggcgatgagtcagtactgtggaatgctcctatgagagaagaattgagaaccatcattgaatttagcaacatggaggtcactggtgacctttgaaagagatgctgatctgcaggtaggggtgggatggggagcagtgggaggtgaggaaaacggagacagaaactgtttccaataggtttgatttcagcatgtttaaatgctgatgggaaggctcagtggagagggagtggttgaatatagactagaaaagggtttgtgcagagttcctaaaaggatggggttgggatgggacccaaagtacaactgaggcctgtgtctttgctgggaggaggggacaccttccacagtaacagaatacaggcctgtaacctatggagtactaagcaaa

SEQ ID NO: 39068 - DNA, 482 bp, Homo sapiens
caccattctttcattctggaaatgtagactttaattttcagagcccttactctatacatcctacctgacaggtcctactaattttacctcagagaagcctgtacagttggtcctgtttcttctgtgtctactgccttaaattctgcacttcatcacttgggctgtggtaataaccacatacctggaatccctttcggtttattttctgtgttgacccaagtaatcattcttaaaaaaaacaacaacacacatttaggactgggaacagtgactcacacctgtaatttcgacactttgggaggccaaggcgggtggatcacctgaggtcaggagttcaagactatcctggtcaacatgggtgaaaccctgtctctacaaaaaataccaaaattagccgggcatggtggcgggcgcttgtaatcccagctacgtgggaggctgaggcaggagaattgctggaacccaggaggtggagattgcag

SEQ ID NO: 39069 - DNA, 582 bp, Homo sapiens
tgctaagggaaagacactctgggagaagccaaaccgcaaggagccttcagttctctccttactgggccaggaggaggaattttttttttttaactgaaaaagggaattaccagcttaaaacacaaccaagaagcctttagcattgaggactggtgaggagaggaggtattcattttggtgtggggaggagacatcagtaagcttttctttctcgtgtacacacacacacacacacacacacacacacacacgctgggacgtaaaagacgtttcagtaggtgtcattcccaagctgtccacaagatggtgcagaaaccctgctcacagtctgtcctccaaaggcaccacctctggagtgatttgcagcctctgcaggctgctggtaaattgaggtttggagagcagcatgaagctttcaccgcggtgaagatacctttgacattttcgggattctgattgtaaattcaattaaaaatcgattgggttccagtaaacaaaatgaaatgacaaatgtgtacaaaagctccttgtgcagggcttagcctggaagagagatggaggtcatataggaaggcgtggaag

SEQ ID NO: 39070 - DNA, 480 bp, Homo sapiens
gactaatacaactgcagaagacaattaggcacgaagtgtctttctgcaagccagaaaccctgggaggtgaggcaagaggctgtggagtgtgactctggggataacagttgggggtgatgatgaaagaggcaaagctaggtcttctgtgccagggaacttgtgcaataggaaaacctcatggctcggtgcctccaaattgactcatgtgcatgcctctgagaaccagcacttcccctgctgcaccaagggtaacagaaaaggtcaaactgaccagaagagcaatggccatcaacaatagtgcaatcacatgggcagttaaggaaaataaagtggtgctctctttacttctatctcattttccatctctccaactccccagagaagttaatactagaaagggtggtacaggtgcctttagaaagtcatccaaattctatccctactcagaacttttagcctcaagtaagacaaagctgtgtt

SEQ ID NO: 39071 - DNA, 472 bp, Homo sapiens
cagcaggttgctattcagttatcctatcgacataagcttgccaaacagtctttttcttctcagctaggaattaaaagaagagcatgcaatttggaactttccaataaatcaaagagaaaagcagccttacctctttttgtttatatggcagaggagctccacagcatattcctccccgttctccgggcgagcttctcgggccgtttcagcacacggacagctcctctgcttatagggagccgctgcgcctgactccgcactgccacactgacgtcaccgggttcagccacaaaccccagcacaagcgaggtttttcaaagaaccaagagaaaataatcactttatatttaaaaaaaaaaaaaaagaaagaaagaaaagaaaagaaaaaaaagttgcatgcttacgccacctgtctttttgtggcaaaaattgcagttttcctttttcttttatcaaaatctttgagacggaa

SEQ ID NO: 39072 - DNA, 449 bp, Homo sapiens
gcctggtactggatgcagctgcttttgtgagcaagccagcaggttctctgccatgaaaatagaaatttaatcacttgtccatccaagcatttcccttcagcttttccaggatgcttttttgtgaatgactaacagaatagctgctgcaaagacagcctgcaaattccagccggaggccctgggaggaaagatgactcacccacgcctgacgtcaaagcctccctttctttcagaggagtaggaagagaatggcaatggcctgggtagaatgacctaaatgccctcctgagtcctgtgtgggtcctgcttcctcttcccccacctggcaatgatgatttcaaaccaaagaaagtttaaactgtcaaacttgaacttcactgtcaagttaactaaaaaactagaaacagaagccttccttcctgtcaaacaatgtcaaatccttattatga

SEQ ID NO: 39073 - DNA, 1400 bp, Homo sapiens
tggcagttcagaaaagtggaatctgaggccaagtctaaggggtcaaatttcaggcaaaaatgcttgagcaacatggaactgagaaaagaaggcaagcagggagtctggcgttggaggccagagagcagaggtgggaaaccagaatcccaaatgtagaaacagcacaacaaaagagaagagggagaatggaaaggatggttgaacagaggccaataaaaaaggaaggaagttcaatcttagttcaaagcaaatattgtgactgtgggaacgtggccctcttcctcctatccttggcgtgttctatctgggctaggggcagggcctgaagaggcaagttctgattagataattgagatgtttgcatggacttgccaactggacagaaatgggttcgtgccaggggtatctcttttggagcaccaaacatgtggaggccccagggagaggctaggggaggtaggatccaagcaggaatgctcagaggccattgaaggaccccaaagatgaataacttgtttctcactgttgcgtgaggttagccctgcttggcctgaagctctaacctcttactgtaggtcacgtgttcatagaggagccctgtgcaggaccctcagtacctctaaggacacctaggactttgaagttcccgaaagacacacccacatctctgtcttgccctcctcctcatgttcaaacttccattcctccattttgagcatcttcttggccaatctaaaaacacacaaaaatcaattttaaaaacatcatgagccaggaatttggcctttactcagatgtttctttggcaaagttcctcaacatgtttgtcatcaaccaactcaccactttcctgaaccagttttttctgtgactgcagagtgtatgcttcagaagaatgtctgctatcactgcatcagctcaattccactcaatcaagtgctcatcactggatctggctgacgtgtgttgaaaattctctaattgtcaggcattgaaccaagctctgacatgctttacttaatttatttaattcccacatccccacaacaaacttaaaaagaaaggaggaggtaattttttttccagtttcactgatgagaaaactgtgaagttgggaaaaacccaagttcccacagagagtaagtgcctgagctgggattctaacccagatccaagtgcacaaccttacacaggatgttaaataagaaatcctagtccagttccaatgctgaactgggaatctggaggtgcgggttccggttccaactctacaatttgctttccagtggcaaagtcactcactgggcccctttctcccttaaaacagaggcatggggttatgagatgcatactgaaagccctttcagtgacagactagtctatgtctgtagattgtaaca

SEQ ID NO: 39074 - DNA, 2251 bp, Homo sapiens
gggcagatcacctgaggccagcctggccaacatgacaaaaccccatctcgatgaaaaatacaaaaattacccgagtgtggtggcatgcacctgtattcccagctactcgggaagctgaggcaggagaattgcttgaaccgggaggcggaggttgaagtgagccaagattgcaccactgcactccagcctgggtgacagagtgagactccgtctcaaaaacaaaaaaaaaaaagagagagagagagagattgaaatgctaaagcaaagttgccaagatatcactgttgacttaagataaacacgtttgctaaaatgatcaggaggaccacatccaggtacgtgtattagagaattctgaattacgtctgtataacatatgtatcgttacctatattgtgcagagcatctttattatacatattgtcaagacaaaaaagataaacagaccaaaattcttaagaatttctttacttctctacaaggttcacaggaaaaaatgtatagtttctgccatatgttttcaaaggcttcctcccaaagtatacaaattatgtttctttttaacttttaagttcagagatacatgtgcaggtttgttatagaggtaaacgtgtatcatggggatttgttatacagatgatttcatcatccaggtattaagcctaggacccatgagtcatttttcctgatcctctccctcctcccaccctccaccctctgaaaggctccagtgtgtgttgttcccttctatgtgtccgtgtgttctcatcatttagctcccacttttaagtgagaacatgtggcatttggttttctgtccctgcactagtttgctcagaatgatggcctccagctccatccacgtccctgcaaaggacatgatctcattcttttcatactgtccatcagttactaagtttgctaacatgccccaaagccataatattttttttcagcatttaaaaaaaaatgtttgaacagactcacaattacaggtagagttcaaagttaacagtgatgttccaggttctataccatgcaagacagatgggctttctcttgcacactctcctactttaaacatatatatttgtgtcacaccagggccccaagttgaatcaataagaaagctcgagaggacaaaaaatcacctgcctctttcgtttgagtcacgatctgctcatttagcaatccaagttcaacttgttcttaagcttaaactccagggtatatgattcatgtgaacctgccaggaaatacgctgactgacatgggctgaagataccaaggctactggccgagcaagattgctcaggagatactagggctagaaatctgcccttaccttcaaaagaggttttctaactggttttcaccaactctatctagaattccagagttctgccagaaaacatttgtattcagtcatccacatttactcaacaaagctctcacctcctaagtgggcattggccaagacagccccatacccatctacccctctacagatgctgcccgtggggtcttttaacttagcagagggatcatacaggccattgggccatgctggttttatggaatctagagtttacaccatttacatgggaatacaaagttacaaatacaaaatcaggtataaagtgtacttagaatgagaaaagaaacgaccacagattgtgaattttgaagatgacaaatatcacaaaataaaaaatggttgcatgttattttcacgaattaattgcttgacactcctctatcatatattatattgtatggctacgtactttttgcagttaaaatatcttatttttgcaaagtggacaaaaacccatgaccagatgagagcattgctaggccctgcctgtagcctcgggaggggcctggagttgacactttcctgtctttgtggttcagtggcctctagtcattggcactgctcacatcaccagatgactcagtctgctaaacaccacactggctgccctgtctgagccgagccaggctggttactcaagctatgtaaaccaataaggtaaaagttggcattttcttgagcttgccactttaaaggtttggggcagacttttagagctggcagaaccttagttgctcttaccttctcaagacaggagctggagtctgtatcttgggtcctcttctggatacatctagctctgctgtgtttcttatgcatatagcacagtgtatgttatgacttcctactgcattgtggtttggcctagctgtt

SEQ ID NO: 39075 - DNA, 984 bp, Homo sapiens
agacattgcagatgtaacttgttaagatgaggtcatactagagtagggtgggcccctagttcattgtcactggtggactcatataaaagggaaattcgggcctagacacacacacacacacacacacacacacacacacacacacacaaacaccacatgaaggtgaaggcagagattggggtaatgcaactgaagcaaaggtgcaccaaagactgcccttaaaccaccgcaagccaggagaaaggcaagcaacccattctctcttgagagttcctagaagaaaccattcttgccaggcttctagcctccagaactatgagatgataaatgtcagtgtttaggccacccagctcatggtacttccttatggcagcttagcaaagcaatccaccatatatctctggctttgaattttatgccttttatttttaatctcaaaaatcatcactgttgttttctatctcattacaattccatattataaaaccagatcatctacattccaaagataaagtcagcagattccattcaacttagcaaatatttatttagtagctaccacagtgaggtatttaaaatgaaataataactcattcctagactcacaaaattctagcattagaaaggacaataaagctgattaggtacaacacttctcatcctaaaactgaagaaatcttctcatgaacctaggtgaaaaaaatcttcaacaaaatattagcaattcaaatccaataatatataaatagaattacacactacaagcaagtgggatttatcccagaatgcaaagccagatcagcattcaaaaatcaattaatgtatggccaggtgtggtggctcacacctgtaatcccagcacttcccgaagtggggcaaggagggcggatcacttgaggtcaggagttcgagaccagcctgatcaatgtggcaaaaccccatctctactataaatacgaaaattagccaggcatggtggcacac

SEQ ID NO: 39076 - DNA, 1095 bp, Homo sapiens
atgacaaggggttggcctttctgcttctcaggcatcacctaattctgaaatcaaatgtacttgaaaggtaacatttagaccattcctggccctccaggacaaagtaatcagggatttgaacatggggctagttttccaaagaccctaacaaacttcacaaacgaaattctcactggtcacatgaacatccactatttacaaaacattctcatttcaaatatagaaactacttagttacacttcaatcaaaatgaggtttgcacattaaactaaaaaatatgacaggcgttctaagactatacaggagatttcaggctgacaataagaactaagactcaatgtttatttatttttctttaatttgaaacagggtcttactctgtcacccaggctggtgtacaatggcacgatcacagctcactgcagcctcaacctcctgggctcaggagatcctcctgccttagcctcccaagtagctgggaccacaggtacacactatcactccgggctaattcttttatctgtagaaaggggtgtctcactatgttgccaggctggtcttgaactcctgggctcaagcaattttcctgccttggcctcccaaagtgctgggattataggcatgagccagtgcacctggccccaatctttattttaaataaatgtgatttagtatttgacttagactttcgattgattttaccaatagggtgacagagttagcaaaacaataccactgattctgaaaataaatgtcaatgtgccataaaccatgttggaaaaatctttgagtactttttggcatcaaaccaagaacacagtcatcagttctccttgcttggtaaattttagtcatgggctgtagtctatgacacatctttgagaggcagactttgaaggagctaatgctggcagaaaccaaccagggttgattttggatgcaatccaaggaaagcagaaagatcaggttaattaattccagtcagccctaagtaatgattctttagggtctgacccaactctcaaaacaaaaatcactttccctcccaagtttacgagccaccttcaaattcctgaggactgcggtactaacca

SEQ ID NO: 39077 - DNA, 1316 bp, Homo sapiens
tctctctaatccacctgtagcgcccctccaggacctccagcagctagaatgtcatgtccttgaagaggctttgccaaatcaaaagttgccactccacccggttgtatttgagactttacagcgcttcttactttagaagttctcttcattttacttgtatattggacgtgtccctccctccgcatccccctcctggaaggtaagcttcctggagaacaggggctcctcctggtcccccgcgacatccccagcgcccagcaccgagcccggcacagactaagcactcggctaaggcggatcgaatgaatgaatggagccgcggcgccgcggcgccgcgttgccgcaggaatcccgggcaagcgatcctggcgcgtccgcaccgtctggggcagcggggccacagggacgcacggttcgggtggccaggcgggactcggcccgcacccccacccggccgcgcgcccggcccggacgccccaggtgcctccccggagcgcgagcgcccccaccgcctacccgggccggcggttcccccgcactcaccatcgtggctgggccgccgcctcccccgccttgcgagcaaggagcgctggagaagcgagggcgagaggcgagcgctggagccggtgcggctgacaggtgaggcgcccggcttagaccatggctgcttcccacaatgccctggcactgaaagtgtgcagactcctcccagcgcggctgcctcctccctgcacgctcctccccgctgcctcctccccgcgccctcctccccgctccccccgctcctcgccctcctgctctccttctttcttcctttcccctttctcctcccttctcctcctcctcctcctcttccctcctttctgcctctcctctgtaccccctccccgcccccgcctcggctgcagctgttcccgccccgagccggccgcacctggagcgaatgcacctgcgcgcgcgggcgtctgtaccccgacagcccgcagctcggcgcgggtggtcaggcgagagcgcgtggcccgctaggaactccctgcgcggggaactccctgcgcggagaacaccggggacttttcgcgattctgccgcgcgagtgtgtcctgtattccttccgcaaacgtttatcaaacctggcaaagatacttccgatacactcgcagaaagtgccgggggctgccttatcctaagcctcctagggagggagcagttggaagagaaagaactagaagcgttttcttatccccttctgcccccatttcactttttaaaaagtaagctctgcagtctaagggcaaagatcattttaagcaggcccc

SEQ ID NO: 39078 - DNA, 482 bp, Homo sapiens
aaaattaggcaatcaagtactttactttctaatttctgtccttatgatattatgccaccttaagaatgtagttacatgttggctttttctgatgtgggtctaaaaacagtgttaaattggtaataggtcctggctggtcatcttacctttaagtcaaacattctgcccctttgacctagagttgttaggcgtgggtgaagcaatcaattgccaggaattctttcagcacggaggttttctctgcaaactcatcctccttttatcttttttcttaaaacacattcttgtccttgacacttgtttcctctttcctaacatattttagaaagcactgagatagttccaggtcctctgtgtaggttattatccctcttttatcagaaaggaaaacagactcagaatgagtaagtaacttgttaagatcatctcactagcaaagcactggcattcaaatttgggttatcttggctctcaagcccatg

SEQ ID NO: 39079 - DNA, 2248 bp, Homo sapiens
cagtggagacctcctgtgttcattttgagtaatagctaccagtaagagcctttccccaccctctgacctagagaaaatagaaggcattatgtgggaaaatgttctttatgaaccagggttatgaatgaagttcttagaaacttcattaattcattctgtaagtatattttgttgatgcctttccaaacatttctattttttttttttttttttgagacagagtctcactccgccccgcctctactaaaaatacaaaatacctgtagtcccagctactcgggaggctgaggcaggaaaatcgcttgaacctgggaggcggaggttgaagcgagccaagatcacaccactgcactccagcctgggcgacagagtgagactccatctcaaaaaaagaaaaaaaaaaagatccccctgaggaatgttcctgggttccagatactcttcctttctggaccttgattctcaggcccgcagctccattggagggtgtcccccatgctgagccatcctggccacccttggagagtggggcctcatccacacctccaaccctgctcattcagtctttatagttccttcttccaggaaactagggggtaacaagtattctaagggctgggtcagataactgactggcaccacccagtactagccttttgtaaaaacaccttacattcttttcttttcttttttgagacagggtctcacttcattgcccaggctggagtgcagtggcttgatcttgctcactgcagcctcagtctcccaggctcaagtgatcctcctgcctcagcctcctgagaaggtggaactataggcatgcaccattacaccaggctaatttttgtattttttgtagagatgacatctcgttatgttgcacacgctggtctcaaactcctggactcaagcaatcctaccacctcagcctcccaaaatgttgggagtactggtgtgagccactgtgcccagcctcaccctacattctttttaggccacaaaccaggaactcaggatgcaacaaccagtctacatatggcaacttgccactgcggggtgagctttgccttcccggtcacttcccacaaaggctccttctcctccatctccttccacagggcagcttcaagctccagttcatccccattatctccagttgaaagaaggaagcagaaagaaacccatatttattatccaccgtggatactagactagctactttacatgtcttaatctttacatacattatattattgcacactggttttgattttacagaaaataaaaccagtgaatgtccacaatgtttgcataacttgcaagtgttaacatgactagtgagtagcaacactggaattcaaaccaagataagtctgaggccaaagtccaagctctttctaccctaggctgtcatgaacatgttccttagcccctccttttggccacctctgggagctcagaattgctgggcaggcaataaaaggatgtgtttgggaaagggaaaaagtagaatttgaggaccattttttcacctataaaatgggaataaaaataaattcctatttcaaggagttcttaaaaggattaaataaaataatccaggtaaagaatttagtactttgattggaaaagaaaaacaatgtatattgggaattcttctccccctctatcacctttaccttctctgccctctctggactcaggtgctcacacaataaaagcagtaacactaggccatttggaaaaggagagagcagcctgcttgtaaagaaaggtgaccaactttgtatccagacaggcttggcctcaaaggaacacaacctaaaatcataggctgacagcaaatatatatatatatatttttgagacagagtttcgctcttgtcacccagctggagtgcaatggcacgatcttggctcactgcaacctccacctcccaagttcaggagattctcctgcctcagcctcccaagtagctgagattacaggtgactgctactatgcctggctaattattgtatttttagtagagacagggtttcaccatgttggtcaggctggtctcaaactcccgacctcatgtgattcgcctgcctcagcctcccaaagtgctaggattacaggcataagccaccgtacctggcctttttatttattttattttatttattgtattttattttttgagagagattctgtcacactctgttgtccaggctagagtgcagtggcacaatcttggctcac

SEQ ID NO: 39080 - DNA, 1115 bp, Homo sapiens
tagtaacagctgcagcctagccaaaaaggaaagaaaagaaagcaaggtgaagatgtatttctttttctttcagggctacagggcaagatcctaaatatacaatggtatcactcaggtgaattccactgtcaaactagacaacatttcttaatttaatatcttttagaataaaaaaacaaagaacaaaaaacaagttaggctcccagctcaacaacagcttagtatcatgttacatgcaaccttccatggtcaaagtcctcacctgcatctctatcctatgcctgccttaatcagatatttcaacagggtgactccttgagagaaaaagtggcaagtgctctttggactaaggaggaagaaagccctgcatttgtttttttgtttgtttgtttgttttgtttagttttttgctactaaacatcagacactcggggctgacagaaagcagttaaaagtgaactgagccctatcaatgataattgccatcttagaacgtggggtttgcagaaagtggtatcagactattaatgcctttcactagctccccactaactcggattctttccccacccccacaagtggtcacgcactgatggccctgaagtaacagcgtccggcctttccttcctccgatgtcccacatgatgatgctgttgtcagatgctcctgagaagagtaaccgctgaatagggtcccaccagaggcaggcgacactacctagggatttgtgagagagagagagagagggaggcaggggagaagtaaaatataactctacatcaggacgtatacatttgacagctgaagaccaaactaggagcagctgagtctttaagcaaaaaggtatcttcatggtgtacaacgggtcattcaaccatgctatcatgagtcatacagaagacacagcaccattatccacagtcataagattacaattttcaattatgcatcaaactactttgggccgggcatggtgactcacacttgtaatcccagcactttgggaggccaaggagggcgaatcacttgaagccaggagttcaagactaggcctggccaacatggtgaaaccctatctctccaaaaaaacaaattagccaggcatggtggcaggc

SEQ ID NO: 39081 - DNA, 1916 bp, Homo sapiens
aaaaaataaatacataaataaaaacaatgaaactctcataactatacttctactttccttgaccccttctcagccaaaagcttctctaatgaccagaccactctggttaccctcaggctctctggctcccacatctcccagtcacacttcagtccatggctcaccagggctaccccactgcatggaaaggctcttcttgttatcagcagctgtcttctacgtgccatcccaaaggcactagccaggcccaatttcatcctctccctcctgcccttgacacctttactcacctcctccctgaaactcactgccctccagcttccgtggctgcactgtcctggctggctctcctcccactttgcccattcttcctgtctctcctttaggctcccagtcctctggcttttctttaaatattgacatttccctaggaatgtgaccttggccctctgcttttctcaatgtacctgctctctctagttcacggcagccaccgttgtagtttccactgacgtctatgttcagggaactcccaacccctgcccagaccaaaccctgaggttccagcacacacacccaaggtcggttctcaaaactgaactcatcacctttccccaaaaaagatcagcatcttttctgtctctgaagacagctaattcctggctagaaacctgaaagtcatcttaaagctgctccctatttcaacacacacctttattcacacacccagccctgcttcccggacagttcttgaggccacagcctcttctccatcaccaccccagtatttcatgatttcacactggggtccggaggcagcctcctaactggcacctgcactttcagccttgtcccttcaaagcctgctacaaatttctgagctcacaaaaaccagaaacctgctcctgctcctcagaggttttagcaaaaccatgtagtttccctaaagcacttgaccctagggttcatctagaggacttgctacttattgtacagatccccaggcccctccctagtgattccgaagctctaggtctggcatagagccggggaatctgtattttagtaagttccctcaatgattggcgtgactatgcaaggtcaggaaattcagcttacataacgtggtctgggccccttaaagtcacactcaaggatcatcatttcccctcctccctggctggcctcccctttgaccccactccaaaacagtgtcattatttaggcagcaggtctgggccctgacttctttcattccctccccagctactcacagtcattcttgtggcttgaaaaatgacctgatgatgatgccctctgcccagacctctccgggactcgttttgtttatcctgtgccaacttcacatggccagttggaagctcactggtatcttaaactaggctggctctcactgtcccctctccctccaactgcctcccccacccagccttacccttctcagcgaacaatactacttcctacccagctgctcaagccaaaaacctggctgtcatctgacttctcttcctctcctctacacagccaacttatctcagatgtctccaagacttatctcaactcaagtccatccatttgtccttcttcatggccactgtcccttcacccaggccgctaaaacaatctgattctcccaccgccactctggccgtgcctcaatctgttctctacccagtagctagggtgatcttcgaaaaatgtaaattacatcatgctattcatctgctgaaaacactttaacagcttctcactgcaattacaataaaatttaaagctttacccagacctacaagaccttgcatgacccggcctctgcccaattctccaatcgccctagggtgccctccctatatagccctgcaccatcaagccactataacattgacttctggaaa

SEQ ID NO: 39082 - DNA, 532 bp, Homo sapiens
gaactcccaacctcaggtgatccgcccgccttggcctcccaaagtgctgggattacgggcatgagccaccaagcccggcctccagggctgctttgaagtctcaaagcagaagattcatcgtccagatttatttatagaacatacctgactgctgagaaaattctctatttagaatgtgttgtaccttggaccatgtctctcaataggtccagaggttggtgaaaaggttgggcaaaggtagtcatgacgctatggagggcacagtccttttttagtgttgatatcggctaccataaaggacaaagttactactaatgtaagttggccaaattaagacaaagaaaaactgaggagaacatgttcattttcctatttttttttcagttttgctcaagtctgcttcagttaagccagagactcaacttcctttgcaaaagaaaaggacttttcctgcagtttattacagcctgtcagaggtattaggcaactaagaaactcattttgaaatctagcagcaatatttaatcagaca

SEQ ID NO: 39083 - DNA, 2442 bp, Homo sapiens
ctcctgacctcaggtgatctgcccacctcgatctcccaaagtgctgggattacaggcatgagccaccgtgcccagcctcctgcttaacttcctgcaagctcacaacactgaactgttgtggcacacacaagaatgttcctgcattctagacacacatcaagattcgtgaaaagcaactctgtgatttcccacctccctgcacctccctgaacttccctctaccaccttctctaaaaaaaatttaaaaaaataaagattcatgaaaagcttgtggtctgttgagaacgaggtgccacatcctgatggcagggatgacaggcgcttctgccttcattttacacttaaggaagcagaagcaaggagagatacgatctgaaaatcacacaaaccaacagcagcactgcatcagactgacttcatttagttgtttgaccaactttctctcttatcaagatggtgaaagttcatctttaaaacattatcaaagtaaacaattcaaagcaaagcagccttatgtggtaagtaagtaaaacttttttaaaggctttttagaaatccacactttatcctccaaagcagtaattcctaaacaataaggaaacaagaagcagtaaattactttttccccccaaataaatcagagtatggaaaagttcaggtctaacttcaaagctcacttggttcaaagaaatactgacctctgtgctaaatacgagtggtgattccaacaaagtctctcactacctccagctctagatttagcccaatctagctacagcgtgcgatattgtatgtaagtgcctgtggtgaaacaatttaaaaaacaatgtgctcaattctttactcctccctgcatccacgctccttacaatcagccattttgcagctctttccatcaagagatggaatatatttctctgagccttgtttttgttttgagacggagtccggttctgtcacccaggctggagtgcaatggcttgatctcggctcactgcaacctccgcctaccgggttcaggcgattctcttgcctcagcctcctgagtagctgggattacaggcatgcgccaccacgccaggctaagtttgtgtatttttagtagagacggggtttcaccatgttgaccatactggtctcgaattcctgacctcacgtgatccgccctccttggcctcccaggcatgaactgccgtgccttgcctatttctctgagccttgaatatgggttggctagtgacgctatgtttaaaaaaatgtggctgaatggggtgctagtactgggtcctgaggcctggtttgctctcactctgtgtcttggaagactgccacgtcacatgaaccacaggggccagcctaccagaggacaaatgacgacatgggagagagctcaactgtcctagctgaagccatcctcggcccgcctgtagcaagctcactcccaggcatgagaaagagtccagctaagctcagcagagctggcccacggctggccacaagcatgagtgagcctggctgaggccagaagcactgcctaggtgacctgtaggctcatgaacaatgacaaatccctgctgttttaagccactgagttttgaggtagtttgttatgtagcacgagctaactgacaccatgctttctgttccaaataaataatatacctttaagaaccataggaatctgaggttaaaattaaaaataaaaagcatttggcatttattgaatgccaaggattttaaagtagatagtacgaataactccatttcaactcttaattgaaatacaggattcccattttgcaaaagtgctaatttgaatccttaaaaatggaagcagtcactgaagtacaaaataaagttattactcttaaatatcatatagtaatgtttgttatcctgtctaccaaggataaaacttctgtatgctttaccttcctatagtagatatatgaaaagtggagttataaccacagttatgattaagaataaagtgtttattccagggagattaatctttgatctgctgaaagatatgcctgatgatcataataagtagaaggattcctttttatttctactgttaaactctatcaaagagccaattaaaaataaggttaaaatacacttaagggaatcactaagtcttgaaagcctcatctatttaagccacaatacagtaggagcaaagatagattcaaggtacaattttttcctctgaaaagcactggctcacaaaccaggaggcatcttgcaggagtcattaatatttttctttcttttttttttttttttttgagacagagtcttgctctgttgcacaggttggaggcagtggcgtgatctcagctcactgcagcctctgcctcccgggttcaagcaattctcttgcctcagcttcccaagtagctgggactacaggcatgcactaccacacccagctaa

SEQ ID NO: 39084 - DNA, 1288 bp, Homo sapiens
gacctcaggtgatccacccgcctcggcctcccaaagtgctggaattacaagtgtgagccactgcacccagccaatttttgtatttatagtagagatggggtttcaccatgttggccaggctgttcttgaactcctaacctcaggtgatctgcctgccttggcctcccaaagtgctgggattacagtcgtgagccaccgcacttggcccccaaaaactttttttttttaatttaaaaaacaaaacaaaaccggacactgggtccttctagctctcagtcttctctgttgctattgtcactgcccaccttttgctctggtcacttagaaatagctatggttctttccctcttacaattccctcctgtcctttcctccttcctctgcctgggatgagggtgcatccctccttcctttctagatgccactcctctatccatgaagaccagctcaacgaccttctctaggaggctgtccccaaaccccggccccagcccaaagagcctcctcttcctgtgtcttcccagcactggatgctgaatacataggggccatctcttcactagactgttcagcccttgggaaagagcaacttagctgtcagctgtctctcccccacaggtctagcatgggccccacacacgtgctgggattacaggcgtgagccaccttgcctggccaaggtagtgtggcttttgacccctgttgtgtcctcagggcctgacactcaataaaaaagctttttctaaatgaatgagtaaatgagtgaagaacgtgacacgtatttatgacaatgtgaaaacaaaccaccatggctaacaccaagaaaaaacccacgcccatgtgctttcattacatctcatgaagtgtagcacctactaaaaaggttgttctcccttcaaggaagttgcaagagcctgaacacaacagaaacctcaaacgccaaccccatcctggtccagtcatctacctgggctctgcaataacagtggtgcacgagtgaaaaagtgagcagatgcaagctcccccagaacgtttcagtcccagagcagcttagtaatcactttccaaaaacatttatcagcactgctcctgaccagcaatctcaaatatttagcaacttacccaaaacgcatgattcatgaataaaatatttgaccgaataaaggctgctaacttttttttttttttgatacggagtctggctctatcgcccaggctggagtgcagtggcacaatcttggctcactgcaagctctgcctcccaggttcacgccattctcctgcctca

SEQ ID NO: 39085 - DNA, 2649 bp, Homo sapiens
ccaacatggtgaaaccctgtctctactaaaaatagaaaaattagctgggcgtggtggcaggcgcctatagtcccagctactcaggaggttgaggcaggagaatcgcttgaacctgggaggcggaggttgcagtgagccaagatgatgccactgcactccatccagcctgggtgacagagcaagcctccatcttaaaaaaaaaaaaaaaaagtcattattctgtccttgcctttttcaggtccccaccttctccccaggtctcatgcactcgatctctctcactcctttctgctttacagacccacagccaggtcctgccaatcactcccctccttgttggaagtcagctacaggtgaaccagcagggagaggccactgcctgctcacaatcagctcattatctaattgaggaaaaaggcacaagctcactcaaaagcaaaatccaaaggaccaacaggagttgggggcttcaggctttttcttcccattcaggatagggtcaatgtcacttcaaaaggtataattacaaaaggctagagaccacgccttcagctttaagagaatagcagtaccttccatcctccagaaagcttttggacttgtggactatccctatttaagacggctcattgcatcaaggaaacacagtttcattcaataaacatcagtcatttccttcaaattcccaccggaaagctactgacattgtaaacctttaggatttgaaagacgctaaagtttaaagtcgaatcataaatactgttccaatccaatcactcaggcccagagctggtgggagttctggattgcatttccggcttcaccagtatctctgtaacttagcagcaagctacacctccaccagcctcggcttcctcttaggagaaatgagaaaactggacccaatcagtgtttcccaaaagcatggtgggcgtccaatgcaagatgtcacagtgcaagagaggactctgtgtgcatgccaattaacatgttttagttattagtttactctgtctggtgagtaatgttagttttcctaataaataagatttccttttaaaataaatgcatccaaatatttttaaaaatgagtcactttcacaaaaacctatttagtaaataagagttcaggtgattctagcagccgtggcaaaaataactgatctagaggcctggcgtggcgtgaaatccctgagtacagggggaggaagagagcgaaggcggctggagttcctcgcaaagaagcaagccccgggcaccagggtccgcagtgaccagccgccggtcctccacgcttccagaggagacgatttggaactgacccgggagggccaagaaacaccttccgagtaccaggctaaaccccgccagggagagagaccgggacgaaggtcccaggctagtgcgacaccgcaggtcggggttccctggttggaggagcgcggtgggctgggaggggcgcgttggtgcgcactggaacaggggtccccggcttgagcagcgcggtgagacagagttcccgcgctggaggggcgcggtgagacagaggtcctgggctggagaggtgcgttggggcgcactggaaccggggtcccgggcttgagtggcgcggtgggacagagttcccgggctggaggggcgcagtgggacagaagatccgggctagaggggcgcggtgggacggagctcccgggatggacgggcgcagtgggacaagggtcccggactggaggggcgcgttggggagcattggaacaggggtcctgagcaggaggggcgaggtgggctgggaggggcgcggtagggcgcactggaacaggggtcctgggctggaaagacacgttggaacaagggtcccgggcttgggcggcgcggtgagacggagttcccgggctggaggggcgcggtgggacaggggatccgggctggaggggcgcggcgagaccggggtcccaggctggaaaggtgcaagtcgaggctggaggaccggcgggagggaaccgggaacccggcggagctaaggggcgcagagtgggggtggggccgtgctgccgggggagccccctcacgcaggaaggaccggggccgcggaccccaccgcccccacaccccgtcgtcgcggagttcgggccgccccggctgcgcccgggccctacctgtcctcgctggccgtgatcacgccgtcctccttggggatgagcagcgcggccgtgacggcgtcctggtgcccctcgatcttgctcagcagcaccgggcggctgctctgcggcctggagtggatttcggccgccatgttcgcgcggcgactgctgcggcctcctcggcaggcagcccatcagctgacgcctgggcgggcgggggacgcgccggtttcccttcggctgctggggcctcttgggcgccgcgccgccgtaagcccccgagtgctgccgccgcaccgcccgtattgcctggggatgccgcgcaagctgaaagtctgtggctgggagaggatgccacggggcgcctgcggagaaatggggaaagtaaggaaggtttaaaagtaaagccattcacccaggaataaattgagcacctggaggggacaaggaattgtcccccaaaccagagatttcagaaattacaatactacatttcatccatttgaag

SEQ ID NO: 39086 - DNA, 2059 bp, Homo sapiens
gagagatgaatgtaggtgagctgtgtctggggaagggaggaaggtaccaggccaattacactaaccacggaaagaggtgaggagagccaccaggtacctgcagtggaaataaatggaaaaagcacttggtggaaactgcaccgaagagggggtttgtcgaaacaaaaacaatcaaagacataggagttcaatctgggtgactgctggggacacagatgcctttaacaaagagatcacagaaagcattgcccctttgagggtctagatgttcagcaggcaactcaaaactgggaattcaaacaagcctccctttgtgacttaatatgttcttttaaaaattgtactgtattaacagtttggtaggaaagcaatagaattacattgttaaagagtgttaacataaagaaggaagaaactgtaattcccctattaccgttttatgtttttttccagtcattttccggatgtttaaaaatatgtactattagattgcttttaaagaaaaattttaattttggataagccaacatttctgagtctagggtttccaaaactaaggcttttggaggcgtgctgggtcaaaaatagaagctcggtaaatacttgctcagtagtggcctagaacactaaatataaattaaaaatgttttctttttttgaggatttaaatgtttccttaacctgaaagcgaaacagatttttgtttgttttgctgtaacgagagaggaaggaacaagagagtgacagggtgaagcaacttctcccagaaacttttgggcgcaaacgccctcaagtccggatcattggaaagtaactcgaagagaggagagaactagcgcaagcgtagcctcaaggcggccgcaatcaccccgccccggggctgtctccgcccctgccctctctcagtcgccccgccccgggggctgtctccgccccagccttctcttcgcgttccgcgttccgggttccgggggaagtgtgttacggggacactggcccgactactttcgttccgtcttccatcgttttctctcgtgcaatggcgtccgggctggtaagattgctgcagcagggacatcgctgcctcctggctccagtcgcccccaagctggtccctccggttcggggagtgaagaagggattccgcgccgccttccgcttccagaaggagttagagcggcagcgccttctgcggtgcccgccgccgcccgtgcgccggtaggagccacctcgggaagaggtctcagggtggcggtcgcagacactgggtcttcttcccgcggcgtcgtgtctgcggctgatgcgcccctgggttaagccttaggaagtttgcgatggagacacccgtgagctgtgggcgcggggcctgaggcaaaaaaaatggatttgtgccgcgggcggtagagcttcgggctgttcccgacgttttgaaactaccatttaggattttggctactgaaaattgggagaaatggggctaactggagggtcttccttatgtggacttggatgttgtagtccccgtttgtaatgcctgagaattccgataagcgggaagaaagcagcccacagcatcgtaaattaaggagaaaaaaaattaatctacaacctgaattctgctgtctagagtaaaaggaaaaaaagttagctttagatttttgccctaattaatgctgttctggtaacaggtttggcagagagagacacaggtttttatagcttcaaaccagatcatactttacataatttaaattccttcatcttgctttttctctttaataatgtgtgtttgacatgttgtcatggtattacaaagatatgtacctcactcttttttatggctctgtatatatgggcctatgagctccatattattgccattaaaacctatgtaacagcgcgtaaaggggacgcatgtgtagtatgaaattttgaaagctattagtactttaacattgccctccaaaaaatgttgatccactttgtactcctaccagtaggaacggtcttctaacagagaagattatagcaaaaaataaaatctcttcttaattcccat

SEQ ID NO: 39087 - DNA, 1696 bp, Homo sapiens
ttatacaggtagtatgtggcagaaccgagattcaaactcagaatgtgtgcttttaatgttcatgcctgccactcatggtatggtacagaaatgagttggccttaaccagggaagagggagagaaggcagcaggagtgtatgtgtgcggttctccaacaggagacaggatggtgggtaaggggactaggaagaggcctgtgtggctggaacatagagtacaaggatgagtgagtctgcagaggtcaacaggccagacccatccctgatgggtctcctcctgcaaaaggcctgcgcgttgggctctcccactctctgtagggaaggaactatcatttccgtgagacagacccagcaaccttccagacacaaacagttgagctccaagtcacttctgagctctaccatgtggtcatgtacctttcagtgggggcagttcacccccaggtaaaggcagtttggaatttggcagggatgtttttaattgagtgggcagtggccagaaatgctatctgtcctgcaatgttcaaaacagtcccacccaatgaagaattgtgctgcttctcccgtggcttttcaataccccaccggatctctgcattggtaggacacctacttataattatctgagcccagaacctcgttctttttcgtgtgtaaacacagggtgttttgggttttttgtttttgtttttgtttttgtttttgcatccttttcatgtatgctgaatttgccaggaatgtgagtcccacgcaaatcaagcagagcctgtgctttgttttgttcagaaatttatcaaaagtcttgcaccgtttcagaaaaaattgcatcagcaatagttaacacagctcatgtttatgagtcaccaggacaacatgcctgtctctgtctgcttttgtagctgtcaattcacaattattctgagactctgactactttattacgtatttgagtgtagttgtacccaagggtttacctattgaactacatatatacatttcttttgttttcctttgtattacagtttggcactgtctcaaatttttaaaaatttgtgtgtgtgcatagagtaatatgatgtatgaatttcatttcagaatagtaaagagagtattaaaaatatttgttacaaacggaggagctggggctgacagggctgcaaagtgctgcaggagtctccatgcttcttcccagcacacgtgggggttttctccaggtgctctgaagactgtcacatggtctaactaatgtggtttaatattgccattctacagatcaaggcagcggctaagaggacaaaatgacatgtcacagtcacacagcctccagccacagagtcaggaccaagaaccagtcctgagggcgtctgcttctgaccactcttcacaagcctacagatgccagacacctggagactccactgaacaccctcatgtgtgctgacctcccgatggtttatggttttaggaagggcgcccagactgcatggtccaggccccactgagaagggacgccacgaatttacccaagtcacctggggtctcctccaccctccctggagccttctttgtccacctcttcactagttctgctaatgggtctccaacatctgggtgtgtaagaatggtgatgggaggcagaggcagactgggagttgccagccactccctcggcgattccaatgcagtgggctgggct

SEQ ID NO: 39088 - DNA, 1252 bp, Homo sapiens
agggcaggacaaattcttcattcatttcccatatccaacagttttcaaaataattcaaaataggttgattgaccagagggttctattttctgtatcactataaactcgtgtttttcaacatactttaagggtctcgatccactgcaaatttattcttattggtgctcaaaatgagcctcttcacactcgttcttaaaccttctgatacaaccctacagtcttgttagcctccttgctttccggtttgactagatgtttaggctcattttatacatcttctgttccagatggaatcagccacttctccagggagctctggttccttttagtgagaaacagtagcactgagcacccttatctaataaaccctaaatgttttaaactgtggaaatgctgagcaacagtgataaggaaaatccaaagtccatttacaccactctctggaatatatccaaatactgaaattcaaattatgagagccagactggtgactgtttcacaccgatggctcaaacatcactggaaaatcaaattatgaaagaccagctgctgacactgaacgggtttgcctcccatggccatctagaccgagggaggctcgctggatgatgacaagataaaggagtctgctgggcattaaaagctgggctgggagaatcaaagtggattgccctcgtgtgacagcagcgagcctcctgaatcaagcccagcctaaaaatggaatcctaacagtgcagatgccagcgacaaacaaccgacacacagcacggcaaggtgagtccccggatttatctcagcctctcccctccccgcccctcagtgaaagctgacaccttctcaggcactgggaaagtctcgccatccttctagtctctgtgttgctaggatcctggttcttggaacctaaggccccttattaatctacaggggctacagcaggtagagaaaaacagcaggtatgttttgtccgaatcatgacatctctcaacagcttttcctgccagggcttcccaaagaaataaatgtacaggccgggcacggtggctcaagcccgtaaccccagcactttggaaggccgaggtgggcagagtgcttgaggccaggagttcgaaaccagcctggccaacatggcttaaccctgtctctattagaaatacaaaaatcagctgggtgtggtagcacatgcctataatcccagctactccagaggctgaggtgtgggaatcgcttgaacccaggaggtggaggctgc

SEQ ID NO: 39089 - DNA, 1320 bp, Homo sapiens
acagataggaaataatgaaaggactcagaaattatctatttcaatcacctgtcaccaggggctattctcttacattatctgacattacaaaattagtcctttagacactcccaatctctggaaatgaagggacctagtatgtgaaacttggctgaaccactaaacctcttgtgctaactgactagaaaattccctacaagcaacacagaactaaaacaaatggttttagttctatgacatgggccattaacttgctttcacatggtacttaccaattgatatggcttggctgtgtccccacccaaaatctcttcttgaattataatctccataatccccctgtgccaagggcaggaccaggtgggaggtgattggatcatgggggcagtttcccccatgctattctcatgataatgagtgaatctcatgagatttgatggttttataagtgtctggcatttcccttgcttgcactcactctgtcctgtcaccctgtgaagaaggtgcctgcttttcctttgccttccaccatgattgtaagtttcctgaggcctccccagccctgaggaactgtgagtcaattaaacctctttccttaataaattacccagtctgggatatttccttatagcaaggtgagaacagactaatacaccaatcaagcctcctataacaagtgggcttcccatgaagattttgttaaggtgaggaaagtccttattggtcagaggaccctcttgttatttatccgtctcttgtgagtctggtaattgttagtcagtctctctgacctgcaatgaccctgggtatcctgacaaactcccaagtttgtcttctctgcttcatgctggggatctccctcagtgatgccatctaagcagccagtgtctctgacaccatacaaataaaatgcagcaccatttggtgatccagcctatgtttattcttctccctttggcaacagacactatttacttactatctttcccagagcaatagagggaagccaggaaagtgctgagcttgtattctacaacctgagaaggaagtaagggaaaggaagagctcagtgcagctaaatcagcttcctaacacatttaagtctacaggtaggttcatttaagcagttcagaaacttttaaaaaggttcagaagaaataaaacagagaacatctttcctaccctccctccaaatatatcaaaggtgtcatattaaaatacatggattccagtagtacacatggactaaacatttcccatcttttattaggtgactaaagggctactttgagatatgttttggcacccacaaaagtaatc

SEQ ID NO: 39090 - DNA, 1424 bp, Homo sapiens
atctggccttcagatacctcacttttggtcccttcaactattaagaatactaaggatcccatgtgcaacaatggagacagatgccccaacatctagcctttctcaggttgcccctgtcaccaccactgcctagtggagaagaggattttactttatgggttttctccctatattactccttcctgttccctgatcttggaggatatgtccttccctcgggcttcccagggacacttgcttaccttactctttccttcctccagttccatcaaacataatttccatatctcatgccctctaggcaccaactgatagaccatcgtgtctcaagcagacaaacccaaggctttgtgtccatcataattacataagggagattttcaaaagacagttgtctctaccccactgccatggtctgaatgtttatgtcccttacaaaattcttatgttgaaatcttaaccaccaaggtgatggtatgaggagctgatgaagacttttgggaggtaattaggccaggaaggtagagctctcgtcaatgcgattggtgctcttataaaagctatcccagggagctgccttgccccttccaacatgaaaggacaccagaaagtgggtctcagcagacactgcatctgccagcaccttgatctccaacttcccagccttcagaactatgagaaaaagaattatgttgtttataaaccactcagtttgtggtattttattagagcagcccaaacggactatgacacccccacccccgccatgaagattctgcttcaggaggtctaggtagtgtcaggcctgagggcttcagtggtcctcatgtttcagtgcaaatcagaataacctagggagttttagaaaattcacatgcccagacaccaccctagcctcctgcagtcgttcaataaataaaggcagggatttgtcattttgtttacactacatctctttctcaatgtctaacaagcatgagtagagtcatctggtatgtttgtgtagactgaacaacttcagaagggatgccatttatataaattattgatttatacaacaggatggtcttgtgaaataggcatctaataaatactgagtaagtgaatgggtaagattggaaaagaaactctttctaaaaagtattactcactttcaagtagcaaaaaatgaaagattaaaagcagaccaaagttagggaagcctgttacaagaggctgaataatggcccccaaagaggtcaattttccaatccctggaacctgtgactgtgttgttactttccacggcaaaagaactttgcagacgtaattaaggatctcactatgagaagattatcctgcatcattggagggggcccagtgtaatcacacaagtccttataagtaagagagggagggaggagagtcagagtcagaggaggaca

SEQ ID NO: 39091 - DNA, 863 bp, Homo sapiens
aggtgaattgtgagggagagaggagcctaggtgccagcagcctggaaaacatgcagcagggactgaacatggttatacttgggcagagcataaccagagcacagtaacatcaataaggacataaagaagataggagcttgctgcctgatgtggtttttgtacatccagctcccatacacatgtattcaagtctaagaagtaaagggagacccagaactctccaggaatacaggaaagagaaagacaacatacatgatgagtcactaatctcctaaataggcatgtgtggaaaaggagagggttctacctttgcagataaatcacggctgggcagggggtgggcagtgctgcatctggagagggtgccacaaagtagcagggtcacagaagtcttcaaagaccgtgtcatactgagaagttgaccctctgaagtcactgacccaggacagaagataagtttgttgacagtctgagccctcttcttttgaaaccctccctatatagagaacagggccaaagtccaagacacaatcatgacaaaaaccctggccctcaccctttatgcgagaagctgaagatcagttcatcaattaccagcgggattgcggtgagaggacctcagctctgaaagattcatgcttcataaacttgaactctgatgagagatatcatcctttcccctggaaattgtgtctgggaatgctcatgcagaagttttcgcagtctcagggatttcaagaatgcattttaagaactttgctacatttcctcaaagaaggttaaaactcagtggaaaaacaggaaggtcttagtgtggaatttagaatacttaagaaaactatgggggaaatgaagttagaaaa

SEQ ID NO: 39092 - DNA, 1716 bp, Homo sapiens
gaacaaggcctagttaccaaaagaggtcacatgaaaattaaaaagcattcaagagtaaatagcagtccatattgtccagggggatgagctatgcaacctaagtaaaaattaaaaccaaattacagacactaattagtgttgtataacataccgattcatttgcatacaatgcaattatcctgataggtgctggattcaacacatccagctgggttagtgcatctccacggaacaaaagcattcggtttttttccctgtgtgttggctgtgttctcttatgactgtgacggcaaataaacaatcattcccagcacctttagactttgaacatttgaaataaaatcaatacagattgtgcatggggagcattcagcccccctcagatgaacaactaacaggctgattctgggtcagtactccatttctagaacattttatctgatcttgtgttttagaaaaccacatttattttatgctatataaagaattcttcttcatcttcttctttttcttcaccctgaacttgcagatgaaggagacattctgaaattgtcttcctggtaccaaggtccctttggccagcaagtggcaaaggagagactctttccttaaggacactgttgtttttggaggtagccacccccaaggaagaggctggcaagcagaatggtggctggctggtctgtaaatcccttggaaatccgccaaaataagtctgcctgggttcagaatttatgatggtcaagccggtgtcaacattcgtctcggcctcaagcttctgaaagctgttttcccggttgaggaccttcattctggccccggattcaaggtgatgagaagacaggtgcaggtgggcacccatagctgggctgctgacctggaatgaccggccagggcttttccacgaagtgccagcacacctgtctgatgtggggctcccactgggctcaggaagctccagagaatgcccctgggacctcttgccctggttcctctggctcctgggttctgaggtcctctttgcagagacagaagtcagcctggagcccaggggaagcatgccagctcccaagatgccattcttaacaccaagttctggattcagctgaacctacaggaaaggaaaggaggaacatatgaaacataatttccattaactaagtgccaagagctgactatgccttattcaccctctgccatgccatgcccatagcagactttcagtaaatttggttgaattgaatagaagtgataagtacaatataattatgagatatctaatcagacccagccccaaatacctctctttgggactccctaaattaagtttttgacaagggtaagactttgggaatcaaatggccaattgacaacaccacacttctggtagagcaagttgttcaaacaatgcagacattcacagatgtcattcagtgacctcactggatgttgtaaatgatatatttattagcaaccatgtaaaaaaagaaatttagaaagccaccaaaccatgtggttaaagttaagataaggattgaagtaagaattcaatcttccaaagctggtgatccttcttttagatcatgctaataaaaatacatatcttgggccattctaagacatgtgaccactccagacggctaataatttggcagcaatattctttaaattcttggggcaccatttatttagattagaggcctggtattgcatgag

SEQ ID NO: 39093 - DNA, 1423 bp, Homo sapiens
tactcgggaggctgaggcaggagaatcgcttaagcccaggaggctgaggttgcagtgagccgagatcgcgccactgcaccccagcctgggcgacagggcgatactcgtaaaaaggaaagaaagaaagagagagagaaaaaaaaaaagaaaaaatatagtttccatgactttttgtttgtgtaggatgcaaagtgactgctgtgtgctgtgaaagatgggacaaacggctttgagctcaagggacatggatttgggaggaattcaaaatgtgaagcctaactcaggattcaggaaccagactaacagagggcaatgaaacaaaaccagagaactcaggcccagagccagcgagggagaggaaggacgccgaagcgtagcgtcccgcgccgccccccgccaacccgggaggacgcagaccccccagagccggtgtccagccccacctctccgggcgcctgcaggaggggaaccgcgcgtcccatcgcccggaccccgggccggcggcgcggccgagtcccgctgcttccgcactcgccccgggacccggacccccgccccaccgcgcccctccacctccccgccggccggtgccacgtgtaacgccgcgggggaatccccggggacacagggctggctggattcgcctctcggccacagctctgcgctccacgagctgctcctgcccggtccccgcaggactcgaacccgcgacacctctgccgcgccctagccctcgcgccccgccggagtcaccccctgacactgccaggatccccgcccggctgcgggcaccacgtcccccgggccttcgcggggccccgagggccaagaccgaggacgcgccgagccgaggctgcctggggacctggtccatccggttctgatggggtccgcagggaaaaggcactatcccggaaagcttcctggaggaggggagcgcgaaggacgaaactgggcctccctctaggcggagcttagtgtttaaagctggccggcctttctccttttcatagtaattattctctcactaagctcaggaagcacgccctccaccatctcattaagcgaaccggctgtggctgactcttccctcctctaacaactgtggctcctcatagccggcacaatgacgtccaaagctgtcggctcccgcacgggttcctccctttgaggcttgtctttcgcactccttccacctgctcggagaactgcgcccaggtgggttcagcaactagcaggtgccatgaagagaccctcagagaagcggccggcctacctggcgcccgttacccctctcgccgcaaacccacttccctgaactgttttgcagttcacagcctctctccccgctctaaaaactaaaaacaaatgaacactgaagagctccaggcttcatttttttttttgagacggagtctggctc

SEQ ID NO: 39094 - DNA, 1278 bp, Homo sapiens
aaagtccttagcacatattaacttcacatttacatttcctcttcaatttattattatctagagagttttagttttgtacttcttagagcacaacaaataaaaattgagaatatttttatagtcaatggtttataaagattcatttatactttatcaatttctgtgattcccctccttattttgcgttccatatctttcctctacgttttttattttccttcctactgaagtatattctgcaataattattttagtgagggttttcgtgtggctttggctgttgtatagcattgcatttccgatcaatttctggtccatgaaataatttattttgttcttcatccagactctctcataacagttttccctttttatgggatatctgtatttgccacgggttttgtgcaagggaaataagttgaaaggttaacctgtggagtcatcttcagttgaaatcagggttaatgactgctgagttcctggtcctcagagggaaggacagaagcagctgaaaacaaacataaatatggcaacttgcctgacctgaatggaaaaaaaaaattatgggcaaatgcacatttcaaaggatatttggcttttctcagctttctaaatttttgttctttgttcaattcctatcaatattggggtgataatgcttggtgtgctgacccctggtggattcagtgagtgccagtttatgacaatttttgaaggtgaagtaggtcttattccagtagcctgattcaaatgccgtaagaggctaggcaggttatataaatgtgtcaggtgaccccatgtgaccatagatcatggtgccagtgtagtgacaaatatgccctgtatatgaccatacacatggcgccaagtgttttatgtgccaagtcacataaaaccaatggtaaaaaaaatgttggcaaaacacacacacatatgaacatttgattggagagcttgattggaccaatcagtttggcccaaactaccttgtttaagttacacacagaaaggttgtgcccctgccctgaggtctcaccccaagctcagtttgtaaattaataactaatgttctttccatgatccactcttaatttccaaaaaaatagtaacaactaatcaatgctacagtgggctctttttataaactactattagacatttgctgacaagacccaatgggagagaatattattcttcaagtgaattcatgtattattgtctgtgttttgaataaaaactttggtggtatatattatttgggaacttgtagagcaaaat

SEQ ID NO: 39095 - DNA, 768 bp, Homo sapiens
ccaaatactacgctttgcccacagtttttgcaacccgcagaccaggagattcccttgtgtgcctacaccaccaggaccctgggtttctagcacaaaactggtcggctgtttgggcagataccaacttagctgtaggagttttttttcatatcccagtggcagccggaaccccagcgagagagaaccgtccactcccctggaaagggggctgaagccagggagccaagtggtcttactcagtgggtcccaccccgacagatcccagcaagcaagctaagatccactgggttgaaattctcactgccagcacagcagtctgaagtcaacctgggacactcaagcttggtggggggaggggcgtccaccattcctgaggcttgagtaggcggttttcccctcacagtgtaaacaaggcctccaggaagttcgaactgggcgggtggcaaagctgctgtggccaaactgcctctctagattcctcttgactgggcagggcatctcggaaagaaaggcagcagcctgagtcacgggcttgtaaataaaactcccatctccctgggacagagcacctgggaagaaggcagctatgggcccagcttcagcagaattaaatgttcttgcctgctggctctgaagagagcagtggatcccacagcgcagcactccagctctgcgaagggacagactgcctcctcaagtgggtccgtgtcccccatgcctccctgacaggagacacctcccagcaggggtcaacagacacctcataca

SEQ ID NO: 39096 - DNA, 1941 bp, Homo sapiens
aaaatcttctgtccgattgctagttcgtctgtcttgacgtatgccttttattgtagcgacataggcaagtatgcccagttcgttaacagtacattttaattgcttgccacggggaagctgaaccagatttgacacccaaagttatatcctatatactaaacatcgcaagggtacgactcaacgtaatgccaaaaaagaaaaagtttctgagcagaacacgtttgctgtcactgaaagcgatgaaacaaagctactccgcaaggcgactacactcattctttgggctcccaaggctgagaaatggagaaccaattggccggtttgctctctgttgcttcccccccacccggccttcctccgagtggcgaggcaatcctgcacaagagtttgtaaagtgcttaggaagcttgtaggatgaaagacgctataaatacacccaatgttactagtttatgaccacggagcattccgtggaaccactgtcactgcgtcgggggcaggttgatggcatagaccttcctggggaggggggcagagagagagggcagccccttcatcaccctaaaagctaggctgggtaaattttcaaagtgtagcgaaaccccacgtgaaaagttccacacacgccccacacagggaggactccgcggctgctagcagcgccggagactgggcctacaaccccggcaacgtggggaggcgtggggcggccgaggggccccggccgcagccgacgcccgcggagcggctgaaggagcagctcccggacgggggcgcggcgccaggcccgggctcccggcgcggggaacggcccgggagggcggccgcgccggggccccgcgccgcccggttgccgggaaggctcgcgccccgcggccggcgggcgtgggggaggggaggccgggcctgcggcctgttgggggacttcagcccgggcctcgcgtgcggctctcggcccggcccccggccccggggtcccggacgccgaggagagactcaccggaaaggcccggatccgcatcttggtgtccttccggctgcccgtgcctttgctcagattcgacatggtgctcgtcccctccccggcggcggcttcaggtcgcgctccgcgacgccggtgtcacatttaaggcgggcaggcaggctaggggcgacgctgggggcggcggcggcgcgacccccgggcagggctggggagctggccggcccctgggcagccgcggcggcggcgggggcggcggcggcggcggcggcggctcggactctggcgactccgatgcggctggggggctgcgctggcgcggcggctccgcggggtccccctcacgtccggctcggctccctttatcgcgctcctccgcgatggcggcggcggcggcgacggacaaacatctcactgcgcaggccgaacgtcgtcctcctcctcctccttctcctcctccgcctgagcgagacgagatccggcccagagggtggaggggggaggagggagggaggagagccggagagtgagagatgccgggggagggaggtgggaggacgggagggggagcccggcggccgccgcgggggacgctcagatctcgcgagaagagggcgagcgcgctgcccccctggtgggcggggcgaagcccgggagagggtgggcgccaccggaggggaggaggggaacagggaactgaaggaagtgggaggggccggcggggcggggaagcggaaagggggcgtggctgagggcgggaggattaagctgcctttttgaaagtggagcgccaggtcccgggttctgggtggaggtggttgctgattggtggagctcggagcggcggttgggagggtcctggtcacatggtggggagtgggaggggggaagttcggagagcgggagcgggatggtagtgggctgggccccactgggctgggacagcaggaggatagtct

SEQ ID NO: 39097 - DNA, 539 bp, Homo sapiens
ttcacttgcagcagagtgctcagaaacagttaattttttccttttaaagttcagctttattacttcctggaagaattccagattttaacagataaaccatccagaaataggccgggactaaatgactggagagaactctacttgcatccacatatccaagggcctccaggagtggtctgtgatgtaatttcagctcgtaacaagctaggtgaatgctgaggtttgagggtaacagaaagtacttctctactggcctgtgaccagaaatagagtcctggacctcagtgagccagtgccattgtgaaatttgagggaaggttgctaaaacacttttgattgctcccatgattacataaaagggaataaggtcagttatttcatcagagtaggaagcagcgattcgaaagccaaatgtccaaatggggtctatggaattattctgcttccctttgccacagtggcccgtgctgaatttcatactaaggacaataatttgaagaccaagagcttatagagaacattatttgttaaaagcacta

SEQ ID NO: 39098 - DNA, 889 bp, Homo sapiens
gcctcttatatttttaagtgttgtaaactcaagcctcttatatttttaagtgttgtaaactcaagatgaaactgaataaaattaaaccaaaaaaaaaaaaaaacttttgagaggatttcctaatctgatctaatttgatctattattcagtacttttatttttaggaaatagcaagagtgaagaaggtcatctcgtacagcttcaggtcaaagttatgtattaccagcgtaagtccaaagatcaactagggatggaattaacccaccaatttttatttttgaagacagcttagaggcaggagcacatcccactgttcatgtaaagaattacacattataaggagagaaatagaaataaaattgacacactagagaaaggcaaagagagaaagagacagacagagattgagagagagagagagagagagagagcaagagcaagcctgaaagagaccaagagagactgactgattgattggttgattcagcagtttgacctggtatgccatttgggtaaagcatctaagataatttttcaacatacatccttctccagcttgcccattttcttgtagattttttaactgaatcccttagtaattttttctgctttgtcaaaaaaaaaatgtggatagaactgtctagccaaagaagccaataactgaagatatgcctactgttccaaaaaaaaaaaaaaagcaaaaaggaaatgctggccttgctgaatatgtttaagctggctgtccttttagatctccactaacgtagttaggttaatcattgatgaaatcatctagaaaattcaatcaaacaaaaccttgtgttgactgagttatccaagtaatcctggtctgggctataattctatttataatttcatctgttcttc

SEQ ID NO: 39099 - DNA, 714 bp, Homo sapiens
aataacattatattcaattttcttaattatgtgttttccccattgtgccctaaaatgcacaatattctaatattcatgcatacatacacacacaaacacacagtagcttacaatatagcaggtaagagtgtgggctctggagctggaatcctagatctaccgtttaaaactgtgtaatcttgtcttagacctaccatttaaaattgtgtaatcttgtcttacatctaccatttaaaattgtgtgatcttgagcaagttactcaaccactgtgtgccagtttcccttattggatcaaactgagctgcctgttccacttccgcaggtgccctttcacctattccctgaaggtttagttttgccagccaaaatcaatacaatcgggctccacaactggctccaagtcacaaaccttacccgtagcaactctgtgacagtaaaaacaaatcttccttctccatcactctcctaaccacacattttcacacacatgtagaacttaactgttaatctaaacttaaagtcaacaagaacaaaaaccttctaacataaacactatctactaccaccagaatttgtccctggaaaaattctgatactgtgaaattactatctgtctttcaggcagggtgttcaatacaagtcaaatagaatgcactgtataactcagtttgatttaaacaaaacaacatatgcacaacaaatgcctggggcca

SEQ ID NO: 39100 - DNA, 517 bp, Homo sapiens
gacatttcagcattcagttcatccagttgccttgagatgtcagctctcagataggcttccagaaaggtttaggatctgtggattatgcagctttttcttgctgctagtgtgggagggaccatttcttggaattttctgtattctgtgaacccaggcaggattttaaccaaaaattggtacatatttggtgatggaagaggaggaaggggatgaatcagctaaaatactcctctgctaagtaaatgactaaggatgatgcttacaattgatgactcaccagactgcaatgaaggtaaataatataataatgttagaagatttgtaagtggttgcctctgagaaggaaagtggtggtcgtaaactactgaggagtaaaccagtatggaagagaagcaagtaacttcttttacgtttcaagcttttggcgttactttttgcatgccttataggtgttattttgaccagaattacttttttaaaatttattaaatttttttttacagttgaggaaacatct

SEQ ID NO: 39101 - DNA, 2007 bp, Homo sapiens
agtagtactttctcaaaaattagttaaataggtcacctttgcaattattgaatgataatggtgtttcaaagactgcatttctacatggcatataatgagcatttcagaatttatttttaaaaggcacaaaggaagaatgaagtgtatttacatacaaccttcatcaccaagcagttttctctgcttcattttaggaaagaataaacagatatttggacttttataacatgaaaagttcattcccccaaaaaacaaaacaaaatatgtggcctcaataatgcagacatctagggaatattagtagaatccagggtctgaatttcttttcaggaacagatcattgtaatcatgtttattttattttattttgcttctctgagtagctttcttctccccaaattaaaaccaaaaatattcaagtgttctgttattttttaaaagtaacacacttgctgataataattaacaacaaattaatatgtaactattaatttgtattaaatgaatcactctgtttggctttgcttctattttagatctaaagctgaaaataaaagaacaagataaagctttctagtttattaacgtttcttaataaatgtacacacactttcatacatatttaaactggcttagatcaagctgcctgctctatcaagggcaatgtattccacaaaagtaattctttacagttcaacatgacatgtattaaatatatatcaaatacttggtacaattttgccaattcagcacaactggcaaacccttcataagaaaggccacaatgtcatgttggcatgaaaatagaatctgggctgagaagtggagagaaaaataaaagttctcttaaggtcaagggcaacagctgagcagctccgggggctccaggggagccatcctgcttcaaaggatacagtgtcttgtgtttatagataaaatgttggtttctatggggggagggtggtcacaggaacaaatgtccctgacacccaaacaaaataatcccaaataaaatggatgatgtagtccatagtaaaaagggagataactattcatgggaaaaaatgcatgacctcaccctttcagaatacacagtgattcatcagcattttccagctttctttcttgcttacttgcttactttgaatctcatagctcagtccctttcccttttgcacctaacgttggcttacttaatcgaagatgttaggggtttgggaaggacagtcaactgtaaggaaagctcatggtgtgtggaagtatttcttgtcaataatgtagaggcatcatctttgctgatgacacatttttctcaaaagctaaatgtgacactcacttctttcctgtttttttttgtctcagaaaagttgtatattaacttagttgataaagaagcccctgtgatcatgaggaaaatcttatgggaataatagatggaaatatatttataaacaggagaaatgagctaaaaaatatcattacaagcaagcaaagttataattttctattgtggtacttgcagaaaccttcaagtgctatcagtccgtctccttcttataaaaatgcaccacagtttaatcaagtaactgtgaaaccactgcctcaaaattgcaaccaaattgtttgggcagtgttatgtatctaaggaaacaaatgtggacttctagaattacattattagtttcttttgagccatgtgcacttcaaagattttttagaatttagtaatgctatgtcacacagaagccaactactacccaggtggaaatactgggcccctttctggtcctctgctgtcatctacctgcctcctggtgatttccaatttttggctcctgcagtgtggtggggaaaagagcgaatttctatctggtttgttctacctggcatctacaagttactaaaggggatgatgaaacactattggtgaaaatgtttttgaccaatctgcttctttccattgcactctaccagtgattcttagcatacacagtactgtggattcct

SEQ ID NO: 39102 - DNA, 630 bp, Homo sapiens
ttttggacacatagttgtgaacaataagacaagctatttttgtcaaggagttcacattctagttgggagactgaacaaaaaataaacaagtagatgtagtaaataaataggaatcatatcgagtgataagtactctgcatagaaataggatatggtagtgtgacagagagtgagtgactcagtgtctgcagtagatggggaattttactaggatagtgatgtaatagataaaccacatttatgtaataatccaatatggttccattatagagagggcagaagcattgtgcccccatgcagttattcagagacccaggtgaatgccaactctgccatgtgcaacccttggcttccaagcttcctccaaatgacgacatccaaggaaaggaacatggaggatggtacattggaggtgtttgctctcctggtctggaagtcacatgcatcacttctgctgacattccattagctcacagtcatagagttaccccagctccccactactaggaaacagcctatcttagtgccagggagaatagaaaaaacagctttttaatgtagaggttagcagtcctcctgcgaggtgtcagatcacacagactatgatgagaaactaatggagagtcttag

SEQ ID NO: 39103 - DNA, 766 bp, Homo sapiens
acccactgaaagaaataccccaggtgtcctgcaaagcattaatctatttcttctttttcttcttttttcctgaggcccaccctcccagcttgaacaaatccccctcttcctccctcctcccctctctgcagaatcccagttccttttgagacaccctccactgtgctggcgtgaccccctgggccctcgctgtctgagaagctaccacccggccagacaggggaggctccgccctgcccctgcacccgccgccctctccccggccgcacgggagcccggatcccgcaggcatctgtgttcgcaggttctgccgtttgctttcgggaaggcgagcattgttttcctctggatgcaagcttttgctgacccacaccccccttccccaatgcctccgcttcccttcccccttcggggacttgggattgccctgcagactccctggacttgagcgttttggtctctggctgcagtgtttgtgagagaggctgcggatgcgacccagctccggctcagctgcgcgcgtttgcaaatgcggctgcgtccagacagggcatggaacacatttccaagctcacgtccccgtttcttgtttacagctgagattataagcaatctatgtgccctcttatcatcgtgtcaggcaatgatatatagtttgtaaatattatttaaaggaaatgatttgcaaaggcaaacaattttaagcaaagtatatggaccatgaggtttgtctttaatgtacttaccagaaggacagagaaggggg

SEQ ID NO: 39104 - DNA, 2023 bp, Homo sapiens
gaaacctctgtggctggcggcaactctgcttgtgttttgcttgcgcctgctgggctcattccacccatttgagccagcaggctgcaactggctcatactactggcctggatcccatacctgccaaggataagccaggagcagagtggtgaggggtgtgtgagcaagtgagcacagggtacagcaactgtgcacagcccagcatgctggctgcaatagggcagtcatctccaggttccagcacaggcagtggttccacgtgaggctgtggctagaccaggtgtaccacaagctgtactgcttcaggcactagggaatacagtggtgcccagaagcttagagacactggaaaccatagaccccaaaagagggtggcacagccctggcttggggagcccttaactttgggctccccaaagtgacacagctcttctctcctacttattgcccaccacttagtgagtgaaggagcatgtttcagccctgtttgtgttacagctctttcagtcttgccatttggtgtgtcctaagttcttgtcccatttccaggaagaatgacgtatgcagacaactggagggtgaacaaggtggagaggagatttattgagcgacagaacagctctcaggagccctgaagtgggcagcttctttctgcaggcaggttgttccaatgagtgtccagctttcagaggagaggagacccatagtgggtagcttctttctgtaggcaggtcatctggacaagtgtccaactcttaatggagaggagacccatagtggctatctcctttccatagccaagtagtcctgatgagtgtgtgagactgattgagtctgggcttttcgtctgctctgaatggagaagtgcatgctgattggtcaatgggcagccacagggcaggcctggaaaaagcaccatccaattggtcaaatggttatcaatgaatttctcactctcaatggtggactttgcccagaactggcagcccagctttcaggcttcaggctatccttggcttgaaagtgaggtttcaccagggactcgccccacaccaagaagctcccataggtcagtgctgagctgcctttaccccatcccccttcctatgctccttggcaccaaagtccgagggggctgaggcaacaggaggctggtgagtcagtgctgccctgagtgcacacacacctggctgggttgtgacagtgcctgggcttggccacaactttgctctgccctggagtgggcacctggagtggggaaaggccagggagcaggaccaggcactttaagcctgcaggggcagggagcttcctgaacccctgagagtgcaaggatgctggggtctggagctaaggtcgggtggctgcagctgcacccaggagagtgggctcctgactcacaaactcagtagtgggcagggctgttgcctgtttccagctaccgccagctccacaaacggcacaaccctggccatgcccccacccccccaatgcagccagcaaccttgcagctgccacttaagataggctgttgctgccatcataaggataattctgtacggatgatttatttttataattttgcataactaactttaaaaataattgttgggagttgagacaacagaaaaataataccactattctaaaaattttagaaaatatctaagactggtgatagattttcacaccataaaaacaggaaagaagaatgaattttcattgtattctgaagttaagctccatgaacaacatgcagtgtatagaagagtcatttaatgatcaggcaaagtagcatcaatattttgcagagttgtttcacaattatgaaccaaactaaaaattattgatcttatttcaagatctctttctttctctctctctgtctctctctctctcaactcagtcttgctaatatattcgcttatttttttcaaagaattggcatgtgactttgttgattttctttattgtaagatttttaaaataattgtttttatttttatatttttatctcttctattt

SEQ ID NO: 39105 - DNA, 2253 bp, Homo sapiens
ccagccaattactagatgtgttgaatgatttcttaatatagttttgaaaaaaaaatacagttcagtgatatagtccatggcctcaagatatttgtatgttgcagaaagtaagctttacgctagcatcccagttggacaatcatattaaatcatagaacagcaattttattatcaagcagttatgtttgtctcatagaaatttggccatattctgcatttttctctttaaaaattactcactatgtgatatgagtgatagacaaggagttttgttacccagatcctcttcagaaatggactgttgcctctactgctgctgctgaccacatgcctggtctagctgtcagctcctttaggtgcctcctcagtgagcgatctggctaaggtcacgtcctttccatagtagcccacatccagtgactgacctctggcgggtactaaagtgcagtcattctgactcctggggaacaagcctgttaagccatacgcactccaaaactccctgcacactcggccaaggctttgttgggcttgcctcaatgtttgacttctctctttgcctactcttactgctgacccctcccttccccaggtgttggtccctgatcaatatccttcatatcaaactgtgctcaatctctgcctttaaagattacaatctataaccatatagaaatcagaagggaaaaatgtttataaagtggataaatacatggtttatttttgatattggttttctgtgtctaatgttacagggatgtgattatttttaaaagtctacacatgctttcagatacttattttttcaaagctacacaatggggtataacttctatcagcttctccagccccaagtacaaatttgaaagtgattatttcagactctgttgctattgctgtaacctgttctccagtgaattagaataatgggagttgggtacatcctctgtggcagtaaagttggctctgctagtacacagggtattatcttctttgtaatgcttgcaagaagaagatcaaaagtagctccgatcttcatcttaaaccatagattatgagtcaaccagggttggcccaagataaatatctgatgtgtggttagtcatatggtgagtcagtgttctaatcagtggtagagttaatcagtcggggttactcaccatgcctaactttcatgcactccttccagagggaaaatacatgcattcttttggcatatttggttttgcatgtacatcattatgtttctcctcccactaccacaagaaaaagatattaattgtagtaaaaaataaagttataaacttctggcaagctaaaactgagaacaggttatcaaagggatgtgtgcctgttcacttttagaagtgtattaggtctttcatagctgagaaaggacagaaatagggagataaagtcgttcacctcagatcacaagctaaattggtggtaaaggctggactagaatctagatgtaatgggtaactttcacccacattatgtcagtcccatttagacttccttggttgactagtattgatgtaaccaaaaagacatctactcaaaattcaatattctaatggtagttattgagaacttactatctgtctggtcctgtttaaagagtaggacatatagcagtgaatcaggcactttttttttttttttatcaagaactttctggcaaagatatatattttgttcctgcgagaggccatttgttgcatatcaacagccagataagccttaaacaaacaggtaataaaaaggacagtcttggctactctttttgtgatttaatctagaacaacatttctctcttggtatttacttcatcaggctgatgtaaggacttgctactgcattcattgtcagcaatggtcacagcaggcctgaatacttttttgttgttgttaactgtatttaaaggtgttgtaccattcacttgcaaagaaactgtttttatcaaatgagattttgctttggaagaatggcaatgcaattcagccatgtttttttctaaattaatgtaacatttgcataataatattttaaagtaattgcttgggccactttctttttttattttttgcagaagaactagcagatcgctgttagaaaaacatttgttaaatttccaaatcataatgtattttagtggtgagaggagctcagtaaaggaaattaaaggcatcgtggactccacagagcatggaacacaatgagctctcaaaaagtcatttgttggcagat

SEQ ID NO: 39106 - DNA, 2237 bp, Homo sapiens
aatagactggcacaagcacatcttatctgttcttcctgaattgagctttgtatactatcagattccactatactagaatgtcttatatttggactatgtagagtacattgagctgagggcaataacaagtatgaaacacagcaggattttgaaaaagattaatatgtcagcttaaggtagcaacctgatccacttattacctccattaaatagctataattgattattcatcatttcaaaacttatctccaaaaaataatagcatgcttaccctatcacacctggactttgagtgcattctactctatttaaaaacattgttttgaattctttttatgtcacaatcacttcacaaaatctaaaagaagtcagagatactaccaggggcaaaacacacttgccccctgcttctcatttgtcctatttagactggatccatatttttgtcttgtttagtagtaaaaataaaagtaaaagggggtgcttagaaatcatagattgtattccaaaacaaacaagcaaaaacaaacaaacataaagccagaccctaactctcaatttcatcaaaaagtagcagaactctctttcatggcaagaacagtgcaagcttgtcctttggaaattcttctgaatcaacaaaagtacgtgtgactgaatcgtgtggccaagatggaatgctgtggcaatacaaattacagagaagatgcacggcttttcatctgctgccctcacccgcagatgtctgtgggatgaaagtagtagtcactgccagccaccccagtcctgctgttctgacaccctgtaatcgtttgctgtattcattacctccctcatcatccactaagcctcctcttaggggtactttatggtacacatttcactttaaaaaattaagtcacatcacgattaattttgcctcgaggatttcacaacatcctttgagctcacagtaaccctgaggatattgtgcaattggagttgggactctcttgcctaagttataactttgtgaaagaaagtgggtgaaagtgggggagttgttcttgcttaagacaattgagtggatattaagcaaatacacaggggtaggtttaaaagtgactggcaaatctggtaaaactttatacatctcgagttatcatttttaatgttctcaccttcttacagtatttttacaggcagtatgcttttgcttgtcctaagtaaaatagcacgctttttttctgtttttctctggggcatgtcttctgtatgctaatctgactcatcattgttaatttaaaatattataaataagcaaatacatgactcaataaatgtgatgagtaaggagaaactggtgtttgcctagccagctcagacctacattttaattaaaaagcatgtctcatacaccatcaatatgttttcaagtgacctgtcatgaccagttctaatcacaagcatgccattcactctttcataataaattggcagattatgctaataaaagaaagggaagctatcaattttacgggtgccagacaagctatgccattgattttataatttatgacatgcacttgcaaaataaaggtggctaaggaaagagtttcataaacaggataaaatgctacaggagaataatcaattagattagtcgacaaataagtggataaaaacgttatgaaaatgttatgctttcctaatggtcaaacattcagggattcagtgtcatattatatctgtaaaatcccacaacaaaaaggtctgtgttaatggcagctatatgtcaatttttaagattggctaattggtatttttaaaagtatttggctggaaaatcacaaagattcagttgattgggactcaaaaattctttgttcaagagaaaaagaagtcataatacaggttgctattgattacaccaataaaatgttaaaaattactatatggcacagtgttttgtgactttacggcctttgtctatggaaaaaccatttaggttagttcacatttttatagaaaatgagagtttgcaatggaaataggaacttgggagctcacagaaaaatcaggggtagacttgggatcagataagacattctacctaaataagcatggttaaatacacattatgtcttacatttcaagccaaaactagttgtttgcttttgattaaaagattagattttgttctgaagtccagtttcaatattttagttttgtcattaaattgtttctaaattgaaaaactt

SEQ ID NO: 39107 - DNA, 674 bp, Homo sapiens
aatacatcatatttctctttatttttttggaattgtgggtaacttctagtctgggaaaatatgatgatccatttcttatcatttctagtataaatgtaaataaaaatcttatttccaatcatacctgcatctacaggacataaatcttggaatattatctgtttacatgtaaatatcctaagcctatgctttaaagagatttcagttttatttaaaattcatgcaaggttggaaggagcaaaaaggtgtctcaggggtcttgtgtattttagagaggaatgtcaagaatgcaggcttcccagcttgtaaaacaatagcttctttgattggaagttcagttgtgctttgcctgacattttctgtttttaaatccaaaggtaaatttaacttagggaggagatatgtctgtttgtcagcttcaaaagcgatttgttttcgttttgtttcttttttttccaagcagtaaatcttttgaaatttaaactctacccttgtttatcactgcagttattgctttagaggttaaagtttgtaacatagtcccttctctacccgctgaaagacaggagacagaaaagcctatttgagaaattctgttggtaaacctattcccaacgaccctatttaaggcagattatgctgttcaaaacatgccactaatctatattttcttg

SEQ ID NO: 39108 - DNA, 1066 bp, Homo sapiens
attcttaccctttctggccgatcttatccttgcttcatccttcactaccacctatgtttagatgattcacaaacttttacctctagttcttatctaatttctcagttccaagtccgtatattttcctgcctcttgccaactcaaactatatgttctaccattatgtttagcccaaactgtccaagttggaccgattattttgttttctccaaaatgtttgtcaaacagaattcctgtctctgtaattatccaagcaaaaaacctggggttcatttacctcctttccccaacatttttcaccatatccaatagatactctagccctgtcatttttttaaatttctcagtcactctcattactttacacttccctctcttctcattgatactgtcattgtttagtcttctttctaatctattatgatcattctctaattatcgtgcctacagcttgactgtctgcaatctcttccattcagatctcagagtaaattttcaaaataaaactcttatcatttcactgtctgaatcacaactcttttgaacccccaccatttacaggataaagtccaaattcctaacctgatgttagatctcctctttcagatgaataagaacagagttcactgacccattttcatttatttattcgacaaatatttattgagtatcaccaggcaatacactaaggatatggaatgaaaaaggtcagggaaaataaaataaacaaaacaaacataaattcaaagttgtaagttctatgttaaaaaaaaattaatgatgtaattgatattaactagatggctgttcttttttgttgtcttgtatgcttctcaattacagcacacagtgttcgtgttatttaaacagctgtatcctacactagattctcgatgccttaaataaagacaagtcttactgcattttcagcctcagcacttagcagtgacagcacagagtaggagcttcatcaatgttagctgaatgtactcactcaggagcatttgcaaatgttaatgttgactgactttgggatgtgtaaaatatttggcaaggtagtggggaa

SEQ ID NO: 39109 - DNA, 2075 bp, Homo sapiens
taactccagtttgagtgcaaaagcttgagagccagggcaccaaaggtgaagatccaagttcaagggtaggacacccatacctgcactcacagacagccaggaagggggtgcgtcttcccttcctcctctttttgttctatttaggcccttaatgaattggatactatcctctcaccctaaggagtgcgatctaccttactaaatttaccaattcaacttgtcaaggctaatctcatctggaacaccccacagacacacccagaaataacacttaacctgggtaccctgtggcctagtcaggttgacacacaaaattaaccatcacaggaatcaatttctgtgactagcccctttcaaaacttttgttacatacttcctgaaaaagctttcagcatctcttagacagtttacgacatcatctgaaacacagaaatgacgcttaaaaagcagccatttactacaggaccctaggttcacctgcctcatgaataattctacactcctgttacttattttctaggaaaagataaaaggtggtattcatccttccctttttcctcacactgtaatattacttgtcaattaacttaatgctctgcttacccttgaggtagcctcagggtactagcagatgtgttttgtttaaagggtacgctaaaactacaaaaaaaaaacagaagtcatcttagcctcttcattgcttctcttagttaatggcagcaccatgctcccagacacagaagactagaaactgataaacatcttcagtgtctccacatctttcacttcaacattaaatcagaattctcaatgcctttgaaatcaaagacactgttcagtcccacagacactgacctcgctcaaattccttctacctctaatgtttaacttccttaacccaacttccaggtaggcctctggaaagacaaacagctactttccccatgtcttcttcctcttctaagaggagggacacacatttaatgagtcagactccaagcatgtgcctggcctacacatgcagggttattgtggattaatcatcacatccacaggtgtggctcttttcttctttctttctttctccttttatggccaaggaatagcgaagtggcccaagcctttctgcacaaggaagagatcgagtcatctagttgtcttgctctttcatgtatatttaagccattagactcaaaagttattgtcgttgaggcaagttggatcacagcatccaagttacagtctaggcttaggaacagcaagaaggtttcttgggcttcttgtctacatgccatgttgcaagcccatcttaacagagttattggcattgtggagttgttgacaaaaagtccaaccaaaaaaaaatattattttgcttttctttgcatttgaccccaagcatgaacatttccctcagcaaccttacgagatgagtggttttgatcttgtgaagattagtataccagactaccagtcctaatggtcctcaaaatcataaaagacatgatcctattgttcatatccaatcacgccagattcttttgtgaaccatctgatgtcctgcttgcctccattgggtactgcatggcacttaagcctataggatgtcatttaagaccatccaatatccaggttgaaatctatctttacaatttttttatacactgaccctgaacccatgaatccaccaccatgaacttcttaaatggatccttcttaggcctccatgcgtatcttatgttgtttctccttccaggaagctttccctaaatcttgatttttcactcaccatattcaattcttccatatttattcactgagtatcttgtgtgtagcagccactgagccaggtttcatggaggtttaaggcatataagatattcaggccgggcgcggtggctcaagcctgtaatcccagcactttgggaggccaaggagaacaaatcatgatgtcaggagatcgagaccatcctggctaacacaatgaaaccccgtctctactaaaaatacaaaaaattagtcaggtgtggtggcaagtgcctgtagtcccagctacctgggaggctgaggcagga

SEQ ID NO: 39110 - DNA, 1440 bp, Homo sapiens
cagctacttgggaggctgaggtgggaagattgcttgagcctcgcctgggaggtcgaggctgcagggagccgtgattgcaccactgcactccctcctaggtgacagagccagaaaaaactttcctaactactcctttcctatgtgagtcagtctgggctgctatgacaaagtagcatagtctgagtggcttacaaacaacagaaatgtatttctcatagttctggaggctagaagtccaagatcaggatgctagcttggtggttccagtgagagccctctttgaagttgcaaatggtcagcttgtcattgtactctcacttggaggagagtaggcaagagagtctcttttataagggtgctaatcccatttatgagggctccaccctccattaaattaccttctaaaggccttatctctaaatattatcacattggggggtttggatttaacatataaatttggtgggggacacaaacattcaggccataatacttgccctacatatgaacaaacacacacacacacacacacacacacgcctggttcgattagagcaatggtttccaatcctggctacataacagcaacatcatcacgcatggctttttaaaaatactaattaaaaatattgatgcctgaaccccactcttcccttagagagttcattggaccaaaagggatctggagcatgtgtgtatgtgtgcgtctgcatgcatatctctgtgtgtgtgtgtgtgtgtgtgtgtgtgtgtgtgtgtgtgtgtttccccagggatggctctgttccttggtaaaacagaatttcaagttcccatattaattattaaccatctccatggagtttgcctcatgccctggaactttaaatatacctaacactctgggattttcagtgttagtcaattatatttctattttatttctttcatcttaggttgtatttgtccttcaaataattttccaactaaacaacaatgcccttgtcagtgaatgattgatttgcctctgaacaaaactgctatatgtctcctttaacggctgccctacaaatgtctggcccttggatatgatatttttagtgtttctaaagcaaacctcaagcatttggctatacctgagtcaagtacaaagatagtctggaagtggtataattattatagacattgttaagtaatagctgaagaacaattacaaatgcaatgtggtatgtcagacactctaagcatattttctccgttgctaatatagtccacccaagaaactgcatttctataccctgtttatctgttattattagaaaatcatgtgctttatatcacattactttccaggtaactgaggcttcccctcttatatgtatttcattaaatagatgtgcaatgcttttttaaaaaacgtgtatatttcaattttaatcattttagattaaatatgtctaa

SEQ ID NO: 39111 - DNA, 1769 bp, Homo sapiens
tgcttcccctaaaatgattcccaaaggtgtatgggtcaacagagaatggaatccttcacagtgggacagggagccagcagacagtatctgggtatgacatcgtcgatgaaagactgtttcaatcacctaatacatctgcaaaaactgttttggcacccagttattgagtccacaaaggtttaatttaacagtgcaaatacacaacttcctatgtgtatgtgtgtatgtttttaatgacctacatacaggctactattttatagtggcttccagcagagagagggaaaaacaagattcaactatagaagctgtctatatttaatatttctgttagttttctgtctgccagtctggcagattggcccaattggaaaaacaacatctatgattgctgaaacagttcctggctacatttggcacccttaatcactgaatgacacagaaatccctgtctgaaaatctaaggcaaaagaggccagcctttgtatatcaccaagacttatctgtttgtctttatttcgaagtccaaattctaatgtcattattcagttcaatagcatagcagtccacaagatttcacaaaaacaatgaaaactctatgcaaatccttgataaactgatgtcatcagtctcatgtcactataaaaaaatgaatctgtctcctgttttgttttgttttgtgctatgtttctaggtcaagaaaaaagaaaaaaaacttacattcacttcactcgaactctatttttaacagtaaaagagttaaagtaatttttatatattgataggtaacaagcaaataagaaaaaaaataactattggcaccatgtgctttagatcactatttggcttacaaaattcctaaatgtggtgaaaaaaagtttttaagtactgaacgtgaagttagaagtgccaagtttgaaagctggtcctgactcttagtagctggttgagatttgacaactcactcaaccctctgagtcactcaatctcacattattgcaagatcaaatagggttccatgcaaaaaagctgataaaagacaaagtgttattcaaatgtaacatattatactagaaaatgaaaagaggacacaatagcctataggtagtatttcaatcaaagtttaacattgaatacatatataattcttaaaggaggaaataaaaaagactgaaaatcttattcccagacttcatcagtgttcatctgcattttttggtcctacatttaattagcttctgaaaactcaacagaatgctaatggaagttatgtttctatgcaagaaaccctggaaacatgaacatctttttttctgaacatttcaacatcacaaactacaaattactgccataaactgctgcctgtagggccaggtaccttttaccctcagtcctgtggtggccaatgataggaagcacatgtcatcagcagtgatggactgatctggggacaggcacaggggaagactaataacacttcagtgaagctttgtcttggttataaaaacaaagcatgatctttgaagtcagactgttgtgattccaatcttggatctaccatttttcattttcttactgttgactggcataatcacactgcaggataatcatgtagctatgaggtttaacaggattatttaaggaaagtgccccagtccttagcacatagaaaatgcccagttaggcctggcgtggtggctcacacctataatcccagcactttgggaggccaaggcaggtggatcatgaagtcaggagtttgagaccag

SEQ ID NO: 39112 - DNA, 1386 bp, Homo sapiens
gaactggctttacatctaaactttgcaagtatattccttaaaagatttttactgttgctagggagaggcctctttactgcacctgatagctcccctaaacttcttactgatgttgaaattagtttgccaactcttttcataattagagataaaatttcaaaagcatatccccgtggaaaaaagtatataatgtttgcactaggctagtggaaacaacatcatttacccgagtactaaatgtgataaggaaggggtgagaaaggggacctctctgggaacctaaagtggaaagaaagacaaacagcagaggtcaaggaagagagaagaaagaaaacccaaggttccacacagcaggatacacaggctcctattctggacttagaaagccatcgtggttccgaatcacatcctacagagaatggtaatagccactctagcaaaccaaattcttggaatattagagatatgtgttggaaaggtcagagtgcctccaattgatccccatgttgaaccattctttggcacagtcatttgtaccccagcctgatttgtcactgacaggaacaccagagttccttctgtagtggatatttgtatgtgttcgcttgttttcagggccagcacgcacctccccgtttttccaatattaactctagaattttatctggggatttaccttccagtatgtctcacattaggtagagcgcttcttccactcaaaagtggaaaagatggtaaatgttaaccattagcctggtgactgtgattggttcagagaattgcacattagtcaattaaaacaaaacagaaacatggactttggctgggacttctaagaaagatacccttgttctatttagttggacttgaagccataaagcatggaattgtgccagccattttgatactacaaggagagaatattctattagagtgaatccaagtggaacctgagtacagtgattgaaaagaagaaaagggtcccaatgccccctttgagtatctggctcagacctcacctgaagccagccccatacattgttcattgtgtgagtcaatagatggcacctttgcctaaaaaagcttgggttcagttatgcatctcgtggaaccaaatgaatcctaacagataaatctactctcaaacaaatatcctaggaggaaaagaaaaagctggctgaataaattaacataaagaaatggtaaatacagtgctcttagctcttagcctaatgtggtataagagttgtcttgtgaagactaaactttcttactttcttccttttctactacatggatttctgtaaataaatgtatacggcagaaataaactaaaataagttctttagtaaacaaaatataaaaattaacttgtaatcataagct

SEQ ID NO: 39113 - DNA, 2433 bp, Homo sapiens
tttccccaaaccatgtaaggcaatgcaatctaatccatgcagtggttttctgtcttgtatccaaaaaaaatacaagagcttcttcagacagagaatttaagatgagttgaggactcaattctgattcattggattattccacttgaaactaaaattaagctcacattcacatgatgtgcttgatgactttgactttctcaatttctgtcatgaactagtgatacagtaattgtacaatatgcaaattcagcaccaacagaaattttgcattgtaatttaatttatttgagttcatttagtcctttataatttctttatccatcaatcttttctaatagattgtgaactcctggaaagcaaaagcttcatttgtgtctactttgtcagctctctactcatagtggaatctcaactgtttgtgaaataaatttagtattggtttctacaaagaagtatattaagcatttcagttaatatcttattaaagaagtcccacaaataaggttaaataggattcttctgggcagcattcattcttatctcacaaacatacatttttagacgttctcttaagcacaagacctatagcaataatatctagcgtgccctgactgctcactctgagtcaggccaaacactaggcactctgattccattattccttctctctttgcaactaccttatacagtatgactgtactatctaaatgtcacaaataaggtagctaatgcttaatgtttaaagaactttatgtacccaaggtcgtacaatctgacacctggatttcttgttgttaactatcgccctatgctccaaagccaatatgttttgcatgttgataactatgagaaccagtagaaaaatgccaagtctataggagcaataaggaagtaattacctttactataaactttaatttttcttgctttttgtttcttagtttcagaaatgagatcaaccacataaattcatttaaacccaagggcatatatggggatgactgtatgagatcttaaatccaaaaactgtttggctcataaaggttggcataagccagcaccactggaaagcacagtctgctgcatgctcagagaaaacaggtgtgcagaatggggtatgaatcatgcaactggcttcgattggtgggttcacaaagttatttgagcatgggacataggccattccctattatgtcagccacttctcctacatgtttcaagagatgaaaaaatgacacaggtcaaaaaaattacaagcattttctatgacaattgaagatgcttgtctggacagctgttaccctgaatcagcaaatagtttaaagtgactaatgttcattctgacacaaaatgttatttacttgatcttttcatataaatgttacaataacttttttcactttaaaggatttttgtaatgtaaaataggaaaagttatctaaattagcactagaaaaaaaaacttttatataaggttaaatccatttattttaccaatagcctatattgagttcaagagctagcaaatagggtgtgagatcaattaggggaataccaagagggctgcactgttaaaatattctagaaatctcaatctattttcttaaggcctctttaatagatccaaggagaaatatatggacatgtgaaactaactacttgtcagaacagggagaaagttaaggacagttttcaaaaaaccaatagtagaaggtactttatccaacctaaatccttacctaatggagaaaaaacaatcctcttctccaatcatttctagctttccaaagatttttttctgccaaagtcccccatcaaaagtaagagaataacaatcttagaaactgttagttctgagatttgagggagtgggtggtacagttggaaaaaaactgatttgtttttttctttggggtagggaagaaaggagtttgggtagatatttgacctatatctacctatttgacaaatctaaaattagaccctccattttcacccctttcttatcccaatctttcatcatttctgcagtctttaagacctgaatcccttgttggctgcatctttctctcagagtgctcaagtctatggttattctgctattctatattctatatttcacatccaaaaataatttttgaaatacattgtttggttaagtttgcccccaactacattttcttctaggatcatacttggtctttattctgttactgttattttgactccatctctggatgcaaaagaaataaacctgtgtgtgcagttcaccgttttcaataggaagactatttatacttaataattgagaattcacttaaccattcattctgtattcaaaaaccacttattgaatatattctaacagccagtgtcctaaaagtctaataagtatattatgtattaacttactattttttaaaatcatatgtc

SEQ ID NO: 39114 - DNA, 1343 bp, Homo sapiens
gccttttcctctgttggcagacatttctttctctttttttatttttttattccttgaaaaaagcagcttattgaaagcttaatgagtttttcttttctgtgttagaaatcaggtttatttttaagcttctttgaccacacatgtgctttgatgaacttccctcccattcgtggaaaagagctctaggttcctaacacttccagctccaattctccacattctccttcacttcacatcgacccctgggaaacttagagtgagaaaaagtcaaagggggaattttttttttttttttgtaatgtactgagcttccttttgaagacgaggaaagagagttttatcttcagtaaaaacaggcccttttgtggaaaggagacgtgatgactgatcaaacagcattcagcattccagggatgccaagatatcgctgggttaaatggtggagatgacccaaagaccctgcgctgtttgaaaataaataaaattactccggcaacatattccgcattcctgtttgtactcggcaatctacatgctttagattctgcctgtggttaccttcactcaggtcttagctcacagttgaatttattcagtcagaatttactgcaaacttccttatgggatgcatgaaactgggccctaggatggatggggcagtgtgcatggtaaggaggcaggatagagcaagagggtggccctgacaccaggaagtgctcagcctgaggccttggaatattgcagagccatggattaagggcctcatgggcacagggagagagtgactcactctgctggaggttgacctccatcaggaggaatgcctcgtggtgttttgtgacctatgaaacattggcagcctgcagtgctgccgcacaattctgttatgtttttcagcactgccaagggtagatttctcatcttaacctcagtcctcctccagtctgcatcctttataatcctacacaacccccagcaatggttctctaagcacaccctccctgactccagttaaccattttttctatcctcaccccaaattaaattcaactctctttgtgtatttcttgttaaacagctatgtgtagaaagctatgcaggacacagaggtgcaagatcttgtgcatcaaaaagcttatcacccagtaggagagttaaacacgtaaaaatttaagtggaaaaaaaatgtaatagaactgcaagtgctgtgagcacttagacaaggtagtgacacactttggttcagcgagattgtgaagttttcacaaaggttctggcacataaactgaaccaagatgcatggacacgtttcctagagctccaaggaacagcatgagcaaaag

SEQ ID NO: 39115 - DNA, 739 bp, Homo sapiens
cccagagtgctgggattacaggcgtgagccaccgtgcccggccataaatgtcttaaaagttgaattaataatgatggctaaaagggtaaatgcgccccacttgggtagaatgtcataattttaacaacggcctgcagaagccagtctagagacagcaccatgactcaaaggaatgactaatatcaggaatttcacacaccatggtagatgcaagaggggaaactctatttggggaattcctgattccactatttatcttgccaataagtagaatgagtttcatctgcattaaatctacttacactaaagtagcaacctctgaaataagtcttgtcatatccaccagcctcattcaaattagactgattttctaaatacagtgttttttggcaagattatttcactcataaaaaaattaaacatgagaactcatatatgattaagaagttttctacgaatcttaaaaacatgcctgatgaagttatacatttatgtgatgacagctccaacatactcaaatataaacgcccagctctacacattgcacaagtccagagggagtaccattcgtgttgaactttgtataagtggtacttcctagaaatggacaatgaatcattctctcaaaatgtagtgtgtttatgtatgtgtgcttgtggatgtacacacatcctatacctacatctatatctgtctgtatctatatctcaaactagatttggtctttcagaaaaaacct

SEQ ID NO: 39116 - DNA, 2818 bp, Homo sapiens
ctttaagacttgaggtacttcttatgatttaagacattagaccataatttgagaatgtttggaaaaagcatgcaatggctttgtttctgaccatcactgcataaaagtctatatatccaaaagattttacaaacacatgtgggtggctaatagtattgttttaagctacattttagttttttaaactaactttacaaacatttttgagggtagcctcaatttttaattaaaataattgtgatctttcttcttgatcatctctgtcttagcacttctcatctcaggatgtaagtccaaaaaatgcatctctttgctgcataagttattgtcagtcatgactcatttatctggtcagaattaaagaaaatagtttctactaaatgctagtgtttcctctgaggtatgtcttttggggtgtggcatgggagtggatagacacagcggtaacctttactcattcatttgatacatatgacttgagcacttcatgggcaagactctgttagatgctgaagatacagcaatgaaagagacagatacagcctttattctcattgagtttgtattaaaagagacacttggacattaaacaactagttacacaataatttaatcatgatagtggtaagtactaaaaaggagaaaaatagcttggcaacccggaaactcttcagaattagccccctttttaaccattgttgtcctatcctttgttcctatcatttattcctaggagagattttatttaaactacttataattaacaaactccagacagtctctagtgaatgactcaacatgaccctgcaaacttttcaaagagatcagagtacaagattttgaaatataaccaacatgttttgaccaaacttaacctatgaaattagaccaggataagttaaatataaacaggtttctctaggagtaaacatacatgagacaaacacaaaaaaatgtatggtgagcagttcccagcatagcctcccccatcttctcattaaatacaaacgaacactgggcaaaagaggacacattgacaacacacagaaaaactaagattgatagtcaacctaaaaccagaatctaggaggaactggcattaattataagggggttagatctggattgtgaaacacatatcaaggcttaaacacatggcatagtgaatgaataaaggctccttgacagagaggctttccccctctcagagaacaggcaggttgcacgtggacccctgggaatttctctgaaaagatagaatctacttccaggcacaatcaatgctgggagtaagcaaagcaaattgctatgaatgaggcaggcatgaaccagacttttgcgtagtactgttttgttttatgtttaatattattatccaaaacagtagagtaaggaaaataacaccagagtagcgatacactaaaacactaaatgaaggccttctagaaatggagtaatgtgtagaacagcctgcacctcatctgaaaatccaagaaagatatgagacaacaaggtcaaggacaggagcaaagacaaataacttacccttctactgaaaactctaagtcttgactgttcctgcattgtaaaagtatgagacaaaagacaaagggggaacaaaaactattatagcagaatgaaactattagaacagcatctgtgaagcttgaaggaagaatatgctttgattatgagttagatgtaacgatgtccccattactgaaacatgagatgtgtttcctttcaaatcagaaataaagctagaaggcccactctcaccattataagctaatttctgaaaggactagctaatacaatcagccatgtaaatcaagcaaggcatatgaatatttgaaaggaagatatagattcatcattttcaactagaatcaacataaaacaaagaaaaattaatactatctaatattttggtaattaccatttttaatgtaatatataaaatacactcttctaaatgcaaacatcttaaatattttcaactaaacttaaacataagtgctaaagggtcacattaaaaaaataaaaacctcagaattttactcagggactcaaaatgcttttatataagaagacttatgtaatgaatgagtcttcctgcatgggaagtttcaatattctaaagatgtcaattcccttccaactataaatattaggtactccaaataaaaattaggcaatttttgttgtggagatgagggtagagagtgggatcttgacgaatgatccgaaattcattgaaagaataatcatgagttaacaaaacattttttagaaaaccaagagtaacagatatttttcaaatgacaaaatgtgttataaaagtacatgattcttatacttttcaagtaaacacaaatgacctttgttgtggactgtaaatgtaagtatgctcaaaactgaagcagcataaaacccaggcctacattcactccaggtcccagaatgatgacagtaggaagtgcacaggttatagtggaacagaacaaaggctggtttaagagactcaccttctcctgtagcacctaacatcactattttccaaaaggaatgactgatagggccagtctctccccatcctaggtgaactgtcccttatggacatacttcatacttaaccattcaaatggtcttttggcctccttcatgctcaccatatagttatcactgatgggaatttaattcaaagtccaacaagcaataactgcattaatagacttagtttcacttgatatatcaagtttatgaagaaagaaatactttcttcacataacaaataccaaaacatacaacaaaatgt

SEQ ID NO: 39117 - DNA, 3364 bp, Homo sapiens
tatatatatccacatacacttataatggaatattatttagccataaaaaggaaggaaatcctgttatttgcaacaacatggataaacctggaggacattatgctaaacgaaataagccagacaccagaaagagaaatactccatgatctcacttatatgtgaaatctaaaaaatcaaactcatagaagagatcagagtagggttgccaggaattgggggtaggaagggggaaagaaatggggagatgttgatcaaagggcacaaactttcaattatacgataaataagttctgggaatcaagaacaaagggactgtagcaaagtgaccacaattgaagctattaatactgtattgtctacttgaaatttgttaagagaatagatgttaagtgttctcaccacaaaaaaaaatggtaactgtaaggtgatagatatgttaattagcttgtgttgctcattttacaatgcacactttaaatatgtttatttgtcaattatacttcaatgaaactgaaaaaaatctcccttaccagatgaaaccaaagtatgccttctttggtcaatgtcagctgcagaggccctggaagccatgcttgctgaaacctaagctacatcatctgcatgcctacttggacactagctaccccagtcaaagcaaagagctaggcatatccaggtgtattattgggcaccaaatgccagtatgctcatgtcttctggaggttttctgtcctaggcatgacctatgaagatttctggaggaaagggcacaggagatcaaaatatcagcattaatgggggcatgactaggttagagaaagaggttcaaacacaaggccaaaagagtttcttcctccttccttcctgacataagcaacctgctggtcacaggcagatcagccatcagggagaaagtgtttgctctgattagagctccacttgaaggacagcagagtgggtggaacccatggactgtccagctcccgaagagctgatggtcattgatgcctgcattcttcctggggtttctgtgacaaaggaccacgaagtgcctggcctaaaataacaaaaaagtatctcacaattcaggacactagaagttcgaaatcaagatgtcagcagggctgagctctctccaaaacctctgtgggaggatccttccttgtctctttcagcttctggtagccctaggcattccttgactggtggctacacaactccatatctgcttccatcatcacatggctgtctccttctgtctctgttttcgcttctttcaagaacagtcacactggattacagcccacactaatgacctcatcttaacttgattacatctgcaaagaacttatttccaaataaggtcacattcacaagtaccagaggttaagatttcaacatatctttttggaggacacaatttcactcataacaatgactaggacctttagtacatttatctcatcacttagagaatctggataaagggatatcagaattttgccttccagtaaatcagataaagtgtgccatccatggagaggatacagtgagggagaagagaagagcagagaccttcaataaagataggttcttattctatgagcaatactcaaagaaagcaagatttaaaaagaagcacagttaattttaaccttaaaatgaatgaacaaggatttactgggacagttttgacatcacctctgtgttcatttaacactttatgtgtcaatctaactatgaatataagttatttaatatgccaaaataaatttgcatgtttccctcatatataaaattatgttcacctgaaggaaacagctgattgatggttaaatattaaacatgcaagaaaagagaaaatatgttcaataatcataatttaaaaatgcaggttgaaaaaaaatgcttttgcctatcaaattttgttgttgttgttgtttgagatggagtctccctctgtcgccaggcaggagtgcagcggcacgacctaggcttactgcaacctccacctcctgggttcaagctgttctcctgcctcagcctcccaagtagctgggactacagatgcctgccaccatgcccagctaatttttgtatttttagtagagacggggtttcaccatattggccaggatggtcttgatctcctgacctcatgatctggccgcctcggcctcccaaagtgctgggattacaggtataagccactgcacccggccaaattggatatttttatgcccatcaaactggtaaaaaaactttaagaactccatagtatgcattgttattaaggttggtgcaaaagtaattgcagtttttgccgttgaaagtgatacaaattagtgatacaagtgatacaagatcgagccactgcactccagctgggcgacagagcgagactctgtctcaaaaaaaaaaaaaatcaacttcagaaaaataaagaaagaagtattcacatctggcaaagtagcatcaaagtggacttccaactcttactttagcaaaagaagatctgacttagggcacattaggggctttttgcaggaatggagcctagtttcagtaaaaacttttagatatctgtgtttggacatagatctcacaacttaaatataaaatatttagccaatttggcccaaatggttataataaaatcatgaaatcctaattaattggtctttcaaaagaccaatgaattaactacagttgtacaaagacactactttattctctattagtcttttatttctttaaaatcaaagaacagaatcaccataaatgagaaagcagcatccatttttgacttgtgtattaggcaggccccacaaaaacatcataaaggagtaaggtataagatgttattccaaaagtcttctgttgtttcatgtcgtatatttagagcaataaacattgttttgtctattttgaggtttgatttctctcctagaaaatatgatatttcattaaaccagtatgtgttcatggtttcttttcatctctttttaaatctcctccagtcattaagttgcccagaagcctttccagataagaaagcaaaggatatttgaaaataacataaaaccagaccaaattcctatgcactaaaaaacctaggaacgcataaattatataaattgtgtgttcttgttacacacagttaaaattactgtcggtgccagctgtctttacatcagagaggatattttgatctctgctgagccctatctgtgtaattatttaacattgttctttagccctctcaacttccatttatcagtgccaacatccagggtgccttccagaaaagagtaaaacagttgattttgtttttctgatttatttattaagactttcatattaa

SEQ ID NO: 39118 - DNA, 1428 bp, Homo sapiens
acacagggaccagaaaggtttgtatggctgagaccgattaactgaaatccaaataacaaaactctttttgttacctcctctgctgaccccactccctttctcagcacgagctcagacacatataagtgacttcattcttagtatctcatactgttttactaattagttgtgccagtgagataatcttgatatgcttgctctctactcttaaactgatagacaataacaaaattatgttctcaattaaaggaaagtaactggtaattgatcagctcacagtgggatttgctaaagcatattgtgactttgagctgaaagcacatcataatcaaggttcttagtaaaggaccaggaacaagctaatggtcccagggctttctgaaagtgtgattatgtttgcttttcttcttgaatataataatgctagtagaatctttttagtagtccattttcacactgctataaagacatacccaagactgggtaatttataaaggaaagaggtttaattgactcatagttccacatgtctggggggcctcaggaaacttataatcatggcgtaaggcaaaggggaagcaaagaccttcttcacatggtggcaggaaagaaagagaaagcaaaaggggaggagcacattataaaaccatcagatctggtgagaactcattatcatgagaacatccaatcaccttccaccaggctcctccctcaacacctggggattacaattcgagatgagttttcagtggggacacaatgccaaaccatatcaatcttttaaaatgcttaatcaataagaagccgagaaatagaaaaatctcatgatacaggaatgaggcacagactaacttagaccaatgattagagcaggacaaatatgcaagaaagtaagtgcattgaacattaatctaccaagcagagaaatttgatttcaatggaagtttaaggtttaaaatcatcctctgactaataggaaagtcaggaatatttttagcagatgaacttcagacacttgtgtagtggttggaaacactgctatctttaatcaggtgccaaccaattatactgcagggtcaaagtcaaccccttcccccaggaaggacctttctcttatcactattccccctctctaaacatctcctaaatttaagactccaaaagaaaggaaaaaaaaaacacacacacacagaggtgagaatacaatgcattatttatttttcaaatgtacagttattaagtattttagggggagagataagagaagaaaaataggtagttttgaagtatttataagcatattttatattttagcaatctctagttcattgccagtaacctctcccctctcttccaccactgtgacttaagttgaatatgtaggtttatccacagaaggacagcatcttttatcagcttggtgtctac

SEQ ID NO: 39119 - DNA, 909 bp, Homo sapiens
ccacggagaggaagtgactggggcagtggttaagcatagtccttggagccactttgcccaggttgaatcacgactttctaatccccagccacaaaaccttggcatgttgcttagcctctgtattcccccaatagcattgtctgtgaaatgaaaatgataaaacttcctttcagggtttcggtgagaattgaccattgcacataaaattcttagaacagtgtctgacacatagtaagggctagatacatgttagcttgtctgaagcatccctgagatcccttccagcaagaaatttctatacttttctgaaattaaagcaccaaattaatctcttagacaattacataaaatttgggggtctgtggcatttcctttaagatagggacgtggaaaaagcagataggcataggtaaagcaggtggccacttacataatgtgatccagttggatgaccatattctgtgttgaagaaatcaagcccctttgacaggggaagggggaagtggcactatgaataatttcagtggaatgattgtgatctgggattgtgcaagaccactccaggacatgttgtctgcaccctctgtgggttatgagaggacttccacctgccctgtaaatatctcacttactattgagctgaggttgtcctctttcctcatactgagtttgaatttcccagcacttgagatacccaatatcatagtcatcccttaaattagaaataaaacccatacttaaaaaaaccctcatatacctctactttattattcctactcctattctaaatgagattccactaaattttttgaaagatgcatgaatctttacctaaaccttataccatgtacaaaaattaagtccaaatagatcataggctaagatgtataatagaaattataaagcttt

SEQ ID NO: 39120 - DNA, 848 bp, Homo sapiens
ttaactggtcattaaaattgataattatgatgtttgtttagaaatagattttaagtgatcctgaaataatattaactttaaaatgcagaaatcagaactacacactagaataaagacttgcaaagaataagcacaaagaaagcagctattgtcagggtggtgcaattgattagcgtatttgtttctattctttttttcagaagcttctttgctgttatgtttatatcctccattttaaaaatatgaaaccaaaactggaaaatcattaacacaaaacaacaatttacaaagagactctgcctgggaaggaggggcttggagggccccctgctgctctagtcttccccatggagagcattcaccagaatgatctttatcagattagctggggtggtgccaagagtccgaaggttaggaccaaagagagaggtatcaagggaggcagaagaaagccagaagcaacacaacaactgcctccactgcatgattaattgaggagataaagaaagagatttttaagcaaaaggtctgaaaagatgagtaggaagagaaacaggtttcaaccaggaaggacaaagttaatcagagtgttatcagtcagaaccttaaggcagatgctgggtaggaaagaaatctggagcccaggtagtagacaggacgaatgcagctccaggaagaacacaaggaaagggtagagagggacaccttagtgggacaggatgagtacatcgacaagtaatttccattttcagcattccaggataatcatagcaaatcttatgttcaaatttctaacaacataaataattagaagagataataatatcctttgttaacacaatttcatt

SEQ ID NO: 39121 - DNA, 2864 bp, Homo sapiens
ttgtttgttctgaaattcattccctagtttttctctgccttttgtcttctctggatttcctttaaatgcctgttctttacatgtaggctttcacaagactctctaactagaatttgcttctgactttgtattctcctccttgacattctcatccactttgatatctcaaaatatcttctttctgcttttggcacctaaacccacatctttaactctatcttctgtccttttgatcaaacttcttctcagctatggaatgatttaatgctggttgagttactagtgccagtgaatgaacactgctcagaccaatatcaagtgaaatcttgcatgtatcttatccactcaagagcaagatagagctattgattgggttactcagtgttttgggttgagtttcaccaagagccaactggagcaagaatttgaggagaagtgtgttatttggcaaagtcctggtaagcatatctacataaaaattctcccatcacctcaaacccaagtgttccaaactgaagtctttatccgcctccccccgacaagcctgtcccttgtcctgtgattcttgcctcagttaaattgcctctacctcccagtgatgcttcatgttgaagtcctctctttcattcacgtccttttcccaaggagtttctctcatatatgttgcctcctttcaggtgtctttagttcagagtttcatgatctctcatcaagaataacgcagttgcttactaacagcattgacttagcaactcaccattcaccatccattgcatgtatataatcacatagcaaaattcccatgtgctgggtattatcattagccccattttagaagtggagatattgaacctcaaagaggttaagaagcttcttcaacatcaccccagccagtactcagtgtactgactagaaaatcagctagaaaaatcttgaagaatttccactatgctagatgactcattggagtggattgtaaagtccttcctgcattttatgcatcagaggagaatacactttctactgctacagtaaacatagtctttgagagggtagaatattagctggagcgtggactctgggcatggactctggattcactctggcctgggtttagatctcagtcttgccatttacaagctccatgggcaaattagtaacttttctaagccttcatttttcccattaataaaatggaactagtcaaatctacttcagataactgtagtgagaattaaatgaaatactggaagaaaagcatctagtatatgcctggcatgttacaggtgctctgtaaatagtaatgatcataataataattctataaagtttttttaaaccaaggaagaaaacagaagggagtataagggatgacgtaacgatgtaaaaaagtagtttctttttgaacaaaattttagaacaaataaaacaggcaaaatctcaaatctgaacactcacttagcaatgccaaactaaggagtcattttcataaaggtagaatgtactaaagcaatactttatttggccacaccatctatttacaaatcttcaccactgtctctgaaaatgaagaaatatagccctcatttggtttggattctacctgtcttcgcaattttcgcaaaggttctccatccttccccttacaaaaagctatttcaggtcaatccaaaaaagtagtgacagatcaggacagtgacagatcactaatgccttgaggctggtctcagcgcttacaggcatgagtgggaaaggcattagacttcatggttctgtcatagaggagccacgctcacatgacaatctttggtggagtctatggtcatatctttgtgtcaaccaaatccacattccagagcccatcagtgatcaatccactgtctgggtagtgtgttggtataagaataggcattcaaactggaaaaatgttgacacagtaattttctctatgtggtttaaagaaaaagtgagcagagatattataaagatgtgagattccagtgagacagaaaagtatggctagaacctcagtgagaagaggtgctgatctcaggagacaatgactgaggccagcgttctgctcagccagggtgggaacagtgagtaggttttactgaaaatgactgacttgaacattttctcatggtggaaaagggattctgggttatacaaaggtttggagtgtaaatccattacacatctgcaatgctccccacctcaaaaaaaaaaaaaaatatctaaagttaagtaagaagtttgatctaaaatgggctggctatgttttggcaagtccaggaaaatgagaatgcttccattggaactatttcattctccattgcaaaacctaggcctctttctttagaagtccagtgaactatccctacaagttcaaacagtgtctgccccggggtgaaaggtagggaggaccatgacatagtaaaatctagagacagggagaagcctagaaatgtggtggcactaacaaagcactttcatcttcaaagctctttataagtgttaattaattcatccttcccacacccatataaggcagcaagaagagatcaaagagctctgcacagaatttggcaggatcagcacagggaagcatgtagcccacacattgaaaataagggagtaagtaagcacttagtaagagctcttctcccaagccccacctcctcaccaccacctccaacccaaaaaaaagtcacattgaggagatattctggaagagagagataatgtagtattaggaaagacacatttagtgaccccatgtccccttctaaaaatataattagagaagaagataaataagctttaatccaaataatcctcgttgttcctgagttcattaaaac

SEQ ID NO: 39122 - DNA, 1390 bp, Homo sapiens
actaagctatttcctgaaatcaacaagttttttgtttaatgaaaagccattgaaacctgcaatatgtcagacacaccatactacacaacaaattgtgttttctcattgatatgatgtgacttcagaacacactgaatctgaaatgtctctgggatttaggactaagaactgtagttatagactgtgaattccatgaaagtagagatttcattggttccattaagtaaatgtgctttgaatggatgaatgataagatcacatgaatcattaatctcctacaagatagtcctgaagatagcttcctagatgacctgaggtcacataattacatcctgtgctgtggctgccgcaaacagcccacatcccaggaacttctgaggacaggttttaataggtagttttatatacatatagaaagagagctggaaaacgtctcagtatatactgaggccatgaggaagctgaaaccagggagagttaggagagaaagaccaaggacagaattttgaggaataaagatagggatgagcttcactgtcttccctgcccgcatgtccatctgatcttcagatgtgggatttcacagcttctcacagcagactgaacttcaccctaggttcaaaagagcacaaaatcaaggctcaaaagatccctgcctggccagacaaacatgttgccttgtgcctgagatctagccatcacatatttatccaattgtctcatatttgacttttattcttagtatcttactccgaattactccaggattttttagacaaagtgttcttgctttgtttgagccagagctctcagttctggagtcctgaatcctatccatctgagaccctctgcttctctgtacctctgctatttgcctattgccaactcccaattactccacccacctatccaaattccctcttattgctcattgccagactttgtcagactgtttgtgttggcagtttcttcacagtggatattcttgagctgtctaccttccgttgaccaagcctagggtctgacaggtagaggaatcatttccacagtgacccccgctttatgctttcctcttttgagacgtgagtcatttaactcctgttatatgtatgcaattggaaaaattctaggttggttatttactggctcagtgttgagtcactcttgatactttaattttggattaactggattcatgacttttttttttttcttcactgaagttcttttccttagaagggaaaagaaacacaggtcttcctgggcccaggtctccaacgcttgctgggtgtttggccagtcctcctctgaaactcagtctgtccttgtctctgggatcttctttttttttttttttttcctttttttgagacagacagattgtcactct

SEQ ID NO: 39123 - DNA, 873 bp, Homo sapiens
acatggagacatttattcttgcactcacaatgagtgagatttcgctatattgaaggagtactaagaacggcgtttaaagaaagaagttatgcgaggaaagtgaaatattttcatgctgtcggtagtgtgtgaacattcatttgatcattccattctgtgatcttttcataacaactgttggatcatatagccgtccagcaaacaagtctcttccatgaattctatttccctcttgggccatatgccaagaataacagattgaactttaactccaagtctgaaaagtttccttttactgactagagttcaaccccagtctattatcctaaactaactgataaagcaatcctttgatgctgtcctttgaacaagttgtgtaagctaaaactcagtgagaaagaaaaaagcagcatataaaggaagcttttgagttagcagctatgctaattcttaattgcagacatagtacaaacatttcacaccttaaggttgcaataacaagacccacaaaacttcaaacatagaggcagatatttctgagttcattccttcatctcacacaaaaacctaagcggccatatgttaccttatttttcctgagagctatgatttatgtacattccattttcccctgaatctggaagcaattacccctgaatatgaatgtgacggcaatagaggagggagggtaggaagtgctgtgttcacacagaacagtgtttacatccctggcactctgaatatacttctaatatagggtgtggctgtttatgttgcaactatttatttaaacctgcttatttgtttattgcttccatgaaccatatgctaaattaccagccaggaaaatgtgtgtgagcccttggcaaaagt

SEQ ID NO: 39124 - DNA, 1148 bp, Homo sapiens
attgtaattataaaataagaaagagttctattttaataaatactgtgttaaccttacaacttggctcaaaaacaaaatggaacacaatgtgcaaaaataaaatcattaatgctatttaaagctttgtgaaactaattcatctatcacagaatttaaatttttattacttttcatgtgggggccaaagaattttagttacttcttatttcatgggcttctcatagtgcaatcgctgatggtagggaccttgtttttaccctaaactctatattaaactcggattaaactaaagttgtcaacacacagtaagtgctcaataattattggtgaatgaatgcaatcttacgtatgcctggtgctttgaaacttacaaatcactttcactcattattgattgtgactacgacaagaaggctgtgtatgagttagtgacaatcattgttagcatcactttagagataagaaaattgaaatgtagaataagttgagtaacctgctcaaagcctcttggatttgactgtaaatcaaggtctcttgagtacaaagaacaaagtttttgtcctactacaaacactcccccattaaggaatatcaatttttgttaatgtttgacaaaactatgcctcttatttaaataaaacactgaaatgaacagacccgcatgataccaaactgcatgttagagtttgaggtcaccagtttatttgaattgcttgaatgtgcttttatcatactgaccatcttacaaggtagatcagctgttgccaaccatgatattgggtcagcagagtattgatgcatctgagatcaacacatgagaaaggagaggatttggagctggaaattgcagaattatccatgcagcaacttggtatgagcggccattaccaacaggaaggatagccattaacggcatccatgggggagaaggtgaggaactagtgaactagaatgattatcaaaatgccaaaacaaagaaaagataaataatggaggtgatgaatatcccgattatcctgatttgatcattacacattatacacatatatcaaacaacaaaaacaaatggagtgatgaatatcacatgtatcaaaatcacatatatcccaaaatatgtactactatagattattttttataaaggccca

SEQ ID NO: 39125 - DNA, 642 bp, Homo sapiens
aatctcatttaaaaaatattttcgaggaaacatccaaatgtttaaccaaatttctgggtactgtgtcccagacaagcagatacataaaattacccatcgccttttttgtttgacattttagtaactctcctttggggtcccacctcccttttggtgggcttacagcccaaaccagtcattctcaactccaaaggacatttgtggcagtcacagctgggggaaaactacttgcatctagtgggtagaggccaggaatgctgcaaaatgtcgtctaatacacagcctggttcccaacaacagaattttccagtcccaaatgccaatagtagcattgcagctgagaaaccctgctccaaatgaccagttcacttcctgtctctaaccctgttcattattgcttcatcctctctggcctcctttcaggtcacagagcatgccaattccttccctccttggggcctctgcaatcatcattctcactgcttgaaacactctgctccttgcagggttggctctttgtcatctctcaagtttcaccaagaaatcccacccccacatgcccctaatccctgtcagtttcattaacctgattatgtcttcatcaccagctgacatttgcttgctttaccttgtacatctgga

SEQ ID NO: 39126 - DNA, 2059 bp, Homo sapiens
tatatatatacacacacacacatatgtgtatctatatatgtgtgtatatatatctatatatgtgtatatatatctatatatgtgtgtatatatctatatatttgtatatattcatctatatatacacacacacatcccacacacacgtcacatatatatacacacacacaaagacacacacatgtcacatatatatacacacacacatatatatacacacacacaaacacacacacacacacacacacacatatacagcattacctccaactaacattcatcattcatggcatcctaggaacattaactcccctgtcaagtcattgcaaagaagaaatttcatattggcttccacccattcttcttcccattcctaccaaaagggtcacatctctccccgccaaggtcttaattcacagtgtctggattcagggcctccttgtgtgatggactaacctacagagtgctctgcaaaagcagcatgagaccaaatatggggtcattgtcaccagcagttggaagactgcacatggatactatttgtcatggctctcgttgtcagtggatggtgaaaccctttcccccctttttttaaccacctgcagtaaataaatataaagtttccgactttgtggtatattgtattcaagatgcaagattgaataaaacagggcttcagtattgtaaaatactgtttcttaccatacagaaaaattgtttcttaatacttcaaatgtctcaaatttaaatgatagctagaagacaaaagccagggaaagaaaggttaaaaatctctacttctggctagatgacttttagtagatccatttttgcagtcactggattagtcaagagtccttgacctttgaaagtcagcaagaaatagccacaaatgtaacatcagtactgatttctcattattgactcaggtggttgatcattaatggattctcttcacttctagctggttctagggccattcttttgcccagaatgaagatatcatcaaagtcataaaacatatttgttcttttcgcaaaagaggattttaaaactctgcttaagtctctaaggaaaaacgctgtgagaggttggtgtcatcaagaaaaacccactaacttctaggttaaccagaggccactagaagcctcaataatgaaagcccttggctggcctacaaatgctttgaaatggataaaagccaactctcctcaatgggaactgaacacaaggactcagcagctgacgttgctcaaaggaaacccttcgtgtcgccagagtatgaacttttggtttgagtaccagcaacttccagttttaaatcggtagtttgatgccaccatcaaaaccagctcaggcaccactagaagcagcttaaataagaatttctacctttatgcttttcgactcaaaaagtcagagaaatagaaaccaagagatagatttttccagtctgttcatttctgctctcattcaaaacatgttgataattccacatgtagaggtatctcggtaacacatattcaaagtgtaggttccttgagaaataataaccagctttacaggaaaatggttgggagtgactttgttcattgatttctctttaactatttcagtcctcaaaggaaaagagcagggcagcttgctctcttcttccactagcaagagtatgaatcagaatgcttgaaaatatgaaaagttagtttgactaagaaagtctttttttacaagagtaaaaaacaactttcatatcagattttcaaaatgggtagtgctctctactaataggaaatgatgtaattctgcaagttccttgaaaacaatggattcttatgactctagaccctatttatcttagaaattgatgagcatgcaaatgattaaaatctgcaataacggacactgcacaacagtctgtgaggtacatgccacctggctgaatgaacagtaacacgggcctcagcagtgtgaggggttccatttatctccgctcccttttgagtagagctggggtccccaaacagttcatcaggaggcagcagccactacaatgccctcc

SEQ ID NO: 39127 - DNA, 1844 bp, Homo sapiens
gaggatgtggcttcactggaccccaagatatctaaggagggatagaaggaattaagtctacaaatgtagcttgaggtagatggtgaagaaccttgaatgacaagctaagaggactttatctaattatagagacaacaaggacatgctacattgacataaggtcaagatgtagcagtaataatgcatatcacctacaaggatagtgacagcttccaaaatacacgcaacgtaagtgtggaccgatatattagggtggagcaaaagcaattgcggtttttgccataaaataaattgcaaaaaccacaattacttttggaccaacctcatatctttttccctctgtctcctcttgaagggaatgatcatggctggcatcagtcatcattcattacgcaatggttttctgataagtcaaagtttaccaaatgatgactctagttttaggagatttctatttatttttaaatattaactctgcctctaaaagacaggtaaacaaactgtatttttaactcactaataaagacttggcatgacgatcacaatataaaaacaaacaaaaaaggaagcattccaagtttgcccctttaattgccagagaaacaggatttactctgtgtgtctacaattgtggtgtccacaaatgaaaagaaagcccgtcccttcacaagccattggtatgctaggaaactccccacaacaagctccagatctcttatttactgtcaagattctcctgaatgcatataggaatgttcccaccagaatttctagattagcgcttaacagagcttcacagctctgggcctctaattaggcaggaaggccacactttattaaaggacttgtgacaaacaaacaaactgccgaacataaaatgggggagaaagcaaagggcatatggtatgtttttcatttcatatctggctcttctccagaaggggtgggtaaacagcttagtacaggaacacactgtaccctcttttatcatcacacgtaccaacctgcacggatgcataaggacagagacccagggccctgtgaggagagggaaaaacaggtggcttcactgggtgctgaaatctgttgctttgggccacttggaaatgatctctgtcattatccacaagtatgttcaaagagcagggaataaaaggacgtatcaagtgcatcgacaccttccttccaaagtcttacttagcacactacttttcaaagccccttatcttaagtcctgatcaacacttgtctcaaaagggaaagtctgaagttcacacctgtttgtctttgtacagggtgtgtgtatctgtgtaggcacataaagtttagctaccaaataatgacatggacatccttcagtgagaactgtccttcacaacagccaacttgggggctgcatacttattccagtcatgcagccattgtttgcagcatttttggaatgcctgctcagccttgggcatattcttttgaatagtctctatagcagccagtcttagccctctgaggacacgtttgatctttggagacagccaaaaagctttgagagccaaatatggtgaataatgggactgattaagctgggtaattgttcccagcgaggtattatctaaagccaaagagttccgaaaccgaagttccaaaatcagagttgtgtacaacacttgctctgatgagtttgttggaaaggaagtctcctcactttagagacagacctcaacatatgcttaatgagactaaagttcatctgtctgtatctccctagctccacatactcacaatcaagcaaggctgaacttgaataaagcaactcactcaaaaaaggcaaacatttgcgtaactta

SEQ ID NO: 39128 - DNA, 2641 bp, Homo sapiens
ggactacaagcacatgccaccatgcctgcctaattatttttattttttgtagagatggggtctcagcacgttggctaggctggtctcaaactcctgggctcaagtgatcctcttcccaaagtgccaagattataggcacgagccaccacccttggcctcagcctatcttttaatgccacaaattaaatatctctactaagaaaataaagcaattttaatattgatgacaatggttctcaaatcacaatagtatcctcctccctcccagtatattttagtaaaccattcctggagtgagggtgggtttatttcagtaaaccattcctggagtgagtgtggggtggttagtaaactaacccaacccacaaacacatacacagtaatttagaatctccaaaaacaatatagccatcatttgttacacgttaggcactacgtgaacagcgttaatatgcattatttcatttcattctcgccacgatcctgagactgcattatcattcctgttttaaacacaagaaaaccgaggtttagaaaagatgagtaaataaattcctcaagatctcaaactagtaaagggacaattaggattcaaaatccatgctattaaccaaaaatttatagacaatgctataaaaagcatgggtggaagtactgtcaaatctttcatctaaatagagtccactggaatatacaaagttatttttataaaaggaaacagggtaagctttgtgtttacaaaggtaatgagaaattacatactgaaatgccattctgttaaatctaaactaaatcagctaaaacaacatttcacttaataggcacttggatatcagaaataccttcacttctagaaaacagcttgcaaaagagattgtcattataaaagcacgtttttatctcttattatatgtcctcctataaaaacactaaaatgaaatctcatttccagaagagtctagacagtggtagacacaacaaactgggtgtgactaatattttgacaaacacaaacagccaaaaggtaaagcgtgaggcctgacatttattgatcccataaaatagaaacccttttagctctcctgccacactgcatgacctggtaggcatggggatatttttattcaacagctttccttcggtccttccatccttttttagaaagccaaaataaaaaccagaaaaggcatacttataaagtcataagccatatgctataacaggtaaataaaagtcctttgacgttagaagccacgaaagaacagaagattaaaaagtaaatcataaacagctgcatctcgcctcccagtgtttacattcttagacatccactttttaaaaatattccctctgtagatcaaaacatgctgtactttgagaaggggaaaacaatgacgttaacgttaaaatattgtacagtttacatataaacagagctaagtttatgcacatcattctagttggcagtaactcatctgaatggctcaaactgagagctataattaagtgtgttaattatctgtgtacacaaaaatctaaaatatatatgttccttattatagagcatagaatacaactggtttaacaaatcaaaataatccaaaaagctttttcaagttaaacttgggtgctctgaagctggatgaaactaggttcaattactgggggaagtctgtttcttcatcccatccttcccctccccacaactttgtattcctttccctcagtaccttttctctttcaattagtgccacccacaaatactgctcagctcattactgacactcaggctttaaaaactgggtggccccataccaagaaccatttttaaaattactgccttcaagcattaaaatgctaatccaacagaaagcaaagcttaagagcatggagctcctcctcccaaaaacatacatgtatatgggagagaagcacggatgagccacatgtttaaaattctagtttgtaacatattcaagagataagcagttggcagaaagctttcaaaacacaatgcccattcacagactttatgcactcactttcagccttataaagggaaatacttcattctaagaaggatctaagttttaacataatacaggccaacttccatcagaagcagcaaattaatatcagtggtaagaaggctagtaagttcaggcagatacaagatttaggggccctgaattatcattaagaaagcatttatcttatacccgcatgtctaaggtacaagccaaggtgagtcaccaactcatctgactgaaagttctgttgctaaaatctggtatcgctgacctcactgaatcaaaacatatatgctcctttgaaggtggtgaaacatccctagtcagtgaatcaccatctctcaaaaatctccaaggattataggtaaacatgagccctgccactacaagtcaaagtcttgatatccaaagaactggctctggtgttaatgcatgcccaaggtttaatgaggatgaagaaaagaaaaaaaacaaactaacatattttccctttagaacacaactaggacacatggttttttaaatcagatgacttattgatcaattataatatgcttattgatgcagaacaatagcaacgtgacctaaggctcagggattcaatccacaac

SEQ ID NO: 39129 - DNA, 1483 bp, Homo sapiens
gtggctcacacctgtaatcccaacgttttgggagtgcgaggcaggcagatcgcttgagctcaggcgtttgagaccagcctggccaacgtggcaaaaccccacctctatttttagaagtacaaaacagccatgtgtggtggcgcatgcctgtagtcccagctacttggggggctggggctggaggatcgcttaagcccaggaggttgagctgcagtgaaccgtgattgtgctactgcactccaggctgggtatcaaagtgagaccctgtctcagaaaaaaaataataataataatgcatatagaataagtctaccatccaaatgagtcatttatgtgcacaaattaaatttttttctttttttgtcttattgcaagattaaaaattaattttaaaactacaattcaataagtggctttactaaaatgttccttaaaatattattttgacaaaagccggcatcaagaatctcattcttactcctcagagagagttgaaaatacccaattactttataaaatgtcaatacaagaggatctcacagatagcaaatctaatagtgtccagtccacacttccctacaaatacatgcggtcataattttttttaccctcttaatctgctgtggctccattagtaagcccctaaaaatgcaacctggcatttacattcttgtccatctggaatgtctctgcatcagaggaaaaccctcaaccccacccccctccacaaaagatgaacaagtgcacagctggtataaatctgggcacgtatgaaggcaaccacttgcatgcatgcatacacaaggctaaatgtttaatccctcaagcaccctcttctacccattttcagatgatgctaggaaggatatgatttgcttttttaaaaaattgaattatgtacttttattagacaccaaacaattccttattgaaaagatattgcaagaaaaaaagcttgaaaacttgccatcaaagctgtctgaagtccaaagtgctatcttttgctgtcaccagaagacttggaaccaaataggcagaaagctaaggtcaatcttgtgaaagtatgattgtgaaacctaaccctagacctctgtcctcttcagagcagcagattcacatatgtgcatttcagcagagatgcaggaattgctgatgttttccatgctgcttccatgaaaaccaacacttgcagggttcactgccagctcatgatgtgaagctaaacttagaaatcaagctgggttctatattgagctacaccacctaagtagctgtgggcaggaatatgactatatagacaactccaattcttaactattggtttttaacgagaagagcagaccaataaaattcagctttctaaaacaacaacataattgctttggaatgcattttggtaataaatttggctgctgtaactgaggttttgagaggacaactacagggggcactatttacaccattctgggtgtgaaaacaattc

SEQ ID NO: 39130 - DNA, 12276 bp, Homo sapiens
gtctgatccaaaggctagaaatggacagaacaggctattctcatgctttatcatgaccctgtcaacagcttcttcggaaagaatcctcattgcaactgacccattaaagagtatcagtcattttctccacaacattcctatgtttagagctgcaaaggaggttagaataatttagaacaaaatcctcaagttactgatgaagaaataggtccagagaaattaagtgacttgcccaaggtcactctgctagtgaagggcacaggctgtgttggagcccaagatctctggctcccaagaactgctttttccattgcatcatttaagatagcacaaagctattttcctggaattgtgatttaaaaaaaaaaaaaaggtggcatgccctttggatcccaagtctcttcctgtagggcaatgctggagatagtatttattgagggggaactcagagaaatgactacaatatatgcaacattttatggatttatttttactataaaaagatacctaaacaattgcaaacattaagcaaattattagctgctcaaacttttctggaacaacagagaaactctctcccactgctcagtagcagttttgggtcataacatttgcacctgcttggtacgtttccacctgtgatgtttcacttggcccctcagaaaaagcgctgccctgggatcttatgattcagtgatgcaagagggatgttggctggtgagaaatgcttatttgagagggaaggaggaggaggagaaaatactcccatagcacttttctttcttattttccttattttagaaaggccaaatctgaacacattttccatcccatgtagtaatatatctcacataattttggttactggagggtacacaacacaaatctagcaagctttcaaaatcgatgtgcccagcctaaattgacgggctgtcactgggactgtcaatgatggaaaaatgaatctgtgtctgagaacgccacagcatttcctccaagcctttaaggaacacactacccaaacccttgtcacaccgggttctcaggatctgcaagctgcagtcccgtctttcatttcgctgtgagctccctcacagcccaggaggatgcgttttcccagctcttacctagctctggtgctttgcagtaaagtgtatggagcctagggcactttcaagccaaaggaattccccctccccccatgacccaaaacgatggcatccgcagcactcgcaggtctctctccctcccttggttgaggggggcgggcaggaatcgcgggccaaccccacctggcccgcaggcccgcagccacgtgcgggactccctcctgctcgcggatctcgagaccggaagacgaaggaacgtggcctcgtagtaaaccgtagtaaagagagaagggaaacaaaatggggctcgtcacatggttacggcctggatttttctcaattaaaaataagagcaagtgtgtgtttccggcccccgtccgtgggctggttggactttttcattcttaggattctgatccaaatgcaagaatacagctgagggcacaacgtcctcagtcggcgggcgcggtgcagagggggcctgcggctcggcctgcgggcacccgcgggaaagaggtgccaggcagggtggcagaaagcggcccagggacgcccgcccgccaccaccgccaggggacccgcggagagccccgccccgcgcccgccgcggctcagccgtttcacatgctgattggctgtggtgggggccaatcagcgcccaaccgccccgcccgcccgggacccagagccgcgcggctgtgcccgagggcggggcctcgcccgccagcgccgaccacgcggcccgggaaggggccccaccgccctggatgacccgagacgggcgggggcgggagacccgagggcggtctggctgcagattcccccaccccgggcgaaagggggctcggaagagggaggagaaggaatgcaggaagcggaggtgacccggaaaagggaaagtgccagggccgagagggtttgcgccagccaaaaaggccacagggctggggaaaggggagggaggggaggcaaccttggaggtacggaatccttgacatcacaaaaaaggaaactgaatgaaaaagaaatggaaagagtctttttctgttttttttctttttcttttttcttttaaagggggagggcataacaaagaatgacaaaaacaaaaaaactgaacccaaaaggcatggctggggtctgtgtctttgtcagctgcagtttcaaaactaaaagataaatttgatgccaggtaaaggtggcagggctgctatgaccgagtctgagaggctctttttgccctgcttcttgggctctcaatttactctctgcagagagtgggccacaagtactgcgaaattctgaaaaggagcaaaagaaaaaaaggataatgtcaggaacatgaaataagaggtggaaacaaagggatggcaggggatagtactagaaaacgagcaagccagaactaagaggctatgcaagagaaagggcaggcagaaaaggtcactggactacaggtaaagcagacaggcttccaacaagtagagctcctgagctcagtgcttcacaagtgttctcctcttaacagacaatgaaaaattttaaacaagccgagatgtttcaacagagcccacgcctcatcatacctctattcctttcaccgagtctcaggttttacctgagaaatgaggaaaagaagcaaagacagcaattgctgaggaagtgaggaaaataatgtttgcacacacattcggagcagaagctgtttgccactcacaggtctgacttctgtctgtttcagatagctatagaataacatctttggactcaacagggcacaggcaagcaagcagaattgaggatgtaaatgtgccaggtagcatttggtgcctcactttaaacaccaacacaaacatctcaaatacgcattgtagaattttcctggcactgtgcaaagcatggtcgattgttactccagaattattagaaataggattatatgattattccagaatattttattttcccaaagaaggttaaggatagaattttgtagagtttttgtttttttaatgcatccaacacataggagaattttattttaaagccctttttaaaaatgaaaattctagttggtcatcaattctcttcagagcaaacatcatttattctactctataaaaagaaacctaaacaaattaagatgacaagtaagaaaaacttattctctttatctcctttaaaaccaaaattttagttctgctgggctggttttcttcaaattctcattattttaccaatgaggcactttataatacaaatgcttaaagtgttgagggattctgactcccaaaaacatcatttgatataacaagatttgtactactgatgttgatatacacaattaaatctttcttctagtgaatgatgaaaataaatgttgaagtaaatactgatcaaataaatgctttttgtaacatatcacccaaaatcttcatttgagtgttcatatacctttttcttgttctataaaatagagaattatatggatcaaatattggaaacagaattaagaagactatgaacacatgataaataaatacctgtcaataggaaaccagggcacagattaatttcttatgaatggacacaaattaagaaaaatcagtgcttttaaaagctcattctgtggagcatagataaaattcacaagataatcagtttgtcagagtaaagtgtttccaaatgctggaaacttctgcattgccaactcatcacattatttgcaaactgtactctcttctacccacaattatgaccaccagaaaacaggatcaacagaacgaagggcaggctaatttcctattacaaatgtttttcatttttaatacggcattagccacagaagacctaaagccaactttcagcatttactgtggtgtctacttttgaacttaaaggcacacagcaaataaccctaaaagtggagggtatacagtttagcccttctactcaatgcaaaacaaaacaaattaaggcatgttcctgacttagtatgcattcttctcaacaaataaaagtaattttacagaagatatatagtagcccccaaatgatatctgtaatgtctcagtgcaagaagagataactataaggcagacatcctaggatgaactcccataactcttaataatgggtcccagacacatacagagtttcctgcatatcctgtacaagagaggccaggcccgtgggatggtgggtcggtgtgtgaataatatttcacaaatcctggtacatgaacaaaaggagaacgtcacccataattactttcttgagagatcacaaaatagataggtacttctctctaaatacatatttctaaaaagctcttactcctgatctttttagggcaggatgaatagaaatcaatgcttcccgctgctgtttatgttgccctagtattatgaaatcacagaacaaaagtacagagaacaacttgataagatcacccttaagggctcccagaaactattaagatagtttaagataaggaagggtttagcccctgtgttaacaaatattttttgtagaactgtcccttccaggggctgacctaaatatatagtgaaaagaaaacttcaacaaacaaatcaagcttcttacggaggaactctacaaaacgcagaactggcataggatatatgttttaaaaatactgcagtaactacttcacttgggaattctcaaacgaaaaagccctcctgtggctgctcctacatgtttgtttgactctctgccagatgtcagtgtggggtgagcatcttgtgtgccctgagaatgtaagtgcattctccctgaggaagcagtgggaaagaacaggaaggggcagaggcgaagaacagaattcaaggacaaggttaaaagcagttttgtcttctgactttgtcaccatgaaacgcacctgctgtgatgtccagttgagctactgacggtcctctggctgcttctggaaactgatgctggcataggcgcttaaatcctcacttgagcggcgggtggagctgctctcaccgctgcccaggggttgatgagggggtgggggtgggggaggctgcggttcaggggtgcactcctgagggcactgtttgaagtccttgaccaaatccaggtctatgtagttaagaccattctccaaacccccagcagccccacacagtttggctggctccttgggggctcccccaagctccccaggcctcagccacacattctcaaaggaagcagagctgtggcgtttcacatcctcgctgctgctgctgctaccgccaccgccccctactgctgcccccgctccaaagggcactgtgttgcccacccgggtggcactgggtgttgaggagaaagtctcggagctatgcctccgccggcacccttgtgggtctgcacggatcactttggcactctggttgcggttaggactgaggttcacccgggtgaaggcgctcatgcccccaggtccttgtgggccccccagcagggacgagtgggcagccagctctgctgccccttgaggcccagtcggggaagcagaggctgctgaggatgaggaggcagcagccatggtggccctgggcaggctcacctcctctgcagcaatgcctgttcgcatgtcagcatagcttacaggggcagctggcgaggtgtccacgtagctctgacggggacaactcatctgcatggtcatgtagtcaccccggctgctgggcactgcccgggtaggcctgcaaatgctagcagccccgggaggtgcagggcccagtctgcccatctcgaccccagtgctctcctgccaggctgccctccggcccggccccaggtccatcttcatgtactcctcagtgccagtctcttcctctctgggagctggctggagctgggatggacacctgacagaaggtgagctgtggaaagccaccgggccagacaagtagccagactgatcactcccaaattcaatattgacatattcccccgggctcttgggctctggagggtgcagcaagggctgctgctgctgctgctgctctcgggcccgaggtaaggtgctggccttgggatcccccagggacagcctcgtgggccgggccaggcggctattggtctgagcagctgtgtccacctttcgaggcagatggggctgcagaacctgatggtggggatgtggaaggctgggctccagcctagccccgcagtatcccccacccaggctgtcgctgctggtggaagaggaagaatcatctgctgttgcagcatagagaaggcgaccagagctagtggaaaggcggaggtgctgatgccgggcaccctcctccggctccccggggcgctgggtgtgcttaaaggatcttggcaatgagtagtaggagaggactggcttgtgctgggggtcctcagggccgtagtagcagtcggaggggctgctggtgttggagtcccccactggtgacatgttcatgtagtcacctgtgcaaggtaagagcttaccaccgctgctctccactgggggtttggggtgaggcaagacatgagagtggtggccccctaccccgtttgtccacagctttccatagctggtcccggaagggacggcgttgctgctgctgctgctgctgctggggccacctccaatgtcaggagagcagccaccgctgggggacatcatcatgtagccattggggtccactctctggggatggcgtctgatgggattgatgatctgctgtggggcagatacgctcttggggctcatgggcatatagtctccactgccctttcggccactgggcactggggccacccctggggacatgggcatgtagccatcatccgtgtggagggtggagctgtctgggcggtggtgccccccccgacgctccaaggggtgcatttccagaccctcctctgggtaggagcgggtgggcacgaaggcggagtgcctgtgtcccggcagtcggcctccactgccacctcctggtgggtaggcaggcatcatctctgtgtactcctcaatggaagccactgaggactgggacggggtcttctggtgggtaatggtaggggatgtgcctgccgagtgagttctctttcggaaccgattatccagatctgcagcactggctgcttcatccccagccaaggctggactcgtgcccaagcctgttcctggggtgcagcggtggccattgccaccccgagacaaaatgtagtgaccgttgggggcggtcagggtggagggccccttgccacccatgcagatatagttgcttagctcctcctcaccgcgggctggtggggtgtggcccagggaatccggagtgacactgcggaaggaactccggaaatcgcagggactggagccatactcatccgaggagatgaaaccgccatcgctgggggaaccagacaccgaagcactagatcgccgtgggaagagacaatccgaggtggagccatggccactggtgctactggacgacagactgaccgggctggtggccgaaggcgagcagcgggaagccggcatggggatggagcggctgtggttgagcggggggtgcagccgggcgctgccccgatgccggtgggcgtgggttctgttggtgctgggactcacagggctgccgtccaccgaggctgggcgggacatggtgccttcgccgtcactggaggcgcggacacggaaggagcctggcttcccgcccaccatgctggccggggaggtggcggtgatgctctcagtgcgtgatcggcgggtcagccccacctggctgggcgggggattgttgagatggtgccggcgcagggggacgctgatggggttagagcagttggacgaggactggctcttgctgcgagggcggaactcatcactcatggcccgcatggcctccaggatggtctcgtgcatgttctgggccaccacagagtcatccacctgcatccagaactccccgggccccgtcacggcagaacggcccacctcgatgaagaagaagttttccgagtggccacagcgcctgatgttcatcagctgcagcaccacggccgctgcctccgagttcagcttcacgaagctgatggtcttgctggtcaggcaaaggcggtagataccaatcaggttctttgtctgacccaggcccttgggcttcaggatcacttgccagacctctttgaatgcgggtcctgggggcacgtcaccgtagctcaagtcctccccagcctcaccaaggccggagctgccgctgcagctgcccccaccacctcccgccccgagggccgcagctccgtcgtggtggcccttagcacggttgtgcagctgtaggagagcctggtaccagctgtcttgctcggcctcgctgtccgccgcgatggcaaagtgctcgtcccgggtgtagagagccaccaggtgcttgttcttggagtcagcccgcttgttgatgttgaagcagctctcaagggggatcgagcgtttgggggcgctcgacttgtgccgccacttcttctcgttctcgtagtactcgaggcgcgccgggcccccagcctcgctggccgcgcgcagtacgaagaagcgtttgtgcatgctcttgggtttgcgcaggtagcccaccttgcgcacgtccgagaagccatcgctctccggagggctcgccatgctgccaccgccaccaccaacgctgagcagagggaggctccgaaaaacaaccgggtggggggcggaggctcctcgccgcggcccggcacatgcaaacagggctggaggcagcagaaaccccgactctgaaatccacgccgccccccgcgccggggaggggcagctgaaggaggacgcagctgctgagcccaggagagagcccgaccggagttttcgggcgcttcacgcccggcggggaggcagtgcgtccggggtgagggcagccccgatcctccgagagccaagtctcctctcagccgccgccgccaccaggaaggagcgaagatgcatctctcgtcgccccggctggagtccggcacagggaggcgacagtcgggggtccctgcggtgcccctccaggagcgcgcgcgcgcgcgcgccttccctcctgagttcccctctggaagcagcgattcccgaggcaaattaaatatccttgggcagggggaggcgggttgccaagtcccaacgttgcacggggttctccctcctccttcgcctcctcccaccccccaaccgtcccagccgccaccagccgcccaaataccagctcagtcgcagagaccgcggcgctgcggctgttgctgttgctgctgctgctgctgctgctgctgccgccgcccgcgggcgcgtcctctgcagcccccatccgggcccatctcggcgggtggagaaagtggcttttccatgcgaaacgataccgggcagccactgcagctggggaccggccggagggacagactcatccctgcccctcgctccaggcggctggggaggaggggaggggacaagggcgagaggggatgggggaggtttgggaagggttcggggaagacgcctgttcctcgggaggcgctgccgctgcagttacttctcccctcctccctcctcctcctcctcctcggagagttgccgagagccccaaccaaaacaagcggcggcgtctggctctgcgcgccggccccctccgaccgcgccgccgtctcactcggaggagaaaaacacgtgacggagcctccgcgctcggcagccgggcagccgccgccgggaggctcccgcccgggtctctacattccgggccgagcccgccccgcgcccgcccctctccgccccccagccgtgctgcagcggcgcccgcgccgaccccggcgcagcgctaggacagcgcccctgcgcggccgccagctccggcgcagcgcctccctacacgcgcgccaaccggggcgcccccggcccgcaggaatccccgcggcgggcgcaggcgggggtgtttgggtggctacccgaaagcacgaggggagtctgggaaaacgggagggggcgagctcgggaagacgcaggagtgagggtggggggccacgggggggcactgcggctacagagccccgagtgggaggccggggggaggcgggggcgccggagctgggctgcctcttacctatcaggtaagactgacccacgggagggaggtttctagtcaaggctgtttcccccaggaaatttaaaagctagatttcggcttcagggcgataggccatggtgaggggatctgtattttttaaggtttttctaaaggacttctgggccagccttccaccttgggatccccagatttgctgccgtgaggtacctggaaggaacagagggacgcccaagggcagtgactgggggcagttatggtcactacaaaaggagaacagggatccccaggaagtgtctcacgtccggcgctgtggaattagttgctgatcaagtagggagaaaatgtaaatatcaccttttctcctgctccccttgcccatccgtgtgacggggggactcacacctaaggctgagggcatgggggaggggaaatgagaggtcccttatcatattccgaagtctatccgtgactttaaaaagctgttagggaccttcagagggttcataaggccaaaaccctactgtgcaaatattggctgaaatgtttgtttcacacacagctcccacacccattgaaccaccctataagtttttaaccttgaccacaaggataacagggagaaaacaaggatggtgccagctcaactgtacaggaaaatggttacttcatgagtggaccagatcagcagcctgggtctacttgaagcgcccctttcagggtcaccttgcggtatcagtctccccacaaacaaacgctccccagagtttttttattttttaagccgacctataaacaagcagtttgtccctgcttgctcgcctggcactaaggacccacagagatgtcactcggtttaatgctgtctcattttgatgcctggcccgtttggggttgccgcccctttactacgccgggaccctcctcggcctcaggctcccaggcactgcaggatgctggctgggcactcagcagtcgaggcgctgggcatgctcagtggctgggacccggcgggccgcgggggagcgcgcctcggcccaatgcggctgaggggcggagcgagtttcccggggaggcctgctgattggtgggatggcctgtttttcaagccttgcactgcagagggaaggtgggggtagaagggttgagggtaccaaggtaggttgcaaagcgtagtaaaaaaagaaaaagaagatgatgatgatgaaggagaaaaagaaccataggcgccattcaggggtgtgcgatacgtaaattagggggattgggcatctgcagaggggctcctccccacccaagcctgggagcctctcgtttctcctctccccttcctgttcccggtcgtcatgcagcctcatctaaacctggttaatctataatttgagtacacatgttgaattgaaagccctcccttcttttcctctgacagcttggtgatgtgggcacacgtgcccactacagcaaggctattaatagcagatatttggaaatggaagcgaggcggcactcacagtgaccgaaattctgggggtatagagtgccttacagggggtagggcagggaggtgcagaataaagaagcctgaagttggtggaaaagtgtaactgtgtgcctggttttaccctagacaagaaaaaagagagattataaaagggttgtttactagtaacaatgtaatccagataaggccaaagggcttttcacaggtttgatgtttagcgctgggatgggggtagtggagtaattaacattttgtaagacaacaaatcaaatccatggacatttacttttcaaatggccctgtccctacctccgtccctccaccccccaccccccaaaaaaagctaaataaaggtactgtacctctatgggggaaaaatactcttttctggaaggaggggagggttggaaaatttatttgcacgtacctcacaattatcttcataggaaggattttgatcataaaaagctaattatgataataaaccttttaaaaaatatatctctcagtgttaaagcatttctgctttaaaaaacacaatttcagttgctaa

SEQ ID NO: 39131 - DNA, 2156 bp, Homo sapiens
ccaaagtgcggggattacaggcgtgagttaccgcgcccggctgtaagatagttttttcatatcctattaaatatatatagcattgcaacatttaacttagcctaactcctacagctaaacataaaacttgctcccgagtagcaaacaattaaaatggtatcaaattatgtattaatcgaaattctattaactgaaatatgaaacacctaaagccctcaaaatgggcaaacgttgcgtggtgcagtcccagacccaagcttctgggagtgaaaggtgcacccgcgaccttgccttgctggctggctctgggactctgcgataagccgccctccggttgtctgcgatagctcctgaagcaggagagtgtctttcccaccctccgcctaacaggcggtatctgacccttccaggcagcagctccccagcctccggctgcgctggggcccggaaggacgaagcttcccggcagagaacctgggcagaggcgtccgttgggtaggcggccgcgacccgctcgctgcttctcccctagtcttcgggtcccttgaacgcaggtcgcttgtttgccttacgcgtagtcagcggccagtggctatttatggcagtaaggaatattatccacatttcacatggagcttagaggacagggcgagggtccacactctccttactgcgctctgccgcggtcctgccccgctgtgccctcgcggcccccttagagccactgccggcgcacgcggtctgcagacagcagagcgcgggcgcgcacaactaagcatgcgccgcggccgagccgtccgctttaaggccctcccctcccgcacccggccccaggaacccggggcgccccggatcgggaacgtgcgtgatgacgcacgtgcgcgcgaagacgtggggacgcaggcgggtcgtagagagcgtgagtttccgcgtctgtttggtccggctgctgtcgttggttgtgagcggcatctctcgccgtttccccgggctgcgggagctggcggccgggctggggctgctgggcggaggtcggcgcctcccggggggctagggcgagggaggcatggcggggctggaggcacagcctccccgtccggggcaagtccgagagcggggagggcgtttcctggggtaactccacctggggtcttgtcgaagttgccgcatctccgccggaccgcacgggaacgacgtgcccacactcggaggaaggggttggcgctgagcgagtttaaagggttccttttgaaagcaggaagtttgaagtgacgttgcatcagcaacagagcatgcagtttcaggtgctctcgggacagctttcagtttctcagaacaagtctaagcctcaccgcagtaataacttttattagaggacaaaaaatccgccaaagtaaaccctttctgtccaacccctaaaaacctttggataaacgtttacaagaaacggatcacagccttatttgtttttctaaactgagcataaactcttttgaagactcagcgttactgtcaaaatgaatgagtgcctgcctagttatgattcaattatcgaggtgtttgggtctctgcagtacactcagtgactcccaggcttttcttttttctctttgaaattgcttattagaaggctttatctaatttctcacagttgtgtgtctttttgaggtagttctaataaactttaaaggcttctggtttgctgcaggcctgccgtcgctgtggaaagcaagtattctttcaaagaagaatagaagtgcattggtttctaaataatcccaggacgctaggatcagcatcacttgggaacttcttggaaatgcacattttggggtcttatcccaaacttactgaatcagaaatatattttaacaagccttccagttgataccaatgcacctggacgctaaagtttgagaattaatggcgtagtgataacacccattgtggaatcacatataatggaatttgaattgaagtaattcctagatggaaaaacttggacatgttacctcacagggctggaatatgaagatgcaagaaaaatgtttaacacaaaacacatagaaaaccctcaaagatgttattaagtaacttattagaactgcataaaataagtacatagtttgtgctggaaggattcttcagcggggtag

SEQ ID NO: 39132 - DNA, 705 bp, Homo sapiens
aacacgtccaccttgttttaggcacagaggctcagtaaatgttgtgtgtcggacaaagggaaaaaaggtatttgttgtctcaaacctaactttatgccattcattttataatatttttataaatgaggtaattttattacctaactgcactgcttttctttttaaccataaaatgctgaaatggagtcaaagctttcatattattgtgaatgagaaaaaacaaacacttgaaaaaagttgaaactttaacgtgaaaaaacaccatcttcagttttatcactgtaacagagcaacttgtagaaattgttttggatgtttacagcaaggtaaacatccaaaggtcaggggatgagtaataaagtatcttctgttagttaatggggacagtcagctagagaaggggacactgttacaggaaatgagacctcgttgaaggtatgcatcaaaggatgagaaaatgctgttagccctgaaattgctaatatttttttaaaacacgaattcttaatagcaaagtgaaaagttttacattacattttttaataagggataacaaaatctcttacatgtatttctgtgtgtttatattgtatatgaatgtatgagtgcagaaaatacttgactcacactaggtcataattttatttgtcagtatattggaatatgggggtggggaccaagtataaaaggaaattttctatatat

SEQ ID NO: 39133 - DNA, 529 bp, Homo sapiens
tctaattattaggtttcctcttgcccagaaatgctaacagaaagatctgtctccctagtgctcagaaacgttaggacaaatgacaaaagctgcagcaagtgataaaggaaaggacactagccagaggcagtgagctgcaggaatcctaagcatgacacagagacagagggatcatggtgtcattgacctgcatggcttctggcagttagaccagctctttggcaatgtgatgtttcaaggccaaatcagcccttattgtgttcctctgtccttctagcttatgtgtgtcctccacacctgcttctgtgctcttgtttacttaccacttcaaggttgaaaaagataagaatatttcttgattggtggtctcaatgaggtatctttgaagtttatggaatttcccatttgtaatagatcttagcaaaaatcgattctatattcattttagtgatactgcccatgggggcagaaaggtaggatgaaattcaccccagattccagtcttgttttaagcacaaataaccaaagg

SEQ ID NO: 39134 - DNA, 686 bp, Homo sapiens
ttctcactacaggaaataccagaaatagcccaccaccctacgggtttcatctctcaccagaagaaatgaggagacagcggcttcacagattcgatagccagtgaggtggcatcttgggaagacatggcctattcgtgtaattattgcccatttggctcattccccaagcccctaattcattttaattcattttaaacaaaagcagagtacaccggtattgctccagatcgctcacatcacctgggacagtcccatggcccctatgagtcaactcacagcttgcggggagtgggccttctcctggccttgttcttgctcataaacaggtcacttcctccatgaagagaccagtttccacgctcccatctctcactgctgactcagcgatgcctctgcctcggtctgcttttgaagactgtgaccttcaccaggaggttttacttacaccagtcgggaagattagtccctcattctgcctggagtgccccgtgtttgacttggcagcgggtgtggagccatccccgcgtcctcctggcgcattgccactgtggctgtccaggaacaggatgtggctgccttggccgaatgttgtcctactctccccaaccccggcgcctcagctcctcagctcctcgggcccctgcgtctggctggtgtttgcagggctttcgctctgctctggtatt

SEQ ID NO: 39135 - DNA, 572 bp, Homo sapiens
cctaaaaccattataattcctcatcttagctaattagtcagacgttacatttgtactaaagaggtattcttatactaagtgctttctattttcctatatagtagattatttcccccaaactgtgccctgcttttgagtgcacctgtatcgctagcccttatttcttgccaataacaagttcagtgtggccctgcatttgctgagctccgcacccagcctggcctgggtcatgctgggtcacacagtttggcagttgttgctgtggaattgaactccacatgaggagaccaaaggccctgttgcaaatcactgacaagttaatgaggtgactgaccagggcagatgtgcccaaaactgccttcagacccaaaccacaactaggattcccaggggagagtcttgttatgttagctctatacgtagactcggtctgtttggaaaataggtaatacattctacagtgtagtaggcagataaaagcttcttttctctcttttctcatgcacggatgctggatttaaagagatatttctcagtctactgaaatgatgttagttagttggagttatttt

SEQ ID NO: 39136 - DNA, 1071 bp, Homo sapiens
ccctggatccgcgcccacctgcccctcaggcgcccagccctttctcgcctcctgggcacgatgcccgggtagaagggacactgcctggtaagttgggagggagggggtatgagggcgggacctgagccacgtcttccctcccttgaagccacaaccaaaaagcctgggtggggagggacgaaccgcgcgaccgagccctacaaaacccgccccggccgagtggcgaggcgagctttccagccgggctcccagagccgcgctgcgcaggagacgcggtggcctgagagcctgagggtccccggactcgcccaggctctgagcgcgcgcccaccatgagcgcccggaccgcccccaggccgcaggtgctcctgctgccgctcctgctggtgctcctggcggcggcgcccgcagccagcaaggtgagtgggggctgcgcgacccccacccccgcacttccatccctcctccacgcgtccgggggacgcgctggccccacccgcagcggcgcggtagtggagcggctgccgggctagtggcgaggctgagggcttcacgcaggtcccgggacaggcagcgagcggaagggagcaagcggggatgccccggaacaggtggaatgcgcggggctgggggaagaggcgaggagggggcttgtccagtgcctaggagtcagggatggcggggacaggcctccagaggtcagtaaattaaaaaatagacacatagataatcgccagggatgatacgtgagaacaccggatgtggagatgcacggtgtcacgctggtgaatcaaatcaagcagcttggcccagcgcacagagggctggcaggagacacctgcagggagtcccagccgccacttcctagctgggacgtcacactaaaccctgacctctctggggctcagtttcttccttgcaaaacttgccctccagttttcctttgctattgttgggaaaagcaaatgctatcactgaaaaattaagagcaccttagaaatcgaactcaggttagaatcatttaagcaatctgacactttgatttgatttttgacttggaatttgagtgaa

SEQ ID NO: 39137 - DNA, 617 bp, Homo sapiens
cccatgtcattccaacaaattcctttttgatcattgcattagcctaaatcacttctgttgcttgccacctcaaaaccctggcaagacatcaggaatccagacaatagtctggccagcagaactggtggttcagcaaccttctgcctcagccaagaagcctcttatatgaacaagtgaggagagaagtaccctcaggatcaacaaatgcagaccagcaagtgcacatgggtgaaccctggctaggaaactcatctggcagttacccaagatggacaagggaatgcggagactgagttgctggttaattattgcttatcagcaaactgtgaggcacttcaacttttgcagacatatgagtgtcagccctggtaaaattaagattgactcaatcagtctctaaaagaaatgataactattgaaatatcagtccttcttgggtgaccttgagtgccagcttggtttcagcttctgccttgctcattgatgcccctcaaaaagtgataagtcttatattttgtaccaagaaagatctggtcaatatttttgctatgctactacattttggtattcacttccaagtctttctttattaatatatccttttactttttggggat

SEQ ID NO: 39138 - DNA, 2117 bp, Homo sapiens
accaccttggacacatgttctcaggacctcctgagggctctgtcacgggccatggtcactcacatttggctcagaataaatctcttcaaatattttagagtttgactcttttcctcatcagtttaattcttaggcccagccaagaccccaagaggggagaggaaatattttcactttccctacaccagtgttaagaagcccaagaacgcaattcagagggcttcccaaatcattttgaagaatggtaacatctctagaatatcaattagatcgtaggggagtacataagtcatgtgtacacctttaggtgtttgtgaaaaccaaggcatataaaatatcacattatttggcctcagtacattcccatactgacaagcactgtaccatttttcccccgctctaagcaagggcttcctggggggaagagtctgtggttgggtgttcagaagcagagagtgctctcccaaagctaaacgatgccgccaactactgtgaaacttaacttcccctctcccggaattctcatggaagacaaggtctgatcaaccgagggcttaagaagtatcaaattggaactcatggaatcactggcggagctgatttacatatgagaattcctaagcctcacagcatagaaattttcatgccagatggtcctgaaaaagttgttttaattggctaccaaaggtttaccttgcaaacaccaagttcttaaagattacaaaatctaataaagccgaagtgtgaattaaacttaaccgcaagaggagtcacctgcggtcacctcgtttcgcccacaacaaagatgtctgcgcatcgcttaccgtggagccgttccagtgcgtgggccacgcgtccgcccttttccgcgtcacatgaccacgaacactcttccgctacggctcccagaaggggccagcccgcgcctttcgcgcttctgccctggccctctgcgggccgctccgccggtgctgtccctgggcgcctccgtgctctcagccaaccacctctgagagcgcccactcgagcgccccgggagccagagggcgggggtcctcgccgggaccctcctgtgggcccaggggtgagtgttgacgtcttcccgacccgcgacctgccgcccgagctggctgccaggcctatcgccgccgccgagaccctccggccaacagggacccgcggtggccccggcccccccggtagtgtctccctgacccgagtcccgtccccgggcctcttgccttcaaccctggtctttcctcctccccgggaccttgagtccccgaggagagcgagggagaggagcgtcttctgcaggtgtttttgggcgaacctcttcaccttgtgtggttcggcgtctccttttgtgtattaacccggacttttccgactggaaaataggggtttgggaagcagcgggagtcccgtgagcgtgaacgccgggctttgcaggtcttcactcatccttccctgccaaggccctgacaccttacaggctgaccttaaacctgccttgtttaaaaggaggtttttgtgttgttttgtggcaagtacattttggaaaagaagggccttgttggaagcccaggttgtggcatcgcgggtggctgcgggccaccctgtccgtctgtgagcatccctgctcgcagatgtggctgcaggcagttgctctcgggtttccttccaggagctgggaagccggaggaaagctgcggttcctgttccgccgagcttctgaccttcctctgcaggacgtgtgctactattactatcgtaaaagaacacccctgtctacctcccacaaagttagaagcaaagggcattctcgagggaagagcaccctttcaaaagtgacatgttttcattggagaacattaaaggggaaaaaaaaaaaaaaggtttctggcccttctgcccaaatatagaaccatttgtattcaggcctctcatccaccgagagacttaagatgatcacaaatgttttgtctccctgcgtgaaaaacattttttctgcctcaattccgttggctaatgagagcccaaaagaaaaacccttaggaaaattaggacgatttagttatacttagtagtcttttcccatgcaattaaattgcttg

SEQ ID NO: 39139 - DNA, 788 bp, Homo sapiens
gttgtttgggttgaagcaaggttgtagcttaaggttcaatcaggtcagccgggcacggtggctcacgtctgtaatcccagcactttgggaggctgaggcaggcgaatcacttgaggtcaagagttcgagaccaggctggccaaagtggtgaaaccccgtctctactaaaattacaaaaattagccgggcgtggtggcaggcacctgtaatcccagctacttgggaggctgaggcaggagaatcgcttgaacctggaaggcagaggttgcagtgagctgagaccgtgccactgtactccagcctgggtgacaagagcaaaactccatctcaaaataaataaagaaataaatatatatttttaaaaggttcagtcaggttgaattggaagtgcctgtgagtcatctacagaattggaagtacctgtgagtcatctacatggagatgtcaaataggctgttggaaggttggccctgggacccagaaaacgaacaaggaggaggagcctcttctggagtcacaagaggtgagccagagtagtgggaggaaacccaggaagggggtggagggcaggtcagtttggactggatttagttttggtgttgtgacaggatccagactagagtggaagcaagtgacggccggttatgtttagacttctctatccacccaagaagaacccattctcatgccccagacaaagggaagtgtcttcggaatcactcggaaacgccaatcacactgatccaattgggtgcttcacaatgtaggaactagcctggagagacaac

SEQ ID NO: 39140 - DNA, 1473 bp, Homo sapiens
tctgactgtgagctcttgaatatgaattttatggtaccttatacattttttaactttcaaagctctgggttgggtagttaccagtaccatcttcacaaattctggattcttctggatgttcttgactattctgggaaaattggtgcgtttgttctccctccgccttgtaccgaggtctgcaggcttaagggatgttaacaaggcttcaatttgctgtgtgcattagcaggtgctggaaactacgttgccaaatgtgtcgtagacacaagagggcgatgtgtgctcaaatgtcaacctcaccgaggaaaaggaattcatccttcaggaatttttggctgaattcccagacctaaaaaagattaacaaagtgtgtttgggaggggcaaaattcactgtgaaacctaatcaaagaggcaggatgtgatgtcagagtgtggagacagcctggcaggagcttggaggggattcttatccttgagttcagaactgggcagtactctaggctaatgatcgttataatcaagacttgtcctctgtctggatattcagaaaagacagacttcaaggctgcagagaatcagtggctgtcttggtctctgattacaaaaactttattctgagaaagcccctcattcattggaggaaaactggctgtgcacttgttacatgccaggcatgagtcttgtaggggctaagaattcagccttgagtaagacagccgaggccactgccctctggaagcatcagtgacccttggcacgtactcccatctatttgtttcttttctctctgagccagtccaaaccagcagtatctacatcatcttttcttgttctgaaagagaatgcaagtcacacatttatggctgtgggccacatttttttagagatgccatctggttccagtttttctgactgtttgtggagagtggtgattccaacaatcttctaccaaatgtaagggggtgataaaagtgttcagtgtttgccacagagatatctctagcttggcctgatctcagtgcactgctttttgggtttactcaacaaattgaacaatgctcagcccctcttccatggaaccttcccaatctctttaaccagggttacactgcgactcctctaagtctctgtacatcatagcacttttgtgggagaccactgctacttcaaatctctgccaatagcaccatgtttcctttcgttgctagctttttagaattctaaagcctacttggccattagattttttttatttttttttttttgagacagggtctcactctgttgcccaggctggagagcggtggtgcagtcacagctcactgcagcctcaacctcttgggctcaagtgatccttccacctcagtcccccaagtagctgggactacaggtgctcacaaccacacgcaactaatctttgtattttttgtagagacaggatttcgttatgttgcccgggctggtctcaaat

SEQ ID NO: 39141 - DNA, 549 bp, Homo sapiens
agaaatgattcgccaatccctgatacagacaattgtttcaaggtcatatacctggtacatcccagagtcaggatttgaaccccagtcagcaccagtgactcctgttccctgccctaccccctgagagcaggctgcctcccctcagccaggagggctggagctcaaacagtaaagtcagcatggttcttttcttttcttcagttcatgctctgccctgtgggcagctgttgtggggaaatgctgagtcataaataattcttacattaatgccaaggcagccggaagggaaatgtcagtaggaaatggtatttcaaataagtacaaatttcataattcagccaattttttagaccatttctcgcagcaacattttcttattttgagttttggtaaactcataatcatttataaatgtggataaaacctaccttcatttggacatgtgacccagatatatacatgatatagaatgggccaaacagatcagagcaaagagaggaacaattggtcttatgtataactggcccttgtatctttacatcacccaag

SEQ ID NO: 39142 - DNA, 1135 bp, Homo sapiens
tagccgggcttggtggtgcatgcctgtaatctcagctacttaggaggctgaggcagaagaatcacttgaagctgggaggcagaggttgcagtgagctgagattgcaacattgcactccagcctgggcaacaagaacaaaactctatctcaaaaaagaaagaaagaaagaaagaaattaactctgaaacaatgctactatctaatctacagaccttattaagatttttccagctgtctcaccaatgtctttcacagcaaaaacaatctaaaatttgaatttgaattcagtcgtcttgtctctttagtctcctgggatatggaataattttctgagtctatttttctttctcatgacattggcatttttgaagagtacaggagtacagagtacaggacagttattttgtagattgttcttcaattaactcaggcttgtgggtgtttcctcatgactatgttcaggttatgaacttttggcaggaataccagaggagtagtgctgcgttgttctcagtgaatcttatcaggagttacatgctgtttactagtgatgttgctgcaagagtacctttggtcatttggttaaggtagtgcctgccatctttccgcaccttaaagttgctcttttccccttcataattgtattagtccattttgcattgccataaaggaatacctgaaactgggtaatttataaagaaaaaagggttatttggctcacagttctataggctgtacaaacatggcatcagcatctgctcagcttctggtgaggccttaggaaggttttactcatggcaaaaggcatgggggagcaggcatgtcatggtgagagaggaagtaagagagagaggagaaggttccaggctcttttaaacaaccaactctcatgtgaactaatagagtgagaactcactcattactgttgaggacagcatgaagccattcattgaggaatccactcccatgatccaaacactcctaccaggccccaaatccaacattagcaatcacatttcaacatatttggaggggatgaaacatccaaaccatatcattccccccctggtccttcaaatattatgttcttcccatgtttcaaaatacagtcatcccttctcaatagtccccaaaa

SEQ ID NO: 39143 - DNA, 2843 bp, Homo sapiens
tggggttttttaacgttggcaccattgacatttcaggctggataactctttgtcgtggggttgtactgggaactgtaggaggtttggcagccttcctggcctctacccaaccagtagcaacccctttccttgatatgtgacaatcaaaaaaagtctccagatattgctaaatatccccagggggtcaaaattgcccccagttgagaactactaacctaaattcagcagtgaaactgttttatgaactgtgtctctctgagatttatttcagaaactttcaaaaattaaaaactgggacagagcctgcctaaaattttacgtggctctaaattttcctccgtcatttgcctaagacagcatgtcacaggctctctctggagacctgggcctgctccaggtctttgatgatctaatagatcttcttttctgtctcagtattctggacaatgacagcataatcaatgcgctgatgctgaaaacatgctgagaaaacaatgggaacagggtcaaatcgtcctgaagaaagattcttttttagtagcatggaccagacataacattgtgatatacatttttcataaagcagaaaactccatgattcaaggagaagtaaaaatcattctttttattgtattcaagtccagtatacatccatgcatggatggagttaagatatagtgacaaaaggagaaatctcgaaatatgctaccaggtggcttaaaaatcacagctgaatctatacggtcaacttggcagtaaaacacgttacttatttcctgtttgggaaaaataccgcactatgcttcctagattcaactgaattatgaaatgcagaaattgaaatgggtacaaaaagtatactatttttttatccctcccccccccccccgtttcctttcttctttccttccttttttttctgacagcattcacacatagaagaaaagttgattcaatgcatctggattgtgaaataaagcataaggtgtggacaggcagtacaagtattgcatactgttaatgtttaattaaatatttgaaatcaaacagttgacttagcaagtgctataaagaagagagtgtagattttactagcttctccatagcttggaaaaaaattcagattgtaccaaccaaggacaggttttcagtcgtaaaagctaaacattattccatggatggctcctagtgggtgactttggctccctggctgcactgcccatgtgactttacagatcagaaaacatcttctactaggcgagttaagagggggtcagaccaatgagtggctaatttgtaaggatttcacttaactgaaagacacccttctgagtgctttctaaaccccattaacagaaattagtgttaaaagttaaaaaccagtaataatctgaccttcaagcatgctatactataaactgaactctctattttctggctactgcattttccactaccagccctagcccaggttgcttcctctgcctgagatgttctttcctcccagcgccatgtgcactccaaatcctgcccatcttaactgctacttcctccaagaagtctcccttcccttatccttcaagactgagggactcatgccttcctgtgaactgccttagtgaattatctcacccctcttgtgacacttcactttctgtcttgttttaagatcttttgtgtttccttttttattccattttattatataaaagtcctttgtggaaaggacttgcacctggttccttgttccattccccacaccacatggctcgggactttgtacactgtttagcagataacaatttaaatgaatgacccattagatatcatgttggtgtctgatatttgttctacccagagtgagtccatctggagggtgagataatgtcgttcagctcctttccaaccccatcagcagtcctaggtgaagaaaggcaaaggcctgttatagatcaactccctggactaatgttgcaatcattctctttgcaaacatgtgtcagcgtttctgcttccatatctttctacatatccgcagtgaacaaactccctaagaaacactggcttattgaaatggggcatgttactaaatacacagcattctttttatctcccttctctgctgtataacacaccaacctccacttgcacattcagaaatataaaaatgattacattatgtaaatccaacccctttgtagggatcactgccagagagatgttaaaatgacattacacctgacctttctgaaaaggataatgctccagaagtaaattcttacaaatgaggatggacaacacttggagttctttttttttttcttttttttttttctttggagtctcactctgtcacccaggcttgagtgcaatggtgtaatcttggctcactgcaacctctgcctcctgggttcaagtgattgtcctgcctcagcctcctgagtagctgggattacaggcgcctgccaccatgcccagataattttttctatttttagtagaaatgaggtttcaccatgttggccaggctggtcttgaactcctgacctcaggtgacccacctgccttggccacccaaagtgctgggattacaggcatgagccaccatgcctggccaacattcagaggttttttttttttttcttttttttttaaagaaacccctattggcttgttattttatataaataagcattttgattaaaagaactatttgaactgaatattttctcccacagaatgggaattagatttctttaacttagcctggcttagggtctctctgtcttcctttttttgaagatctgaaactctggcaaaacaatgtcatattttctgctaat

SEQ ID NO: 39144 - DNA, 1587 bp, Homo sapiens
attagccaggcatggtggctcatacctgtaatcccagctacttgggaggctgaggcaggagaatcgcttgaacccaagaggtggaggttgcagcaagccaagatggtgccactgcactccagcctgggcaatagagcaagactctgtcacaaaaaaaaaaaaaaaaaagaaaagtcttaattgaggtcctttatgaatggaaagccctccagggacaaagccaccactggccattccatgatgttggttattgctagtcctgctttgctctcaagcaaacaggaggcctcctcttggggccttgcctgcaggcatggagggtggagcagtctaagatgacctggcagcttgctgctggctccctggctccctggggcctctccaaacaccagggtttgtcggggatatagtctctgactcaccactagtgataagacaggccaagaacctttaagcaagtcagacagcattcagggaggttttagattcttaccactggaagtctgatttcagaatttgcaagttccttaacaaaaccgttgtagctttgacagaactgtagtcattctgggagccaaaacagcagagacaacaatacacagaatgctgaacctgctgcatcaaagtgaggaaagctttatctctgcctcctcattgctgcatctatttattcatccaaccaatatttactgagccctttctaagtgccaagtctcacagtgagtgctggagaaagagtagtggacaaacacagacttggtcccttcccggaggaggcctgcagtgtatggggctggggggaaggaagaggggccctaactgaaaatcacaaagcaatgtaagtagccacagcagcaaatgctataaaggagaggcccatggggctatgagtacatataatgaggtctgacatgtttaggcatgtcaggaaaggatctctgaaaaacagatattaagctggatctgttatggttgagaagggaaagtggagatggaagaccatttttaccaacaaaaatagtgtgtgcaaaggccctgtggtgggagccaggagaatgtaaagaactgagaggaagtagggctggagcagagtggtggggacttagaatggtgcccaaggcactggggcacggggcagaggccagggggcggcggagggcaggtgggcgctgctgggggatgctgggctaggctgggagagacctagggtgagcaggaaggaggctgcctgtgcagggcgtctgagcctctgaggttttctttcatcctaagagcaatgcaaaagcttaagtagggggagggaactggggacatctgaatcacatttggattttgaagagattactctggctgcagtgttaacatctctaaaggtaatttctgctttgcaagtccaataagcaggatcagtcttcagtcactggaagcagaagctggtgccttggcagccagatctgggtttgaatcctggcttcatgcctcacttctggcatggccttgggcaggccagcctttcagagccttagtttcctcatatataaaacagcggtaataatacctctttctgcgttgttatgaaagttacgg

SEQ ID NO: 39145 - DNA, 2255 bp, Homo sapiens
agtcagaaaggagcttgctgtgttcagaaaactcaaaatccagtgtggctgagtgaggacgacgaagaatgaggtagactgggctagactatggagcactttttacggcacggtgaggaatttggaattatactcaaagcagtggaaagcccttgaagagttttaaacagaaggggaaggtaacccatgtgaaacgctttgcatatataagcgctcaataaatactgtctattattaatattattatcaccattgtgtctaccctacttggctccagacccggcccatgcctcagcgaggccgcagtgactcctcctggccagcagagggcgccagcggacacttggctaccggccgcccagggcgggcctcctcttgccgtccccttcctcgtcttttcccctcaggagaagtcgggaaggtggcggcggcggcggcggttgtcccggctgtgccggttggtgtggcccgtcagcccgcgtaccacagcgcccgggccgcgtcgagcccagtacagccaagccgctgcggccgggtccggcgcgggcggcgcgcgcagacggagggcggcggccgcggccagggcggcccgtgggaccgcgggcccccggcgcagcgctgcccggctcccggccctgccggcctcctcccttggcgccgcggccatggcggccagcgcgaagcggaagcaggaggagaagcacctgaagatgctgcgggacatgaccggcctcccgcacaaccgaaagtgcttcgactgcgaccagcgcggccccacctacgttaacatgacggtcggctccttcgtgtgtacctcctgctccggcagcctgtgagtgcggggcggccgggcgggtgtcgggcccttcccgggaggtgggggagcgggcggcgggaccgggacccttccggggctgggaaagagccgggtgccgtgggaggcggtcgggggcggccgttgggcgccggctggcgggcgcggcgtgggaggctgcgggctggatgcgcagggcccgggcagccgggctggggatgcgttttcggttttgccgggcgagggtttacgttctgggcagccttcgtgggtgggacgtgggcggggttggggtcagggagggggcgaccggggcgagcgtccctggtctccgtcgagcctgcggccgccgccctcgctctccagctacccggggcgccgggctgtggggggtgggggaagacgctaggaggccgggggggaggtccatgcgggtcctttgtgtgccccgcctctcagcggcccgggagccgcggtgcggagcgaggcacctgctgggcgctcctgctgggggtcggggagaagctggggtgggagggagggacgcctgcctcgcccgtgccttttttctgggtcgagagtacctacgtaactgggaggaagcaggcacttaggaatagtagcaggatgaaagcatcttgatggcagatgtgaatcccctgggaaaagttcgaaaggattaattgcgggagggggaggcagaggagcagatttgaagctgtgggattttagttttatggtccgaagagagtgttgaggagttgggggaaagttttaatggcaataaggtacccactaggagctgtgtgattctaaatatgatggagttatctgtgagatttatctgtatctcgctatcaatacccgagtgccctggctgtacacagaaatgaggagagctagcaagtcaccatgatttcagaaagacactaccgtcctgagttactgggatgatttgtgtttgttgttctttgcttcattaagctttattttgataaagatttttattgccgtgcaatttcattcggaaaatttgcaggtggttttggaattgataaaatgcttttatattattatcttgtatttaaagttactaacaacgtggcagttactaagtatttttaaaacctttgcttgtaagattaatacaaagcacataatactttatgtgggaaaattgatttcttaaaacttagaaaatgcagaacatgtctagtatgtactatttgctttttaaagttgggcaaagaggcattattagtattacatgagtgttatttcttcagcagacattttttttggtgcctattaggttgtgtaaggccctggggtgtgccagtaaatatagcaaagtcttgttctcttggttcttacagtccagtggggatgcaaaagtaagaaaaatgtcttgggcaagtactatgctgaacatgaaaattgt

SEQ ID NO: 39146 - DNA, 850 bp, Homo sapiens
gtcaggtagtacaaatccttcagttttctgtttttaaagattgcgttagatattctgggtcaggggttgaccaactaaagcctgtgggccaaatttggcctgttgcctgtttttatatggtctacctgattgagctaccattgtgagacatggagaccaagctggattttctctcccttccttcctcatttctccctccactgttggcagctttgggcaccaagtggtggaatctgggagttgatgactcagtcacctttgaccagctgcccaaattgagatgactgggctctttgggaagttggaaaggcacaccaggatctgagtgtcactgtggtggagagtgaaaatgaccacagtgcagattatctgtttgtcatattggttttgataaattgtacttttcagggaatttgctcatttcatctaagttgtcatatttattgacataaagttattcataatagtcttgttctcttaatgtgtatgggatctataattactttgctcttttattatttccttctgtttactctgggttatttcctcatttttagcttactaaaggtgggacctgaggtcattgattctacagcttgctctttgaatacagagttagaggaaagataatgttattaagacattaataaagaagggaaaatgtatttactgtttattaagtggaagtagattgtgttcagtaggctgaggaggaggaagaggaggagggagggactggtcttgctgtcttggagataacagactggagaggtggaggggaggcggaagaggcagggacacttggtgtaaattttttttttttttttttgagatagggtctcaacttccg

SEQ ID NO: 39147 - DNA, 3997 bp, Homo sapiens
gaatgtaaatttctaacctttgcaaggaagatgggtgcagagaaagcagtggacttctggtctgggccactggtctatcctagtgttgctatagacagggaatcctggaacttgggggctctggctattgcagagctggtgggctgctctgagcagcttggtatttcataaacatcccaggtattactgtgatgtggccatcagatatttttttctgttgtacttaatcacagctagctgaccttactcagattccttaacctgagtcccactgattaagagaagataaaaattatccactattttgtttgtaaggagtaaataagatcaataggggaggaatccaagcagcacctagtataataaatacagctgtctttcccttgcttttccttgaaaatctcatctagtcccagtcacccagaagatcacaaggaccaatgaattggtgataaaataaaagctcataatgtcagacccagctaatatagattgttgatcatctgtacaaaaaccaatgtaaaaggttacaaaatcaatttcaaggctatcctgtaagaatagagagagattgaaaaagtaaatttatgacttaattaaggttgcaaggaaaactgtttctttaaggaattacattgtttgaaagcactttataaatactaacttatgtaagactagcaataaatcattcttaactgctctttaatcaaatgttcagtccttcattccatagttccttccatagggaacccttggtcggcttcgttaaattctgctcaaaatacatgctttccacacccatacttccctatttggatgttttactgattcattttgattcttctctacatagtctaaatcagcaaatatttaccatatgtactttttaaagagttgaaaggaagttatccctatattctagcgcctcatgactcgtgtctcagcatgaaaagtattttttatccagattacttaaatcaacattgcatgccaacatttcccatctgaaccttggcctgcccgtttttcctggcaatgttgcttaacacccactgaccatgtagtctcatcatttttaatggtgatgaggcagatttcctcctagttcacattgaatagtctatgtcactgatcttgctatttggatgccatgagctaggactagggactcgtttcaatggcctgtttctctatcacccaggaaatcacaaggctcaatgaattgctgatagcaattttggtactgaaaagtagggcggggctataccaaatatgtaaaagtgtggaagtgcctttggaattctgtgatgggtagaggctagaagtgttttgaagcacttcatagaaaaagcctagattcacatgtctgaaattgttggtagaaatacagacattaaaggcaattctgggccgggtgcagtggcttatgcctgtaatcccagcacgttgggaggctgaggcaggtggatcatgaggtcaggagttcgagaccagcctggccaacatggtgaaatcccatctctactaaaaatacaaaaattagttgggcgtggtggtgcgtgcctgtaatcccagccactcagaaggctgaggcaggagaattgcctgaacctaggaggcagaggttgcagtgagccgagatcatgccactgtactccagcctgggcgacagagcaagactctgcctggcggagtgggggtgggctgggggaaagacaattctgatgaaggctcaaaaggaagagaggagagctacaaagaaagcttctattgtcttagagaatacgtgtaccaccatgtacagaatgtttctagaattatgcacattacaaggtgtttctggtgaggtctcagatggaaaggggtagcatttattggacactgaaggaaaggtgattgatctgtgttataaagcagcagagaacttggctgtattatgtcgtggtgttggaaggaaagcagaacttgtaagtgatgatgcacttggatatttagctgaggagaatcccaagcaaagtgtgcaaaggggaagcctgttgtctccttgttgcttgtaataaaatgtgagaagaaagagataaattaaagaaggaactgctaagcaaaaaggaagcagtacctgatttggaaaattctccacctgtccaaatagtatactatagaaatgtcaaaagtatggctcaacaagtgtttgctaaataaatgaggtgtgtggctcatggatccaatcatttatctcatcagaagccaagaatagagatgtagttgttcaggaaagatctgtgcagggccctcttgtctgatggcttagatcaccatgaatttcttgggaggctgacaacgtttttgagaattttataccaggagaaacattgccattctggactgaaagagaccataaaattaacaagaatgacttaaagcctggagtgctggatgcagaggccagtctcgaactcctgaccagttcgagaccagtctagccaacatggtgaaaccccatttgtactaaaaatacagaaattagccagacgtggtggcgggcacctgtaatcccagctactcaggttgctgagacaggagaatcgcttgaacccgggatgcagaggttgcagtgagctgagatcacgccattgcactccagcctgggtgacaagagtgaaactccatcacaaaaacaaacaaacaaaaacattgtagtcttttatgagaacatctaagtttttaaacaaccaccatatgggtgtaaaagatcatcaggccatagaggattatgctcaggccttgaagtctttttttttttttaattgtaagttttcttcagtctcagaaggtatcaggccttgaaatctaatggaacttgccttcctaggtttcagacttgcttgggacccatgaccccttttttctttccaatttctcccttttggaatgaaaatgtctgtcctatgcctagatattgtattgtgtaagcagatgactcattgtctgacttcacgggttcatggatgaagaagagtttgccccagggtgattcatactctgagtctcagccatcagtgatgtagatgacaacatttgggactttgagttcatgacctttagatgaaattttggacttagagttgatactggaatggttaagacttttgggaatatttggaaggggtggatatattttgcatgtgggaaagatgaattttggggcaaaggggaagactattatgggttgcttgtgtcccccagaaagacacgttgaagtcctaatccccagcatctcagaatgttaatttatttgaaaatagggttgttgtagatgtaattagttaggttatgataaagtcatggtggagtagggtgtgttcttaatccaatgacttggtgtccttataagaaagggaaaagagacacagagacagacctgacagtgagaagacagccatgtgaagaccaaggcagagattggaatgatggatctacacgccatggaataccgagaattgctggtaaacaccggaagctgaaagatgcaaggaggggctctccccgataggtttcagagggtacatggccctgttgacatcttgaattcagacttctagcctccaaaactgtgagacaataaactcacgttgttttaatccaaccagtatttatggtatgtcattaaaaccaccctaggaagctgacacagattgtgctacacctaatttgaatttttaatcatttgcacaaaatgtgggattaaatctttaattaaaatatttcatttaaatctactgtattctgattttccatgtatcaatactttcacttttgttaaatacaaataggacagatgaatctatatttacatatggagtgaaattttccagtttgtttttgttatctttagctaggtaataaatgttagttacaccccgtgtggtggttgtttgaaaacttagatgttcacataaaggactacagtgttatttatttatttatttatttattt

SEQ ID NO: 39148 - DNA, 1634 bp, Homo sapiens
atcatttccccacattcccagaggagcatatggaagatccaagatgcccaaacactggcttcaaaccacatgatcaagatctgaatccaggtctccctactcccatcaggaatctttcacccactccactctccctcattctggaggccccctcagctactggtattaacctaatgacaaccacagtgagggaaaaaacgtgtatttataaacacattcacactaaagattatggttacatatatagagcttttagggtcaattgcagtttgaaagcagacgagagagaaggaaaagcattctcattccggaatagcaagtcttacctgggtggaattccaggtatccagtgggtggggagctttactaggggttggggaggtaggaaggacctactaggtcacatcattgcggcttgccactcaccctaccctttcccaaggtgaccccgacagctgcataattcctctcttaagttcaatagggtaaacactgtttatgtcaacaaagcccttgattaagcagtggagagacaagagcgatcagattttgaaactaggattacagcatcagtgagcaatgctgacaatgtgaaaattttgccaaaggcaaattacagtgactgttaacctactcccttagtccagaaaacagggctttctcttcttcctggaatgctgctgggtttgctggtgctttctgtcttcgttgttaatgatcttatagaaatggctgtcctggacaggtgatcactgaggcttggtcatcttctgaagagtggtcttgctggggtagcatctgctggctctatatccagagcctcctctccacctttgctgaccacggatttgttctctaaatccaggtcatcatcttctctgtgcatctgagacctaggactatgccacagtgatccacaggctgctaaaagcctgctggattatctatctttttatttctttaggtttctaatacagctgtccaaatcgatttagttgggatggtcaagcagaaaaaaacctataataagacatgccctactaaagtacaagcccaggagggcagggcgtattgcctggtccaccacattgtcttaagtgcctagcatagcacctaatacatagcactcaaggaagatgctgaatgaattgaataaacaaaccactacagtctacttgaagaagggtaagggtgaaaagagagaagtgtcaggaacaggcaagaatccaggagttagggaagacaatcttatagaaggaagggcatgagtcacgcctcaccactgagaataaattcaagtgctgcctggttttcgtgagtgcatctcacttcctagctgcatgccttacaggacagaaaggtcctcagatctccaagtgttttaccatttacgactaggactatgataattgaattacttatgcaatcttttaaaataatttttacattttgaaaatgatttaatttttcttggagcattctgtgaggcacatggaggtggtatggttgtcactggatagatggggaaatggaggactaaaggtagtaagatttgtgctcattttcacctttaacaaacatcagagcctggacttggtctcagtttcctaattccaagttcagctatctttcct

SEQ ID NO: 39149 - DNA, 1418 bp, Homo sapiens
aagctggtctcgaattcctgacctcaagcaatccgccccgctcagcctcccaaagtgctgggattacaggcgtgagccactgcgcctggcctgagagtacttttagaaaacattattcctttacctttttcaaacttgaagcactccgaaagtcccaaccttttgcacatttgcggcagcgacattgatttggtaaacagctgtcacactatttattatttgatgacttaggtatcctttccagcagtgtttttgtaaggtgtagttgcgttttcttttagtttcaattaactaaatttcaagtggttcccaaaaaagcccctgctctcttaaattcaaactcaccttcctttttcccactaggaaggaccttttctccatccttggattggaatttggaattctatgctaaaatgccttttcagttaaaatctgtgaacgtgggatgtaaccataggaggtgctggcactttacgggaatcatgattttatttaatctgcgcttccagaaggctgcaaatgggaattccagacaaacccacttgggtgaatcccagcacgcgggctgcggcgtagggggagagctcctcacgcggctcagagtgtagcccaggcccgcagagccaggaacccgcccccagctctccaaacccgggaagagagaggcgacactgctaagaccgagggatgacggtgcttcttcaattaattcgccccccgagatattcttacctacagaagggagtgtctgttcaccaaatcgctcacttgccgcacgaccacgcacccgcggctgtcggatggatccaggcgctcttggtgggaagggggcggagcctgcctggcccggagcccggggccacgcccccacgctttgcatatgcgaatccgggcgtccagacctttcatcccagtgtggaagcccagattttcctggcccagggccggttttctgggcagaaacagtcaactctgctgaaaggaacaacttaagtaatacactgacattcagcataatgaagcaagagggcctgaatccaacagcgatcgtttgctttatttacaaatatgtcctttcttatgaatccatttatttctctccaaaagcttaggagagagggctggctggctgtcacccccactctacacatgaagaaagtgaggcggaaggaagtaggcctagtaaatagagaagcctgggttttagttggggctcctggctccagagccagtggttataatcactctgcactttttttttttaaaggaggtagagtgggatggtttcctggcactttgaaaatctgatacaaacaattttttcttttcttcttctttttcttttcttttctcttttctttctttcttttttttttttttgagacagagtctccctctgtcgcccaggatggagtgca

SEQ ID NO: 39150 - DNA, 1533 bp, Homo sapiens
ccctattttgcacttctggctccttatccctctgtcaggtctcacggagccctctgccccattactgtcatcattgtattccttgcacattgacattatatatatttgccatttatgatctgttttcctccatatttggtgcaaatatcatggaaatctgtctggtttagcactatatccccagggctgggactagcctatgctaatcagttacaaattagtagaaagaaaaacaaaacaagagtgacctaatgtttgcagaaattggatcagcagtcctagttcccaaacacgcagatactgaggccctggtgtggccttcaagggcttcccaaatcttatgccagctctttttctaaactcagtgtctaacattccccttcattcgagccatgtttacattaacccacacactttcatccaccatctctgctggttagatggtttgtttctcagcctggaatacactttctgctacccccaggccagctttcagcacgtgggatgctgacctctccatgtgtgtagttgacatctccacgtggatgcagtgcaacctcatgatgctattttatgagttagcgagagtccaaaaaaggggccttgctgggtgagcctgaagcagttgatgaagaagatcaaggtgtccttgatgtccttgccattgtccttgttctgcggcttagggtggtgcgtgggggaaggctcttcctctgggttcactggctcgtgtgttccttttctttttcaaaagccactccaggaaaagtcttgatagcagaagtcagttattaaaagctgtgtaaatgtactaaagaggacaggtgccagacacattttcatttaacattttactctcaactgggaactgtttgcctttgaaggaatgtcaggcacagttcctagttggggctggagcatttttgtgatgttctgcacaagttttggtctagagaagaaagctggctgcatggatagcatgaagaataccaatccacttgagtaataattatgcaaaatcaggtttcagggcccactaggtaatcatccaacatttctgtgctgactcttgcacatagcacaagagagtgaagtatgccagatccaggaaaaggcaaagttcaataattagctataaatacaactttatagccatttccccagactaaagggtaaaagtttaacaactggctataattacaactttattgctacatctccagactctatttttatagggagaataatggcttcttcaatgattaacacggttgatagctactgctctgtctttgaagaagcacatggtatttcgtggaaatgtgcgtatgtgtgtgtttgtatcttaagtcaaacattaacaaataacacagaaagtcccttgttttcttgtcttgcacttagccttttgcatctcacttacttctttctttccttctttctttctctttctttctttctttctttcttttctttctttctttctttctttctttccttccttccttccttccttctctctctctctttctt

SEQ ID NO: 39151 - DNA, 1273 bp, Homo sapiens
cctgcagcatatggttttgagttatcttagtaattccctcttcttttataattggaatttgagtggagaaaattaaacaatacacatgtaataacatcattctttatctgttccctacttaatatgtgatttcttttattggctggaaaaagtacatagctgctgatttatctacttcaagtagcaggacaatatgcttaccttaaatagtcaaatgtagaaaagaacaatggtcctgaaacacagtccacgccgtcacaggaagaggagaggcctgagactatgaggagagggagagaccagtgatcaaaactgagctctacaacagtcctctctgttgggggaattaaaaagcaaaggatttgaacaagtaattcacagatggggtagtacaaatggccaggaaacttctcaaataacttggaaaacgtgaaaccccaaggatagtgttaagagaccgctttaaagtgagatttctgttattcatgtttaaaatatgaagtattcatcagtcttctggaagagactgacacacaaaaaatataacaagtagcttgtattgatctttcaccaggagactttctgagaacttttcacatattagctcatataatccacatagcaactttatgaagtagacagttaattatttccattttgtagataaagaaaacaaggcgcacagaggcattccgtgttttgtccagggtcattcagtccttggcagagctggcatttggggtcaggcagctgggctcctgggcccgagcgcttaaacactgccttgtgctaccacctggtggtcaaaagcgatacacgcaacaatggaggtgagcccaggccagccaggagccggctccctggaggatgtgaacttgaagcagaaatcaggaaagacattccagggagagacagcagcactcgccaaggcacaaaaacagcagttactgctccatgcatgaggagcaagagacaactgggaatgatagcaagaggagtaaaaaataaaaagaatttcttttcttttttttttttaaagagcaaagaatgatgtgttaggagattgagtggagaggtcagctgggaccagatgacgggagagctcctagtaaggggattggactttattctgaggctgatggaaagccactgaagagcttttaatcacggcagtcggccaggcgtggtggctgacacctgcaatcccaacactttgggaggatgaggcaagggaatcgcttgaggccaggagttctagaccagcctaggcaac

SEQ ID NO: 39152 - DNA, 724 bp, Homo sapiens
actggagtatttacacatcacaccttagaacttggaatatgtcaacatgctagcctattagttaacgccattcataacgaccacttggaaattcttggctctaacctgaagctacgtgctatgaaggaacgcaggcctcggtctccagtttgtgccttaactgatcagcattccttagtaaattgttctctgcgtagtccgatgattactatagctgccttcttcatatcaattgtgagacacatgcaggggaattttcagatttacgatagagagctaccaatatttcatcatcagcaccacaactgtcatacatattaaaaacctttgatctattaagtaaatatgctcggcacccagaggctcctttggaaagtacgggagtggtagggactgccctccccatttccattggttctcttcttccagttcttcgatttccctggcaaaatatttactttaagagctcagggtgtggcatactcactttacaacggcatgtgttctttgtgccaggaaaaaataaaaagtcccttgtggttagtgaagtagaggtgaggacataatcacaatagccgatagcgctgaggctcttgtcacattttagactcatatttatgagaagaagatgtagttgcttccataatatcctaagtaaattcatctctatctgatctttgtgaaaggtgcagggaaatgggtttactcgatcagagagttctgg

SEQ ID NO: 39153 - DNA, 3520 bp, Homo sapiens
ttacatcttcccaatgggttaattttgtgttaccatgaaagtccctttttatttccggtaacattaaaaaaaaatctattttgtctgatataggcatcaccaactccagttctcttttgtttactgtttggtatacctttcttttgatccttttactttcaacctatttgggtctagtggagagttcttatactgccttaggttagggattcatattacattatcatcattagtactgttatttgacatttgctgtgctgactagctactgctgataggttttctttcctcaacaattctgaggctctatattgagttatattagtacatcatcatggagagttaaaggtaggtaaggattattttctgaactgcaatattgattaaagccatgtgaatgtataagattcttagaagagttgacattaaatcaaggtgaagctgaggtttgagccttacttaaaggctgatattttccactctaactgcggacagtactgtagcactgttatagtacctgctctgaatgttagtctagcaactcagggtcttcttcatgacagctgaacctcaaccatgtgatggtaaatgtgtagcagagtatgcctggcatcccacctgctcctcctccccctcctccttgactggttctggaaagcaaatagggtgtaacaataggagttctggaatgttcctgtgtggggctgacctttgtatcgctgttaatcctctattttcagacacaaaaatgattaagttaaaactggatgaaagtcttttctgggtcacagggctgagctgcttttgctctttgcaaatacaaagaatttaacaggattctccccttctcaacttcctgtcccccaccctgaccttcgcaccttcccaatatgaggaaaaagcaggaagttttccttgcgggttttttttatgatgacatgatggggccagttgatcaatggggaaaaccccatgtggcaacacgccttctgtgtacattcccaatatttgctataaatagggccatcccaggctgctgtcagaatataacagcactcccaaagaactgggtactcaacactgagcagatctgttctttgagctaaaaaccatgtgctgtaccaagagtttgctcctggctgctttgatgtcagtgctgctactccacctctgcggcgaatcagaaggtaagtgtcgctctttccgctagcacagaagaaagactattttcattttccttttagccttgagctcaactgggggtccctaagggatggaaaactgttaggaagtatacaagaggtagtgatggaagttgtctgcccatggtggagtggaggagagaagagttactgctgcggatcaggctttcctctctgctgtcaatctcagcagatttggggagtggtgggctcttagagatccctaaacttcaggataaagccaaagtgatgtttctgggagtgatataaagtgtgtaatgttaccagtagatggggccattttgaaatgtagagaatcctcctgtgtccccaactttcgtacctcccaacttaatagttttggtaaagttcaaaactcatcctttagaagtagattataatacctgacatcaacatccccacaaggcatgggggacattgcttgccaactttaaaataacattaatcccttaccttacagcatgttgtaatctgactcgggaatgtccaagtattgctttattgctcaatagtcacacaacacttttagcaacaggtgcattcctaaaaatgcacattgaatttttttttttttctgaggcagggtctaacttcatcacccaggccagagtgcagtggcatgattacagctcactacagcctcaacctcctggagtcaagtgaacctccagtctcagcctcttgaataacagggaccacggccgtgtgccactcacctggctaatttttttacattttttttttttttgtagagacagggtttcactgtgttgcccaggctggtctcgaactcctggaggcaagcaatccttcctccttggcctcccaaagtgctgggattacaggcatgagccaccatgcccaaccacatgttgaacttttatgaacaaaattaaacattcctattaattaataggacaatttcaaagtgttttcactcctataaatcatatttccctttgtagctctatttctcaatacttagtagccagataatagattaaaatctgccaatttattcattttctgcttttggaagtttatctacataagggttccttcaagcagtagggaaggggctgctcatattcttgaatgattatagtgaactgaaatgaaatattgtcaatttgtatttcttactgaagatatcccacttatgagaagtcctgtgtttctcaattctattattgaaccaaaacttctcggcacacaaactgttttttcaaagaactgtaaactatgttagattggttctcaacgaccttacaaaggtttccaagacattgaaactcctcctctaagtggtttattcgtcatatacatgagattcactagatttttcacaacttaaggtagttttataataccaatcacaggataagtttattcatgtggatccaatacctttcacttttttttttttttagcagcaagcaactttgactgctgtcttggatacacagaccgtattcttcatcctaaatttattgtgggcttcacacggcagctggccaatgaaggctgtgacatcaatgctatcatgtaagttattaattgattttaattcagttgtatcaggaatacctagaaacttcagttttaaaaatgtttgcctttttagagtttcattcagaaattactgatgttttgaacataagatcttattttaaagagaaagaaatgatgtggcaaagatagctttgtcttagtacatatctactttaaagttcactttaaacaggactggaataaggcaaaaccttttttaaaaattttttttggtcaaacggaactagtatagggcaaaaatcactttctaaggctattaaagtgatatattaggaaaatagggaagatacacatttcgaaatgagcatcttctaccagaaagtgtttgagaccaaaagtaaaatctcagactaattatactatcacatataattttcttgatttatataggatattatattttggaattatacaagttattgatcagatacatacatattctatgtaaccaccaatagcaaaattatatgacaattctgggactttatcttcctgccattgtactattatttgttacattgcagagaaagagagaatcactttgattttgcattaatcttcatcagaagcattttttgtgcattttattttacctcatcaactgaaatgtttagtgtgtaatcaactggaatataaaatttccattgtatgttctatgaaaaacccattgaaaagctcattaaacacaaatcaaattttctgatttttcagctttcacacaaaga

SEQ ID NO: 39154 - DNA, 5781 bp, Homo sapiens
ttccacttacagatcatcatcgttattattattttaatttagtgatttcttacatgatgtattagatttctctatgcatttgatagttactagctgcctgattcttgttgcaaagatgcctactatttatataatttaaaggcaatctggcatttggttgtttgttaaaaactgaaaaatgaacattagttaaacagagatcaatggttctgatttacgttgacaataatagacagtaacactttatcaatggacagaaggcacctaacaccagcatgccatagatactgaacttggagacacaagataagtgtccatagcctgtttctgtcattaatgagctgagttaggttgggcaagggccatcctctctaaacctcaatttcctcatctgaactctgagctgcttgacatactgagttgagattaagggcaggtgaagcaacctttaggtaccaaagtcattcccaccatgcagtcaccttgtcattacttacacttttcttctttttcattttacagtaaaaaagtcaagaacatgtaaaaactgtggcttttctggaatggaattggacatagcccaagaacagaaagaaccttgctggggttggaggtttcacttgcacatcatggagggtttagtgcttatctaatttgtgcctcactggacttgtccaattaatgaagttgattcatattgcatcatagtttgctttgtttaagcatcacattaaagttaaactgtattttatgttatttatagctgtaggttttctgtgtttagctatttaatactaattttccataagctattttggtttagtgcaaagtataaaattatatttgggggggaataagattatatggactttcttgcaagcaacaagctattttttaaaaaaaactatttaacattcttttgtttatattgttttgtctcctaaattgttgtaattgcattataaaataagaaaaatattaataagacaaatattgaaaataaagaaacaaaaagttcttctgttgattgagttttatatcatttttatgatgtgtattgaaaccatttccaggcacagaaaatataagaattttctgagaaattatatcctccacttacttctagttgttccctttatctcggcccctcatggccctggacttgattttacatgaattataatggaacagttgttcttttttttctttaattcaaagtcgtccagattaaaagttgaaaaagatcctatatctgagattcataacccaatgtttattgatttaagaaaactgtttaaaataagaaaccatgcccacacaccttttgactacagggacacaacaaccatttagaatataccttcaggcatcacttcttccatccttctgtcaccagccaggatctcagcatacgaacatttctccatttaaaagtcctcccgagtcatctttaagcagtttccgaaaggaaaatgactattcagagagttcttagtggctgccttgctaaccagcggggagcccccagacgtgtgaaacctggtaagagcccagcaatcaggatgaaaagactctgaaccagtagttactatcactacattcatgcatcaaggttcacagagtgcctcggattccaaaggacacacaggatcactggaggcaggcatgctgatgatatgatgcaaaatcaagacacataaacccataaagtagggcagtggtgggtcacttgatgtggagccaaaaaagagtaagtggctcaatagtccccaagggcgtctgcatcctcaggaacagcaacattgaatcatcagggaaagtatgctcaacatcctgtgtgttgattcatcatcacacataggttcagtatgtgctgggcaccgtgccaagtgctagagagaagaagtgacttaaaacttaataacttgctgctagatatttaaggctgagcaatgtggcgagaggcaggaatgagtaaagcagctcttacaacacttggtggtaagcactttaataatgaaatcattgggcatcattcgtgagggcttccagaagaagtactatgcagttgaatcacattaagtagccaatatttgatgtcattgacctgagaagatgacaatttcacaagattcagcccaatacttgtggtatgaagaatcagtaggaagtagctagttggaaaagggacagcaggaagtgtttggaaatatctgcgggcatgtgtagttgtcacaatgtctgagggtgagtacaacaagcattcagagggtaggagccagggttgctaaactcactagaatgcaacggatggttctgcacaatgaagaattgtcccaccccaaacgccaatcgcgccacccttgagcaataccggatgaagaggagtatatgcaagtggggcaggggtggagtagctgcagattaagttaaactgttatctcaactacgtgtggtggtttgggcttgaccatggagcccttgggaaaccactgtaaaggtcaaaatacatgttgtctctgcacggcagaggaaagggaggtggggtggatggaaagcagaggtaccagagacagctgcaatgaggaggctgagaaatggtgaacttcagtcacagccacggcaaaaaaaaaaaaaaaaaaaaaaaggcagaagaggtgggattgtgaagcctgggacttatcccagacaccccttctctcctccccatcagtcactgttggaacagcacagtcaaagcaaggcattttcagggggcagcagatttgtctcattgctggaaggcctcagcaggtaaggcttgtagagtcaggaaaggagaaaattttgttagcactctgaagctgtctgaatcttttgaggccaggactactaataagtattaagtgagtttctgaagactgaaatctccaggctggaatgccaatttattaatcaacaacgaaagcatccaagcgtcaagtatgcggacacaagcacatggctagattagggaagcaagctacctgagcagtcaaattggaatcacaaagctggtttgttaaggctgggatcagagagcagggcctcagctatgtaatttgaatatttaatgctctagttttcactggattaaatatgatcttagattagggatgccactcccaattcacagctctctctctctctcttttttttttttcattttggaaaaaaagcctatttactttttaattgaagtataatttatatgcagtaagatacacaaatctttttttttttttttttttttttttttgagatggagtcttgctctgtcaccccggctgaagtgcagtggcatgatctcggctcactgcactgcaccttctgcctcctgggtttaagcaattctcctgcctcagcttcctgagtagctgggattacaggcgtccaccaccacacctggctaacttttgtatttttagtagagacagggtttctccatgttggtcaggccggtctcgaactcctgacctcatgatctgcccaactcggcctcccaaagtgttggcactacaggtgtgagccccctcacctggcccagatacacaaatcctaattgtgcagcttaataaatttttgcatatgcacctacctgtgaaacaaccctgcctccttcaagacagtaaatgttttcaacacagcaggggaaggagctctcatgttcccctccatttgtagaacccaggggtagcagctgttctgatctgtttcacaatagattaatttgccttttcttgatttcatatatatggaactatccagcatttactttttggtttttgacttcttttactagaatcttctgtctctgaacttatttttaatggcatgtatagtacatgaattcactctcattcttaggttcaagcaatagtgatacggtgaaggtctcctttaaactttcatcaagccccttgactctctgaggtgaccccacaggatgcctttgctctcccctgggctaagtagccctttctgtttgtacagtcttcttgagaaccactgctagtttatgtaagagtctagtcctgtctcctaaatacactctaaccatctgaatgattctgaggcttttggtcatatattttccaaaagtctcttgtgtaagactgctgatgtctggccatagccataggccctatgtgtggatttgacttgctgtattctcagagttgtctccaagttcttcggtgcctccctggtgctttccattagtgtcatcttaagaggtaagtaagataaggatggaataatgtcttgcccctggcaatctgtaggtcattggtaactgtaagagtattcagtgaggtagtgtaggagagagaatcccaatgacagtgggttgaagaatgaatggtgacaagtagtttggcaatgaaggtaagaggaaataaaagctagaaggggagccttttatctttagatggaaaagtattgaaagagtcagggagaagagagagagagagagagaatgagagagagattgaagatattataaagagttgaagattctggaagagtaacaaatggtacctcaacttctctcaaaaggcgggtttccagaacacagttcagctgagtcatctcttccttcggaacaaaattcactcaagaaagagcaggagtaggtggggagaattttgcaatttgggatggaggaagttgacagactttgaatatggtggtcttgcttttcttggtgaaagactagtcaccttttgagagtgatgagtgagctttgacatgaatggagaagctttgagatagtcagtagaggacacaggggtacactcaaggttgttccacagtgttggggttcactgaagtcggagataactaagctgctgtgatttccattggcacacaccaggtggcctgctgcagtttgggtgtaagaatagacagtggtgactagttggactagtttagggtcaggctttgcatctaggcacagtgcaaggacaagagggcaagagtcaatgacagaggttcagagaggggttaaagtgctgaaccatgcagtctagaccagagacaggagatgaggtccaaaggtatctgagacactgagagagtatggggaggccctcagataaaaggcctcaatgtggtcaaagagcaggagaatgggagggctggaggggctggagcagctccaggggccaaagtccaagtgtgtgactgtgggtgtgcaactcaagtggtggggtagcagggcgatgactggaaggctaccaggatggatgagtcattcccattgattttccctctactttttccctcttttttaaaaaaatatagagttggggtctcactatgttgcccaggctggtcttgaactcctgggctcaagcatcctcctgcctcagcctcccaaagagctgggattacaggcataagccaccatgccctgcttccctccactttttattatggaaagtacaaaagtggagagaatcatataaaaatcccccttgtatccaccatctggattcaactgactaatggccaatcttgttacatctacaccacccaactcacttcttcccatctatccccctggattactttgaagcaatttctagacattaaattattttgtttataagtacttctccctctctctatatatgtacatatatatatatatatatatatatatatatatatatatatatgaacttttaaaaacatacaatttccctcacatggatttaaaaatcaacactaattctctaatatcacccaatgtccagt

SEQ ID NO: 39155 - DNA, 2289 bp, Homo sapiens
atgggttatccatcccctgaagcatttatcttttgagttacaaaaaacccaattacattatttaagttattttaaaatatacaattaagttattattgacctacggaaagaatgtaaatgctcttataaaacaggtgtacacttctgccccctactggcagtgagctatttagcagataaataaccttgacctaattgcaacaatccctcgatgtggtattttatttggaatagatggttagacatattttgcatatcaacacgtattccagagttaaacaatttagttatagaagtggttaattccgttacgataatgttcaacgaaaaaagattttaggtgcctagaaattgggtatacagcccactgtatatatttacatcatttgttttatacaatagccccatgaggcagatagtattattatccccgttttgatttgagcaaatcgaggttctaaaagggatctgctagtaagtggaagaactggcattcaaacgtcaagctcctctgactcacatttgtgtcctttccgggcaggccatcaggcctccctaaagaggacgaactcatcagcaacatcaaaagtctgactcttggcaggtctgatgtaattacacattgcaccatctttccctcacttcattttcattgaaaagcaacttgcaaccaagtacactagaggagagtataagctcatgagggagtgtggagaggtgaaggctttttgtgagcagggctagtctagggggagcctacaatgatcagctgccccctgggcacgtgtccagggctgggtggcccactgagaagtctggatagctcccaaagccctgccagtgagtggggcaaaggctggcccttgctcagcttgggttttctggctgcgggaatgcccccattaggcctggaggtcctggcagtgtgaaggaacaccctctaacccagagctgatgcctttccctaatctgcccaaagtcatggcttgtgctagcagtggcaccatataaagcatggcaggatgtctttacctgtttgcatgaaattcacaagcctagccagggcctttttctcaggcaaggcagagggcaccagtgatctgattccagtcaatccccagcaccactaccatcagcatatttagagaatgactcatttaactgggtagaagggagaaggagggagacaattagtcacagttggaggtaggagggcaggagagaacttctttggaattttgggatccaagaagagagataaatgacgccgagcttctttgaggtgatcctggaaatccagcaagcctcacaaagcagctttcatgcattgcagaaaggagtgggcattgagtggaaatggcagcctgatgcaggctggagagagatgactaatttatctgtcaaactggcaagtttaggtatttagaagttcactggaccccagagtggggcatggaagtcaccaagaactacaggttctttaagggacccagggccaagaggagagactccagaagtggcacacagcagactgtcctctgggggctgaaacagggtgcagtgacatttcagcaagttgctgcagtgaaggtggtaggaggcaccctgacaagctgaggagggcattataatgcaagtgggagcatagaaccaatgacaaccaaggctaataatttcagaccttttctccattaatccgcaaagggctattgtatcagatccttcaggagtttagagtaaaccctgtaagaggaagaaaaatcagacaagtaacaccgaatagaatggagttttcaacatgaatgaatgaaccatcactagggtcccgcgagtttacttgagagtggccagatgcagttgttggcatagggattggaggcaggcattgtacggtagggacattttggagtgtgtgatgtgaactccacatccagcacatactgttgcagaaaatcaaattgagcatgtggacaaggtgttcttcactgggtgaggctttagaacagctgacgtgggaggcttactgggtggcagaatgacaagaatcaaagctagagcaggaataagtgagtcgtggtgcctgagtgctgaatggaatgagcgaaaatcatttgcagttgagtaactgaggattagaagggcaaacgatttgcttaaaggtcatcaatgaaagggcaggattggaacttctgtcttccaacgagcaacccactgtttcatacctttccacatttatctttttgtgaaaacacacagacacacagcgagcacaagatcatggaaccatag

SEQ ID NO: 39156 - DNA, 1169 bp, Homo sapiens
aaataaggggttgaggatctatctgatgccaagtatacactttttaactctgccacattctttttttttttttttttttttttttttgagatagagtttcactctgtcgcccaggctggagtgcagtggtgcaatcttgtctcactggaacctccacctcctgggttcaagcgattctccttcctcagcctcccaagtagcttggattacaggtgcctgccgtcatgccagctaatttctgtatttttattagagacggtgtttcagcatgttggccaggctgatctcaaactcctgacctcaagtgatccacctgccttggcctcccaaagtggtgggattacaggcgtgagccactgcacttggcctctgccacattctttctcaatggctcagtgcttttgaaaagtaaatagagtgttttggcaacatttcctattttcccttgatctgaaatactgctagaattatatctgttatatcaaactatggtctatagcagtgattctcaaactgtagaggactcctgggaacccttgaacactttcagcagggtctcaaggtcaaacttatttttcataataacaataagatgttacttccttttctacactgtgctgacattgtcactaatggtgcagaagcagtggaaggtgaaactgctggtgccttactacaaatcgaggcagtgacaccaaactctaatagtggtcactgtatttattcttcactgacacacactcacaataggaaaacatcaaaaaaatcccaacagaacaacctagttttgcttgaggatttccttgatgaagcagtaaaaattattaatgtagcaaaatattaacataggagtgcatgtattttgagtattccaggtgatgaaataggaagtactaagaaagcacttctgctctacagtgaagtctgatagttgttgatatggttaggctttgtgtcctcacccaaatctcatgttgaattataattcccataatccccacaatccccacatgtctagggagagaccaggtggaggtaattggatcagggggaggttcccccatgctgttctcatgatagtgagtgagttctcacaagatctgatggttttataattgtttggtagttcctcctgcattcattctcttcctgccaccttgtgaagaagg

SEQ ID NO: 39157 - DNA, 1420 bp, Homo sapiens
gggtaatttatcttgcatcgtctcatagattcaatcattatccttgaaacaataatgaagtgggagttaggagaccccaaagatgcttctctgtataggagtgaaaaccctggtggcagcagcaacactggtttccttgctgttccttgatgaagccaagcccactcccagccttctgcatttgtttttgttttacactctgcctggaatgatcttcccccccggcacaactgtgtgtcacttaacaacaggaatccacattctgagaactgtgtcatcaggcaattttgttgtgtgactattgtagggtgtacttacacaaacctagattttatagcctactacacacccaggctatatggtgtagccattgctcttagactataaacctgtatagcaggttagtgtagtgaatgttgtaggcaattgtaacacaagagtatttgtgaatctaaacgcagaaaaggcacagtaattggatatgcagtctgctgttgactgaaacatagtatgtggcgcatgactgtgtacacatggatagctctgaaggaaggaagagtttccaaaaagaggcaaccacagctcatttgagtgaagcctgttgtgacacagcatgggttgaaagtccagacactcaactcatcatcttaggctctgtgcatttgctaaacaatctgactgcattgcatcatctcagatgcctcacaatctctggtgaagccatatgcttcttcttgggtgtcgggtcacccctttatctctgtatccatgtatactgcaaattccttctttactcgccagttcctcctcatcttatagctccaatgtagcttcttccgtaaaggccttcctgctcctctgcacccctcgccatgctatgggtgtcctgatgccttctctcggctcccccgatccctgggcttaccctgtcacagcctgacactccagctgtcgatccctggtatgtgtctgtctctctcttccactgagtctgagaggacaatgctttgtcaccagagtctgggacaaaaccttcaccaagggggggagtctgtaaatgcgcaccaacttcaataactgcatcctcagcgtctttgggaacacagtggagatgtacctaattcatcctgggaaagtaaaaatgggagggagacatggaggcttaactcagccttaaatgaatgaataaataatggccaggcagtggggagttgggaggagcttggaggctttacctaccacagtgaaagtcctataactatatttcaccatgattttccggtagtctaggagctccccagagaccctggcctggggtggatcctgtgtggtcacgttcatagaccactaagaacaaaggcgccttcctccatcatttccaccttgctgccactggagggagaccccagcccatttatca

SEQ ID NO: 39158 - DNA, 3763 bp, Homo sapiens
aagaattagtgaaatagaagtaggaaggtaaaagtagtaaaagcatatttgttatttaaagattgccatcttaagaatattttgttcatgactttttatattctttaaaatgatagacaaaaacaaaaccactaatttacatgtagaacaaatgggtacaagaacacattttgccctctagttctgcttgaatgagtgcttaaatggaaattctctattgttactgattacagctttctgtaacccaaccatcttccctttgaaaaggagttttagtctgataaggattaaaattctgtgtacttttccaactcgcttggcattttttcaaaccccacagccctaggactttgaggatattgaatttggatcattcgaagggcaaaagggcatgtttaaagaggttaatcgtgacctcgtgtaattactggaggctgtgcttctagttccagaacaaagggaaaacctggctgtttctgtttagaagtttaagggctcagaatgctccagaaatatataagcattccaggattggattggattggatgaaattgaagcattggatcacaatggagtgtaaacctaaacctctctgaatacgggcagtgaaagtgtgtaattcatggcagaaacttaaatttgaaaaagaggaatgttagaagtaataagaagaaatgaagtgagaatcccagagccttcattacatgccaaaataaagtagacatgtattacattcctcccttctgtgggtcccttccacacctgttgttgctttcctggggaattagccaaagtgatacaatttctaagttttagtggggagaaataattgtatcccaggaacaggaggccaaggttcaatttttccaccattgttcttgttttttaatatctttgacagaggagaggactattgatttagtatagtggttcagggaaagcaaaaggcacatcatgtacacacagcacaggaaactttttagtatgtgtttataaattgcatcacccctggctcagagcttcgtttgattttttttggggggggcgggttggttgattggttaattggttgattggtttgttggacacgttatgttggagaaatgacccctgagaggtgagtcagctctatctctggatgatttcacacatacttaattgaaaatgctttcctggactcatggtcttcagaaaaatacagactttgattttattaaagtgaaatattattctgcaaaaatagcccatttgttaagatttataggaagaatatttcatgcatatactctttcatcaattttgttctgagcaattatgtgtctggcactgagctttactgaaatattgaaaagacagagtatttatccacaggaaatctaaaaactagcatgggagaaaaagcaatgatggtagttatcagtggccaacttcaaatcattgtcacacgatttttatcaaatatggtattaacaacagtatcactgtcacaaataaatgtgtttgtactcaagaagagtaggttaatattttttctctgccacagtgatactttaaagcacagacattcattcattcccagttcataaggtaatgcggccacctaccgcaagtcatttaaccacatcaagcctctgttttctcatttctagaataggaactaatgataatactttcttctgagagtttatgtgagaagaaaatgtgacaataaaatacgtcttttcagaaatcttaacagcatagctcctttcaaatatgcatgcaaatcttgatgaccaaatcactaagtgatagacattggcacattagaagatataattctagctgccagaaatttccaaagacaatgaatgctattgggcagttgtgattgctgccactggggagccttaagcatatgaccaattggatgaaatgttgcatgagagatctgagtattagatgggtacgtggactaatttcaagacctcattctctaattctattatttttgcctattatttatgcctcacaccctcttcctggaagaagtttctattttacgtttttcctagagttaatgaaaagagaaaccagccgtgatttgtactttcagcccaaatgccctggaaaaggctgtgtggagctgattcttctggagtgcccagcctatgaacttggaatattcaaaagaatcaggtgactctgatctcctgccaatctgaataggttacttaacagctgaaagttcttgatggtactgttacttctgaccagaagattcaagtaccaaacccaggtcgatccgactgcagaacgcttgccctgcatttctaccctgcacagctttccagatgggtttgtccactagcaggcaagaatggcccagctcagcaacagagaaggaagatttctcagccagccaaattaactcagtaaataaatactggccaatatttaccaggaaccctgagatttctacctacataagcacaaaatgtagttgaggttcctgggcactaggcatgtttagatatgagatatgccttcatgttctgtttgtttttttaaatgtctttttatgtgctgctgatctatattaaaatatagtaaaaaatatactaataaaataaaatgtccacactggaggaatttaactaaatttgaatacatttagacagactccacatatgtacataccagtgaatgtagaaacttcttgatgtccagttcgttatgagattcggcaccgtggtcctgagtggtggttgttctggggctgagcagggctgggtttggcaagggagtgaaatacttcttgaccacaattttagttcatagaattgataagcaatgaacataaataatgtcgtaaaggttatccattagaaataaaggtaaatagtctgaattcgactaataaacccaagagcaaatgactgaaagaggcagccaagaaataaagccagaagggttaggaaagaagggagactgacaccacaggaagtttgattcggctggaagaaatttaattcagctggagaactatccttagtgaatttgattcagctggagaaattctctggtcttgcgttagacatttactatcatttatttttcttaagcagcgtttgtggtaggcaactacagacttccctgatacctggttcacttctacttccagttaaaaaaaaattagcattccccaccacttcccttgccctcttgctttcagtagttaggtagggccacgaaactaacttcaggcaatgaaatatgagtagttggtatgtatctctcttccaggaaagctttgtaataattgctggtggttgactttccaacttttctcttcctgtttcagggaacactgataatgcatgttgaaattgtagtgccgtaaagtggtgtagcataaatacagtcatgtgtcatttagtaacaggattcctcccccagaaatgtgtccttaggtgagttcatccttgtgcaaacatcatagagtgtacttacacaaacctagatggtgaagcctactaaacacctaggccatgtggcattgcctattgctcctaggcggtactgaatactgtaggtaattgtaacacagtggtaagtattcatatatctaaacatatctaaacataaaaaaaggtacagtaaaaatagagacttacaatcttatgcaaccaccatcatatatgctattcatcgtagactaaaacgtcattatgtggaacgtgactatatattgagcagagcctcccactgacctgcagtggac

SEQ ID NO: 39159 - DNA, 988 bp, Homo sapiens
atttagcaagtaaaatacctaaataatgtatcagaaatatcaccaacataggagagcctaattaaaataatattgcagattgtgtgagttggtagaactggttagctttaagaattatcagtgtgggtttttgtttcaactttccagggagatgttgacaaggcatttgagattacatacctatgaataattctcttctgaaaactgtgattgcaaagataatggacacagcattctacctccacattccttaaaagccggataggagcagaagatacgtaaaatcagtattcgatacatgtcagaaatgggacaatgatattgtgctgacttaaatgtttacaaaggaattagaaagcaattagaaatgcaaagcctttcttcctccaaggcaggatacaattcataaggtcaattgtgctatggtgaatggctgtgtcccccaggtagaggagaagccagaataaatataattttcatggcttgcaaggggctgcttctccgtggacacccaaatactagagagttacttcttaatcctgctctatattacaacatcccaggatgaatatgcaatgaactattactggaagtctgctcagaaaaatcaataaaaacacaaccagcagttttactgacagctttcagtatgttctgtttctttaatggaaaataccacattctgaaaaggagagaagagatgagttcacagcaggaactttccaatggtcttcctctgtttgtttgttttggtgtcttgtcctagctgttggttttccagcagagaaggtactctgcagcatggatgctggttacacctagagtggagacacaggattctcttccggctacatgaaggttcaaatgtgtgaactggttataccgtgaagatgtccatatgacagccgcccctgctggcatgcatcatatattctgtaactctctcagcagttctcttgagtatatattttgaaactacagctcttgg

SEQ ID NO: 39160 - DNA, 1240 bp, Homo sapiens
aatttgagaatgattgtggcctgtggttttctaagtaagtaaaaaacccatttggttagaacaagttacgtaccccaaataagaaacatacgtgaacagttcctgctgttatttcctggtcatctgatctcaactgtaattaccgtgcaaagctcaaactcaatctagatccttcattcatatctccctaaaataaagacaatgatcccaaacaatttgctcatccacccaccaatcagaacacctgcctattcctaaggtattcttttttgttattttatgtctcatcaaataagctaatcaacatagaaattaaagaacgtaatctggaaaaaacagttcaagtaaagcaaagcaggaatctacagaataacagactaatttaattaatgccatttgattaaataactgtcttttattgaaaacctgaatacacacaaggcattgagtcaggcactgatgaaagtcatggcagggggaagggaggtgagctcacttcctgctgctttggctgtgcctccctggaaggtcatgagagtcaggtggttgtcaaagggcaactgcagtgtccagtgttgtggcttgtagcttccaacttcccgatgcccagatcagagttttcttgaacttaatagtacaagcaggccttagtcctactcctccagctctctgagtaatttttaagtacccaattccctgtcttatatcccatagtttttgttttctgtaacaaatcctagttgattcatgaatgctctatttcagcaaactagggatgcaatggaagccaggcaagaaatgagagaaaaatacatggatgagtcatcatcattcattcattcacgcatgcattcattacatgattcacacatataattatttattgaacatgtactatgtgccaggcactgtgttactgccaaaaagctctaaccttttatgaaaccagggtagtgatgggagtaaaacagagaaccgggaacattcactaatgctaatccctctggctgaggttcctctattgtttaccacgtttgaaatctctgataactgcctgaagggccttcatctctgtatcttttgcccattctctctgtttctcctgtgtgacattaagtttgaagagatatttcccttttaaactttatctataagtaattacttatgatatgcatcctacaaaataaaaataaacatacttccatctatataaaatttgcataatactattatgcaaata

SEQ ID NO: 39161 - DNA, 660 bp, Homo sapiens
agatgagcagagagaaccaaactagatgtttctcttgctcatgtacactgggcaggggctgactgcatgagctaacaagggaggtggctcctccggagactagcacccacggcttctagtcgtgttcacattcgttataatgaaaatctgtcctgctgcccagtgggttcaagtaaccatggcaacttaccagcaacatcgctcacacaaattatagcaaagaagctatgaccagctccacccagaaactgaaacggtcacaccaagaaagaaacatttctcaaggacacttagctcttaaagagccattggcaaccctgtacttgttcagctttatcaccagaataaatctcagctcgcttttactgaacagcgttaaaagctgttacacataatacacttgaactttggttgtaattaaactggtgaatcacaactttgactaactctctgtgtcacaaagagcattgataaggagttgtctggagagccagacagccctcagcccacctggaatgctgcagacacccgtccttgcattctcagggcaggcagaactttcactgcagaacgtgcaagtcccagcgcttctcagagaccagaagcttggcgcaaagtgatgcctgggggacagtgacagcaagaaaaggaaactctgcc

SEQ ID NO: 39162 - DNA, 1761 bp, Homo sapiens
ttgcagttttggacttttcttgccaacccccacaagtgcatatgccaattccttgaataaacctctaaatatagatgtcctactagttctgtctctctggctgaaccccaattgttacagccaccttgtagaataaaaagttgccagctctgagggcaacttctttttaatggaaaagagacttgcccttaagttttccagagtgtttgacttgaatttaaaaaagaaaagtaagagcaagtcttcgtatttcttccagaaacttcgtaatctggaagtttctgtccttgctcctaatagattccagcccaatgcagagtgtagggtttggagttgccaacaggggacagtggtctggaaggagccacataggtcactgagagtgagatctgaaggtggtttgccaagttggttgggaaagaaattggggccaacagaggaacaggatgaaggaagagggaagctccaaatgtgaggtttgagtaagtgggggtatctcccctgtctgccattttcctcaggctctacaagacattcataaaagcacagagcatcaatccaacttctgccacacagcaattttctgaagagggcacgagaagtggccctgctttcaggaggttgagacaaccacactgcctggaagttccgagatggtcttcccatccgtgttgtaaaccaaatgccgcaaccattgattcagtcactaagcaaacagagactgaaaggtgtggaccagcacacctgcccctttgattgcttggctggggagccaagtgaaataaatacacagataaacagaaaaagaaaaaagaaaagctaaattggagacaggaagataacagagttcaaattccaacttcaacacaatatattgtgcaacctcagctacctaactcttctgagcttgtcttctccagccaggcaggcatgtgccacacatttgcctgctgattcattccaccttccctgaacacctatatgcagccaaatactgtgataggcacagctggaacagaaataaaacattagtctctgcttgaaagggtttctcacagttgatggagactgttaagtccaatgacaactgcaaatctgtgtgagaagttctatagcaaagctagagagagactaagaaaatatttgaggtgaaacagagaaaatgattcctttaaaacgggtaccttcaatggctttgtcctctttgcccactgtcaaaagatgatggttaaagagggaaataaaatgtggattgcttgatgaattatttaatctataagaatacatcttcctatggcaaaattaacattttatgtaactctgagtggctctggtgcatttttggtggttaaaagcatgagagttatacctgcttctgctttggaacactcttctgtccccttccttggggaagcttctccactactgcatgctgccttgttgaatgaggctgtcagtcacagttccttgcccccaacactgaataatgtcattgccccctttacacaaagaatatgcaacatgacacaggctgaccatctgagtgtctcatgtccctgcccaaaagcattggttcagaggaaactcaagactggctgaacagaatgtcctggagatgggcatgcagggttgtggactggggtgatgtgagcccagagctgctgctggcctccttcccaatcgaagtcagcctgagagtgagaccacactgagacaaggaaagacagagatagacagagaaatttcctgagaaatggaaag

SEQ ID NO: 39163 - DNA, 1954 bp, Homo sapiens
gaaaagaaaaacctacaccaatttggcatttatcttcttgttacaattcatcctagtcactgtcttattcaaaatagtttcagtttaattttaaaggcctacatccaaatccttataaatttaaaaggcgctctatatctattaaagaaatggctattattaagctaactgaaaatactcatgttcacacagccatatttattcatgcagctttgatcatggaagcatttttttttttaccttcccagagtctctcaagtgattatgtgggagaggaaccaaaataactccgtgcccaaggagtatgcaaaagcccccaaggcttgtgaagggctcacttactcagtggggagagagacagagggagagagagagagtgtgtgtgtgtgtgtgtgtgtgtgcgtgtgcgtgtgtgtgtgtgtatactcactaattcattgattttgtcactgacttgaaatacacacacacacgcacacacacaaatgtgttatgttcctagttaagtagtttctgtcatcttctaaaccattttgctatatgtaaacagttatttttccatttttctaactgtgaacagttaaacaattcattgttaaacatgggttacaagctgcctctaggtaagttttatttaattcacagactgctttgttgttaaaatttgaagtggttttcaaaaattgagatacatacatagctgaaatctatatttccatgtcttttgaaaaatcagaagttctgcaaaaggaacattccctcatggttaacaattagctccagctgactgttgcaactgccttattgacctaggggctttcctctgcaactggccatggtctctgcctgccctcctgccaactttctcgtttatactaaacaccatttgctatttttatagtcattgtatgccttaccaaattcactcccatacattacttgcttgtcccttttaggcatttgaatttgcaacccctgatgtaaaacgccaaatgctaggagcacagaacaaaaatttcacctactcatgaaaaaaaaaaaattcaagtatagctgaattgactcctacctgtatttaaattatgaaaattgaactaagagggtgtgagtcagtgaatgatagaataataatataacacaatataaacaggtcaacatgtctgtctgtcattgcactcaatgaggatgggacatgaacaagtacttagaaatctgctcttctctgagttattcccacatgccccttgtggtgtgagtatcttgttgcactgaatacaattaaaatgctaacaatcaatattgtttacttccacttttaatcaggatgaattaacatgaacagggatgaccctcctacttaaaacaaccagaagttaagaaacaacagtttgtgaccctgggtatgaagcaatgaaggacagtggcccctgagagatgtgaaacaaatgaggtaagatgtacacctgcccagcttcctgccttgaaacagtttgcaggctgcagagcagggaggagaaacacaagcagggtgcagcggaatccctgagctaaggagacagagatgaaagcctggggggacaaacaagagaagagaacttcacagagagagaattctgtaaattttcagagggtctccttaaatattcagctgactactgatcagcatatgcataaaaggaaactcaaggctggacaacatccactggaaagaataagaggttagagtgctggtgctcacacagggccagttacattgcctgctcgcatcagccagactgaaaaaactcatgagtcacagagcaatgagtagagaaataaagaagttctagtgccactagtggggaaattagcactagactacatgttgctctggtctcacctacaaatcttaaaaggaagattcaaaggatcagattgcttccaagtaatttaacagaatctaacaacaacaaaa

SEQ ID NO: 39164 - DNA, 525 bp, Homo sapiens
ggggatgaggccaggtctcctgccacctagcaagccctctgaaggggtgggttgcccctccaattccatcacaggcttttaaatactctgagattacatctgagcctgcgggaacctttccttttaatgacttaacggctgattgacactcaggattggcgtcttcgtatgccatcaactccactacgcccatctccgccactccggattcggggatctgaacccgactccctttcgatccgctgagggcaagggaggccattgcctgtcccttcggaacggcgctcgcccatctctcaggaccgactgacccgtgttcaactgctgtttcactggacgccgccagaacagcgacgctttccaaggcacgggcccctctctcggggcgaacccattccagggcaccctgcccttcacaaagaaaagagaactctccccgcggctcatttttctttctctacactttgtctctgtgtctctttcttttccaagtctctcgttccacctaacgagaaacgcccacag

SEQ ID NO: 39165 - DNA, 564 bp, Homo sapiens
gaagcacactgcagtcattgagtgttctggactagttttatttcctgaccactaacaagtccctgaactgctgctattcacagaataaaataccttgtagaaggcagcctgatctccagtacccttgaagctgtaaggctgattctcccagagtctcctccaaggctaattttcatggtagaatggggtcagtgtggaggggtattggtatgggagggacctaatctggaacatcaaacaaaatgcaaaagttgcctaacactccaagataactcagtacagtcaacacgaaacagccattaggccatggttaagcaaggggcacagagtttgttcccaggctaggattttgcaaatcgcttgaaagagatttgctgacaaacttggagaaagactcaatgatgtaagatagcattttattcctgagggagactaaggccccggattaatgacaactcctagttttctttatgaacaatagggcccgatgttttgtgcttactcaactacaattgatgaaaacaacaacaaaatctagaatgggtttagtgagaaacctgtgcc

SEQ ID NO: 39166 - DNA, 3041 bp, Homo sapiens
aaagatttgtgaaaggcacatggagctcagacatcattaaagagcagaactcattctcaagtttcctatccagcatgatatccactgctatctctgtggccacagagcctgggagtggcaaagtggcttctcactgaggaatcggacaggcatgtttctatatcacggtgaaaggaaaagaaaaggaaaaaaccccagacagcaaacagagattgtgacaaagataaccacaaggaatgtaaataaaatatgataagcagctcactcaccatctcatcctcaacagctctctcagaggcaaaagtaaaaacatataaattatgtgttttcaaggagagtcaagcaatactctttgggaagaagccacggatataaaaaaatttttccgcatttgtctcacttctctaatctcaaggcttgagatgtatgtactttcaaaagagactcatcgaaatttgggcagcatgaagttgagccccctgttggtaaggaccttccaacagtgactcggtcttattggtgataagccctgtttatatgagctttcaaaagcctaaaaacaggttctttcaacatgacaccttgaaataaaataaacgcattgcaaacaccaactgcaataaaccaggctcacgccaaaatgcacacgtgcacatttcacaaaataagggggagacatttctagtgaggagcaatctctatgggaaggcaagcgagagcgcccacctgccaagggtcacatgctccagagcgcacaggattccctaagtgaaacaggccggtaggaagaacttgaatagtcaaaaatctacaaactcttcagaggtacagatcatcaggccataaaagccacctcaaggaattttggtcacatctctctaaggacttccaaaagctaccctctgcacttgaacaggaaacctgccagctcccctcaatcattctgctcctttggaatagaagttacgcctttaaccgaaggagaacttcaaatgcgccactggtatctggtgccactgccaaaatatatttacatcaccttctatcagtcattcagagcccagtgctgatattctcttagtaagacaaggagggggttaggaggttggtcatccacctcctcatctgcaaggctaaatgcaggttttcttgtttattctacttgagaccctggggaactggtctggtgtctcaggctctgataaattgaacacactccccgcaaatcatggcccagggagctttggaaaggagctgtggggcatctgtttctgctaaatgcaatgccctctgcgggttgttcctctgtatgaggactcctagacaaaggttagcctctccctgcatctgagaaactgtgcttggggctgtaaatgttcattgagaagcctccaacctagccagggcctggcctcattgtcctaagtcttcagatgcactcagcctccaatggtgctgtattttaccagttaaacacgtcttcaaagtttactacgaaacaatgtggctcctagcttgccaaaagtttaactgcaggattcagtggattttatctggcagagtagctgccgtgactcttgacaatatttgccagcaaaaggcagtcctcaaaccttgcaaccagggcaatcccaaggcccaacgtgtcactgaaggagttcttctgggaaaggtccctctttctcttcaatcgcctcccgcaaatccccagcttccagaatccaattcaaggcagtctggcatttcaggagacagcagtaaaaaacttttgatgggataacccaggacataaatattcctggctgaacctacttttgattcttaaatatctgaaggagcttgggtttaaggaagataaagggagagaaccaatgaatagggaaaaataaaataagtagcataccatgaccaagccaaaccaagcttgatatttccacattatattggcaaatggatgctttcacatatcacttgttctgtctttcctggtgaccacaaaaaaaaaaaaaaaaaaaaaaaaatctggcttcaaaaatcctaaccccagaccactgcattgtgtcagtggaatgcaatctaaattgccagtcagaaagtccaaccttatatgtaccaaccaacacgcacacaagcacctccaagccaaaagttgtaacgcctgaacccgtgcgtttatcaatttcatcatccccatacccctgccgggttcctggcgctgggtaaaccgacagcatcatgttgccatcgatgcgtcttacaagatggttttgggcaaatcccctaaagtaggcagaagcaaaaactaggttcctctgcccgggcacctcctcctccaggctggcccccggctcccgggtgccccttacctgcaggcgctccgtggccggctgccacatcttccagccctgggttttggcagaggagacgctggcgagactgtcgatcgcgccggggggcgaggggctggggtcccgctttacatctggggtcggtgtccgcgggatgtgcgtcctggcgctggccaccgccgccgggtgggcgtagggggctgcgagcaggaggaggcgcggcgctcagctgccggcaacttgtgggcacggccgcgcgccggctgtcctggcgcagctgcgagaggactgcgcagctccgcccgggcccggcgagcgcgcggcggcggcgggggcggccgctccctcctcccccgccgccgccgcccggacctgcgcgctctgagcatgcccggggcgggcgcccaggggccgcgcggggcgggagtgcagcgcggccgactctaaatcctagtgaggggtgaatggggaggctagaacagccggcccttccctgcaggaagcccccattgggttggggtctgggaaaagggacagactggctgaggggggaagggcctggagccgggggtggtgggggcagcggggatgtcgggggtggcgggggtgggggaaattcctaaaataaggaaaccgtagccccgggggtcccgggtttccatataacaggcatctctgaagtgcctgtgctgt

SEQ ID NO: 39167 - DNA, 1162 bp, Homo sapiens
ctgcctgataaccacctgaaccttctcagctccttctccagttcctgctacttgttctgaacttattaataaatctcttttcatgaggtgtttgcctgtcagcccgcacagacatgtgcctcacatgcttggtgatatggtctctgtttgcttttccggtaactcctcctgcacacctccacacctacaaaattccttatgaccttcccagcccccagttctcttttatcaaatcccaaagtagaaagaaatgcaattcattacaaaaatctagaaaatccagacatgcatataaaccccaccccccaacccccccaggaagctaaaacaggaatattcagttgccagggatgtcttcagacttaagctctgaaaccatccttgcttgcagatgcttccgtggaaaagtgattttgttttaaatagcagtggaatgagttaacggcctaaattcaaatcgcattagagcgttaaatcctgtcttctcacctccaaacgtaattaattgttatgactcagtaatacagcttttagtacggagtatggtgctatttaaagagaaaaagctttggctctgtaaagattgctttcagttaccgttcccactttgcaaacagatttggtaaagtaaagaatgtatttaaactcaaatggcactcctgtttcaattacctttatgccacgaatcaggaagctaggggagggggtggaggaggggcaattgcaggcttgtgggaggtgacaaaaggatgggacaacctcccactcatagattttgctcccaagtcttcccattcaggaggagcctgcaatgaagggtgaatgaaatagagacatctgctggctagagatgagacctgcatgccaatgtctcccagctctgttctgtgacattggaacctcatccttcctggtgaatctgaaaatgctgccttacgatgtaaacaggtttgttctgagcaagaaaccacccttaaaatgagcagaaggtgttttggtgcaatgagtagaaatattaggcatgtaaatgtgtgcctaatttcatgtacttagtctcctgcaattaccgaaacaggtctaatcttgtcaataaataccatttgaaggcaaatgacagaaatcaaaaaagcttgacaaggcacagatgcgttattcacacatt

SEQ ID NO: 39168 - DNA, 782 bp, Homo sapiens
gactgtgtgtgcatgtatgtacgcaaatgcctgaagtgggactggattacttccaggagacttgattactttgattttcacatctgtgtatttctacattactggcaccttttttacaagtatctatttttttataattttattaaaaactttaaaaatctaatgctatttgaaaggtgggatatctgctgatgttacactggatgccaagatggatgaatagattagtgtctctctctctctcctcctcctgcccctcctccctctctcccttcccctatccccaccctttggagagaaagataaattacattctaccttgcctaagaacgtacataatgatatgcccacacttcccaacagcctcaagaaaaatatgcataaagcaaatagtaactgaatggtatttacttaattttctctgcacttcattacttagctcatgttgtgcaagggactgccacacccaatgactcatcctttaggcactgaaatcatccttgctgggcttttcccttatttatttctcaatgccttaagaatagggctcaggaaggaggaaaggaagtaagagaaaatagaaatggaacttcctatctatattcacactaatgacttatttgagccaggtaaagctcaaattttagaataaatgacctgtaattctttttcatcctttgcccctcctagccaagccatcaacaatattctgtcaggtatttttctgaagtgtctttcagatctttgcctttctttccttcctgagaccacccctgtgatcc

SEQ ID NO: 39169 - DNA, 484 bp, Homo sapiens
aggagaaaataaagttgttttctggtcttacaatatttaattcttctttgtggggcttcacagagagaacggaactctcaggagacaggtaataaagtattaaggaagtttttgttcagaatgctgctgaggggtattttcacatgtgttacgacatccagagcagagctgggaacagcgtgctcgtgagtcagtacgtgagtaagcctctgttcttccagcacaattgcagcttgtttagtttgcaaacacaagttgtctcagtgatccacattcccaataggtaagggccagcgccacactgcctcctcccacaggacacgcagctcacagcatgtgagcccgaatccacatggaagaaaactggaccctctgaggggcagctattcctgtctccaccctggctctgaaggagagcatggaggtcaaccaagaaaaatatcctcatgtcaaacacagtggagaaactgtttcacttcaaggt

SEQ ID NO: 39170 - DNA, 4027 bp, Homo sapiens
ataaaactccctcaatctcacaaagatagtcacagcagttcaacatttctggggctgaacacacagcaggaagtgtcaaaagaaagaattagaaattctgtatactttaaaacttacacttaatattgatcactttgcatgtggtaaatatgaaaatcagcctcaataaaatcctctacaatttattgtctctaaacctctgctaattccattcctcaacccccccggggtgtaaatgcgacacacacaggcctcatatacaggcctcttgcctttttttctaacacaactaggacctttgttctgagcgtcgttttaccccactcaatagctctttcaactttctaccccgtattttttgttttgtttttaaagaggagactctgagactcaacttgctaggtctttaaaaaatgaaatgccaaaaatacctaatgagactctcgagaggaacataaagttaaacacatcactaaagggcctacaaaacggagtaaagcccggagatcgggtgatctggcagcccaggcaagatcgaggaccgcgactaggaaaggagacagcaggagagcagttagacgtccacttagaacggattcactgcgctattaaccgtacccgcctccccccgcaccggcccaacctttacacacaaacacattccctcccccaattaactaaagaagcaattaaactatgcccaccaccagactcgatgcttaggctaaacctcccccaaagtaaaacagcattatcaaaaaaacacaacatttgtcttaagggtttggaagctgccccttccgttatctcctcaccacgtaaggtaaccaattccctcctgtcccccaccaggagttcaaagtgtgatttccccccgatttacatgtgtttttatgtttttccgcatttttccgtctaggaaatgaaggatttcttattctgaggaagggagagacgccgaggaagacaggatttgaggttttactaccttcgttattcgaactcccctctaacttgttcctgtactagaaacccactcactatggagaaggaaggagaggggctgaactgatggacaaacgttgtaaataataggttttatgtaatccacatataaataaattaatcgcctgactcgctctgaatgctaatacgattggggtgacaattggcccacctccctcccccaagtcctagttaaacccacctaccaccaatttccattctgatctatttaaaaggatactctattcctctcagtcaagtttctcggcttctttaggcctccctgcatgcccccctcgtcatcatcctccctcagcctcaacttcccacggcttaaaaaactgccccgcgcagaccccgtctccgggctcgccctccctcaaccgtccctcgccgtccccctgggcaggaaaccccttactgcggtctaaagtctctctggcctctcccttctctgaccctcgcttcccacaactgttgtcactggagctgcttcctagtttccatttccgggccgtccacggccccggagcctcccctttcccgatttccgggcccctcgtcccatttccggggaacccttgccgtcttcacaccccccacctgcacttccggccccccactttctctcttcccagacaccctccaagctccaaagcccacttccggccccccttggtccccgccgagctccccaacacccgcaagccttaccccggttctgtgaagggccctcctcattgcgggaagccggaggagggacccagcgacccctacctcccgccaggccccggtccctccggccgcggccgccctcgagcgtctctcccgtccacccccggcccggtccttccgcggccccgccgccgccggcgccgggagcaggccaagcgggggccgaatcgcggcgatgacacaaccgggcttcctgggactttctgttccagctcctccccccgcccccccaacccctcagctggccccctcccccaaggcttgcccccgccgcccagagctgcgccccaattacctagttaggccccaaagtctccggtccggactcggtggcgcggcagtaacttccactagctccccccaccccccccagcggcgcggcggcggcggctccgggttccttcaattatcagctgagccgcagcaccgcgcccggcgtgcgcctccgcccgtgccgcctccctccccgcctgctctgacaccctcggggaactactttgtcctcgggctccggttacgggctcgtccgcgggaccggcaccgctgcctactggcggcccatcacatcgcccctccctcccacgcctcccggctcgactctctcagcagcctccgatctccgcccgatcccttcgagggaccaggaaggggactgtggagatctacttggtatccctccgccggggtcaccccctcccctccgtggtagcaggaactaattccccctcgggtcacccgggacctggagctggaaatttcacggatcagggttccctaagacccttggaagaggggacgatcgccccaagttagaaatccttctgccagctcataagcgtggttcaatttaaactagggttttggccccttgaccccaaccaagccccgccccttcctggttgtcttagcgacggcggtggcgtcccaagatggcgtcgtggctgccggagactctctttgaaactgtaggacaaggcccgccgcctagcaaagactattaccagttactggtcacccggtctcaggcaagtgcgagccgcggtttaccctctctcctaactccctacctggcccggttggggcccgggacgcaggctgtgctaggccaagagcaaccgtagcccgccggaagcgcccagtcccggctccgcgccgggagattttcctcgtcacctcggcctcctcggtccgacggcccgcgtgtccctgctctccccgagcccggctagtccctggcaagccttctctgcctccccgcggtgccgcgtgctcctttcccgccaccccggcttcttacccgtagagtttcctccgcgcgaagaggaaaacgggcgtctccggcttgcgtgcggcctcacctcagcgtgagaaggagggaaagaacgactcagccaagtgtcccaaggaggagccggctagggaggggaaaaggagattgcctcttttccaggataggaattaatcatggagaattttataaatctctttgtggcctttacgcgtgccacggccacatcaaaacttagttatttctagtagcaactgacgattgggagctcttaccttttggagtcccttctatcccattgaaagtgtgcgggtggtggtataaaaatgtttcagctgctctgcgcttcagccccacccataatgacatctgctccacaacaataagaccgaggattatattatctccaaagtaaccatcggcctatttttatgcctactttggttattgaaggtgggcttttggatgatttactgtgtccatgaaattctcaacttgagcggggcctccattgggaagacgtttctaatcctggctgagtttacgcctgtcactgagttattcatgcaccctgccctttcaatagatactattcctataaaatgaaatttagaagtttgtatatatttgttttggtgtgcatattgatcattccctcagtttttccaggagcccttaaacaaaataggtaatgagttaatttttttatatttttgaaagcatcttttaaaatataaatgttaatatatattttttaatttaagatttagaaatattacaaatgtaaaatcagcctgtccaaaaaaaattttttttaaaacagtactgctccttgcggagcagggctaattcataggcagtgggcccagggtcagactcaaatttttaattaaactgttcttagggggttttgcacatttagtgatgtatgaaatactgaaaggtatccttttctgtactttttttttggtgttgtttttttttttttttttttttttt

SEQ ID NO: 39171 - DNA, 572 bp, Homo sapiens
gattcacttcaggataactacttgaggggttctgatactggaagagaaaaggcaatatagcgaagattttatgagtctgacagcaggcctgcctccctgctggctgtgttcctgctggacagcaggagagttgagggattcagccaaggcatgtactaaccaggctttttaaatggtagtttacagagctgcagtctcggggctgccaggtggtttcccgccagcagcagcactgtgataccaaattaaatcagcccggcaagttcaaaggctcctgtgtctctaaggggaaaactccaaaccatggtgttggtagtctctgtacacccccttcttagagaatccttcaggaagtcctctgtcttcagaggaaggaggagggttcatggtagcacagactgggactcagtaagctggcgttgaaatctctgtcctgccaccagcccgctgtgtgatcacagctgattgctcctcccctctgtgagtcagtttcctcatccttaactggagataatggttactccatatagccacggtgagcattcaatggcctgatacaaagtcaggcgcag

SEQ ID NO: 39172 - DNA, 1738 bp, Homo sapiens
ttggctattgttattacattgcatgtggtgagctcattacacataaggaaagcgggaagcacgaagctaaaattgaaattacagtcttccccaaagctacgcagagcgtggtggtagcggctctgcatcccacgcaggtgagtgcgggcttcacctttaattctgctctgcaggcgcttccgcgctcttcacctggtgtgtacagggcatttggggcctttagagggcgcacttgcggccagcaggctgaagaggctgccgcggagaaggctggggagcggagctgagctgagctggtgcagacagcataggagaaaaacagaaccgaaaaattcacaccgaattaggaggactcaacacatacatgcttcgctctgggtcagggactgtgcttggtggcttctcctccagtccaattggcatgaatgtccgcattttacagaggaagaatctgagccatcaaatgggagcaatgaagcttagaaaggttaaactagcaggctgtggaaaccaaatcggaacccaggcctgcaggatcccaagcctgttttacctcctcccacccccaacactgcctctctcccctctcttctctctctctctctctctctctctctctctctctctcacacacacacacacagccgcacacgcacgcacatgcaaacaaagaagccagacaaggcaaaggagaatctctctaagccccaataatggccctcagtcatccttgttaatgagcccgaatcaacttttcctcagaaagaaaatggcttaattggaaagcagagttcagctcctaaaacatcgtcatggccttggcagcgtttagccccgaaatggccgtccccggtctctcaccccatttcagcctctcttgaggagcctcaatcggaagcgctaagggggcccagcctctgcgcgccctgggtgcgggatcgtgcccgcggggtccggcctcgcgccccacccttcgagcgcccgcccccacccgcgctcggtgctcccgctcccttggcaccccgagaccacatccccacttcgggcaccccgcatccctcggcgcgttcggaagccagcagcccaccggggaagctgggccggctgcagcaccacagcctgtgcagagaggcatccgcaccccgcgaagtccctaggcgcagccccgggtcccccgctctgcgcctcatcactgtccagttcgagtcccaaacgggcctagagagcagccgggcagcgaggctgggctccgggcagaacgcgcttctccagccggacgggggtgcccaggatgacgctcgcggggccccggccagcttgagcagcaaggcgcgcgtccccaagctccgcctggcggtctgccctgaaccgccggttaccctgcccgcccgcagctcccaagcccccgcggcggccttggcactaccacctgccccggcacagtctcgccctccaccgcccgggcagcctttcccgagcctgccttgggctggggctgccccttcccgggggtccctgggggtgcagcggccatctgaaacctaggctccgatgcccccggcgtcgctccattccccaggcccgcggcgcgcgcggcctcggatactcaccgcccgaggcccgctgggctgcggcctcactcggctccacgcccggatcctcgaacttgctgctctgcttggagccccctgagctgctgggtgtagagatttgttgcaatgtcgcctatcatcctgga

SEQ ID NO: 39173 - DNA, 1374 bp, Homo sapiens
tctcagaaaacaacaacaacaaacaaccaaaaaaagtgtaaatgaagacaatttgataacatatttgtctatcaaattggccaagatagaaaataatagtaataatctcagacactgtgagtgggaaggtcaacaggtccaaatgttctgaaggctgatttagtaatcagtgtcaaatgtcctaaaacatgtgctcctttgaatttccacttctaataatttatttcaaggaaataatcatgtatttagagaaaatatataaaaagttcatgatacactagagacgaaattaaatgtactctcatttttttcttttccaccagcttcccaagtacctctagtcatttacacaatggataacagatgagccgcctattgcgggcactgaaggatcagagcttaggtgagggtagagggcaaatctcggctccattcacaataacaggctggactctggcgaaaaaaagaggtgtcagtgttccctccatgtgcccccttttaacagtctcctaataagtaccacatgtctgagctctgagagagcctcagagtttaaatagttgaactccaccctgcagctgctgccgcgaagttaactctaagagctgcagtcaccaagagcgaagaataaagcagcaaagacagaaactcacctggactttgagtttgtcgttcctgcccctttccaggggctgggacagggatcactcctcaagattgggagagttacagggagatgctagcaggcaaaacaggaagtctgtgctttgacaaacgcagtaaggggccgggcttccgagaaaagaaaagtgaaagttttcggagtttgccaagccggaagctgaaggcaggtcggtgcctgcagcctctctccacctcctcatgggcacttgtgaggctcccaggacgtcttggcagttggggtttgggggagggcgtgttgccagttgggatcagcccagagagggaggtatgggaggaggaggcataagggtacagccccagcggcaataggaactgggaactcagcgtccaaatgcttccctaaccacatctattttcccatgacttgtcctcattctgtacattttaggttgatgaaaatgttctcaaactggattgtggtgatgtttacataactgaatgaattcactggaatttatccagtgtgttatcaaactctaacaacacacaaaaaaacaaagagaatgtgccagaaatgcctagaacttgtcaggataagattattacaggaagaaattgaaatgaaagggaacctgcacatgaactggaattgtgcagaggcaggcagacctccaggcagaaaaatggctgagagctgggcaggtagttgggagccaggagtctgaggca

SEQ ID NO: 39174 - DNA, 1599 bp, Homo sapiens
tccagtgacttctccgaagctctcttcatccctggctgttccaaggtggccccatagtcaagattccttaaacccttgccccttaaaatgtttgcctttcttaccatgctggctccagcctctggtcccaggggtgtggagagttctctcttacttctggctgatttccaggaaggctaagaacactctccccaggttataatgctgagcattttggttctctccagccctgggtccccatgtcaggacctaccttagtccagtccatgctctcccatgggcctgagagaagatttgaagtttctggctttccctccaaccctccaactctcacccccagccatttcagcaaggggaaggggcaaacatggagttttccccccaactcccatgtaaactatgccccctcttaagagggcagagcagctaaggactattttggttcaaggacattttttttttttttgctgtccattgcacaagcaagtggactcccggaagccagccctgctcgtcctctgggccctcctttccctggtcctgcaggtcttgctgcttgtcaggcctctcctccaaccgtctgccacatttcagaaaagctgagaaccccttggagtgaaaaaggaggagaaacacggtgtctgtatcccagcaggaagttaaataaatactttcacttttcttttccccatttgggcagaaatctgtgagggtgagtcagtctgtcggccgacttcctgctccgggtcagggcagccacactgcacgcaggctgggccgactggggagctcataggccaggctctgacacccaggcagggcctagggtgggacgatggcaggtgggggcagcgacctgagcaccaggtgagtctttatctctcttcctttcacctttatctctggcagtattggagctttcatgcctgtagttcagtttctgtctaaagcttcagtttagtcctgctttgcaagaacataggtaggtagtgtaatataatggaataaaagagaatgtaataaggaaatcagatttttacaactgcagcaggacagctgtttgtgtgagtccagcttgccataacacagatgacttttcttgttttgaaactactgctcagctggcggggacactctgaacagtcgtttcagtcatttgtgactgagagttattatttcctcatgagaatgaggaacacaaattatatgtttgtgtttcaacaaacatttcctcatgatctcccaaccctttcacatccctctgccctctctaccttcacatatgtcatgtcaaagaaggtagtttggaaatagacactccagggtaaacagctggcttacttttaaacattggaaactgtggtttcacctgtcttggcaaggggcctcagtcagctttggggctatttccttgactgactcagggtgtgagttctgatacaattgaccttgatccaaagaaggaaaaagaagaaaaaggcccaggatggcagaaagctaaatatttttatttttacttcaatttcctgtcccaagatgggggatgcctctgaccagaaaagagatggaaatcctatcttttctctagtaacgagttta

SEQ ID NO: 39175 - DNA, 1429 bp, Homo sapiens
ttctgagggtaggtctgaccccgcagccttagttccatgcttgtggaggcatccaacatggagctgcctggttccatatgtcaggtgacagccccaagtctaacggggacccactggtgaacacaggaaggtgccaccaggaatccccagaatgtgaaacatagtgagcctgtagggtcgttctgttgcagtccagcagttggggctcaaagtgaaacgaaagggaaggtgaagccccctctccctcactcagggagactgggtttcggggtggggggcattgacaaacttctgtgcatgaaacgcacttctctgaagtctcgtgtcttctaattcactccatgccacccgtttttgccgtttgcccactattttttaatcctttcaactgctcagcatcgagtcatatcagtgtgccccgcaaggacagcaggagtgtcctgcagggccttagggtgcggggcaggcttaagggcttcagcctccggggaggtgcagaaggcagggcggcttgtggctccggacggaatgaaactcttagggaagaggacagagaccaggaggagcgaagggcagagtcccccgcccctcacgggctgaacagagggcaggcggcgacccggtggtgctcgtgagctgccagagggcaaaatgatctcagaacccagaccttacatgggttcgactttatttagaaggaactacggctcttctaccacacaattcgaagtgtttggtgagctagaatcccgataagaggaggattttcggtttctgtttctgcccagccctgaagaggctgcagcgctacgcgctgccgggagactgggcgccggccgggcgggggcggagcccggaggagcgcggggcggccgcgggaacgggaacgcgggaggcggacacgggggatggcgatcaccgacccctgctcgttgcgcgtgctcacggtgtgtccgtggcgggcctcgccggctaggtggcctcggaaaggaggcatgaggtggcgtccatgggccaccaggaccctgtgctgtccgtcagttaccaggggacagggatctgcggatgttcatctgcggatacaacaggggctcagctgaaggaccctgcgtgatgatgcggactcaggggtggccctgggccagtcggtttcttcctggtgctgcacaaggactgagggcgtcctccggatttctcatgaatggtccccaccttcagaaggtggccagagggacttcctgtgttgtccaatgctccccttgtctttctgactccctacaatccttcacccatagcctctttaggccagtcactgaggctctgctgagcaggggaccctggtgagtgggccagggaggatcagaccagcctggtctcacccaacttcctaaaagctgaaatattgctaccaaatgcccgctgagcccgg

SEQ ID NO: 39176 - DNA, 1721 bp, Homo sapiens
ttgccccttaaaatgtttgcctttcttaccatgctggctccagcctctggtcccaggggtgtggagagttctctcttacttctggctgatttccaggaaggctaagcacactctccccaggttataatgctgagcattttggttctctccagccctgggtcccaatgtcaggacctaccttagtccagtccatgctctcccatgggcctgagagaagatttgaggtttctggctttccctccaaccctccaactcccaccccaagccatgtcagcaaggggaaggggcaaacatggagtttcccccccaactcccatgtaaactatgccccctcttagagggcagagcagctaaggacaattttgtttcaaggacattttttttggctgtgtattgcacaaacaagtggacacccgggagctggccctgctcgtcccctgggccctccttccctggtcctgcaggtcttgctgcttgtcaggcctctcctccaaccctctgccacatttcagaaaagctgagaatcccttggagtgaaaaaggaggagaaacacagtgtccgtagcccagaaggaggttaaatactttcacttctcttttccccatttgggcggagccctttctgagtcagtctgtcggccgacttcctgcttggggcctgggcagccacactgcacgcaggctgggccgactgaggggctcagaggccaggctctgaggcccacgcagggcctagggtgggaagatggcaggtgggggcggcgacctgagcaccaggtgagtctttatctcccttcctttaacctttatctctggctatattgcagctttcatgcctttagttcagtttgtgcctaaggcttcactttaatccttctttgcaagaacataggtatgcgatgttatataatgaaatgaaagacaagtaatgaggaaatcagattttttaaacaggagcaggacagctgttggtgtgagttcaacttgccataacacacgtgactttcttgttttggatttactgctcagctgaccgggacactctaaacatagcagttgttggtggctgggattaactatttcctcatgatctgtgaaccctttcacccctcagccttcctctaccttcaaatatgtcatgtcaaaaaaggtgctttagaaaataaacactccagggtaaacacctggcttacttttaaacatcagacgctgtggtctcacctgtcctggcaaggggcctctgccggctgttcccatgactggctcagggtctgagttcttattccatcaaccttgatcaaaagaaggaaagggaagaaaaaggcccagggtgacaaacggctaaatattttcatttttacctcaatttcctgtcccaagatgggggatacctctgaccagaaaagagaaggaaatcctaacttttctctagtagtgagttgagaaataacattacttaatcttttaaattttttaatacaaaagaaatacactgtacattattgttcataaaatttaaaacagtggagaagtatattaaggaaaaagtcatctttgccactcagccattcttgtagcttctcttcccagtcctgtgaagagtcttgggcacagcttttcttatatttttctatgcatttatatatctaatgcattttttgtaaatacgtaatttatgttcttgatttataataaattatattacatgtgctagtctgcat

SEQ ID NO: 39177 - DNA, 806 bp, Homo sapiens
cattggattttatttcttagccatttgttattttgattttgatttcctggttaacctaagaagtgtttgggagtagcttttaaaatttctcagtggaacgagtgggggaagtcgtcctctgtcctttggttgtttactctgatcctattacattgtggttagaaaatgtgttccttaagatttccatttgtgagagtcaattgttgtttcttttgtggcctagtgcataatcagttttgaggcttcaccacatttgaaaggcaatatagtgcaatgattaagagtgtagtaactaatgccagatagtagagagggtaggagcagggaggatcaacactaggatgattggggaagggtgatgtgaagtccagctctgccactgcatacatgtagaggtggggcaagccttgtttcttccctgtaaaatgacggtattaataatggtgctgccagcaggctgatacaggttcttgtccttgccccagaaaagaatttgaaggccagaccaaagtgaaagtacagaagattgattgcagagcaaaagcaaatacacactcaagagaggattgcaagtatgctcaaaagaatgagccatgcccaacctggccagagctcacatgctatatggataagcataatgaagtcatggaatattacataataagaggagagattggctgggtgcggtggctcaggcctgtaatcccagtactttgggaagctgaggcaggcggatcacctgaggtcaggagttcaagaccagcctggccaacatggtgaaaccacatctctactgaaaaatacaa

SEQ ID NO: 39178 - DNA, 712 bp, Homo sapiens
atactacacattaaatacccagaacttatccatcttataactgaaagtctgtgccctttaaccaacatttccccattcctccgacttccaagcttttggcaactgctatttgaccctctgtttctatgattcaacttttttagattcctcggtctgaatctaatctaccaatgggcttgtcatacatggcctttatggtatatttcatttatacccaatttgttaaatgttttttatcatgaaaggatgctgaagttttcaaatcctttttctgtgtctattaaaatgttcatatgatttttgtccttcattctgttaacgttgcacaacaccattattgatttacatgttgcatcatccttgcatcccagggataaatcccacttgatcatagtaagtgatcattttagtgtactgttgaatttggtttggtttggtagtattttgttgagaattgttgcatctatgtatatctggagaaatggcctgtaattttttttttcttgtagtatactaatctggcttaggtatcaaggtaatgctcataaaattagtttggaactgttccttgctcttaatttttttttttggaagagttttagaaggattggtattagtttcttcttaaatgcttggtagaattcactagcatagccaactggtttttctttaatggaaagttgtttacttattcaatctttttactcattat

SEQ ID NO: 39179 - DNA, 1030 bp, Homo sapiens
gtcggttaatagaggcaaagatctaaggatagctcctggcatacaacaagcactgaatacgtgttcaacttcattcttgctctcctcctgttgcttgggaagcaggtaaaatactgtttcaaatttatctggaatgatttggagacgttaatagagaaatataggatacatctcagttaagcatcgtggctgtaaccgagtctagatcagaggtcagcaaagtatgacctacagggcaaatctatcctgctgactgtaaataaagttttactggaacacagtcaccgtcgcatcctttgatgaattcatgacacaactacagagttgagtagtcacaacagaggttatgaactgaaaaaccttaactacttactatctgtccctttacaaaaaaagttcccgactcctgatatttttctttaagttctagacaggatcctgaaaagttgcatttgaatggtggttttgtaaaacactactatttgcaatgtaaagagacatttatgttgtttttcaactttctcaggaagaaaagccaacactagacctttgaaaagaagaagaaaaagaggtaaatagaagtgatcgatatgtttttcataattaaacatttaatatttaatattctgtactgtgagtaacaagtcagttttcttaattggcatatggagctagtactggagccttaacgttgaccagcagttcattttaagaccctcaatacctgcttcagtggaatcagatccccagtgtcccagtcaacccctcatgcagggttccctgagcaatgtgcacgttcttttttgttgattgattgattaatacgtaatagatagaaatacttgggggtacatgtgacaatttgatactttcgtataatcaaatcagagttattgggatatccatcactttaaatatttaccttttttgatgccaggaacattcagattattctcttttagctattttgagatgtataatcaattcatgttaactataatcaccctattgatctattgaaaacaccagg

SEQ ID NO: 39180 - DNA, 783 bp, Homo sapiens
aaagtgaagcaaagcagttggcaaagagggagacagatgccaccccgaaaggtgccccattaggtgccactctgccatcctgccctctgtcccctcagtcaatgcctggaatggggagatgaggctaaaatttgagagtttgttttaacacaacatcaaagcaatatgagtggaaatctcccttcaaaacatcaggaggaaaatcattgtgtgataggtggatatgaccaaccagcttgaaagttgagatcctaccacatgccaggatgttgtgtcatattttagagggtggaatggaggacaacagtatctacagctatctaatgtgccatgaaagaaggactttgaaatgtaactgattcatgggggaaatacctccaatacattttgaattataaaagaaagctctcaagacaggtggggagggacaatgcacagttgtaaaagtagatggaatggaaaaaaaaatgcttccttgcaggtccaagaattcccaaagatgaaaatattaattttaaacaatctgaacttcctgtgacctgtggtgaggtgaagggcactctatataaggagcgattcaaacaaggtgagtttactggtccatctacgattttcagctggaaaatatccacacagatagcatactgtttaggagtagacacttgcctttgaggttctgcaaaaccagccccaggcttgaagatttgctaggagctttcctaggacttgggacatcatcacatttacagctagggtttatgagagaagcatgcaaaacatacc

SEQ ID NO: 39181 - DNA, 1966 bp, Homo sapiens
attacaggcatgagccacagtgctggccaggaagaaataatttgataacgatttcttaaaagccaaatgtgaggagtgactcaataaaacacaccaacaaagttgggagtattgggagtttttaacaaattgaaatgcctttttttttttttttttttttttttttttttgagacggagtctcgctccattgcccaggctggagtccagtggcacgatcttgcctcactgcaacctctacctgctggattcaggcaattctcctgcctcagcctcccaagtagctgggactacaggtgtgtgccaccatgcctggctgatttttgtatttttagtagagacagggttttgtcatgctgatcaggctggtcttgaactcctgacctcgtgatccacctgcctcagcctcccaaagtgctgggattacaggcatgagccaccgcactggccacaagttgaagtgctcttatagcagaggtccccaaactttttggtgccaggaaccaattttgtggaagacagtttttccacagaccgggatggggttgggggcaggatgattttgggatgtttcaagcacattaaatttatcctgcactttatttctattattattacattgtaatagatactgaaataatgaaataattatataactcaccatcaagtagaatcagtgggagccctgagcttgtttttctgcaactaaaagttcccatctaggggtgatgggagacagagacagatcatgaggcattagattctcaaaagaagcacgcaacctggatccctcgcatgtggaatttacaacagggtttgtgctcctatgagaatttaatgctgctgctgatctgacaggaggtggagctcaggcagcaatgccagcaatggggagctgctgtaaatacagatgaagtttcactcactcgcccaccactaaccttctgctgtgtggcccatttcctaacaggccatgagttggtacaggtccttatcccggaagttggaaacccctgttttgtagaagagtttaggagaagggagagggactcctcacaccagagctgtcctttctcattgaaggatacaatacagaagttacaatcattggatacagatcgcaacatgcaggctcaaatgtatccatgcaagacaatcagtaaaactctaagatccagaaataaatcagtgtccttttcagggtcactgggttatgcattaatcactgtgtcaacaatttgagagactcatgataagattcagggacaagatttcaccatgaatcacaagaccttcccaaggtgggttaattggaaagcctgtttacttttaaactaaactgccaaatgtgacctgtagattatcacattccctttttgattaaaaaaaaaaaaaaatcttcccatggaagtattgctgatcaatctgctaggttaaggggatagatgttcttcattccttgtcaatgggaaggcttattccaggaggtcatgtccctcggtgggggaaaaaaaccttgttattgcaatcaggccagtttgctgacaagatgaggtaggtcatgacacacagctacctgctattctcctgaatgataaatcatctcactgggaaatcagtattttggccttagccatggatcgaaagcaagcacaatgcaaatcatgagtgacttaatagccaagaaaataaactatgtttattattaggttgaggcaaaaaagtagttgcggttttcgccatcagaagtaatggtgaaaactgcaatgacttttttgcaccaacctaatattataatcataacaacttgaaaacacaatagaaaaaagaaattagtcctaagagtaaccaaatgaacaagtcatcaatttatagttgctgttgcttgttgaatacaagcaaacaacttgaaaacacaatagaataaagaaattagtcctaagagtaaccaaatgaacaagtcatca

SEQ ID NO: 39182 - DNA, 3657 bp, Homo sapiens
tcttaaagttaaatatatgagtattttgctgataacttagaagatagttgttttattaaagcaaaaatatttaatcagtcatacttatcaaaagatttattcaagtcatgtgaacttagatgtttgggactactaattcctgagcattaatgtatttataagtcagtctgttactacagagaggttttatagctttgattttaaaattttggtcatgaatcaggtaaatttcactagttttaaaaggagaattgaattaaattgtgcctttcaaaatggtacaagttaaagttatctgtcctacatgactgaagcccttaatgagtgtaaaacatttatatctcaaagcacagagaaagaatttaatccttccatatggctaatgaagttttacatttccaagggactgtgaagtccagcagggcatttaaagggtattgtctgatattggataaagagtttaattgggtttacttccactttaatgggggtggttgaatatgttttaccaatgtcagtgggagattgggagcataagtgatccagcaaagcttgcaataactcatcggtgtcattcgttagtcttgggtcagaaaaaattgttggtgataattgtgataattttaattgtttcattttcattctttagttgttctgtttgctccttctgttccaaacgtaaatacgttttcccccttttgagagaaggaaatgtgtgtattgtgacattccaaaaatctctacctaagagacagatgggagccaagagaacaagtagaaaggaataaattcagttaaggaagaatatgaaggcataggggtagaaggaggagaagaaattggaatgaaagggagaaagcttctgaagtctttttcaaatcagaaatagtgtgggatggccttttgctcatctcttcaatgaaggccattttttttccccagaatttcttttaggagcatctcactgctatcagaagtaagtcagtttgtctggttctaaaaccagctttttccaattgtgtatggtaatacatcagcttaggcattttcaaaagatccccattttggccactgctgcttttgaccatcccgggttacatgggtccacttatctaagtacttgcaagaagaaggactctaagtgttacacatcaaaccagctggtgctgatagaggcagtgtaccctgagtcttagaagacatgtttcccatcttggttgttttgaatgagacaagtaatgtagtggattaagtgtggtggttttgaatttttcttccccgaaatttcactcaataggctgaaaagattatcttacatgtctctgattccagagtcacctccaaagaagtttcagggtattcatggacaagagataatcagtttttatgaagcttgccagctgagcgaaaagttaacagtgtggggattttcctatgagactgctccatgttgctgggggtatgccctgacacctccgctattgtgggtttcctaaaaaccatttggtcacagacagagaatgtttcttaacttcagagcaagactgccctccctcatgcactcaaaaatgagaaagctaaggaaaggttgtcccatccaaaaccttgagagaaataattcacagagctcctattttacaccgccctaggattcaacaaaaactcctgtctagccaaggagaaaaccagcttcaaaaaaccagaacttccaccacgatgggaggttcattgattttgggaggaactcctctgcaacccccagccagggcatccaagttcaggaacacaatgtgttcattgccagtacctgcacaaaggtcggaggccgcatatgtcgtccagggaggtcactccaaaattctgccaactacaccggaatgttgacgaaaatttagcctgttgagaaataaataatttgataacagtttattgaaagccaaatgtgaggatcaacccaagaaaacacaccaacaaagttgagagtgttccagagtctgttacaagttggaatgattttataggtagggtcaggagaaggaagagggactcttcacaccagaattgtcctttcttattggaggatacaatagagaggttacaatcattggatacagattgcaacatacaggctcaaatgtcttcatgtaaaacaatcagtaaaactttatgattcagaaataagtcagcacccttttcagggtcagtggggtatgcattaatcagtatgtcaacaacttgaggaactcatcatgagattcagggacaggatttcaccatgaatcacaagaccttcccaaggtaggttaatctggaagcctgtttacttttaaattaaactgtcaaaagtggcctgtaggttttcaccatcctttctctgcttgtcatgtggatgcagagaaaagggagtctgccaaacttgaaacttacccaactgtcccatagaactgatctttatagtttcttttgaacaaatgtgaaacttgagccccccagttttgaaatctcagaaagctccatttgtcttatcagaggccgtttctcaggaaaccaaccatcaggcctctaagattgtaacaaggagctgaaacacaccaggtcacagcatctggacaatgcaacccaggtaactgacccccggtgcctgcctaactgactatctgcttcttgttgacatattcctcttctttacccctaattcctagtttgctgcatgtagttacatttctgccctataaacccctaattttagtcagttatggagatggatttgagactgatctcccatctccttggctgcagcacctgattaaagccttcttccttggcaatacttgttgtctcagtgattggctttctgtgcagtgagcagctggacctagatcagggtgtttcaacaacagattttggtttcctgacagtaaacatgttgcttgtggcttggctgccatgggccacgagtctcagaagccctcctaagcagctgcccactcagttttgactggaggtgagttgtggattctctctggccctgctgctacgggcccaaaccacattcctgattgcctaggaagaacagcctttgaaattccacatctgcatctggatagatgagtatcctttgtgggcccagacagcaagatctgctcttctctattggggaacattttaaaggaatttccatttgcaggttgaaaaaacccaaatggctgagaaagggaaacaccctgactgttttgatatggactttcttgatggattgtttgtaattgtgtgtgtgttccagcaactgagtgttcattgcaggtaccagacagtgggattggctcctatcgatttgggaaattccaaaggaatttctgtttgcaggctgaaaaagcccaaccgatggagaaaggaaaacactcttgactgttttagttgggacagtcttggggcttgtttgttgtggcagcagatggatcattgtgttttggtgattgtgtgtgtgttgatacagtcatgggaaattagaatttgataaactgatattctttcataatactgtttagccccaatattctttggaatctggagtttgttgttaaatgagaaagtgggatggagttccatgtatccaggcttttaagctgctgttctaaacagagttgggcctggtta

SEQ ID NO: 39183 - DNA, 1119 bp, Homo sapiens
cttcctcaaactctaagctttatataattaactacccatatgaagttccctaagttcaccatgtttttggtgttatttgcatgattttccttgaacatttaaccccatcttcacttgactaaatcttattcgtgtttcttatctcactcttttgtagttgcctattttcttgtgtgtctttcctggactataagctcactgagagcaaggaccacacagtgttcaatgtctcattctcactgtttgtgctcagtaatttttactctcaataagtatttgttgaataaacaaagtttcattgagatttacagcaggtttggtgagtctgagggtgtgggtagggtggaaggatgggaggcgaaagagataactagagttcatgcttcaaaggtagagtccttctggtgcagtatccagggtggggctaaacaagtggtttttgaagtggagtagaattgaaggtcactggagcagagaatacaaggcaactatgaccccatagatgggatgagtggcacttggtgttgcccaggagaagtcaggtcaggcaccaggtggggtggggagggaagctgtgagtcaggctccaaagtcctttcatagatggtctgattaaggcagggaggtgccttcatcctaattccaagctgcacggggagaggaagggaaatgaaagtgatggaagatacacagagagccagcagtgactcaacgagaatcatggcactgccttataaccctgagatctgtgggccctcattagagaatgaagggcctccgttcaaaaggatttcatgatgaacaggtgggagaattttctagaaagtggttgtgtctacagagaagcattttaatagaaaggtcttcccagagagcccaatagaagggtttagaagatgtctcccagtgtacattcaagtggtcaaacgacatgatttcttccagtttggtttcagaatttgttacaaacccctgtatcagaaatgtctactgtcttactgctacaattctcagctgtttctcccagttaagacattaatctggaatcttactctgatccttaaagcgaagcaattaaaaccctgtatatgggattatccacccctgtgcattcttttt

SEQ ID NO: 39184 - DNA, 2214 bp, Homo sapiens
cctggatgctgtgtccccctggatgctaaaatgaagcgatctgctccaagaaagtaagaatcggtctgcacaaagtgggatcccggcctctcgcagaattaagcttgaagagttgaggaagtggtcgttgaaagtgggcgtgcgattcccgcagtaagagcgctcaggcggaggagaaagggctgagccccgccttggaagctgcggcggaggaagaggaactgcggggcttggcttctgcttttctctgcggcccctcccgctcgggcctcgcgcctacttgcggcgccctgagtccgccggccgctcgggggcgcccgaggcggaagggggcgttgcggcaccgcccgacgtcgcgtcctcggcggctgcgcagtgcgcacgtcaaagccgggctcgggccgcaagcggggcgaggggttcggggagcggcgcggcctgggagacacagagccttcaggcgccggggcgggggcacaggcgaagactaaggcggcgccgggccccacagcagcagccgcagcccaagcgagcgcagcagcgcggcggcagccgcgggagcccctgggcagccgtccgcccgcgcagccgccgccgccgcgggagcccgtcgccgggagcaggagcgggcggaagacaacggaggggccgagcgtccgagccactccgcggggaccgaacgagcagcccgaagcggcggcggccgaggacggggacagcgacgacgcggaggcagagaagggaacgcccggcccagccccgtgagtgacccccggccggccctgctcgtggtgcggacgcctgcccggcttccgcctgccccgctgggccctcaccggccccggggctgcctccattttcctgggtggcggcggccccggcccagcttgtccccggagcccccgggagcagccgggcccagcctgccctctccgcccggctcggctccggtccctcgctgagacgctccctttgccttcgccggcgtggggcgcccgggggcctgcagtccaggcgctcctgcctctccccccgtggttctctggcggggctggcggcgcgtggtggtccgggccggagtcgggcgggcggggaagtgcgggccgggtcaactgtcaccggctgcacccgggcttcagcgcctcgctcccgcccctggtaaacttcctgttgtcgggaggcagataccagctttgtgaccaattcaggaaaatgcctaactgatttctggttaggaattgggcggtcggagcgttctggagttcaatggaaccaccccaagcgcagactgcgtgcaggcgccgtagtcggcccgcaccggagggattcaaaggtgaagcgggccccggtcccctcccccgaggagcttaggctctggtgtgagagataagacgagaacacaaataactgcgataccgggaaggaggtgataagtcctgtgaaagaacgacggagtgctagaacggcacccggaaaaaccgaaccgatcacttctgcctcgcagaaacctggaaggcttcctgggcgggggatgctgagcagagtcttgaaggcctgatgggatttaggagaggaggattgcagaagaggtgtgtggaaggggtagcaaaagcgagaagacaaagcctagaaatcatggataattccgtttgttggcatggtgcagggggcggggggtattgggctaaagaggtattttggggccagatccttgaatgctgtagaggagctatttgagcagcattctaagagaaacttagagctcatttctcagtgactcatgagcccggaaatgtaggctaggggatattaaaggcgctcttgtgaaaggagagaggaggaggcccagtcaggagttgacattctgtgccttgaatgtaatgcagtttcagatcgattttgacagcttcccagataatcaagtaaatccatgcccaggctaagcaaagtacctttgcagaaagcttcattagatatcaggctcttaagaggtaatggaaaggtgtctataaaataagctcatctgcacacagaaggtgtttctatttgtgcgttcgctacagtgcataaaaacttcttgcactttgtattaggcgtatgtactttggaattactaagctaaacctacattctttgaggtggcatttgtgtaaaataacataaattgatgatttttaaaaaatggttagtaatattctgctgtagaaagccaga

SEQ ID NO: 39185 - DNA, 476 bp, Homo sapiens
gggattacctcccagagtgctgagccaccgcgcccggcctcaagtgactttttcatattcaccttccaaactgtatttgtctttttctgagtctaaagtggttaaaaatcatttgccttccttctgggcggtgactcaaacttgtagccgggaaggaaggcggaggaggggagttcggggtggaactcaacagtagcagaagcgcggccctgcagactgccacaagggggcgccgccggaacccagtttctctcgaggtcttcgccccgagcgaggcccggcggggactcccggaggcctcaagggccctcagctaggcgccaccacctccaggcctgcggtccgcgaacgtgcctcttgccctctgcaggttctcccaaccgcgggaagagaggtccggcccgcgacggagttcccaggaagaaggctggctgcaaaaacattcccttcgcagcaactacaaatacagaattcct

SEQ ID NO: 39186 - DNA, 1086 bp, Homo sapiens
gtctggaagctgcatttgcctggcaaacactgggttaacaaagacttgcgttgcggggatgctggccttggacagggaatgcgaagggattatgctacggagaacggatccgagcgtgacggctgaatgaatgagtgagcgagtgagtgagtgagtgagtgagcgagcgagtgagtgactgtgcgagcgagcggcagaaggaactccgacccgccccaggtgcggagcggcgcgcccggcaggggtcactgcgggccccgcgggcgggaagggggcgcaggcgcggcgggcgccggggccctcccgcggggacggggcggggagggctgggggtggggttagagagagggacgcgagcgggatccaaacttccggtgcctgcagagctcggagcggcggaggcagagaccgaggctgcaccggcagaggctgcggggcggacgcgcgggccggcgcagccatggtgaagattagcttccagcccgccgtggctggcatcaagggcgacaaggctgacaaggcgtcggcgtcggcccctgcgccggcctcggccaccgagatcctgctgacgccggctagggtgagagggtctggggctcaggcggtggggcgggggacccaggctcacgacccaggcgcgccccgtcggccctggggactgcccgaggcgcgtcagggccccagagcccggggtggagcagggttgggaagtctcgaatggttgcttatcccagaatgaggagggggcttaagtcccgtactaaagcggcagccaaaagctgaagtccgaagagtgggaggcgtctggttctggtcttcaggtggagaagtgctcgaggtctcttccaaaagtgggggccccctcgccgccttatagggggagggggctggtccgaagaagttcgaggaatgttggtgggggggtacgcgtctggttccaatcaactgggaaagccgcgagtcgagtccccaggtgggggatgggaggagggttagacgtagtttttccaaagtagggcggtgggacctgattggctggggaattgggggtgggggggtctggtaccaacgaagagggtggggccg

SEQ ID NO: 39187 - DNA, 978 bp, Homo sapiens
ttatagtagtggccgaccttgtttactctttcctaccggagtataagctccagggggcagggacttcatccccagagcctagcccaggacctgcacacggaggcactcagggtgtttgttgattgaatgaaaaacgttcactgaacacctctgttgtgccgcacacactgtgccagggcgtggacgaaagctcagctgcccaggccattgactatttctgagcatttccactctcacgttgtacacccctcatttctctcttcctggaggggctccctacctgagcgcgggaatcatcttccttcctctctcctggagtctgcctgacttggtgtcccaagacagggactgggtcccctttgagcccctggaggaatgtgaactgagccgatgaggagatgcctcctgtctacttggaggaaagggaccgggacacacagaggcgcagggggctgaaccctcggttccagccccgataactcatccggagtcacgcggttccgggactttgcagaggaaaggggcgcgggatgtgctttgggaatagaattccacctttgcactcggctctgcacctgtcctgccccccggagattccttgagtccacgtggatccgagaggagaagctgttgatcatttcctgtccgctgaggctgtgatccccgggcgaccggaccggtagcccggcagcgccctctggtggccggtgacgctcagccagcgccgggaatcgccgcccaggccccaaggaccagaatcaggagcaggatcagggccagggccagggccagggccagggccagggccagcgcgggaggcagatttatcccggtgcacacctctaacttatccctcctacacaaggcaggactccggcttctttcccttttctgtgtatttcaaaaggaatgcacattgagcataaaaaatatatgtaaacaaaaagaagctcccagtcaaagctgtgatactgtgtc

SEQ ID NO: 39188 - DNA, 1006 bp, Homo sapiens
ccttgttttccaaaccaacactttctggtcacttttttttttttttttttttttttgagacaagtccttgatctctcacccaggctggagtgcagtggcacaatcacggctcactgcagcctcgacctctcgggctcaagccatccacccaccccaacctcccaaggagtaactgtgactagatacacactgccatacccaactagctgtttgatttttgtttgtttgtttatttagggatggggtctcgctatgatgcccaggctggtctaaaactcctgggctcaagaaatccttccacctcagtttcccaaagtaccgggattacaggtgtgagccaccacaccagtctcttatcacttgattcccaccaaattctgtttaaatgaacatgaagaggtaaagtatttcaaaaatcccagtttactttatatcttcattgaacaccagagaaagaagaagtccattaattttatgatgtttttctaaggtgcggtgggagaggaggaagaaatattcttggcatcttgcctttttttaaaaaaaaaaaaaagatctttgcagtttcctgttaatttaataccagaacctttgctgtgtaaataacacagataaagataaactttactggccctggactccaaccttcgtttaacattccacccccctctgatccatcccgcatcccgcctatggaaatttgtaattagttgtggagatttagaggctgagaatatatagttcaggaggcagagcatgttggttttagacaagccttgtaagaatgtgctaaaaatcccagtatacctgacagtgcttctctagaacttgtctttctctcttcctcagaggtgacctggatggggttaattccctttctggtcaacttgtaggtttcaccctggctctgccacccaccctcccagtttattatacccacttaggctgtgctttgctggcatggccttgcactgttatttagacaagtgatttaatccctcttact

SEQ ID NO: 39189 - DNA, 1317 bp, Homo sapiens
gggaggagccacccttggagggctgaggagaaagccctcttcctcccacccgggcccgcgatgcgggctgcgcccaggggcgcgtgcacacagaggccccgcccgggggcccgggggtccggctgggctcggccctcgggggcgtgtcctctgtgccggggcgccaccgccccgagaggcgggcagcgggtgcgcccgggccgcggcggccgcagagggcgggcggcggccagcatggagcgcgagctggaggcgctggcggcccggcttgcgcgccctgccgagccgcccttccaggcgttggtggaagcggcggggggccgcgggcaggtgctgctggtgggcgagctgtgggagcgcgaacagagccgcgcgctgctgcgggacttcgcacgggcggtgttcccgccggagccaggcgcggccaagccgggcggcgcggcggcagagggcgcggggcccggggcggcgcgcggggcgcagagggcggcgagggcggctggggcggcgggggcggcggcggcggcggcgcgcgccatccgctcgccgctggtcttcgtgctgtgccgcgcgtcgtcgctggccgcccgggagccgcggcgccgcctgcgggagatgctgcgggacgtgcgcggccggcggcgggccggggcggcgctggtcggggtgctggtggccgaggccgggccagaggacgcggtggcgccggggctgcggctgctggaggcgctgttgcgcgccgtgttcggccgccaggcgggggggcccgtgcaggcggccgcctactgccccggcctcccggcctcctgcctggccgtccaggcggccgcctgcagggccctgcaagccgccggagccgggcaaccaggtgagactgcgcggggcccggctgggcgcgggcgggcggtggctcgggcacgtcccccaagttggacccctttggccattcccttattgagcaccgaggtaaactgaggctcagagcagggaggtgcctagagccaggcctcgcagctagcggagagcgggccgtgcgtagcggatcgagtctgtcccggaagggtccggagtgcacgggagatgcctagggggcgtgggaaagctgaggggccgagtagaaggcagagggagtgggtagagagaagggatgaatcgggcaaggccgagatctaggagttacggggtgggtgggggtggggagagaagaggagtggggaaggaaatgggaaagccttgggatgggaaagtttcaagggggtggatgggtgctaaggagattggcggtgccagaagctaaattctagggcgctgcgcagc

SEQ ID NO: 39190 - DNA, 1121 bp, Homo sapiens
gggggctctagatcactggctccagaactcccggctgccagggtagcccctacccccagccccttgctcctggacagcagtgggtctcacctttagcctctgcccccagttctggtctgacccaacagaggggctctatgatattaagaaggggcccttcctgctctgtgcctcaacctattctccataatagggagtctaatcctattccttccctgcctgatgaggatggtgtgaggatgaggaggacggcatctcatttggggctttttggcagtgggcctcattttaatcctgcagggctgcctgccagtggatctatccagctgcttccttgtagccaagaatgagttcaatgaattgtgattcactgattttattgattttgttttaaaacagggagactggtatttttgaagctgctatcattttctatttctttattaatttctttgtaatcatcttattaaagttttcttatttagtgggagagggagctttgtttaagtttggaatttgcctaaggcagaagttataaggcttcataaccttttgtatgtattgccaatatttgaaacttgggagattacgtataaaaaatacctagttttctgggtggaggatggggcatgctgtcatctcaagtctgctgcggctcacccccaccacctttaccccctcccccgcccttcccatcccccactgcacttcactcatgtaagacgtctgcccggtgctggtccaggcgggcatgtgagtttgtagcctctgctccaaaggatggtttacacattattttttcattaccttcagtattcctgtgaatggttcaagagagaaagtcttcatttactaagatttgggttctgcctcccaagtgacaatacggggctgagatccctctcagcttctttgagatgtggccaccataagcatcatcgttgtagggacagtctcattgctgtcttctagcagacagaagagttaggtgccagaaaggacaatcttgatggtgggtcccctccctgaaggactttaagaaggcataaaggggttggggtggagggtggcgtgtgaaggaggaggcccttgattaggtcagtggtccctgggagccatcg

SEQ ID NO: 39191 - DNA, 1877 bp, Homo sapiens
tggttgtggcacttctgacttgaattgataattctcatatctaataaaaccaagaagtacctcgttgatatcttatagaaaacaaaatggatcttcttcattctcctaaggggctccttgcagagagaccctggagagcagggaagcttggcaaatggtggaaatctgtggcctgaaagcctcccagcctctgccctgggtgacatctcccctgccgtaccagctgggattaaaaaacctgtagcgagaaagcataagtatatatttaaaaaatgatttttaaatttttgtagagacagggtctcactatgttgctcgggctggtttcaaactcctgggctcaagtgatcctcccacctcggcctcccaaagtgttgaggtgacaggcatgagccaatggccagatttttgaaaagacagcattcagcttaggatacaatggtgtgtgtgtgagcgtgtgagcacgcacatgcatgtttaaccagagctaaaataaccttaactgagtctcagagaattctttctactatttgggtcacactttttctcctctcctagtgtttgtctccaaaccttagtgcacaagagtccctgggttgtcaaacccaaaacttaaggcaaccctgcaaaggggccaggagctgagtccccaaacctttgaactgaacgagccccccttaccctagcagagaactgtggattcagccttgctggagaagacgaaggactgcctggttaacttgaaagcagcctgtactttaaagtgtagcaaagcaaagctgcaggctttattccctggggtcaggaggcctggactttgtcctgtttgtatggcaaacacagccagcccagtgagtgagtgcaggaagctggctgtttgtacccaagggctgcataaccgcttctgacctggttttgtgtgttagtggatcgaggattgggacagacgtggaatttggcctgggcagcctgccacttgtgtaaccttggagctcaggaaaaaatgaggtgcaagggagagggtggatagccaggatcccacatggacccttcagatgcctttggtctgagccagagccctctggatcccttatattggggctgcctaattgggactggaggcagagacggccctcctgggacatgccatggttcacactgtagtgggggccaggatgtggggtagctcaggtccaaaccggggctgggtgctgaagccactgtggggctgtggttttggcaagggtgagaaccctctctggtgtccttcctgggctccccagccccagctggggctcctgccacaaatgcagaccggggactgcctgttctttgaccagtgaaattcagagaccctcaaggaaggcttgagggtctctgaatttgctgtcctcatctgcacttagagtaattgcacttaagttgctgtcctcatctgcacttagagtaattaggtgcctcgcttagtcctgtgaccaagcctgattttgagtcgtggttacagaaacttagtctgtgtcttgtagccctgagctcctcctcttcctcaccagttaacaatatctcaaagaagggtgttgtcctgaaccattaccataaccccagcctaagctcaccctgaccaccactgtcccaggtatatcaccggctccagaactcctggctgccagggcaacccccgcccccagccccttgctctgggacaggagggagtgggtctcacctttagcctctgcccccggttctggtctgacccagcacatggcagctccaaagagcggacaaaaccttgaagcaaagccaaagggccaggcctgaatgggaggtcagagggaagaaggcccaggagagggtctaagccagccctgtctaagagg

SEQ ID NO: 39192 - DNA, 1535 bp, Homo sapiens
tgaaaggttttgcagttatggaatttctatctatttttaaatttcaattaattaaagttaaagtttagaatgcatttcctcagttgcactagccacattgcagctgctcaatagcacttatggctggtggctactgtattggacagcacccctcaagaacaggggaggcctcgcgcggtggctcatgcctgtaatcacagcactttgggaggccaagacgggtggatcacctgaggtcaggagttcaacaccagcttggccaagatgatgaaaccccatctctactaaaaataccaaaattagccgggcgtgatagcgggcacctgtagtcccagctacttgggaggctgaggcagagaatcgcttgaatccgggaggcagaggttgcagtgagccaagattgcgccactgcactccagcctgggcgacagagcgagactccgtatcaaaaacaaacaaaaaacaggggaaacaggtgagaggcctgtcttggggattcattgtgattcctgcggcagttgcctccccagacacccagagcttgctggtcatcccagacccttgggcaagggcaagacagcagcgtccagcagtcggcttgtgcagggcagccttccaattgcccaaaatatgcgccctcccggacaccatccttggaagagaacctagttccttaccgatcctttcgtgcctcagtccacccagaccaattccagccttggtgaggcgtttccctctgaccaagcacccacccatgggaggcccgtgtcacccggctgcgtttcgcatctctgctcccatgaataaatgtatttactctaaaaacgtgtggctcgtgtgttgtacgtgaaacagccaccagcctcgtgctgagtagccgtaaaatctgtggtgtattgagcggagcgctgcgctgcgtgtcccggcggccctgccaggtaggtggatccagccatccctttccctttggcgggagaggctgggctcgagggacgcccgcggccacagcgctgcgctgcgaagtggcagagcagagatttgattcccgggctcccaggctccacgggcctgccttttccaccttatctccgtgcagcccaagaggcagtcgagctcgagtcttgacgggagaacggagcccttctaaaacccggggatttgaatgcctgcaggatgcgcggtgcgctaggggcggtcacagcttcctccggagcgcccgcctcctagaaggccttgcgcccactagcgggcgccgcggggagatgctctgggcagctcggaaaccacggtggcctcgccgggaaagagagcgcctaacccagggccaggcaccgccacgatttccttcaccctgacacggcccccagcccagccgatacctgtgtgaggccacagctgacctcgattgggctttgagaagttttgtgtcactcaactctggagggaggttgtttctaaaccgagcacatcctaagaattttttccgtgatttcactatgtcctaaaaaatagagctcattttagagtcttggaca

SEQ ID NO: 39193 - DNA, 1827 bp, Homo sapiens
aatatattgacaacactggacatttttccaaaagtaagtaaaaaccttcattgttcaactttataataagccaatgattacttgtggattcattatgataataaagcacttctatggggattttcttttttttatgataggttttgctttagaaaacaattgaaagccacttttctgggaaaaaaaacaaaaaacaaaaaaaaacgctgtttgcggcagccccaattccctaagcattatctggtgggagatgtgttgcagcgagacctcccaccagtaggtggcactgcgcgcaatgctcgcacctcccctcaacaccctttctctcagcaatggcgggtgatggtgggggtcctctctttgcagggctggccattctaatgcctgacctcaggtgcagaccagtgttccgttgcgcgggactcctgacctcgaggaggtttagagaaaacaatggtgttctctgtgtacccttccgcgagggctggggagtataccgccgcgcagaagacgcaggccaggggagaattcgcgccgggcggcaggcggggtggcgggcagcccctgggcgggcggggtcctggcgagaagcgagccggcggcctgaggaggcgactgactgagcagcgcacccggggagcaaggaggcgcggtgaactgagcggcccctgagctgacagatacactgcgcagctggaacggcgagcgagccgacgggcgagtgaggggcgcagccatgatcacctcggccggtgagtgcggcccgtagccagcgcctggagggaggagccgccgccgcgccggcttttagctgagtcagggccggtgactgggcgcctcccggcggaacgccggcctgggcagcttcttgctgcccagggcccacccccgggccggggggctgggagtctgatcaggtcactgcgtgcttctctggcttgagggaatcgagccgggtcgaccgcctcggcatccctccccaatcacaccccagcgccaggacccgaggggcttcctgggccttcccctgaccccagaagggcttaccttttttctgtgcctcccattcttggccgtgtgaggtcgtccagccccagttcttgcccgcagggggccggggtgggatgggcccctgtgccattgaacagtaaggcaaacccccctgatcgggcagcctaactgctacagaagtgtttctggacgtggccgagctccattcgccttagaatgaaacccgaaattaggtttgaggtgggtcatttctgggtccgatccaagggtgttcattcaaaacacccagagaacttttgggttcggcgaagaccctaaagacgccctggagatacctttatactgagagcctacttataccctttcgaggttatgtgctcagtctgttgactgtacattcaagaaagaatggatggatctgcggagcaggtttcatacgcgcaaaccattgcataggtagattcacgtagtgacatttgcaatggagtaagttacagagatcaagtttcaattggagacttaagctccccgttacagattgacttgcatatagctgtccagagccttggtgcttttttccgttgcctatttacatacccttttctcattttcttactctgtgtttgacccacaaagaaagcattttattgtaaacaaactggtgagcagaagacagtaatctgaatggtaaggcgatcaaaactttatttttatgaggattggttaaggagatcgttggagatactgggagacgtagttactttcaaacatttgaagagctgtcacttgtacctgaaataagactttttgtcccca

SEQ ID NO: 39194 - DNA, 1209 bp, Homo sapiens
gttgaccaagctggtctcaaactcctgacctcaagtgatccacccgtctcagccgcccaaagtgctgggattataggcatgagccaccacacctgccctccattcctttctttgcctgctttatttctcctcacaatccaaaacttagctcaactatcccttgtttgcagaactttgatcccaatacccatgccttcctcagcccctaagcaaagactaggtccagttctgttgttaatcttatggagccctgtacattttttcatggtgtttatcccttgataattgtattagtagatagttaatagctgtctttcccactagatcataagctatatcgggacaggtatttgtgcctttttcaccactgtatccccaaaacctaacacagtgtttagcgtcgataatacgatttgtttaaatgagtgaatgaatgaatggcctaatgtgatataatggcccttgtttccctctcaatttcatttttgtgcagttttagcccatccttgtcttcgtgtgtgtaagattacatttttggctttcatttattcaacaaatattttttcagtgcttactgtttgccagatactgttctaggcattggagatgtgcattgtccccattcatccatggttttgctctctgtggtttcagttacctgcagtcaactacagactgaaaatattaaatagaaaattccggaaataaacaattcatgtcttaaattgtgcaccattctgactagcacaacgaaatctctcaccatctctttccatcccgcatgggatgtgaatcatcctagtagatctatgctgtgtacactgcctattagtcactttagtggccaccttgcttatcagattgactgtcgcaatatcacagtgcttgtgttcagataacccttattctactcagtaatggcctcaaagtacaaaaatagtgatgttggcaatttagatatgctaaagagaagccttaaactgcttcctttaattgaaaaagtgaaaattcccaacttaataaggaaagaaaaaaaattgtgctgaggctgcgctgagatgtacataagaatgaatcttccatccataaaattgtgaagaagaaaacagaaatttgtgcataatttatatagagtttggtactgtttgtggtttcaggcatctgctgggggtgctggaacatagtcctctcagataaaggagcacctac

SEQ ID NO: 39195 - DNA, 623 bp, Homo sapiens
aagaaaagtaaagattaaatgagtgtccattctctaatagtatatcatagttctgtggtttgatggcacaaacaaagtgaaatacttaccaaacattattgtcaagagggcaattggcatcacaaacaatccaaccagcaaatcagccaccgccaaggacattagaaagtaattagtagcatactgcagcttcttctccagtgaaacagccagaataacaagggtatttccaccaattgtgggtattatcaccatgagtatcagaagagctgcccagtgcagtttatttccctgttcctcaacaatctgtttcatttcctctggtattgattctgtctgtaatccagaccagttagaagagataacgtgaacaaaggtgctctgcaaaatgtgctcaggaattgtgctttgaagttcagacactctgtaagagagagccatttgctgtttttctgtgattcaatcccgttccgaacagtggtcagcatggttagtagctaagctgctcatctgtttttttaaggcattgtaaccatgccaaacactcaaaagccaaagttgacaccttcctttaaaaaaaaaaattcaagttctctaaaatgagcgcatacacacatctgtcc

SEQ ID NO: 39196 - DNA, 918 bp, Homo sapiens
ctgagtagctgagaccacagatgcgcgccaccacacccggctaatttttgtagtttttgtagagacggggtttcaccatgttagccaggctagtcacgaaatcctggactcaagcaacgggggcagatatattcttaattgctgtgtattgagttaatcctctaacactgtggcacttacctaatgagaattataaattcataattctgctaagggactatcctgaggcttaaagcctgaaaaattccctctgaattcttacctagcattataggcacatggccacaaaggtggttttcccagggcacagtttgtccattgcactttggatgagctgaccccttgatgtgtctaaatgtggaaaatttgattgcataatttatggtattgggggatgggggactgctttcaggtagttccctggggtcaggggggaagaattccctctgtgatagccccatttagaatagtgtttctgcctatctatgtatattgctgtttttcctcctttagtaaagatggattagagggggaaaagaaagacaccatattcttgaaagcatcttgatttattagtgatttaatgttgaggttgcacaaaatattcataaagaaatagtatttaaaagccagtgtgttgaaagaaaggaattcatatgtgcagtttatggtccaatgatatggcagtgacttatgcatatgcccttgcacaattcctgctctgtggaaggcttgtacaaatagtaacattggcaagatgactgttagttacaaaccaagaaattttattgaaacaacaaattagaatgtagttagcttattttggtgtgcgtttcattttttaaagcagaaaattacaactttttttcattaaaaattgaattacatacttaggattaaagcaaagtttttacttac

SEQ ID NO: 39197 - DNA, 582 bp, Homo sapiens
gctttgtgtgtatatgaccctaacagcagcccatattttgaaatgcttctggctgtctttcctggagcccatgcttggcataccatggagcccaggggccacaagagccagcaggggcagccagaacgcaccacttctcttgggaagtgccctggcctgagactctgcagcttgcagcaacccaaggagatcaatacacatccgatgacccaagcaaacagtgcctatgagtgggtgccatggagtcagtccttgccctggaatctccaggcctcgggcctgccccatggtggcctggacacaggtgcttcagcctcttgtcggttctccaaggggaactctgttgagtcacactagtcacgcaacagcgggaagccagcagcagggggaagtgagagggccacgctccagggtcagattaggacagcagggccagactcctataagcaggcaaaggacacgctggagccagcacagcagaggcccaacaaaaataatttcatttttcttaaaataatttgatcaacatttgtttgtcattgaaataatctttaacagaaaaaggaacaagtcatcagactt

SEQ ID NO: 39198 - DNA, 1350 bp, Homo sapiens
ctcagaggcattttagaaagtcaagagggtgcagccatgccagggtaaggactaggctcccagcctccagggaagaccctggaaggccttggtggctcctctctggttctcagcagacccaaggttacccaggcagagcggacatgcagtcccagtcccacacagggctgaaagcggagcggagagggagagagcgggacggaagcccaaagaccgagggcactgtaaagtcctacttccagccctgcccagcggggccagctccacccctgacttctcagggatgtgagccaaagaaagcccttttggcttaagctgtttcgagacaagttcctatcactgaatgtgaaggatctcttctttcctaagacaccggacagctctgatctgtcctttgtaaggagttcaggcagggagggaaagggccaggggccggaccagagagaacgtgcagtaagggacccgggtgggccagggctgccggccggccagggcagctccacagtcaggggctgggggctaagccggggcgtgttgagagggggcggcttgggggtcggtgatgggaggaaaacagggaacccaggacgcccgggtggggactgactctccattgcagggcgtatgttttctgggcgcctctcgccgtcctgaccgctgggctggcagagatggcgctgtgttgctggaaatgacggcctaagggaggtgggggtgcacctggggccaggtcgggctgtgctggctgttccccaagactctacctgagtctcccgccgcagccaaccccaatccttcccacgccggagatcactgcagtgacccacccttcgttaagtgtcaggccactgggtaaaaatccctgcagcccctcgctcgcttctcttggctggaggccgcgggacgggctcgctccccccgccgggacccagatcgggaactggcccccacgccagtctggctgcgtctgggccgcttcccgggctgctccgccggccggatgctcccgctgagacatttatcctccgcggagcagggccctgggggggctgccccgcctgcactggccgcgggtctctccttggagttggctggggtacccagtgggcccgcagctcggctttcttggccgcagatgctgcaggggccctgcctaggacccttgagttccagcagaggcacccagactgctgagccagaagatttgcgtttcttttctttttttttttctttgagacagagtcaggcagatcacgaggtcaggagttcgagaccagcctgatcaacatggtcaaaacccttctctgctaaaaatacaaaaattagctgggtgtggtggcacgtgcctat

SEQ ID NO: 39199 - DNA, 890 bp, Homo sapiens
ggtcttcgaagacatatggagtacccattcttatcaagcattttccattcccaagtaggaattccagtcttcagtttgtagcatgaagtgttatttttccatggtcaattgtttttaccagaactgttcacttttgagtaaggtgagaaaaagtgtagttaatatgaagttggtggccccagttggggcgctgtacctcagttttgcctttgatactacgttttgacagctgcttaaatgatgatgctggaaagggcctgtgatgcatgtcatccctctggtgagtattgatggcataaccctcagttcccagtaggtggagtgtgactacaggagatcttgttccatgcgccagcacatttgccctttcaaagcagagtcatgccagagaggatttcagaactccctgccattgctttttcctgtttctttttagggagtgaaactcttttaaagaaaggaagcattaattagtaaattatttagctgtttgctcaccagggagttggcagataagcaatggggtttgtcaacctcagggagagcttgggtttgggtttgtcactcaagatggctttggcagcgtcagcctttgagaaggcttcggatgcttggttttgctcttggtagcctcaagcatccccagctcagctgttctaagtgtgtgactggttctgccagccatgctgacccttctgtcgctcagaggggacaggccctgctggcccttcatggaggagcagggctacagatacggccccatgggatcaacctggactgctccaagggtcgcaggagcaccctgagtcttggagctccccaaggttgccctacccccagtacagtatgtggaggaagactcccagcctgcatcctcagctctgcaggcc

SEQ ID NO: 39200 - DNA, 946 bp, Homo sapiens
ccagagccctgccccaccgcaccctgcttctccagggcctagcagaccagcatctgccccggtgaagggatggatcagctgtgggggtgggtgcagaaggttgccacctcctacctcagcgggagtcacctaggaaagatggagggattgacactattttctcaataaaatgggacttttttttttttttttttttttttttggtgtgaaacttcctgttcccagctgcatcagagagcctgtctggggccaaggttgccagagatttctgaagacacagcttgttccttgttcttggctggtgggtgcacaaggacttctggaagggatttagacggggctgagtgctaggattaaagtggggatgggagtacggcaacagaaaaacctgggagctagcaatgcacccagcccttgactgtgccctggtggacagccgagctgtggctctagcgtgagccagtgccttcctgtccctgccaagggtgaggccagagttggccccgaggctaatgtttcagtgggtgagattaggtcggccgtacagaggccggtgggctccctgacatcccttccaggcaacctgaaagcactgaaatagcttatggccctgtgccagggaccttggcccaagctgctgacctccagggtggggagggagctacccccaggagaagagtcactcagacagcagtatgagcaagccagccagcagctccgtgcctgcacccagctcaggggaatcccagggggttcagatgcccaggaaggaaaaggggacagcgctactgctatggaatgagaccaccacttctcctgttgtccttcccagcttctccccaacctccccttttccctagtttataagacaggagaaaagggagaaagcaaaaagctggaaagaaacagaagtaagataaatagctagacgaccttggcgccacca

SEQ ID NO: 39201 - DNA, 1223 bp, Homo sapiens
tgtatactcactgaagacccttccaaagtgagccaaagcttagagctcaatccttttagagggttttgccccccgggaatttgagaaaatatctagtccagatcgcaaccagacagaatgaatccgaatgagtgagtgggtggggcgcgagcccaggcattttttatcgctcccaggtgactcaagttgggaactaccggcctgggctgggattgactgaccctgccgtgcagcctgtgacctatcacaaatcaccttggctttgtttttcctcggtgcggccgaatcccacaggaatgcgtggaatccctgccctcacccatggcgaagctgcccccctcgggctccgcctgccccccgcggctcctcgtcgccgggcagccaggagctgctgggtgggcgcgggcgtcccggggcgcggtgcgacccagagcccctcgcggaacccgcctgggctgtgcaggggacaacgcgttcggctgtcgagggtgggggagccctgtgtgtgtggtgggggtggcatccgatggatcccgggggcctgcggaggaggtgggcatctcggcgccacccggtgcgcgccccgagcgagggcatctcccctcgagaccagcccgcggagctgcgcgaggcgtggggtaaggcggcgtagacctcccagtgccggctgcagggccgcgggtcggggcggggccccgcgaggagcaaggggctggccgggctggagggctgggtgagtccccgccctggcaatcccagaagagggcagggagcgcccccaactgaccgccgggggcatcgtgacgctgaggtggatgggagactgcacgatttgagcaggttgtgtgaaatctggaactccattacttgtaccccaaggcatcttttttatgcggatttaagctggaaagcgccacaccaagctgttaacaggaactgcttcctggcactgagattccaggggctgctcgttcctttctctggctcatctgtgtaaggaagactttcctccgtgagcctttccaccaagctcaggcctgaggcttaggagaaatgtgcgagatcccgacagcctcggagggagtgagggggcttcgagaccctcagggccaccttaggggcctctaccagggaaggagaaatgatcttgtttcaccggccagggaggtgagtgcagccccttcaggacctcaaaaatccctactgggggcccaccctcagag

SEQ ID NO: 39202 - DNA, 749 bp, Homo sapiens
atgctcccattttttctaagaaaaacggaatgaattactttttttttaattattattttctattctctcccctttccctccttcccgtttcctactcagcccttcagaaatgcaaatgtaaccgttcacctccccctagacattcccttcagggtaattcccttcagggcaatttcttcaacggctccaagacagatcttttccttgagagctgacagtcgatttgctgacagttgatttccagactgaagcgtacctgccacggaacttttacctccatggggtgaccttagaacttctgctctgcaaactggaagtgaccttcatcctccaggagggtatgtcgaaagcattcccgcttggccacttttacaagttatttctgcctgggaaggcaccaactcaattatccagtagataagatacggggcaacaggggaacgcctgccttgcatacttgctcacccccgaccttataaaagtgtccatgttactgctccaaaggtgaagcagcacatgtaaaggcaggacgcgttgtgtcccttccccaagctacctttggaatacattcacttttcttacaccagacctcgcgcttgttcattggactctgcatgcgatgagcaactaacctgcttttcagttatgctttggagccatgttgtttagcacttagaaaatagaggtgggtctgggcgcggtggctcatgcctataatcgcagcattttgggaggccgaggtgggtgga

SEQ ID NO: 39203 - DNA, 2544 bp, Homo sapiens
ttcatcttctgacatttcctcatcttcactatcttcttctacctcctttggaggaggagccattttcttggggtcaccttgatttttacctgcctaaaatggacacaaatagatcattacacctccacctcgacatttcaggccattcatattttgccattagtgttcatacgccatcatctccgtcctcagatccatttctcatagtgccaaacaccacaactaacatagaaactactcctgatggcaatgcaagagggactactctcaaccgcccacatttttcctcccaggctttaccaacagaaaacctgccctaaggtaaaaagtcaacctgaggaaatgatttctcctcccgttaccttagttaagcacaaccgtgttttaatactacaaatcccggtactttattctaccaccctcatctgaatccaaattaacggtgaagatcattaaggcacttaaaaaaatgactaccttgattttctcatgaagcttatgcctttcccagcgagacaaccccgccccttaaagaggcggcgcggccacgtgggggtacctggtaggccaccacgtgcccgaaacacagcgcaaaaggcacgcggcagagccaccttccggggcccaccacgtgtcggcttgccaggccggggcggagacatccgagcgcagccgggactccgactagggccgataccgccatttcccggcccaaggcacccggtccctctggagattccaggacccacgcggcgcggcccacgtggcaggccgcgctcccgggcacgtgcgtcaggagtcgagtcccagctcgtacgcgtcgcaaaagtttggtctcatctctccaccccgaggcccagcgccccctccccgcgctcagtgactctgtctttcccgccgcgttcgccgcccccagcacctgcagaagctcttcacctcgccaccaagtagccagaagccgcgagacctccccactaatcgcgcgagacttcccgcagcatggcgccctagaacgcgcccgggactgcgcgcaggccctcctccccgcggcgccgcgctcgcccctcggaaagcaggcctacacgtctgcgctcgcgctcaaggccgtttaccttcgcgagcttcaccatgatggcggcggagtgtgaagcggacaagtggcgcagatgagtccagaagaagccaagcgacggcgatggcggccgcgggtgctgaagatcccggagcacgtacacccgaaggccagcgagagctcgagactgaggcgaaagactgagcctgcccagtaatcgcctgtggaaaggcgacgacggcgccctcgtgactccgcgccgaccaaccaaagctcgcggccgtccccatgagccaatcgcgagcctctaaccgtgaacggcgcggggcggggagtaggcgggccgaggcggccacgggagggggaggggctggcaacggcgccgtgggggcggggctcgctttgtgcaaggtccgcgctgattgggccgtgggcgcgcgggtcccggcctgcgtcgtgggactggcgtttttggcgccggctgtgaggggagcgcgggggtggtggaatcgggcggtctccggttcgccaatgtggctgggtccgtaggcttgggcagccttggagttcctcagagaccccgcgctcggtcccggcacgcactcacgccgcggctcctggtggccctggagcgaggagtccgccagcaccggaagttcagggaccgcggagttcccgttggcccttttggaggcacagcttatccctgcttgcccgcgagcatggggccggaggcaccccccggctgcaggcagtctcctgagagctgttaataaaggcagtcgcgggtctgtgcgaggttttctgtgagaaatgcacgaacctcccctaccccacagaacctcaagcgggagatatttctcgacatggggaacggcctcggagaagtaactttctggcctcacagggcagggagaggggcctgggagggccgaccgcagagccgggcctttgaccgcccacaggttccctggttattatttgggtcgaatgcgccaattaaggtggtggctgcgaagtcagtgtcaccagatggcccgggagcaggtcgagagccaccggcagggttccccggcggcagggcgaaggaggccgccagtgacttccacggttagctttgtgggtgggtctcactcgatgccgggcttagcaaaccagagcatttccctccgtccagggcctgccggggatccatcccatccataggtccagctatggatccatccatacctcattgttcctacagaaccaggatatctgcagctacggctgtacttgttaaaaatcacctcaggccgggcgcggtggctcagatccgcaatcccagcattttgggaggccgaggcgcatgaaccggggaggcggaggttgcagtgagccgagatcgcccactgcactccagcctgggcgacagagcgagactccgtctcagaaagaaaagcatttgttaaggccgggtgcgatggctcatg

SEQ ID NO: 39204 - DNA, 1533 bp, Homo sapiens
ggtatttccaacagtaaactggcatttggaataaacttatgttaggcctcatcttaacttttaattttcatttggtatcttttactcacaccagcgaacagaaaaacaaatacaaaaggtgatttttgatgttgtaggtgaggtctcccatacctcttcttttgccacaatcgataagtggaaactccttaagaaaaaaaaaaaaaaaaaaaaagacaaattcccaggaattccttcctattcctctcattctgatccgtcacgtgttttcaagtaactgtttaaaaaatatatatatagttccactacagactactcaaatggaagcacattgggccaaaatacaggggacaaagggccaaaaacagtacctgcaattcaagtacctttacttcgccagtcagataattctgtgaactgggtcagcgtccatcactacccccaccagaattcagaacacacatgagtctataaccctcgctgcccacagcagcccttgtccctaacaggttttcctttaaggctgtcgcggtgcgcccctgcaagccaccgcgcgtgacggacgcgggcacgacgcctggggacagcccgaagaaaaccgcaggcgccgacacgctggtgacgccctctcagctattgccccagatccaaggcgcgcggggaagacggccacgtaaagatacggcgccctggtgactccgcctcgcccaatcagagcccgcgcaacccctgaaccaatcctgagccgcgaccctgggaggggcgggcggtgcgggagcctgggggcgtgagtcttgagccggggtggagggggggccgcacgtgctgcgcctgcgcgtggagcggacattttgctgcggtctagcgcgggaggcggggttttgggttcgctggtccaggtgcgcgcggtgtcccaggtcttcgcgccaggttggcgcgggagaaggccgaggtgccccagagttcgaggagttggtgacggtcacgcggtgcgacgctccatggcggaggggcagtcggaaagtgaatagcactcgttaaaagcgaccagtccgtaagggcgcgtgtgtcggcgccgttacggaccccagcgctcggggtcgttaaaccgtttaagtcgcgtcccgcccagtgagggctatgttagcgtcctcgccgtttccagccgtgaaggaggcactgagacgacagctgagggtctctccgttaaggctgtcgctgctgtaggggccctcgcccgctgcgtgtttgtgccacccagcgtactgggtgctttttcaaaattttatcatggacgtctcaaaacacacgtgtgacttagatggtaaaagtttcatttttcatttaaagaagttgaggctcggtagttaaggtttaattctccatcacttaatactctcgtagttttttgagttggactgtcatgaacatgtgctctcacaaggcctcatggccattaacaccagtagccccagtaggaggatcaagctcctcggagttagccccatgttggaacttgaacagtgacacttt

SEQ ID NO: 39205 - DNA, 1091 bp, Homo sapiens
gaggtggtcagtgcagacccttctggccccaatgccctcttcacccaggggtggcctggcctggcctgactgccccgactgcccccaaccccaggcagcggtggaggagagggatgtcacacagcacaaacgccggcggaggggccacaggagtggggagagcaaccagggatgaagcagagtggggtgcgcaggcctcgcgtctcctcccccagggcaggtggccaagctcagagatttcctgggtgattagggggaggggcgcgaaaacgccccttgctgccacctgctccttgttgccagagcaggaacccaggttggggcttggggagcaaatgaggctgggacagagcacggggcagtcagatggggtgaggcgaacaaaggcctctctctgcgagagaaatcccgactggctgcggggcgcactcaggccacaatggggctttctccggccacaggcggcccggccagcctgagggcaaggcagggcgtctgcgctgccgcgggccaggcggcaccgcttccgcgagggaagagcagctcccgtgtcggggccggagctggggccgaggctccgaggcgggaccaagggcgcgggtggccgacggggcctgcaagaccggccgagcacccccagccccagcccggcccggcccagcaggcccggcccagcaggcccggcccagcaggcccggcccagcaggcccggccccgccgtctccatggcgaccgtgacctcaacgcctgggcggggagggagaggctgagccggttgctgcgcgacggcccagtgacgtcagacaattgagtttggttcccaaggcaactggccgggcagctgggccgggaactatttgtgtctgtccccagaggggctgcggagcctccagggtctggcgcagctgaggaaatgcgctcctggcccggggcaggcgggggccgggacacagaggccctttcagccccggaaggctgcgggcccgggcggggcggggcggcaccctccaggaggacgcccggccttctccccacttctgcctgggaggcccctggcccgccgggctttgtcctatttataaacgtgctcc

SEQ ID NO: 39206 - DNA, 3275 bp, Homo sapiens
gataggtgaggctgctcccaagaaggaggtcctgagggagcaggaggtgagctcagctgcacacagaggactcagttggggagactccctcaaaagtggcagccaccctgagtcactaagtctgtgactcacctctggcagagaggaggcaggacaagtaacaaagctggtgcttcctgggatgttatctgtgggccagtccctggtttgcaaatcccttccgtgcatgaacttatctaaagccctatgaggtggagctagtaccggcactatcccatactgcagatggagaaattgaggccctgtgcggtgggggttattccagactcttcggccaggacacaggcatttggctaaacctagtgtttgtggcagggtctgttctgattggccgatgcctgtcctactggttagtcaatgttttgaaggtcaccctggttacacagctggaggaggcagaatcccaactaacccctggggctggagccctggtctgaaccaggatcctctctccgtctagcgccgcagcgcacctcaggacaagtaatgtgcgtcgaagggctttggaaactgcaaggcacagtataaataacaggttccttcattcctcctgggcaggaactttggcctcaacagttccttctttgttgaggccaaagaagctgggccatgagaaggcagaggaaacgctgctgtggggaaccagcattctctctgcttactcaacggggaaagtgagtcagaagggaagcctccctgagtggagccccatggtcagcccctgggaggttctcacgtgccagacgccatccggcactaaccaggttagcctggacttgtccccagggcccgtccaggctctcctgcaactggccaccagggggcgccgctcccccagccttcctcttactgaacctaccccccaccacccccccaacaacctgctcgcgagaaaccaggccttggaaggagtcccggggagcaggcaccagagactttgaaaagtggcaaaaacgcgggagatgctgagtggaggtgggagttcgtccctgccccactgggagggagaagggaaggggggacggaaacctacatatacccattttcaattcccaaaccagccctgtggaggagtgcctgctcccattttacagatgaggaatttgaggcccaaagatgttgggtaagatcaagaggctagggacaggcagcgctgcgtcatttgcttccaaggtcagttcctaatgggaccacaagcaaatgctagctcatttggccctgttgcctagcggggtctccccccccgccccccgttgatcctatgttctgagtcgtggccaacaccacaacctattcccccactgtgttccagcaacaattccagctgccccttctccaacctgaactttctggaagcctgggcacctgcttcattgttttccagggacccccatcagccacccatcccacaccctccccatctgggcagagccgggagccccctctgcagccctgtcctgcttgacatcccttccccaccccagggaccccgcggggtcaggctttgctcctcgacaccccacggtaggcagcagcacgaataaacaatgggacatttgaaccaggaagagcctgtggttgaggccaaaacaggcaccaaggttttctctcagctcctaccaactccttttatggcctctgggcccagttccttcttcataaaaagtcagaactggaaaaggcctcgagtcactgggtccaacctgagccaacactttccttttctatagaaaaaacccgtcgtgctgcctccccggctccagccaggtttacagcaccaggatctgggccggcagcgtccttcaccggagggaaattctaaccctggggcgggacctgggcacgtccgccggggaggcccagtccctgcacctgtaaaatggggggcgggcctaaccgtagcttcttcaaaggccccccgcccccagcttgaggttctgtatctagccccagggacccgccctaacgaacatctatttcggccccctctgtccaaccgtttccttccctctgccctgagagctgtaggcagctcgcgtgtgtgggcgcacgtgcgtgcaagtgatcatgtgtgtgcaggagccggtggcggccagacgcaactcggcacaggcgtccgcgcctggctctgtgcgcgcccccgagatgccggcctcccctagtcaaccaggtggccgtgtgcagccccgggtgtgctccgcgggtaccagcccgggccgctcgcccctcgcggccgacagcacgcggtgcgcggcatctggaacgtgggagcttctggttcccagtcccggagaccagcgccccctccccgccagggattttttctgctccgcgaggcgcgctccggggcgggggccgagagcagccccgcccgggccggcctgctagggcggcgagtctgccgggagcgcgccgcccccacccaggcgccccgatgggtttttccatgactgcatccggcctcgggccgcctttgttcccgccgtccccggcctgcccgcgaagcggcccgcctctccctgcgcgcctgggattttccagggctcaattggagcactggcgagccgcctccccgcccccagcctcccctgccccggctgcccccgagtcctgtttcagggatcctagccctctctccagacgcgctgctctgtccactgtccccgcctccaggacctgcgtcctcccagccccacatttgtgcgcaaagttgacggtcaccgggcccgcgcgcttcggcatctcgcgaaggcgctgcccgcgccctgagtccttccctggggctgtacgttggaaaggacagaggtctcctctgcttcgcagttgcaaaaggcttcacgttttcaccaaggggcagatggggcagtaggggccctgggaggcctggtccaccaaggagggggaacccgcgcgcgcgcgcgcacgcacgtggcccggcgcgcccgggagacctccgtgtgatcaccgcgcgcagcagctcccgggcggaaacacctcccccctccacgggaaagtgggctcaaccgggggcggaaagcgacacggctgggggacgactacgtgctcccttaacccccttcccgctgtcagtaaggaagtggagataaaccgaagagaggccttggagaaaggagcagggcggggtgagggagttgtggggggattatttgagagtgaggtcaagctcaagagccccaggaccctctcagatcccc

SEQ ID NO: 39207 - DNA, 1383 bp, Homo sapiens
ttatggctaaggtttgcttttaaacattttcttgatcattgttttacaggaacatctctttaatggaaatttttaaacttatttttgcctcccccaaatccataaccccaatttgaagtagaaagttgcaaactatggggatgaatttgcggaagggtatgtcttttctttttctatgaacaactcagaatcacatctcaaaaggtgtaggcactttcaagaacgcttcatccgcccgctttaagcacgcgcaccgacgaaagagtttggggagcgagcgcctcgggcttccccggaggggaattttcacccccgccagaggaagagggcccagctgcgccattagcgcgtgcgagggaaaatggaggctcctggtcccacccgcgcaccggcgcctgcgccctgggcgcccaccccggcccgcgaggcggccacggccggagagagagggcaagggaaccagtgccgtgtcgcgccccaccctgcgcccgagcgcagtgccggcgagcccggctccggcccttgagagtccgctccaggccgctccacaccacgagccgctccgcaagtttgcagcgctccgtgctttccctccagccctttgtgttctagcgcgcgtcggaaggaacgcgggaacgcgcgccgtgctgtgcgcctgcgcaagggttcaggcggtgcgccaagcctggagtcaagagtgggcgaggctctcggccgctccgccccgggccgccttcgctccgcccctcgcccgccatttcgtgctccgccgcgtctcccgcgtctggggcgcggcttccgcgtgatggacgcccggaagccggcacaacaaatgcccaagcgccagggcttcgctgtctgcaggtccttccgctgcccgcggagcgaagatggcgcctagagcttgcagcgttgcccaaatatggggggaattaggcgcctctacctcctcaagaagggtctgccggctgacctcgggggtgtgcacgtccttctgtgtgcagaaccctggggcgtgcgcctttctgtatgtgcacaacctcggaagtgtgcgcatacccttgcttacactccctagcacgcacaccaaaactctggcatgcacgaacccgcgggtttccatgttttcgtatgtgcacgacctcgaggatgtacttggacccgagaatgtccgcatttgtgtttgcacaggtccgggtgtgcacggacacgtgcattcaggaatgtagtggttcacagaagccgctgtttgcgcggcccggggatgtacgtggaccctcgagtgctagccccgcctccgctgtctgtggcccgcgaacacgatcttgtttccggcctgttttggattcatttgcacttgcccagtttacatgcaaagcataa

SEQ ID NO: 39208 - DNA, 1826 bp, Homo sapiens
ccagctgtgtgaggaacagagcctccagaaaggtggggttggagtgggacgtgcctgggcaggcaagtggggacaaagagggcgccggcacacctggcggccaggcagcccgcgcccgccagcacagattcaaagtggagccgaggctgtgattggcggcccagcccaagccccaccccttctctcacctcccaggccgctgggaaagacgcagggaatggagaaggcccctcatcccgcctttaaccacgcagcagtggcctggctggtagtgaactgctaacaacctctcctgctccaaaccctgccgggcccccgcttggcattctggcgccgccttcggtcccagtgactcctggagctgctggggctccggccatcgaatcacccctccctgagccgtctttcagcctgcggcctcctccactaactggtcttaccccaacccgccctctccaatgtcccctgttctctgagcgctctcccagtccagccaccagccacggccaggcccaggacggagtcgctttctgggccccgtcccgtgcccatcgggcttttcccccacagcggtggcccagcccctgcttggaccccggggactccgagcgcagctgggccgggggtggcagcgggggaggccggtgcacaggttgccggaccgcggcgggggcaggcggcggaggctgggcgggaacccgactctgggcccgcgccccgccccggcgcagatggcggcggcgcgggctggtcccgggccgccgctgggggctcgggtttcggccgagaggggcggggcgagcgcctgggggccccggggaggctgcggcccaatcactgcccggcccggacgctgcccccgaccccggcctccaatcactgcctggccggaccgcccccgctccgctgcgtcctttgttcccgctcccctctgccttcccgggcgccccgctccggccctgcggcttccggcccgcgcggaccctgccgtgtggacgcgtgtgggctgcgcccgccccgggcgcactccgggccccaacgccaggcacaggcccgcttgtggctgggcacgctcgtgtgcccttggcggccccgggcgcttcggagggcctggccaaagctcccagaagagccctttggagggactgaactttgaccaggggcagagggcaacggaggaatccaggacccgggcagtgtccagcccgggccccaccttcccttcccgggctgcggctctcctcactctcagcctccttgctttgcccacgctgctgccatggcctaacttcttttcacgtacattccagccttccttccagacccgttttgggggtgcatcgtctgtgacgccacccccaccccggtagtggtccctttttggtctgggtctgaggcctccccagcagagagccccagcgcccggcagggctcacttacagtgctgcaaggggccctcaacaagccttggtccccaagcttccgcgggcaccccaggcctgatcttggttccgtgtgaggctgcgtggaggctctgtcactcactgaatcggagccgcggtgttctcagcggtgaaatgggcacgataatagttaacggggtcaactctgtttcccaggtcaggactgtcgtaaggattaaaagagctggccgggcgcggtgactcacgcctgtaatcccagcactttgggaggctgaggcgggcgggtcacgaggtcaggagatcaagaccctcctggccaacgtagtgaaacctagtctctactaaaaatgctaaattagctgggcgtggtggcgtgcacctgtagtcccagctactggagag

SEQ ID NO: 39209 - DNA, 1162 bp, Homo sapiens
gaaagagtaagtgtcaggatgtcgcagagcctgccctcctcaccctcacgattatcagggcttggcctcctgcttggcacgggcacacagacgctcctcagggcctacttgggcctcctggtcttcgggctcccatgtggggccgcgcagcaggaagtcacatagtggtgtccaacctttcctcgggtgcaatgctcttgtgggcattcacaggtagggtgcccaggtgtgtgcctgctcatgtgctcccccaactagcacctttccctgctgccgtgctgctgggcccacccactcacgaactgtaaccggaacttcagcaaaacacccacggaactcgagctatgcaaataggtgcacacacacggagggatccagggaagagagccaggaagtgacacaggcaggcagaggattcctggagggatctgaaggagcatgtgtacagggagtcaaggactggcacgatggccttttgctgtccgggggcagtggcgtctgtgcacactgcacactcacctctcccagcctccttacctatgctcatgcccgggccccacaggccttggcatcggtttggggacaggcctggaacattaagagacatttcccaccctctccctgtaggaacctcccagggtggccagacctgtgtgagtaccaggagccaggtctctggcacagctccccaggagaatgggcaggcctgggcgtgctgagggagcaggcgttgggggctcttacacaatcccagccaggctcgcaaggcgggagggtagaaaggctcctggcagctccccaggcccttatgcctggataaggaaaccacagtctgaaactcctgggtttctgaagggctggaaggcgggattttttgagacctgctccactccacctgcctcccagactctgtcatgcctttgaggccagaggggctgccaagcatgtcgggcaccaaatcacaggcttccagaaactagagaggccagtgccctcatttcccactgaatacggaaagaacttgctgaagacattgttcctttgtccagagtcctacaagctctgtaaagccaacccacttaggtacagatagcagctggaaaatggggtgcagtggtttcccaaatgtgtcggacactattttaagcactttctgaatatt

SEQ ID NO: 39210 - DNA, 6028 bp, Homo sapiens
caatggcgtgatctcagctcctgcaacctctgcctcccggattcaagcgattctcctgtctcagcctcccgagtagctgggattacaggcgcacgccaccaggcccggctaatttttgtatttttagtagagacgggggtttcactatgttggtcaggctggtctcgaactcctgacctcgtgatccactcacctcggcatccacccacctcagcctcccaaagtgctggaattacaagcgtgagccaccgcgcccggccaggcaaagcagttcttagagggaaattcacattcatcagttccttctgggtgtttgaccttcccgctcccacaacagcctgaatccagaactgtcaagtctggttttcagctatggacacagtccactgcccgaaggccaccatccagacgacggggaagccttgatggcctttccggagccactgcccgaaggccaccacccagacgagggggaagcctcgatgcttagagatggtacaagccaggctctcattgcatctgggtttcgtggaaaaaacaatcctctcgagggtaactggaacttaatggatgcgccgcaggtggaaggcgctctgtccccctgtttacgatgacgcataatccctccaactctctgagaatgtgacacaaaggagggggtcacggtggctgaggtcaaggagcccttcctctgtgaagggcggccccaggtctgcgcggcggtgaagacagactggcagtgggagggagggaacccgacaaagagttgagacgcgtagtcctcgggaacagcactgtggaagtcccccggattgaggcgcgcccgtccagtggagaatgccacctccagccactggggcgcctgggggcagggcggagacacagcgggcgtcccttcgccgctgcataggagggcgaccgctgggcagcgggtgttggcgcggtatccccgccctgcccagcatctgccccacgtttcttcaggctaaactaccgggatcccgggcttcttcctaaagtaaaactcgctccggaaaggccaacagtccagcggccagacgggcacctgggaacgcgggcctaacgcgtactggagacggagtggcgcccggcactgcgcgcctcctccccgccgggagactgcgtgctaagctcagcaaagccccgctgtggagacggagccatgtcgcccattacctaatgaaactgagaagggagactcagtctctcttctagccccgagcgcaagctctgctggacttggcatcgtccgccctccacgatcccacactccgggttttccccattcccagctcggctgcaaccgagagacagacggaagaaactgccaatggaaggacgcaaagcgtcaactttgtgttcgcccgccactctcggccaatgtgcgctcgtgtctccggagtcccgccttccgtgtcgggcgcccccttttggcagcacagggacgaaccctacgtctcgccatcttgtgtgtggcacaggtaaatttctggactatctttccacctattctggtcctttttcccacacaaccgatttcttagttcgacagctaagtgcggtggcgataaggccagcgtagcctgttgttctcggatcgcccacgtgagctagatcgctacgtcacgccacgcttgccgagcccggcgccatcttgagtgtggcgttttgatgctcccctttctcggggctccgcatggttctctaaatggtcccccaaatttcaggtagtccccaaagattagcccaactggctccagagacgatgatttttcccgaggaactctgtaatgttcatgtgcccatcgcagtccagcagtggggtgggagaagggtagactcgatggcccggcaggcccctggaggaggctgccctgaggctgtcgcgacggcagtgaccgctcgggacagaccctaactagaaacctagaatgaggggaccgctatgccgtgcggggcccgcgggctgtcccactcgagggctggagccggcatcgcgcatcgagtccgcttgatacatgaatccgtgtgtgcttgggacggtgcccgcttgtcgactgacttggccgacggacgccggacctgatggtgggcaatcgaggtcgcctgcccacaggactaggggtgccctgccctgggagggcgcgagggcatggcagagggacggggcggcccaggtgcccgggtctcggcctcgtgacctcgttgctcgtcgtggggctgccgtccacttgcactgggacaatccttggtccaaggcgcccaggcgcggggggcgggcacctccgcgggcactgcgctgggcaccgcccggggcgagcgcggcccagcaccccgccttcccctcccccgcgctggcagccgtcgtgtgcccgccgccccctcttccctccccctccttccgagcagccgcggggagggcgggagagggagggaagggggttgggcgggcagctttgccgcgctttggctttctgcgtcagcagccccagcaaaacagctgcgggagcgcgcgtccggaacgcgctcgcgcacccctcccccgcgccctcggccctgctgagacccggcaaactccggccttgaatgacagtgcgatcggcgactgcgcagcgcgggacgcgccggggcactgccgctttaagcacgcttgtccattgttcggaatcgagccaatgagcgagcgcccgctccctgcgctcagccaatagcggccgggcatgggaagccgagcgccgcccactaatctatattaaagcttctggcgccgcgtgagtcccccactggctgctctgaaaagccatctttgcattgttcctcatccgcctccttgctcgccgcagccgcctccgccgcgcgcctcctccgccgccgcggactccggcagctttatcgccagagtccctgaactctcgctttctttttaatcccctgcatcggatcaccggcgtgccccaccatgtcagacgcagccgtagacaccagctccgaaatcaccaccaaggtgaggctggacgccgcccgccccctcggggtccgcgcgccgccgctcgggcggtgtttggcgcgcagcagctggactgtctcaagcccgctgttgctccctctcgcggggaaacggcccgcccccggcgcggtgccctcaggcagcccactctttgtgtggtgcgggggagggggcgggaaccgccgcgggcagacgtgatgcccgtcggggagtgggccgggcgccctcgggggccgagggctaggcgcggaggccggctcacggccctcgaaactcgtctgtggccggtatgagtggcggcgggaggagaagagcctggctgggggtcgtcggcccgccgggcgcacggaaataactttgaaactcaagcgcgttgggaatcggaagtgctggggggcgcgtgttggggcgcgggccggccgcgggaagtggcggcgagcgcccgccggccgcgctgctctttgttcggcgccaggccggcggtttcgcgccctgcagcggacctgaggtggtttgtctagactaagtcccgataaggcggatggggcgacgggctggctggccgcgacgtcggccgtcccggcggaggtgtgacgggcttatccgctttgggcgctctgggaggcgggggtgggcgcccttcgaggtgagtgcgccgggagcggccgcccagcttcagtcatgcacccgcggtgccgggcttggctgaggaggcgagagcccacgcgccgcagggaggaaagagaaagtgaagcgcggcgctggggcgacgatgggcgccccccgcggctgcccgggagcaccgtgtgcgccgcagctcggggcgacgcgggccaacacggcggccgcgacaggccaatggtagggtcgaactgggggggcgcccgggccccgtggcgggttcactgccctcggctatgaggtcctgcgcggctggtgcggctccgctcctgttgtcggcgccgcctcggtcccactgcccgccctgggtagcgtctccgcccttggcgggagcggggcgctctcagactgactggctctttcttaatatttcggccctcgtccgcgcccgtcgtgcccctgcagggattggcgcgagtcaccttggcgtctccttaacccttgtgtccctggcgtcatctctgactctcccaggggcgacttcttggcagagcggagctcggggcccggatctccacaggggctctcagtgaccccttctggactcagtccgggaatgagtttgtggggtgagaacaccgtccccagtgcggggcctggctgttcgattttctccgaagcaccaaaaggtgacttcccgcgagggcgatgagtagtagcccgagaggcgcatccccgacagtctcggacctacgcagcccggtggactttggggcgacctcccgtgggacttggcccgccgaatgcagacattcgggcctgccggggtggcggcagtggggcgtcgagtcgagagcccggccgaccgacgcgcgacccgcgcgcgtgccactgcaagctctgcctgccggccgggagtctccaaggcaagggacgcactcggcggccccgggccacgtgctccctgcgcgcggtgcgtgccgaggcccgcgcgcaaagcccgccgggcgggggatgcgcgcctgcgcgccgcgacctccctgcccccactgctccccggggcttcggccgccagggggcgagagcgggcggagccggggtccgcggagcggagcggggcgggccggactgagagggccgacaggtggcccggagccgctcgccggacagcggccgaggggttcccgcaggcccggacgccggacctctgttggtattggtggccgtgtcgtgtggaaaaagttaccgggcgcccggggccgcgctgccttttggatcccgggcggagtcccacccccgaggtgctgtcgggatccctagccgccgcggggaggccgggagttggtggctccggcggcaggccccggcctggggcaccgccaagcagcggtttgcggcctctaggaacagcggtcggatttggggggtcggtgtgctttggcttttttagatacctgtcctggccggggcggtgcggcctcgcgggccttccaggctggcgcgcctgtggggctctccccgagcgcaggcccctctctctttgccttatttatttttggaacataacctgccgcctttctagacggctcgaggggcgggctctttgcacttggaagcaggctgatgggcgtgagtgtccggggctcgtccacccggccggacgggctgggggctgtggcgccacatggctcctttttcctgggaagcgccagggggcagtgggaaccgccaccggggccgctgtagcgggccttaaaggatgggaaaccttgatcacagatgccccccgccggccttccttccaccagaccagtgggagagggaccgcaggggcatcaggcctttctcaacatgcgactcttaatttgggacggacagaacagccgtacagaccagtagttctcagcgcctttgcttaccctgggttgctcagaagacttactggttactggttccttcttcccttttgaaggacttaaaggagaagaaggaagttgtggaagaggcagaaaatggaagagacgcccctgctaacgggaatgctgtgagtgtctgctttgctcctgagccctggcagctaccgccccacaaaatttttcctgttctactttaaacatacctatatatgtgtgtgtatgtgtatatgtatagctttgcacagtggcagtatcgtagccaatgagctttacccgaggcgcgattattgctagttaaatatttataaaaacctttcgagcagcgcctgaacaagaataggttcagaggagactccggtagtctgagtttgggcttggcccagggtggggaaaagcccttgtcctggggcagttaatgtgcaggtttcatgatggagcctggagggtgttgactggagaaggg

SEQ ID NO: 39211 - DNA, 618 bp, Homo sapiens
gtgatgggcagcagagtctggtgggtgggcagggactgagctgcagttggctgggggggctgctcactggggcagtcagtgattgccccaagaagccttaactggggaggaggacttcatcactgggtgccacatggggaccctggtgccctgggggtgggggtttgcagtcctagacactggaaacgggccacacgggactgccattatgtggagcgcagggtgctggtggtataggccaagagggaacttgccaagcctcccaggatgagcgtccaagtggtggctgcctctgcaggcctcacaggtttagctccatgacgtggctccccctgctggtggcacgtggtaccccccggcctcttagaatgccggggttttggtttggcactggtgcagcctggcagtcatccaacctttggtctccaggtcccttaggttagttgggcaggcccaccctgccccttgaacacagttggagaagttactgtgccgtttggatattcatacacgggctgtgagcagtgggtcaggatagccaactggaggaagtgccaccagctcgtgccctcagaggtggaggtaaggattagagctcacctagaaccttctgggatc

SEQ ID NO: 39212 - DNA, 1648 bp, Homo sapiens
ttgtggaaaccagacgggggtggggtgcggtgcggtgcggtgggggacctgagagagttttaaaagcactggtatttgtcccacacaaggtcgcccgctccaagtcactgttccccgctccccgggtaggcttatagccaaagaggcttctaggcttcgagatcagcccaccgcgccccctcagcccttctccgcgggccgcagccccatcccggcctctgggtcccggccggggatcggaacccagccggcttctccgacagcgtttccgacgcccggcacctctcgcagccccgtcccccaggctcccccgtctccacccgccaccccccggcgctcccgtcaacgtccccttcctccctcaggacgccccttggggcgcctctcgcgccgggtcccgccgggtgctcggcacgctgttcctttcctctcccctcccgcggcccttcttctgtggggcccacctggcgcggcccccgcccccggccagtctcctcagtgagcggccgcctcccaagtcctcccggccccgccccgctcccggacggatacagtttgaagcccctcaggatctccctggcccgctcgtccttggctgacatgatgcggcggtcgccgcccgcggctttctcactctggtcggcggagcctcgcagacggtgcccaggagccgaggatggagccgcagcccggcttggagacctcgggctagcagccgcagcggccagaccaggaccggcctctctctcccctcagctcccgcttctgatcccttctccttccccctagcctcgcagtgccctcctggaaccaatggaaagccagccttggcgattggcatctcaaccagccagtaggagcgcgcagcggcttcgcagggggactgttaacgtcaatgggaagggccctccccgggaagtcccataggacacaatattcatctggtgttgttgcctagagtttgtcccagcggagggttggcttcggatctgcagaggctttagggacctgctccagccactgagcacactagccgtctgagacggcagctgagttgcactgtgcgacgcgacagagactacatttcccagcattccagcggcgcactcgggggaccacagatcccagcgcaccacaaagaggcccggggactacaaatcccagcatcccctgcactcggttcctctgtaacttagactccagtgtgccgcgcagtgtgcgcaaattcacaaacccgcccgctgagttggtcgtttcggaatcccgagacttgaaacccaacgggaagacccttctcaccctcaaaagaagatgacagcccgcagagagttaacttctgtttacatggaactcagacatctgcaaatcatggtaaggctgcaaacaacaaacaaaaacactgattaaaccgtgaaagagaacaaaatgacttcttcaaatcgtgcttgtttgttggtctgaggcgccttttacatgtatttcagggttttttgctgtattcctggtttgcaccgggagagctatggattgtatactcagaatatcaaaacataaagggactttgctaatctatcccctgttgttacgtatgaggaaattgaggcccagagaggcgaagggattggccacagatcacagcaagttcggg

SEQ ID NO: 39213 - DNA, 1429 bp, Homo sapiens
ggtgtatacaggaatcagtttaagtgttcaattatgtggcatttcttagccatcttcccaggggagttggtaagcaccagatgcaactctatcaatgacattttggtcatagaaccattgttggcttaacccatctcttgcttattttaaaacattttctgaatagaggtcaagaacatcgtcttcggcctcagatagcctgggtttgacaaagatagcaagctttgtcactttctgacttttggacttagttaactcacctgaaaaatgggaacaataatacaagccacagttatgagaattcaacgagataatgcatgtacagcacctggcacatggtaaaacgctcaataagtggtagttagtaggcttaatgtatctcggtgcccaggggtagcgcagtagccatggggagctcctgagagagaaagcacagcctaaggggaggatttggggcccgggatggcgatggcgacggttgggctgcagtaccgtctaggccgcattcctctccttgggcccctagccaccccctccccgcctggttcccgggctgcagactcttccccgccccctcgctcccacttccccaccggaggtcgaaggctgtaaacgcggcgggtggaaccttgtgtgggcggaacgcgagtgcagcggtgggaggcttccgggggagctgcacgggcgacgggtcggcggagacagaaaagcgccggacgccggggtgatcatggacgcttgacaacctgcgggcaggcgccgggaggccgagccagcgactaagaggaccgagaggtggcgtggacaggtaggagctagcgagagggtgggccgagcggggccggcgctccaggctcggccagacgatccggcttagagcccgccgccaaggaagcccgcggccgtgcccgccccgcccccgccttggggagcgcgtcccgcggctcctcactccacgcctgcggccctgcttggagcataccgcccaccgtgaggtctgctgcagcttgcgaccctcagcttcagtgctgtggctgctttcgctctcccatccccaaaggctgctcgtttgcccctctccagtccatccaaatagcgccctcccctgacgggaatttatctccgctctgtgcctagcctctggccctcccactccagaagaaagcgactgtctccgtctctttacattctctgcgcccacaggctttgctccttaagccgagattttttgaagggacagaagtttctctccatttccctaccccctctccacccccacctcctaacattgggactctttgcagagatccccatctgtctcttcacacgggtcctcttggaagggccttttcgctccttccctctttaccgtcaccgaccctcctttcttccctactcctttccttcttcctcgtatcctctccccttc

SEQ ID NO: 39214 - DNA, 628 bp, Homo sapiens
cccacgtttgtgatttaaacaacaacaacaacaacaacaaccagttaacgtaattgacagcagagaagttccaggcagaacagtggctctttcgtttttcttctacacatggctttttgccatcagcatcagtgaagagtaagtaattttaatgaacattttgatttggggcagactgataccctggttttctgtcccagcctggctttctgtcataccttatgatgtgctggtctctcccagggttcatagtccacgtgtagtcctgaaacttggaaccaaccctgagctttgttcactttgggttggtggtggctcatgccatacctaccaagctggtatgtagatagggctgctccagtctttgttttaatgcaaacagaatcttgagaagatttgaactccttccaatgcttaatgctttgtatgtgtgtgtgagagaaaagcagttcgttgggcatgctgtatagaaagtaaaacattcctgagagagagaaattaaatttggggctttaataatcttgtttattttttcccgaagaaccagagttggtagagaccccaggggccaagtaatcaaatagtacagaataaacagccatggcatctttgacacatgctcacccgt

SEQ ID NO: 39215 - DNA, 584 bp, Homo sapiens
ttcttagtttttctttaccctttttaatagtcctttcattatcttttactgcctttatgataaaattatcatgtgaaaggcaactaaaatatgttgaatgaatgtattccatcttatctccttggagttttggtgtttgatttggttattacactttcacacacacacaccccacctttatcaccttgactcatctctgaggttgcaacacttgttattgaccctgagttgcttggttgtttgcttctttcactgtccttggtggcagtggaattgggtggggaggagacaatcctcagaacctgctcagggactggattgttagggtgtgggcgtggtgatgagggaaagtggagtcagggatgaccccatggtgtctgcttttgtgactgagtagatgttagtccagaaggctgggttaggggtggtggttgctaagaattcaggtcaggctgggactgagaggttctggggcaaccacagctgtgtacaagccctaaacttccagaaaggcttggacttcataacagactgttatggactaaatgtctgtgttctttcaaagttcatatgttgaaacccta

SEQ ID NO: 39216 - DNA, 1671 bp, Homo sapiens
ctcactggcattctttcctcttgtgctctcccgaacgttctggctgctctttggatttccttttcctttgctcacatctacaatattggtgtttcctaggtcccgtacttaacgattgtttcctctcaacacgcttccctgggcgggctgaactgtcgggggctttctcggctgcgcttcctctctcacctgaaaccctcttcccaaccctttatactaggtcgacgtctccaacatcagctgctccccacccgtgtctgggtgggccccttgggcaggctcccctagtctcctttccttcgatcatccccacgtgcaggacgtcatctgcttgctctgccatcagcctcacatcctgagggcagggaccatgcgggggttgtccatctctgtatccccagtgccagcactgcacctcgccccaagcagttgtccaataaatgagcagtgagtaaatgaaagaatgagcaaagccttgtaacaggaaaggggccggcggcgtctgccgtgcaagacctggcccagtggagcagagcctggaggttcaggagccgggtctggaaggctccttccggtggaagaggggcccggagccagccggcgcctggcacaaggcgtctcagaggccgcccactgggagccaaccgttgcagccagttgtccccgcgagcgaggccggagaaggcgcggcggcccctggcctggccatttcgcccttgtcgcagctgaaccgccgactacgagctcctgcaccgcgcacacaccccgcgcgcttcgctctcggcctcgcccggccaccgtcgctctctagaacgccgcgcccgtgacccggaagagcattctccttagcaactgcgggactgcggcggcgccggcctccggggagaaacggtgaggccctcactcgcctgccccctgcaccgcctagtgctgcacgaccccctcgggaccgacccggggtctggcctctggggggctccgcggcgcttcgcccggcacctgtggtggcggcccgggacgagcgtcttccgcctctggcgttgctccccggcccacgcgtcttccctgtcccgcatctccctcaatgtccccagctccccactctccgctcctgaccgacccggcctcccaggccgcgcttatagcgccggggcccttgtagcctaggatggcgtgaggggagcgagaccagaattagagcctgttgctgtagagaggacgcctcccgaggctcgggtcacctgtggacgcgttctctagggtcttgatcgagatgttcaggactggcagggatggggagcctcgggaatcttgaagggcagccgcttaattataacatgtccttgacgtttgcgctttccacagtgatacactttatctcctttattgatcatagagagtttttttttttaataaacttttagatatgggggatacgcatgcaggttagtcacatgggtatattgcacccaggtattgagcatagaacccagtaggtagtttttcaacccacatcccccatctctcccctccttccagtagtctacagtgtctaccgttaccttttttttttttttttgagacggagtctcattctgtcgcccaggctggagtgcagtggcgcgattcggctcactgcaagctccgcctcctgggttcatgccattcttc

SEQ ID NO: 39217 - DNA, 579 bp, Homo sapiens
ttcagagaagtaattactaatgttatttatttagaaaacatatatgcccttcagactattgtatccgtttggttgctttccttttataaaggaaagtcttcaatacaatacaataattattgaaaaatgagtagttttatcgtttgtctcaccataatttaacaaatacttgggtatagagttgaactggtttatctactgtttacacttttgaacggcattcaattaaggttagttttagtaaagatcttagaatctcagatgggacttttcagctttaggaaattggaatgtgtccctggactatgcccatgccagagtgccaagctaaaagaatgtaggaaacctctgaccaggcccttcaggggactctgtgcaaaataatgaggtcactagcatgaagagctctggactctgaggcagttggaacaggattctataatttctttccaatattattattatatattatatctctttgaggctaagaatccagggaagggaaagcagaaatggggttgctcaactgagaggttaaaaaaaagatgagggatgggccgggcaccatggctcacgcct

SEQ ID NO: 39218 - DNA, 681 bp, Homo sapiens
agaatgccctgtaggaaggtggtctctgagtgtcacaccagatgaagaatagggaatcttaaattcttttccttgcctgaaccccttttttcaagcatcccacgtttaagcatttttccattttaaaaactgagggaagaattatcccccagtgaaggagtaggaggataataagtagctacacagtttgcagataaaatgtgtgataccttaggactgatcattcaggttaccaaaagagcagatggtactgtgttaataagttcttctaagccaacttgggtatgagtcaagactctgtcagtgagtcataatggaaagggaattgatccactcattaactgccaagtccacaggtagactagtttcaggctcagctggatcctgaagttcaaatgaggtcataattcttcttttctttcttagactattattttctgtattggcatgattatgtagcatagatgtttcctggcagctccaggtttatgtggtccttagtgcctaggatcccaggagagagaccctctttcctgaagttcatatcatttatcaatacaacaagttgtattgttcaactgaagcaaattcagcactatgcttgtatcttccatgtgcttctctctgcccattgtatatctttaaactgtatacttattttattttattattttatttttt

SEQ ID NO: 39219 - DNA, 1263 bp, Homo sapiens
gggattctgcctatactagcttgagccttcctgcctcccaagcccatgccctaggacatgattctggtatttgctcattgactgccctaaggtcagaggaatatccccaccatccaccctagaatgcagcaccacaggtgcattctagaatttctgggctccacttctagcaaagtgcctacttgatgttcacaaaggtattggcacttctggagcaaaagctatccaggaaagcccaaaagtttctaggatttctggtatttaccaagtgttactgagagttcctctcatgttttcaacttgtccaccctgaaaactaacctctcaaaagggaagagaccagtctaggctttgagtgcagccatatcctctaggggctgaagatcctgttgcctgtggcccaagtttagttcccccagtgtagctgagcttatcagttgacagtgatgtcttccaccccatggtggaaatcaccttgtctgagaccctttgctcctgctacaaagggagctagcctagatgggctctcttgtcccaaaggaaagccagagctgttatctgccatagccgccttcaatatgtggaggccctacctaggaagacctggcacctcctctcccctgccccaggacagtactctctggatcactgaaacctagaatatttgagcaaaaccctagctccacctgctccaggagacttgtacagccgatttcttcagaagtacagctttgcctaccattcacattaggtgatcagaaccaccatgtacgtgttttctgccatcccagaagtgagaatagtgaatagagaggaagacagagttgatcagagccaggaaattctgagtcagaagctgtgtgatcatcaaaaccccattccaggtaactgtgtcatgggcaataggtaatctcaatgcacagtgatgcctgaaagacccagcaccttcagtgaccaattagtgagaatagttagctgtgtcctcatctgagcagggggaattccgtaccagactttgcttgtgtcaaacgtactgtgtccctccctgacctctgtggctggcctaagcctaaatgcaatgtttaagaacttctctttgccccccgacccctcacaatgtctatgacacctgagtccaagctctgagcaggtataggcagcttaagagaatgcagtgcaaacttctgacccacaagtatctctcttgagtacatggggcttcctccctgacccccatggccatgaagccacggccatgcacta

SEQ ID NO: 39220 - DNA, 608 bp, Homo sapiens
aaataaaaataaaaccagtgagagtctgagaggttttattattttcacaattgtacagaataaaaaataaaaacaaaccaaaactgaagagtctgaagaggctcacctgccaaggccacagaggtcaagggcagaacctggccagttgtggcaaattctaaagcctgtgctgtgccttcatgacacctgcctttctctccatgccaggaagctgcagggagtgctgattccagccgtttctaagcaggcctgcttgggaaggctgtctgggaaatcctgggatttccagtccctgtgaaccccaggtcagatgggcagcttctgacttgtcatcagagttctgggttaggccagtcacgctgcttggcaggtcaccatccattcagtggtatgtgatgtggctgtgttagttataaagacctcgtagttttgggggtgcagttgccctgaatacctgcctgattggcccttgtagtagaccctggcagacccaggccctagctttggggtgcctgctcctctgccctgctggcagttgtgcctcacttggtccagacagtgaggccagcagttgctggcagatccgttgtccctgcggacctctcaga

SEQ ID NO: 39221 - DNA, 1147 bp, Homo sapiens
agcaagggagccagagagacacacaggagtgaccttggacctctgcgaggaacccgttcactcgctcccaggcagtagcactggccctgacacccagccctgaaagctcggagactgcaggacaaacagcttcaggggctgtggccccagctgggacgggctatgcgctggtccctagagactctcggtatctccccctgccccagtcctgcctcctgcccagcacaagggcctttggaactcagccctctgtgtctcagcccccgggagggtcaggtgtcagagacgagaagggccgaggctggcaggccggaaactgcctcccttggctgctgtggggtggagtaccaggggacacagaggtgctggggtgaagcgtggcttcagctgcgtgggatcaatgccagaggggatgaggtcagctccgaccaaaggtgtgcctaggtccgagaggaagcgccaggagcctgaggcctgtgttgcacggggcagggaatggcatcctgggctttcttgcctgcctcccactctagccagatggagcaatggacttggcctccttgaacaaagaccacagcctcctcagcttctgcttgtgtctccagcagacagcgcctgcagcccccggtcatacatggccacaggcttccccctcctccttcctgggccagagtagcagcctcagccccatgctggggaggggtagaccagagacggttccctcctggtggtgcccagcagtgactcagcagcgacggcacatgtctgggccattctcagtgctgccaccttgagggcatttgggaggcccaggcaggccagatttgtctcctggagagaagtatgggcacccctgggctctgcctgcctcctggcctccccttgggttcccttgtacagaaaggggcactggtcctggccctggtcctccctggctttgctcagcagccagcagcccgccaggtctgtgcacaccaaggctgccgatggcaaagctgtgggtggcatgggacctctgggaatagtcggaaagctctgggctggccaggctctgacccgccccacagatggcactttacttctgctcggggctgctgcaggacctggcacagttcgggcactatgcgctcatcatgcccctgtacac

SEQ ID NO: 39222 - DNA, 1587 bp, Homo sapiens
tcaggatgcatttgactccccagctctgccctgatccagggcattcatcctggagcaggcccccgttacagacaggcgagcagaggcttccagaggccaagggagggtcctgggggtcctgctgcagggatggaggcagagttgcgcctcgtcatcaagccctgccatctttgtcccctcactgccgggctctgcacaggtcatcaccatcttcagcctggtggaggtggtcctgtgggcagccatggccctctagtatagtgctgccctgaggcagccgagcaaccagggccacctggtccccgaggaagaggaggaggagtaggtcgagtttgaaaaggaacctgaggtctgatgtgctggccaagctcagccaaaccctcctgccccaccccgctagctttaggaataggacctgatgacaccaagggggatttttaatttaggttttaacaactcaagggtttgcttttggttttacttttgcattttatttagtgtttgcagctcagtttttaaacaaactgcaggggagaggatggagctggaaggaaggctgagacctggccagcaatgagaccggttccccttctgcccgggccccactgccttctccagcccagggaatggggccttttctgcaaatcagtgtcagggaataaaatcaagtgtgaagtgccatctggtgtgtggggcgcctctgggaagcctgggcagcggaatgccccttgcacccagggcaagggacccagttcaggctccacccctcactgctgagccgatgtcaccacccggaaccttcctgtcagttccagcacgattcagagtcggctacgtggcagattggtgccggagtctcattctgcctgattaaaaatggaattagtatgcaggactgagagcgcccccgtcaccctgacgcatgtgactgtgtccaaccctgcccccacttcctctctgcaccagctccgcagggcctggtgggggtcataggtcctgcaacaccctctccccgcagttccttggccaacactctgaatggccctgtctataccctgggtctgagtcagtgccctggcagctccaggcccaatcctgtgctctggggacagaagcaggcctgggcctcggggaggggacgagggctctccagtgccttcccaacctggccccgttgcccacccagtgtcctgagcacccatggatcccacctgccttggggcctgggcagagctggctggccactgggcattcccttccccagccagcctgaccccagcctgcactcctccccctctgtgggggaagctccgtggcttggcgtccccgagagctgctagaaactaggatgaaagccatggtgagcacggcctctgttcccccgcaccatttcctggggtgtcgggattaacaagctcatttgatctggttacagtgaattttcttcaaagaaacactcaatagggtcccttgtcagagtgcgtcgcagcacctgaatgacagcgactggttatggctgcctttgttctgccactgtcagatggggctggctgtgggaggcgaccaaagacatcccacacctgccct

SEQ ID NO: 39223 - DNA, 1769 bp, Homo sapiens
tcctttgcatttacaacttggctaactgtttgccgcaggaggcctagccttcggcctatctcggcttttgacataccttcctcactcagtttaatcatttctagtttttgatttaaagtgagagatgtgcgactcttcctttcacttgagcacttagaggccattgcagagtcattaattcgcctaatctcaatattgttgtgtctcagggaatagggaggcccaagaagagggagagagatggggaacggtctgtgggtggagcggtcagaacacacacaacattaagttccacgtcttataaaagacgctgtatgtggcaccccaaaacaatgacaatagcaacatcaaagatcactgatcatagatcaccataacagacacagaaatcatgaaaaagttttaaatattttgagaattaccaaaatgtaacacagagacaccaagtgagcacatgctgttggaaaaatggcgctgatacaattgctggactcagggctgccacaaaccctccatttgttttcagaatgccctatctgcgaagcgtaataaaacgaggtatgccatagtacagtggcgccgcgaccgacaaaggaaagcctccgggaggtcaaaagagataccagagagtgcgtcccgcactggaggaagaggaaggtttttaccaagcagcgagtccagagcccgcgccgtcaacgacgcggtgctgccttttttccgagccgctgcgggagggggccaggacacgctcccttaggagagcgggcgggtcacaaggacctggacagaggcagaactgaggccagcagccagctccgccgctgagtccagccctctgcgcagccgccctgagctggcgtcccgagatagccgcttccaaaccgggcctgcgcgccgacgttccgctgcgccccgcgcaaaaccggaagtacccgggcccaaggctgagggacccggtggagcggaagtcactccctgaggcagtggcgacagcggcggcgagaggatgaacaacaagttcgacgcgtgagtggctcgtggccgcccccggggccccttccccgaacagttcccccgcgcccgcccccgctggggctggggcggcgcaaaccctgcggcaccggcttccctgctgggatccggctgcggccggacctggcctggactggcggggaggagggggctggggagcaatggataccggagtcccggagaccccagggccgtccgaaccgagggcgaagagctgggcccgggggaggggtggctgtgccgcccggtagggggagattttcggacgccccgccctggtggatgcggattgcctgcgacgtggaggggtggggacctcggcggtttgggtgtttccgcagtctggcagcgctgcctctgaatccagctttccccacacactccctctcccctctgagcctcagttttctcatctgcagagtggggacggtaacaccctttgtcgtagagtttggaggatgcaatgaggtaatgtggttgctgccctcgacgcggtggaaggctggcttaggaattatcttcctgagactcttcctactttctttctcctccccttcccgttcccgtcttccaacacactcgccaagacctaagtatacttgttgccctctcctgcccgctccggtttctagtttcagcatcaaacagtttggaggtacagagagaaaatgcagaagtatctttacttatccccctccaaggattgtatcttgaggtagaatatgttccttcctctc

SEQ ID NO: 39224 - DNA, 1001 bp, Homo sapiens
aaggacctcacgtgcttcttcattgaaagccctgccacatcagttttgactagatttcccggggttccgcagatacatccttgtcccctgctgtcatgccattcattccctgctgtagaaggccctcactccacccttcaccctgcccacctccaccacccttcacatattgcctcttccaggcagcccctggtcccctcctgccctaatcatgggcacctcctattttcccacagcactaggcccaagagactggaactgcaggtgtccttgtctgttctggctgctgggataggttccaggaaggcaggggccacacctccctcatctctgaacaggcctggcatggatgctggctgcggagaaattcctgccaaaagcagatttataaaatgccttagtcatcgtgtgctgttccatccagcactgcctctcgctgaagaactcatttcacagcaaatgaagtgcagcagtgggcttgaaggaaacctaaatatttctctctaaaatactgagtattacataagcgtaaaacactacataaataaactaattaaaatactgccggccaggcgcggtagctcacacctgtaatcccagcactttgggagaccgaggcaggcggatcacctgagctcagacatttgaaaccagcctggccaacgtagccaagctctactaaaaatacaaaaattagccgggcgtgatggctcatgcctgtaatcccaactacttgggaggctgaggcaggagaatcacctgaacccaggaggcagaggttgcagtagccaagatcgtgccactgcactccagcctgggctacagagtgagactccatttctaaatgaataaattaattaacaaattaattaacaaataaataaataataaaacactgtgattgttgggctgaagaaggctaaatgcaggggggcactcagcctttccctctgcttgcccgatggcaggacagcaattcacaaagacgagatccttctacc

SEQ ID NO: 39225 - DNA, 1400 bp, Homo sapiens
gggcgagagagtcaaagatgagttgtatctgaacaggaaaacctgttgttctgcaggcaagcttggctctaaagtggctgcctatataagttattttggagcctccaggatataagcagcccaggtaccaagaaggtgatgcaagcattttgcctctcctcctagtgggaggagttccagctgcctcctgctggtggggactgatgacctgtccagctccactgtctcttgtccctctggactgggtgaatgaggattctggccatgaattgctgatttgcttagttctgtcctccgtctaatgagcattatcttctatggacagtcctttgctctggtctgctggggtgtcaggtgattttatttgctctccttgaaatcactgaccagcagcactgcaagtgttctttccaagcttgtcttgttttgcccaacatgtttttgcatccaaagtcttgttgctatgtatctgaatgaatcagtctttctttttatggcttctggagactgactcatacttgaaagccctttcctgtaaaacctggatctatttatagagaagactaaaggtttgaaagagccatagggcagggggtggggagatggaaacccactacacctgcacacaaggatgctcggggagtgccgagggcatggattggtggctcaaaccaggaaggaactaatccagtctggatccccaggttcaggaattggcagagctggtgggctggagacagagggcacaagctggagaaggccccagtcacggtacctgaagtgattggccaaggggcctcagcaggtgagggaggttatggcagtgtaacagggagggttaggggttctgggggccctagtgaggcaaacagcaggtagcataagagtcagagaagaagatgactagaaggaaagtgattccagaaaaagcaacttcaggtgatggcaaaggccagaggacaagcacgggagaggatggctggtaggccggatgctttaggccaaggaaccacgaaggcagggaggtatgggtccgggatgtctcccaggatgatgatgtgttgaagctcaaaggaagaccaaagccagggttaaagcccgccatcaccatcgcttagctcagcacagcttagtcccgatggtgccttataatcggcagggtctggacccggcactcatgattccagtgtcagctgcagttataaattgctgtcctaacttatgtccctgttaagctttccactgaagtaaggagcatgaattaaatgcaagagaccctgtcatttcatcttaggcctaaccacatggacttcctagccttttcctggtgcctcaacaatcacagggcagcccagtgcaggtgcaggtgctaacagcccagacccgatttcctagtcccg

SEQ ID NO: 39226 - DNA, 859 bp, Homo sapiens
gagctgggtgtggtgatgcgcgcctgtaatcccagttactctggaggctgaggcaggataatcgcttgaacccgggaggcgtaggttgcagtgaaccgagattgcgccactgcactccagcctggccgacagagcgagactccatatcaaaaaaaaaaaaaaaaaaaatcggttctgagcaaatttcgagtcactgacaaggcggcggtatccagcagagggcgcgccaggcgccagcaccaggcccgaggacgcctggctcatccccaggccggcttccgagagccccgctaagtgcaggcggataccccggccttggcggctgcttgcctttctccgtactgtccctgtgaaggccaagatctgtaacgctgacagtccccagacatacgatgggagagttgcagtaagtgctctttaaatcccctttcacccttgagagtctacgattttcgacgttttccaggcgatttttactctggtccagaataggtgcgcggtaattcctggctttcgccaccggagggcactcccggccctcgcttccctgccccgcgcacggtctgcgatcggctgggcttttaagccttctccgcgccggctggtctcccagagaatctaaactcgaaactcttgagagacaccccagcctgcagcaatcccagggtgtgctgaagtccccatcgtcctcccctggaatgtcagtgaatgaggaaggtttctttttttactcaccgccatcctccgctcccagtcgtgggtagacccggcgctggggctgggggaccctgagcaggttcctcacctgcaccgaccctcatctttaaagttggggtgcgaccgggcgcggtggctcagc

SEQ ID NO: 39227 - DNA, 1607 bp, Homo sapiens
catctctaggtaaaagggttatagccccagatgtcctaggaaggaatcagagctctcaagtcctttccagctgtcccagtacaacactctgaaatgaattcccagttctaccagaactgttaacaagtagagaaactgctttgaatttcagcttttgcggctttcccattcgctctaggatggcaactgcgaagaaaaatgccggactaaaagctgtggaaaagttctaatttggaaaaccagcccgcaagtgatgcagaggcttttgaactgcaaaagagctctgggcgtacaggacagtgagtcacacggtgcctggtccgggcccaaccctggacaccaacaccactcaactcaagggcaggtacccggctgctgccaaggggtcagcgggagcctgcgcactgccacggccccgccctcttccaacctttcatccgggtctcgggcaggggcgtgtctgggcagaggggcgggtggtggcggaaaggaaggatgtcgtgggagactggagagtggggagggaagcgggaaggggcgggggcggagcagggggcgtggcggagcgggagcgcggtcacgtgacgtgcgtggcgacgtgtcggccatcttgtgttgttgaggctgaggactgactggggttctgagactccctgtcccggaccgcaggtaaccagccgttccgtgtcgctcccctgcccggctctgctccgcgccccggccccgccgccgcgtcccgggccgcctgtgtctccggtccgcgttcgcgcccctgctcctcctgcccgagctggcccggccgcatggacacccacaggccgctccggccggcttgggccgtcaggcgacgggacaggtcaggtgcagggccggagggagcctcctcctgggcgaggggcgctgagggccctggcgcgtcacggccgcgaggagccgagaagcccctaggccagggcctcttggcattgcgaggggagccgaacaaggcaggagggttgtggggtgggcagtgtcaggccggcttgctcggagctggagggctcgccttcctctgcttgcttctccgcgccagacacccgcccagtctcggggtggcccggtaacagctgctgcggccagacagctgctcctgccggctctcctgtccacacctggtccctgggaggtgcgctcctgccttccccacagagcatctggacggaggagactccttccgtggcgagagtactgggtctggaccaggcctgaggcgaggtgcagccaccatgatcggaaccttgggaccgaggctgggaaactagagcccatggcagccttggggacccaaatgttcacatcaggttgaaatgggcattatccttaagtgtcagtttccaaaagcactctgaatacttgttttgcgactgaaacataaatcaagcgaacagggaatgggggcatgaaagaagcggagcgtatgaccgtgtttgggaagcaataacgttgttttgcagttaattatttagtactgtgttttttattttgttgttttcgttttcctgcaagtcaaagcacttaaacacacgtagtctctctgtaagaaaggtaagtattccagtttaacttgc

SEQ ID NO: 39228 - DNA, 791 bp, Homo sapiens
aagatgaaaacaaatttagttctatgtctcccctttttagagatgttgacactttccttaaatgtaccatgcatgatttgtctaccacccttttagcttgttatacttaaatcccagatctctgtcttcccatttcagtttctctagaatttctggctgcttccaatgggtcaaatttatgagtgaaccattaagaatcacttagtgtagaaataaaccatgggttaggagtttgaacactgcctaggttctgtttctgatttgattatgactcagctgtgtggccttgggaaaccaccttactggtatccctatccttgcagaagcaagagagttaatgatggttgacttaatctcttgtggttattatgaagatcagataagatacattaacacattttgccaactgaataaggttatttatttacatgtgtgtccatggacctggggatcaggtgctatgtctcagccttatctttgtttttaatcctgtgtctctaattgtgtttgtcagtaaaggagtgagtcatttaatggttgctagatgtttgagtaaaacaaacaagcaaacaaatggtaaattagtactatttctttttaaaaaatttttttttacattttaaaaattatagataaatacagagatgaggtctcaccatgttgcccagtctggtttcaaactcctaaactcaagtgatcctctctcctcagcctcccaaagtgctaggattacaggcgtgagccaccatgcctggccagtagtactatttctttgggaaaatatttagtag

SEQ ID NO: 39229 - DNA, 1444 bp, Homo sapiens
tggccaggctgatgtcaaactcctgacctcaagtgatccgcctgcctcggcctcccaaagtgctgggattacaggtgtggggccctgctgccagccagagagtttaaatgattattttaaaaatgatcttcaccagttttgccagggagcaggtccacgcagctcctcatgctgtcattccgacagtgaaacagttatttcttaaagcaaaaccagtgttgaaatgtaaggtagcaatgtcagcgcagaacaagaagagtatagttttaaaaatcaatgaaggacattaggcattcgggggtccctatttgcttttgatttgtcaaaagtttgttctgagaagcatgattgacacactgcagttctcctgagtgggcattatagggtgggctggtaagtgtcatgaggcaatgttgaaagagctctgggatattatttccgatgtacaaagaagacttaaggaaaatgaaagctatcagcagacataagtctatataaggaagacttaactttggtctgtagaacagacctatgaaatatagagtatatattttgtgtgtatatatacctagagaaagagcgtgtgtatgtatatgtatatgtgtgtatgtgtgtgtgcatgtgtatatatatatatacacgcatatgtatgtgtgtgtatatagagagaaatagggagtcaggccagggaggagagagaaaataaatatattttggcacagcaataggaagattctcagaggtgcccgtgaggatagatggccatttctggaggcactgcctctattcccagtgctggctgagttctgctgaagcgggcttgaaagattgtttcctgattaccatggggtgacacatctactgtgattttagacaacatcagtggttactggctgcatcagaatgattaaaatatgctgattctcctgccttcccttctgatcttctgattgattaggtgtggtggagccagggcctctacatttttataggtcccttcaggttatgctgccagtttgagatctactgccttacttgatcttgatagtgccttcaaatgagtcatttcctgtggagacaaagttaatttttgctcagttttgcctctcaacacctccctcccccagtctttgttaacttccctctgcacccctcccccaccccagggcaggtgcattttgagagaaatgccctattgtctgtcatattggctaaaaaatgttaagagttgattatgttcagtagtgttgaagacattcatttgaagagttgtttggcagtatcagtgatggtttaaactgtttataccttttatcctatcaatatccactgttatagatttctgctgtaggtccattcttttggggactgtttggcattttatttgttttgatctatgttcatgtattatttttattaaatacattttttaagtctggttagg

SEQ ID NO: 39230 - DNA, 1325 bp, Homo sapiens
aagggtatatccaatccaaatatttgaatttttttcttttttggagccaagcattggattatttactgggcatccatccagtattgccaagacattatttatggtgttgtactataatcatatagtaacagtttctgggaatataatatcaccctattgttttgctttagtaaatctgtaggtgtgtctaaccggcagaataagaaagtagaagaagaagaaaagttgctgaagctctttcagggagtaaataaagcccaagatggatttacgcagtggtgtgaacagatgcttcatgcccttaatacggcaaataacttggatggtaagaattggggagggaaacccggcatgtggaatgacagagcaggacccacagagaggctggcaaatttgaacagtgggccaaaagtcaaaagatgaaatctaaggaggtcaactgctgcacctgccataggaacttgactctttaatagtattacttgtgagaaaagtccagtaatactaaactcaaatagattattggtggttgtcaaaaagtaaatgccatcttagactgccttaatgatacacaggacagaggaggtcttagttccatactgttcattttatggggaacattgccagctatgtcaagttaaaaaaagtaactctcatgctggggacaaaggtcaacctggacaagtgatggctgaagtgatgtgacatcattccctttctacctttgggggagggaatgggaattgtgataaagcaagtacacttattttgtgtaagataaaactaggaccaatgtgcagaagtgaaaaggctttggcacagtttagagaaaaacttgctcatggttagctgtttacaaacagaactgtctcccatccctgaatatttgaagagagactggtcaacatgtcaggattcccctaactaataggctgaattgaattaatccacctctgataccctgtctaaagccaagaaactgtgaaaaatagcagtaaaggaattaaagagttcctttgcagcagtgtaacaatatctaatggtttaaaagcctacagagaaaacaattttaaataacagtaatggctgccatgcattaagcacctaccatgtgtgctaggcactctcttggagttaacatgcagcatcccagttatttgattagcagtgatttttaaagatacctttacaagataggtgatattatccccattttataaattaggaaacagaggctcagaatggttaaataactcatcaaggtcacacagccagcaaatttcagagtcaggttttaaacccatgtttgtctaactctgatactc

SEQ ID NO: 39231 - DNA, 8991 bp, Homo sapiens
tactttttaatttacatatttcatataatttgtatactgagaaaaaattaataactatccattagctacacattccccatgcataaaatgggaaaatgggaagtcttcgttgaaaaagcagtcactgatggaaagagaattttgcttctaaaacaaaccagcagagggggccacagcctcattttaattatcaatattctccagtatctcctatcttcagtaggcttcctccacctcccgggttcaagtgatttcccctgcctcagcctcccgagtgctgggactacaggtgcgtgccaccacgccagctactttttgtattttagtagagatggggtttcaccatgttggcccggatggtcttgatctcctgacctcgtgatctgcccgccttggcctgccaaagtgctgggattataagggtgagccaccgtgcccggctggcttcctctttttttagagctcttcaggtggtcattgtgaatcagcaacctgcactcagatgtgataaacacacaatacagtttctccccagactttccttgtaagaacaacctcacaaatcttaaagaactcatgtgagtgagactatgctctgaacctcacagaatgtcatctttagagccaggcatagtggattgaatccgtgtttgtgttgccttgggtttcacagtacccagaactttcccttacatcaaatggctgaatttgataaagaatggcattcagccaaaggatgaatgcataccttgctggttttttaaatgacagttaaatgagaatatgtctgtttgctaaaagcctagactgataattaacatattaatcaactttttttggccacagacttttcccttcctgtctttgcatgagtaaaattaatttagcttttaaattacacttccacttcttttgcatatagttcattattgccttttatcacattttatctgttcttaagatacacgtgaagtcaatgaaaaatctgcctcagaataaagtagtattttatttcatagactggcctttaggttcttgtacttgcctaattaactgttactttaaaaacataaacattagggtcaggcacggtgactcatgactgtaatcccagcactttgggaggccagcgtgggcggattgcttgaatccaggagttggggaccagcctgggctacatgccaaaaccttgtctctacaaaaattacaagaattacttgggtgtggtggcacccgcttatagtcccagctactggggaggctgaggtgggaggatcgcttcagcctgggaggtggaagttgcagtgagccaagatcacaccactgcactccagcctgggcgacagagtgagaccttgtctttaaaaatacatatatatgtatatatatataaacactaaggctgtcactattttcaagggggaagaaaaagacttgtgggttattggaacacagttgatggggtcaaactcaggatggggtttggaatcctagcctctccctatatttggtcttgtaagcagttggtaccacagcttttttggttaataaataggcatgtttatttttttgaatcatgatatttttgagtcagttaattaaggtattttatgtaaggcatttttgtttattactgttacatttcaaatgtgtatttatttgaaaacttgaacatgaaaaaacaagaggctgcagaaaacccagctaatattaacagaactgcttttagaataaggacattgcctgtttactttttggtattcaaataactaaaacagtttgggattttattcaaggtagaagaactggaacatttttggggagtcactcagtttaaagaggcattgttcatcatttttatcaacctccaattatagaagttttggaaaaattacatacatgtgaccattgggcattcggcattaggttttctttttttctttttctttcttttttttttttttttttttttttgagacaaggtctcactctgttgcccaggctggagtgcagtgatgttatctcagctcactaaaatctctgcctcctgggttcaagcaattcttgtgcctcagcttcccgagtagctgggattacaggcgtgcagcgccacgcccagctaatgttttgtattttgagtagcgacaggtttttgccatgttggccagtctggtctctaactcctggcctcaagtaatccacccacctcggcctccagtgtgcccagccagcattaggttttcagctgtcagttgtgtttgtgagtactgcttattgccttcaatgggtatgctagtactgctttttctaagccaaattcccttttggttaatcaaacattgctaactgaaatcttttcctttgcagatatatttacagtagatcgagttagagtactttaatcttcttgctctgtctactgtgggaaagagaatatgcgaggactctaaggatcttaatagtgtgtcttccatggagcctcttaccctgagtatcaaaagctctgggccagaactttcataaagtttttgactggtgggaagaagtattcccattaaagtgggttgaggtttaaaggggtattaatcccactcagatttcaaagttatgtggtcaagtagttacaaagaacttagtgtatacaaccctccatggtaacccccctgcccacccccatctcttttaaggtagacctcctgcatgaactttcctccagggccagcccagcctgtccttgatacacactcacatcccattcttttctctgattctctgaagcagtggtttgcagggggtttttttgttttgttttttttttgagacagagtctcgctctgtcacccaggctggagtgcagtggcgcgatctcggctcactgcaagctccttcgaccaggttcaagcaattcttctgcctcagcctcccgagtagctgggactacaggtgcccaccaccacacctagctaatgtttttttgtatttttagtagagacgaggtttcactatgttagccaggatggtctcgatatcctgacctcatgatccgcctgccttggcctcccaaagtgctgagattaaggcatgagccaccacacccggcctgcagttctttttaattggtgatgctattttgttttattttccttcctaattaggttatatcagaaccttaagaaaataaaaaatctctctcattggaagaacagaaagctactgctgtgacctttatctttgtctccctgtaatacttctatggtatgctcaaaaacaaaagactggccaggcacgttggctgacgcctgtaatcccagcaatttgggaggccgaggcgggcggatcatttgaggtcaggagttcaagaccagactggccaacatggtgaaaccctatctctactaaaaatacaaaaaaaatgagacgggcatggtggcatgtgtctgtaatccagctacttgggagtctacggcatgagaatctcttgaacccaggaggtggagcttgctgtgagccgagatcacgccactgcactccagcctgggtgacagagtgaaaccctgtctcacaaacaaacaaacacagacttacattccagctcaccgcctagaatttgagccgcttggttgcctgggtgtggtcactcatagccagttttttttctgcaggattttcagtcaatgcatcatcggagcgactcaacatgggtgaaatcgagacgttggatgactactgagcacctgccagtggactggccatccctctcctgtctgccgactatggagtctccacctttggacacaacacttactcaccatttactctttatcactctgcaacaaatcacagaaccgatcatctcaggctttttcttctggccctttgtgtccaagattctttaatccatttttgttggtgaacatctcagactatagataagtggactggaccctgtgtcttgggggtggcagttgggattactccccaacaaggctgattttaggcagcatgtgttcactgtgctgtgatttcatctactgtctcccagaaagtgtgttgggatcggccattagcagcttgctttctcttgtcactttttttcttctattttgttttttcttcttctttttccccccatcagggcaaatggtctaactggtgcaatcatgaagagagttaatggttaacagacattggccaataacaaaacaccccatggactgtgactcgagtatccaacaggcagtcagagctctcccggtctgaaagttgcattgccactgctaactttgggattgcatcagagaggccctgagtggggttgagatgaggttggtttggtttgatgttacacactcctcacctgttctttctgagtgtcctttctctgaaaggatttatgtttttcttcgttagatagtgacttctgagcaagctgatctcccctggcatgctccaacctgattggacaaaggaagctctatggcctgggagagagactattcttaatttttctttcttacaaaaactgatttttcccataaatatttttacttcagaggactaggaccattttgttttgggcccttctgctgaaaatttgtctcgtttaagaggcagctagaatctttaccatatgtatgaatttgtataatttcatttttggatagggataaacttttgcttctgataaaagcctggaatttcatctggtcctcagagcattgcgtgtgtgtcttgctgtagcccggaaaaggttttgtgtaaagattctgggatggcaagttgtttgccttttctgaaaagagaacatacagaacctgtccatctttaagaccttcatccatggaatctactatacaggaggatgcagtgggctggaggggatgggcgaaaatgggagcaggaagcctggcctggcttctggtcatggcctcctaaaaccttaaacttcaagtagaaatgtactcaagccctatttataaacaaatacttttcctgcctccaccaaacccctacagaacatcacctggaattgccactcacactgggttggagtcattgggcagctgtgcctgtgcgagaggtgctgtggtctgggcagcccctggaaaagcacctttgctgcctgtcattgttgcctgaagaaggctggagttgctctgagagcagtttgggtttggagtattatatttggcttctatttttattattttggatcaccattctccctatcccttcttgcctccctcccttctaaacatgtgtaataactatacagagactgctacaaaattgtatatagtttttggatcaaatagcatgaggggagaggaaaccattaaaagttggggctcctactctcctttgctttgtaaattcaaaagttgggggtgggtaagagggatagttaaaatgtttacaaaactttaggctccctcggaacttttgccagtgtggaggaaaataaaaaagaacttaaataaaatctgattgtattctatctgagtgcacctcttgtactcacctttatggaggctgagttctgcactaaactgttcctcttggtaccatggaaaagctccaagcacccaagacatggaggcagccatggcttctttctctgccagaccacgtagcactggctggttctgtatttgagaatgtagaggtcaaggcagatgtcggtaagtttgaccaaatatcttttctctttttgactctccctttctgctaacatgtggatcagctcctgccctcataccgcagacacacccactctgaacacacccctccagagcttgcccacaccttcccaactagactctgtgtgtgtattcaggaaaaatgaaaataaatttttaaaaattgggagtggaatgggcagattagggggaacaaagtcattttggtcatggaacatccatttgcttaaccaaggagacttgcttctatctgaggaatttcccacttagtagaaagaaacactcttccctgggaatgtttgtttctgtctctctcaatgctactctctttcatattctcatttgctcaccctttcacttagagccaccgttttctcatcccattctatgaacttatttccaaattctcctaactattcctgagttttgaagtatttgttttgtaccctctctgcttccggttttttgtttggttggcttttttggagatagggtcttgtgatgttgcccacactggtctcgagcccctgggctcaagtgatcctcccgcctcagcctcctaaatatctaggactacaggtgtgtgccaccatgcccagctccagttttgttggttgatttgtttaaattcagagatttaaaaacatcccagacaagacagtttgattatggagactgtccccaagcagattggtgtgctggtggctgctgtgcataacagattccctccagattggcttacaacagctacttcattctgtgggtcaggaatttggatagggctcagctgggtggtggttctcctggggtattctttggttgtggtcagatgtcttccagggcatcattcctatgaaggcttaatgaattaggcaagctgtccaagatggctcactcgtgtaatgacagttgacgttggctgtaggctgggaactcagctgggttgatgactggaggagcttatgtgtgtcgtctccggaatggcagcttcagaggagttgaacttaagtggtgattggcttcccccagagaaccaggcagaagctgtgttacctttttgagctcttagctcaggagtcacatagagtcacttctgtgacactgtgttgcatcaaagtagtcacaaacccactcagattcaagagaagggagcatggccctctccctgcaaccccctccccccccgccttgatgaaaggagtgacaaggtcacattggagaagagcttgtggggtgggagatattatagccatttttgggaaatatctgcataaaatgagtttatgcatacatgaaggactttattttcattggctttaagttgagggtttttgtttttgtttttgtattggagatgggttcttactatgttgcccaggctggtctcaaacccctgggctcaagtgatcctgttgcctcagcctcccaagtagctgggactacagctatgtgccagtgcacccagcttgttttttttaaattttaggatagataatggtacttctggctttatttaaataatttttttagggaaaccattgtatttatacatgcatatatttttatatatacaaatatgtatataaaagtatatgttttacattttcaatatatatataatatatacatatatgttatatacgtatatatattgcaccctactttaaaattgactgataacaaaattggtaattttgtataaaatgcccaactgtgcattattaataaaagtatgtgaatgactctaattaaacagaagtgattctttgaaatgaacatattctgtactgtccttccaatatgtgacgtagatcattttcaacagagtagcaggcaagcgcattctacagagagtaaagtacaatcagagcacattccaaatggaagttggccttatagttaatgagtttcttagaacaacaaaagcccagctatgaagggtgcctttggtcctgcgtgagttcagtctctggtgaggaagctgcaatgctttctaagactctggagagtctgggaaccttgaagcagccagatgcgtgatagttatttgcaggtgttgcctgagaacgatggacacgtatagcttttggtagtgctggttttggactgggaacctaaaaccttcaagaggacagtttccctccaaagaattaatcagtgggaatgttttgcaacaaaagtgtcaaccatagcagtggggcaccacatgggagaaacagcatatagatgctggcaaggaagaagtgggctctttacctaacagctgatcttcgacctaaaagttgtcattgcgttccctttcattgctgccaaagcgatgacatcatggggatggaattcatgatcacctccacacttggttcaatccagctgatataacaagcagagacatcacctcttaaagactgtttacttgtcccccaattgtaggagtggaaggttagtttcccttggcagcaaattgcctttttatttgaatttctcctttagcatgagaaatgctcctgggaatggtcagtgggtcggtattgggtttggttgcatctgacaaaatacaaagtcaacagtgacaataaaatcacttattttcaagtgaaataggtcgtaggtccaaagcttgtggggtggcccacggacccagattctgtttcagcatcctgattgtggctttcttctgactcgtgatccaaggtgactgttacagcaccagccatcatgcctatattccaggcaggaggaaggagtggggtgaggcaaacagcacaccttcctactcagccctgtttaaggagctttttggggagcgctatccaacatcttaagtcttaccagccagaatgtagatacataactacagttagttgtggaagctttgggattttagttgagtgctatcatccccaaatgtcattgggatcctgttactgagaaattgggaaaacggatgctacattggcagttgcagtctctaccacatcctctgcagtcttctgttttaaagtgggaaacgtgggatggtttgtgcacactgatcatgggaaaagagtcctcgtgggtaccctagttttgcctgtggactgaggatctcaggctttcccaatggggggactcagcaagctctggtttctgttgctgtgcagagctagggacccagagcaggtgtcagtgacccagccttactgtgtattttatttcctaattctacatagaatctggggtttgttattttgttgtgttttttgttttgttttgagacagagttttgctctgtcgcccaggctggagtgcactg

SEQ ID NO: 39232 - DNA, 5110 bp, Homo sapiens
agctgggcctggtacccagaagccctgccgcggcctccagatgcagggaggtgcctacctgccagtctgtcttgggtgtgtcatttgtccatttctttggacatgttcaggcagtcagtgagcctagaccctggtgcctgccaggcggtgggcgcactcaggccttttacctgcccagcccccagaagcctgaggcagcacgccaggggcctggggccttccatggggactgcaaggctgcagacccctgcctttctggctgcgacatgggaggcctggctgggtcacttcccctcctctcagggtggtcttcaaggtttgcgggaggctagagagacatcagtgctacagtgcagccttgggcccctcgggagggaagcctcccccagttgggggccaatgggccttccacccatggggcctcctgccagaggtcttttctggaaaggggttctgccttgggccagccctggggaatgtggcaggtcaggtgaaaggtcagcaagctgtctcagagctgagccttgcaactgacctctccaggcttgagagaggcccagaagccagggacctgctaacattttattgtggaaagatgtgaagtttacagaaaagttgcacaaatactccaatgaactccaggagtccatccacctagtcttgccaactgccaacattttgctacattgctgaatcctctatctgaatgctgaaatcatttgagagtaagttgcagaagtcatgttcctttgcccctaaattcttcctaagaacaaggacattctcttaacacaccagagtcagctatcaaaaccaggaagtgagcactgaggcagtcctaagccacaccctgttcaaacttcaccaacggacctgagtctccgatcacaggcctgtccctccccgtccaggaacattgagctgtctccttagtctctgatctggaacctttcggcctttctttgtttttcctaactttgacatttgggaaggcccatttactttaagactgaccctgagtctgggttggctgatgtttctgcgtggtttgccctagatggacacaactggccagaaaaccctggaaggacctctgtgtcttctcgagcatccgcctctctgggtgctggtgaacctatgaggagggcaagtgtctggcttgactcttgccccagcgctcagggatggaacccgcagggacaaaaggtgccctagggtcgccggctggccggcagggtctgttcacagaacggcagcctccctgcactgtttctgggcagcacaaccgctcctgcaactgtccaaggccttcagcccacctgtgctcaccaccacggcaccttatccccaagccttggctttcttgtctctgaaatggggataaaagcagttcccacaccacagagtagctggagtcaaagagatgaggtgttgggacatccccaagctcatccagggaaccggcttgagggtcgagtgtccctggatcacagtctctatcccagttgagattagagcatggggccggccgcagtggctcacacctgtaatcgcagcactttgggaggccgacacgggtgtatcacctgaggtcaggagttcaaaatcagcctggccaacatggcaaaccccgtctcaactaaaaatacaaaaattagctgggtgtagtggcaggtgcctgtagtcccagctactccgcaggctgaggcaggagaatcgcttgcttgaacccgggaggcggaggctgcagtgagccgagattgtaccacttcactccagcctgggcacagagcaagactctgtttcaaaaagagagagagagagattaggacatgggcaggcctgccctgctaacactgtgatgtcagatggtctggctgggctggagaggccaagagccgacctaccatccccatgttgagctttccagcgtttctggggcatcctgtctggttgccggggatggatggcccagggttggagtggtggtcaggggaggacaactggggtgggctggctggtgaggatacagggcgggggttatcatgcaggcgtctcagcctgtgctttctgtgggactgagaatgtctcctttctgctctctggtccctgggtaccccaaatcctgccaactcccaaccctataagcagagaagggctttgtggggggcacctcccttacactgaacagacactcctcctgcccacccaccggccctgcccaatgggaggcagcaacgcactggcttcagcttcttagcctgggaaatgtgagggctagtgcagcgctgagcccagacccctcacacagcgctaccggcaacttgcttaacctagaggtggggggtgacgtccctgtcggccccgtcacctggggccccagcacctctccttggctttgcagacgatgttccacaggagcccgtgcccacgctgtggaacgagccggccgagctgccgtcgggagaaggccccgtggagagcaccagccccggccgggagcccgtggacaccggtcccccagcccccaccgtcgcgccaggacccgaggacagcaccgcgcaggagcggctggaccagggcggcggtacgggcggggcgggggagggaggggagagggagaaattaggaggggcggggggcggggggcgcggggagaagggccggccaggcgggggctagcaggtgacatggtcctccgtcctccgcagggtcgctggggcccggcgctatcgcggccatcgtgatcgccgccctgctggccacctgcgtggtgctggcgctcgtggtcgtcgcgctgagaaagttttctgcctcctgaagcgaataaaggggccgcgcccggccgcggcgcgactcggctgcactcctcacgcgcctgtatgtccgcgcgtgcgtgtccgcgcatgcaggtgtgccagagcgtgagcgcgcgcaggcgagcgctcagggcgggggtgcgcgcggggccgagggtgggtgccgtgcacgcgcgcgggtccggaggcgcgcccgaattccccgcaggggcgccggggcgtgcgtgagcgcacagcatgtccgagcccgcctgcgtgtggcgtgcacctgagcgcgcgcagggccgcgcggctcggcgtccccgtgcaccacggctggagtgcctcaggagcgcgccgcatgtgcgtgcccggtgcgcgtgcgccggggccgccagggcatcggagcgggtgtgcggccagcggtcttagcccgtccgggggcaccgtcacggtcagggccacgccacgggcggccccttctcccggcgccgcctcctctgcctgggcgcgggccgaggccctcgccgcgctccccggggcctgcctcccatcccgctccgctggggttcagagcgttccgtgaggaggtaagcgctagggcaggagaggccgacagagaccccggggcccgccgctccttgaggccggggttggggagggcaggggccgtcggctctcccagccagaggccgcgtggttttgggggacgtcttgactctgagtcctgcagccagggccccatccgcgggctcagaccagcagccccaagcccccctctgcccagggagcctcaggagcaggatgagtcgagagtcgacgccggacacggcccgcccctgcttcctactctcacccccaggcctggctgggggccggcagcccccacgcccacggttggtttgttcagggagagaaaacggctttcccagctctactcacctcacttcaccctcagagagtcggggcggagtgagggtgaggagcctggtccagggtccccacctcggaagcatttagagatgtaaactttgatcctttgatcatttaacctgctcagcacagcaggaagtgggaacttggtccctaccccagtccccagggcctttggagggaagggttggacagtttggaggccagcagaccccttggggacagcttaatgtatctgaagattcctgagtgggaatgttgctggagggcaagctgcttctcttttttaaaaattcattttctctagcagctgttttggcccctttggtgtccctgagctccccatggcactgtttcctgccgtgactttctcctcctggacactggagcccaggtggtgcccgcgcacctctcacacactgggggatagggtcaaggcctcatccaagtctgttaacagcttcccactcaaccagtctccccaaaatacactgtgagttcaatgattctgcttataaaggagtgctatgaaactgacctattttcctaattggttaactgacttcatctcacataaccttgagtaaccaaagccttcatcagagcggacgatccaacccaacatgctgtttcccatcctcaaaaggcacggggaccaatggccacccaactccttcccaaccctcccctccagggacgagagatggccccctctttccctttccccactctgcaagcactcccccaccaacgggtgcatcacagcccctcactgggaccagggggcctccctctccggtggaaccagtgtcacatgcctgtgcatctctgtgattctcagagggtctgaggtccgagcaccctgctgtggcctgtgggaagacgctacaaagtcccactggatctaaaccagaggcctgttctggcgagcagggaaactgtgtcctggcagagatcgtggtcctgggcacacaggacccctcagcacactgaggtggagctggggcgaggggagggggtgcgctctgggtaactgaaggtgtgaagggcccagggcctgtttctgggcagtgcaggaagtcccagccccatgcctgtggtgagatcccctgtagggccccccccaccatggacacttcggggcctctacggtcttccaaagctgtgtcctcatttccactgcagcagaggggcgtccccagctccgtcaaacagccctttctgtttctggagtcctacaagtggaggcccaaatccgttcccatgttgaggcaaggccctggctgttccttcctctctggaaaccgccttgaactcttcctttgggacatgcctcctcgaccagccttgaaggggtgctcctctctcactacctggaa

SEQ ID NO: 39233 - DNA, 1192 bp, Homo sapiens
acagtgtctgtcctcggagtcccactcctgcctccgcactcggatcaaccctgcgttccccaccctcagcaaagctcgaggctgcgcgatttctcctccccgctctttacctacacggtctccttatgatccagggttcgccgtggacctctgggccgtgcattccagcctgatttgggttgtttttttggcttctcccgacccctgtgttaacaaatcactgctgtctctgatgctgtgaccttcgatgcgttgttgcagctgcgtcaccagggtgacatctgcgggggtcggagccaaaggccagcagaccgtggactgaagggcgggctcactggctgccctccaccttcctcacggccaggaaacaaaacgtagccccttccccacaagggttctgcgaggtcccttcccatccacccgtgtgccaggccctccccacacaggtcacccccagtcctgggcatcagggcactggcctggagcccaacttagttcactggcttttgcctggagggagggaggggatgaagagaaggccaggcagaatgccaagggtctaaggcgtccttccgggactcccttagaggctgtggggacgtcgccgtgacacctcagcacaggccctaccatccaggctccgtgtctccagtatgctgctgggagctatcagggccacctgggccgctgaagacccggcctcagtctgtcctcggcagggcagtggctggggtgtgtgtggtacggggatcaccatggcccactcctctctctcctctagcagctggggccagagccagagccaggggcgcagggcgctcccaagctctccactctctgctcctgccccacagagtcctcttgctgcagccgccctggggtgattcacatcctctgttccccaggatgactcaacagcaaggtcacaaagttgcctcggtgcctgctgctggtgcagtcatttacactgcaggcatcaggatgcacggaagtgactttaaaaggcttccagttaagaagaaacccctcaaaggctatcctccttctgcagacaatgatgatgaagtcggactccagagccagagcccgagcccagcccgctgcagcgcagtctttagtgaattcgaggccggactgagcaggtcccgtgagcagcgtggggagtgggggcttggctgtctgatgggggagt

SEQ ID NO: 39234 - DNA, 2406 bp, Homo sapiens
tggctaattttttatatttttggtagagatgaggtttcaccatgttgtccaggttggtcttgaactcctgacctcaagtgatccacctgcctcagcctcccaaagtgctgagattacaggcattagacaccgtgcctggccagagcaggacttttttgatgttctggaattgctgctaaggccaaacaaatttctgctgtagcttgggtctgctggcaacctgagggatcggtgagggaggtgtgcctcctatggtagtccccactctcagataaaagaagaggaagaagaagggaggagcttggccctctgggggtgctgtagcccatgcaaagaggaagctggctccaaagaagccctggaaaggcccagggctccctgcaggaaggagaggctcccagatggaagctcatagggctgtggaacccatgggcccattccagagtctcctgggaaagggttctgagagcctagggttatggtgctgagatatgggaatacgctgcccatgggaatggagctggctttgagctgggggatttctgaaggtagggacctgctggaagactttgttccatggggctcaaagggattgtggcctgtgtgtccttgaagaaaatgaaccccctcagccttatctttgttctccatggcctttggagcagccctttacaagaagaccctagagttccctgagggtccttggaacccaaatgtcagcaagtggtaggggttggggactgcccacatggccactgggccaagcaataggagacccaagctggagaagggattgcaagcaggcatgtgcccccagggccagagggagatgtggtcacccttctggaagggatggtctcgtgtgtgtgtgtgtgtgtgtgtgtgtgtgtgtgtgtgtgtgtgtgtgagtgacaatctcaaagaccccagagggatgcctcctaccgctgtgcgcagctggtggagtagaggtgccttagctggctgatccctgctccctcccccaccactgggggaggaggggaggtggggagagtggctccaggccagctccttgccactccccaaactgtctgcaagaagagctttgaacactatgagattgaactttggaaaattgtaacgtggctgaaatgtgcaaaggctataaacagcacacagaaagttgatacaaatcacccttaaaatcttgtgaaaggattttcaaccctgtgcctcttaagaggaaagaaaattcaaaccacactgagatgtcttttttcacttgctatattggcaaaaactcaaaagtttgaagagtgattggtgcagccaagggcagcaggcagccgccatccctgctggtgggagtttacatggattccagccctacgggacagtttggcaatgcctatcaaaataaaatagcaaatacgctttgacccagccatctccgctgcaggaatttggccactggatctgcctgcactgtagggagtgtcctgggtgcaggtgactcactccagcatcatcctggagccagtgactcatggcagcattgttcaagggcaagcaattggaagcaaccggggtgtcttttgatcagaaactggccccacagatgagaaaattctaaacattttcacaaatgggagatgatgcagttgtaaaagcaaaaaagaggaagttccatgtacagtactgatcaggaaaggatgctgggaaaaatccagaaaaaaagcaagaatagaagagtatattttgtatgtttctatcagcataaagagagaaatgtattcaaatttattcaaatctgcctaaaaacttctggaaggagttacaagaaattagtatcaaaattattatcaatggttacacacacacaaacacacatatatctgaaataaggttaaattagatgagggagcctggatagttggggagtagggctgggaggaagaatttaaggtatgtaccttttaatacatttttggttcttaaagctatgtcggccaggtgcggtggctcatgtctgtaatcccagcactttgggagcccgaggtgggtggatcacttgaggtcaggagttcaagaccaacctggccaacatggtgaaaccctgtctctactaaaaatacaaaaattagccaggcatggtggtgcacacctgtaatcccagctactcaggaggctgaggcaggagaattgcttgaacccgggaggcagagttgcagtgagctgagatcgtgccactgcactctagcctgagcaacagagtgagactctgcctcaaaacaaaacaaacaaacaaacaaacaaaactatgccagagtattatgtattcaaaaattaaatatgtcttttgagaaaaaatgactagcacagaaccttaaatacagaaatgagtctattctaaaaactaaagga

SEQ ID NO: 39235 - DNA, 2414 bp, Homo sapiens
caacatctgggctattttgttactggtacaagcttccggtctcccacaggccaagggaagttcttaaagcaatgaaaaaaaaaaaaaaaaaggaacagagacagagtcttgccaggttgcccaggttggaatgcagtgatatgatcatagcccaccgcatgacttctgggctcaagcagccctcctgcctctgcctcctgagtggctgagactacaggcatgcatcagctcttcttaaagcaattcatcttcccccatgtctagcctcatctgtgtccccagccccactggggcagaaagctgtggaatgttactcacactgtcattggatcaacccctggctttcctgtggggatcccctccctgggaggggttcccatgacaatttgggctccagaaagggatgtgggaggagagtgcggtggagggaggtggtctgtggtctcccttcatggaccagaaagcttgacccccaaggggaccctggcttctacttcctcagagctaagcagtgccaaggggcagcctgagacatgggcaaaggggaagcctaaatggaaaaagagagagagagagagagaaagagagaaggggcagggaggacaaagacacatggcaagtgtccaagctggaacattcccaccagtggccttattgcattaaggattttcccaaaaagcagaaatacactgatagtcaatggaacatagcagagctgtcacgagcccaggaaacacaagtcccacctctacacagccagagactgtgtgactgtcccaaattttaaatcaagatagacaataagaacctaccactttcacatccaagaaaactgtgtccctacacatttcagtcacaccgtgctgtggcttgaggccagccagatgcaaaaatcaggaaggttctgaggggtagggccttctgtctttctgaaaggggcccctgagcggagggggcagtgctgggggagctaaagcgcagtgggctgtcacttcacgactatgacttctgtttcccaagtgcacttcctgaccctgagatttgtgccatggcacacaggaatcagggcacttccgtttacatatacgctcattatcaggactggcgtcgtgggtgtggggcctgggcagtcacagggccctgttcttagaaggtgccccggcttgctttaatgctgtgttgttgtccttttgaaagccttactattttaacaaggggccctgcatttttatattgcacagggccctgcaattatgcagccattcctgcttttgatctcacttaccccacagccataatggaagagcgcctggaaggagtccttatcctgattcccagatggtgaaactgagtgccaggaggggcagtgctgaagccgagaccagacaggatccctcgggtggaatccagggctgctgtttctcttgggggctcctcctcagtgaatggatgggtggtaatctcctttcctacctgtcctagcggtagcctctgttccttctcttgttttatctcattttatttttttaaaaaataccaaaaccattctctcacctgccagagaggagctcataggagttgggcttcctcagagagtgttcctccctcgtcccctgtcctgtccaggcacctgcgagcaggatggtgtgtccccggctaaatccacaggcgctccactctgtcccagagagcccacagccaaaaacttcgtcctgtcctggaaaagcttcactggtaagcattcccgacctttagacctgccttggcccatagctggccacgagcccataacgatcacttcccggctgggtgtttaccttcctgggccccatgggttgagccagggtggcagccacatacctgacacaaaagtggtgcaggagggaagggctatctgaggggaaggctgggcatggctggaatacccgccgcccgcccagtgcaagataatgctgatggtcacaccaagaggggcccgtggctcagctggcccaccaaccccaagcattggccaagccagctgcacggccctcaaatctgagatttgggagaggctttggggtcctccagggttctagtcacttcctgccatggccatctggccttaactcaatcacttccaggcatggaacactcactgctttgtaaggcatcttgctccattattattattattattattattattattattattattattccctctaatagcttcctttaatccagtgcttactacatgacaggcactgggctaagtacattacataatctatgtaatccttgtgttgtcactatgaccagagaatcatgcccattttaaagatgcagaaacagaggctcaagaaattgatcatcttgctcaaagccccacagctagtaagttggggatccaggattcaaacccaagccaa

SEQ ID NO: 39236 - DNA, 3358 bp, Homo sapiens
tctggccggaggggaggctatctctgggttggcatgtttctggttggaagtgggtttatcttagggttggaatgtttctggttatgctgacattagccattaggctgatgtttttgggttggatttaggcagtttcttaatcaaggggaacttaaaatggtggcagttgtccaagatggcaatgctcctgctgtcagggtaggccttgggaagacaccaggtgtctttgtaaacttaggtttcccctgtaccaagcacagtgctgactgcattacatgggtttttctttttactattcgtgacaaccttctgaggtaggtatcattactgtccccatttacagatgagacaactgaggcttaggtaggctgtcactcatccacagccacagagctactatggagggaaccccatttgttcctaaactgcgattaaaaataaaagtggggggagacaggccaagaaaaaaaacacgaaaagggttgaaaagcagcaaaagaaaagtaagcagtcaggcggaaacggcccctttcctgcctccttcccgcccggcgctgggccttgcgcagggcccggacgcccccaagcggccacctctctgcagctgacgcttccggctacaggctggcgtcactagcgagcgccctgcgtaggcaccggctcctgagcccgtgcttcgggtgagggggcgggtcttccggccctctcgaaaatcatttccggcatgagccggaagaccgtcccggatggcctcggggactgccagtgtgtggaggtgagctccgggattgccggcattcccgcttctgctggttgcttcatgctgcaggctgcggccgtcagccctcgctcgcattggtggcgctgaggtgccggggcagcaagtgacatgtcgtcgggcctccgcgccgctgacttcccccgctggaagcgccacatctcggagcaactgaggcgccgggaccggctgcagagacaggcgttcgaggagatcatcctgcagtgtgagcggcgccggtgcgggctgggagtggggcgggcgggccccgcggaggcatgcggggcgtcagcgggaacctgaggccgagtccctggcgccgcccgcacgcatggcggccgccccgggtaacccgcgcttgggacgccgcacgccttttaaatgttttttctaacctgcgttttatctttggaggattttccctattaaattgtacgatctttgtggggaggcacagttcgtgtttgtatttgtaaatcccagtagctcatacaatgcttatgcacttaaataggtcccagaaacatcccatctatggggtcatgttaatgaaacggtcgttgactttcagtcgcagaattaacattgccttctcaatgcactggaacgggtggcctttgattcctcaaacttacttcccttactccaccttggtggttttttttgcggggaaacgggataggggatcagggtcttgctgtgtcgccgagcctggagtgcagtggcggagatcacggctcactgcagtctcaaactcccaggatcaagtgatcctcccacctaagcctcccgagtagctgggattacagacgcgcttcaccacggtcggctaatttttttaaaaaaaaattttttggaacgaggtctcactgtgtttcccaggctggtctccaactcctgcgctcaaacgatcttcccacctcggcctcccaaagtgctgggattataggcgtgagccaccgagcccggccccaccttggtgttaatatcgtaatatcttttaggcgggacagaacctttactgttactgaaatcttcagtatgaaagaggtggttttctttccccttactgcttgcagcttaagggtacaaaaatgtttgtacctttacctaaattataatggtcctaaggtggttccatctgcgtctgaaagtaaacctgacgactttctcaagttatgctgttgatgatattcagaataataattgctaccttatattgcattctgattgtgcaaaatcagtagttctcaaacttagctccacattagaatcacctatggatctttaaaaaattacaaatcccaagccacaccccagaccaactaaatcacaagtatcacagtacacaagtatcagtgtgtgtgtgtttgtgtttgtgtgagattaagcctagaactgcatgccaagttatcagtgttttttgatgcttcccaaatgactactgtgcagacaaattttagtactgtggtaagtatttgcatgtgttattttatctttcccaaaattctgtgtatgaagcaggaactgttattgccattttcacacatggaactgaggccaagagagattaggtaacttctgaggttgcacagcaggttaatggtgagactgggtttttttgtttttttttttttttttttttggagacagagtcttgctctgtcacctaggctggagtgcaagtggcgtgatctcagctcactgcaacctccacctcccaggttcaagagatcctcctgcctcagcctccctagtagctggaactataggcaagcaccgccacgcccagctaatttttgtatttttagtagagacagggtttcaccatgttggccaggcggatcttgaacttctgacctcaggtgatgtacctgcctcagccacccaaagtgctaggattacaggcatgagccacagtgaccagccgggactggaatttgaacttaggcttgatgactaacttttgcatttgcttttctcactggctcccccagcaaatggttctttgctttcactgcacccattgttttaacaaaactaagaagaaagaggatgctttgctgttctaggaggccctgaagaacagtgctgtttcagaaagccagaagcacaagaagtccctcttcctcaaaacatgattccctgacagatgacataaatcagttcattaggtgcttattaggtgcttatgctttaaaagctaatatcctttgaaagtcaaattgggtgggaggcttgactcacccctcactgaacattttcacttactttctgagtctgttttgcctcatctataaaatggggatgaagcttgccctgcccacttcataaaaacagtgctgtgcatataagtgctttcaaagccatctgtataatagcttgtaattgtaaagcgttatctctttgacacaaatggaatgttttcctgcactttgaaaatggcatcttgatggggcaggagcatgtagaacagtcagaataagaggtcacttgtggagagcagatagctttaaagggtgctagagtagcgagtaatacctgcctgagggaccaggacaggagaccgggatgagaagc

SEQ ID NO: 39237 - DNA, 1229 bp, Homo sapiens
ccgtgtgctggctcacgcatcctggcattgggaggaggatttataatacactagactacaggtggaagattggtccttcaggctgcgagttagcaggatcagacacagtccctcgttctttttctctctatgctaaggtaatggtgcacgaccatttcaacccatgctcccctcagggcacgcagacaagggatggccagggtggcacactcctctgaggattcccaaagctgttccccattgcactgagcccttcccctgtcctctgccacagcacacaggctgctgtgtttagctcctgctagagctcttgggctagcccagggcctgggattctgccctgtggtgcctggtgagaggaccagcccgttggttcctgcattgcttgaccccaggacatcctaagtcagggtggacgttaataagcccgacctttggaactacgtgggtgagagagctggagggaagggctggaagaccaatccctggagagcagaggtcagcacagcccttaccctcctagttattttggtgccaaaatgtctcgatacgccctccaggtgctggcttgtttatggcctgcagctggccacgctggggagggagttgggggaggaagcgagcagccagctgccctgagcagaaagtggaagcttggctcagctcagcctgcacatgtgtggggctgtctactggcatgtagtgtcccttggtatcaggaggcaggaagtctacgtgcaggttgaatgtgtggcccagagtttttgggacagatgcagtgcaagaaacggggtacagagcagttgaaggtgctgcatggagaaagttctgcaaccagcaatgaagggctggagaagggggatggatccctgctattgatggagtgcctaccttgtgccaagtacttcacatctgacatgtaaccatttcagtagtacttataaatcagtagcatcattcatatttcttagatgaggaaattgcggttcagaaaggttatgtaccttacacataggtcacacagctagtgagagtcaaggcttgaatgctggtgtccctgagtctataactagacctttgcccactgtatggtgctgaatggaagtaggagagtttggtggagtggggggagggagattagcatttaggattcaacaacaactgcccttggcccttgctattttttttttccattgaaattttcaggctgggcgaggtggctcatgcct

SEQ ID NO: 39238 - DNA, 788 bp, Homo sapiens
ctttcttccttccagtttcatttcacaggactgagtcgcatttactgatctttgaggagtagggcaggtgcggggtgggagttggggacatttggaaatgtgtatggtggtttttggttttcacatgcttggggaccagaagctctatgtcacatgcagtggagaaatgtgctgctccaaatgacaatcatgaccctagttcagggtaaaaattggatgattcccatgttttcaagtttcccttttatattctccaatgtgaagtggttctttctgacaggagttgcgcctcttcactgacgtgtcacaaagaagaattaggttggacgtgaagtgtgttattactgccatcttgatatgccctcaaggtggggtagactcagggagcaggctgtcgttagagatgattcatagtgtgactcattcaataaagaggcaccggagggaatgtgctcttccaggccaccgctttgggggagttgatgtctcagcccttcctgagatctccaggggaacagcgctgtgcgctcaccaggagaacaaaaaagctgcttcatcatcaaagaacatttatgccagttttctttgctttaagaatataattcttaccaagcctaatcctctttttttaaaatacactttttattttgagtagttttagatctacagaaaagttgcaaagatgttatactgaggtcccccacacccaaaaccccctattattaacccttacatgagtagggtacatttgccacactgagtgactcaaatgttgtttccagtaaaat

SEQ ID NO: 39239 - DNA, 1862 bp, Homo sapiens
gaattacgggaggacacagttcagcatgcgactgtgctgcagaactttctggggggacgggggaagtgttttatatttgtgctatccagcgtggcagctgctaagccacatgcggctactgagtccctgaaatgtggctcctgtggctgaggaacggaatgctgaattctaactaattgaaatttaagtagccacatgtggctagtggctatagtaccctggggcaccatggggccttcggcctgtcccggactgttcctgccttaggccttgtcctcctctgtcctggccgtgagcccatgcccctggccgtgtccccatgccagatgccactctgcagccccaggtcactgcccagggcggcgcggccagcgaatgcctattggcaggcgaggtctctagcggcagccctttgacagggagagggcacacctgggcagtcccttactgatttgcccctcagagcagggcagacagatggacagcatttcctctgggtggcaccaagccctgctccacctggatggcaccaaaaacttagctgatctcatctccagcttcgcttcctcctcttctgcccagagcagcgctggaccccacccgcccaccatccagcagcccccctgggaaacatgggactcgttctggtcacctctgtctccctccagtcgctggtcactccccacctggatctcagtccacgtctctatctctcagcccctcggtaatccagggcgtccacctgccctgataacttcaaagcccggatcacaggccccagcgtggtgacccagccccgcccagggttaaatccctcaagggcttcctgctgccttccatccccttatctggtttccaaagcccgcttcgacctgcccgccccgaggctcatatcttaatgccattttccttgctctaagcaccagcttccctttcttcccccgtcttcgcccaacactcgttctttcttgcctccaggcctttgcacaaatctggtctctgcctagaacatggttccctctctagtcacaactcctgctcacattttccatctctccttaagaaccgttttctccaggaagccttcccagatggagcggtgcatcccagctctggcgtcccgaggcccgtcccagtaccggggtctctttccagcacgcgcgcgcgcattcgagctcgccccaaactcggccacacaaggctgggcaggacagacacagccccagcctgcctgaggttacctacattctgatgcggaagagtagagatgttttaagaagtgaatatagaaacaagaacacaaacggcgttccagaaataacacacagaagccacggcccggagaggtgggcggggggcccgggacgcttcaggtgggggcggggaggggccgcgcggcgccgtctgcagctgcgcgcatggccggcagggggcgcggcggggagaggcgggaggccgcccccaccgcccccggcccggcccgccctcggccccgcccctcccgccggccccgccccgcccccgcccgcggtgcgcgcgctggcccggcagcatggcggcggcggcgggcgcccctccgccgggtcccccgcaaccgcctccgccgccgccgcccgaggagtcgtccgacagcgagcccgaggcggagcccggctccccacagaagctcatccgcaaggtgtccacgtcgggtcagatccgacagaaggtgagcccgcggcgcggcggcccgggcgcgcgcccctcacgccgcggcagccccggccgaggcccgtggccctgcccgagcggccgcccaggcccggctcggcccggcccggggtcccgcgggcgtcaccgcccctgtcgagcgtgccccgccg

SEQ ID NO: 39240 - DNA, 1072 bp, Homo sapiens
agagcccccttcattcttggctttaattgagccaagatgagtggaccgtataatccatttctggattctcgtaagagaacgtcttgtgttggggtgaactcatcagcttttcgggttgagaggagttttagtgtctgtggccgaggcactttcctctcatggtgtgtgcagatgcacacgccaggcctgtgagtggtgggttgggctgagggcgcgggcctggagcttctgagccccagagccgctgacgtagacagctttggcagcagcatcctgagaaatggcagggggccagagaacacagagacagggccaagaatagctgaaaaataccaaatgctgaagttggagaatgcactggccccgcgtcccagtgtcctcccagctgctgtgtactgtggccctgtgagcctcagtgtcccttcttcatgtctgccagtgcgtccagggcacaccctgggcctcttgacacccccacccacacaggcacacattgccccttagaggacaggattggtgcaaccccccatgcccccggcagcgtgctgggcctgtgcataggtcaaggtctgttgagagtgtgagaaatattttctgttagagacacgaatatgtttcagccgcaacaggctgcgtttcagccggaagagtgaaagggcaccttgaaaacgcaagtttatgaatatgtttctgtactttcagaccatcatcaaagaggggatgctgaccaaacagaacaattcattccagcgatcaaaaaggagatactttaagcttcgagggcgaacgctttactatgccaaaacggcaaaggtgaggccccatgcaggaaagcacacgcgaggacatcacaggagccgtcccaggggaggaactgggggtgctgagtccttgtgtgggaaaagcttcaattctcagatctgttattgccagtgagttttgtaacactccacgctgtcaggttttacttgtctcaaggcatgttttatttcttatcaaaattaatttctgttcattttccttttctttaatgtcatcggtaatggggaaaaggaaaaaagggtcacagaga

SEQ ID NO: 39241 - DNA, 3554 bp, Homo sapiens
ttgtgaccttgcaaaatactgcttgtttaattctagtagtcattgtgtagattccctagaaagttctatataaagttgtatcatttgcaaatagggacagctttacttcttcctttctgactcacatgccttttatttatttttcttgcttcattgcaaaggctaagattccagtacagtgttgaataggagtagcgaaggcaggaatccttccaccttttccagtcttaacatgaaacagttcggttttcatcattaaatgtgatgttagctgtaggctttttgtaggtatcctttatcagtttgaggatgttctttacttgatcgctgacagttttaattattaatgggtgttgaattttgtcaaatgcttttctgcatttattgaagtgaacacatggtttttttctcctttatattattaaaagggcaaattaaattggttgattttcaaatttaagacaacttttcattcttgggttaaaccctatttgctcataatatgttttttatttattgttggattcaatttgccattattttgttaaggattgttgcaccaatattcatgaaggtattgatctgtaatttatttctctccctttcttccctcatttcttcctttctgcctttgtcaggttttggtactttaaaaaatagagagtcaggccagatgtggtggctcacgtccgtaatccctgcattttgggaggccgaagcaggtggatcacttgaggctaggagttcaagactggcctggccaacatggtgaaacctcatccctactaaaaatacatatatatgtagtgagtcagtgttaccccgcctctgttttctgataaagtttgtgtaagcttggtgttctttctgaaatatttgctagagtttaccagtgaaatgatgtaggtatgcagtttttttggggtaaagtttttgataataccctgtgattttttttttttaatgttcagattttttgtttcttgtgtctgcagtgacattttctgcattctcttccttttccctctgatttatgtctgttggatggagaagtagaaactttatgagagaagggatatcatggggcttgttgatctgttttcatcccagcgcccccgaaccatgcctggcaccaaatagccacactgtaaatgcctgtggggttaattgatttgttgttgctgtatctctattccttggcacctctgggaagcatttttgtctccccccgtccacatgggaccgtgtcgtcactgtgctgtgacgggagctggctgagtcaggctggcaggctgtggctgccctgcatgccgtgccctcccacggtggctcttcaaattcttggctatgtgcccagcactggtacacagaccctctgagtcagggcttgccaatggaaaaaatattttcaaccttttttggtcttttaaaatattaaaacctatagttggaattacttcttttcatttttacaatgtacttgaagtatcagaggaataaggaaagccattgtaagcttggttagtggaaagggataaaccacctctgagcatccaaataaaattaggaagcgggggttctagatgagggaggacaattccaggaggctcttgaccttgtatatgattccctgactgggaatgtggtctgagatgccctttcctggacagattacaaatgacagcccctggagcaaacacatgaatcagccagggagttaaaaaagaacagggtagtttggactgggcctctctctttcaggacatgactgctgtggctacagactgcattcaggtccccagcatctggaaggagtctgtgcccacttatcctttgcatcctaaggggactgggtctttgtgcaccagcagcagccgtagaggttgggcttgggaatcaggggctcccttatcaaagctgggaaacttagaacaacagctgtgccgctcatggacctgtagtctctcctgttaagcagagtgctgagttcatgtgatagcaaacacagctctgccagaccacagggtcaccaggcaggcactccatccctccctccagggggagaccacggcatgccttggatgaggtgacttggccaactgtcttgtggccccagctcctgacattacaatgtgatgactgtgacacttggaagagaaatgtctcaggtatcgtggtcctgggtcctgtggtacaggaccttgtctctgcggtcctgtacttttgcttcacaattagaagaattgaaagcttcaggttgtttcaggtatgttttttcaagaagtgcaatagtagtgtgtttatagatgttttccttagagttagttttgggggagagaagatgactgcccttccatcctgcaggtggattggctggggaatgaggccatctcttttcagagtgagcagtgaaccatttttgtctgtacactgacctggggctgatttggcatcctgaccttccagtctgagggagttggtaaggggctggaagggcccattctttgtgtgtgtgggtattttttagagacggggtcttgctgtgttgcctgggccggtctggagatcctgagttcaagcaatcctcttgccttggccttccgagtagctgagactacaggtacatgctggacccacactttggactctgtccctgctggcctagttctttgccaagagcaaaacttgagagcaccctcacacaggtaacagttagaccttgtcaggagacatggctgttttcccagacagctgagctttcagactaaagcacagaaaagttggaggacatgggactccttagcccacaaaagaaactctattttaattttccatgtgaaataggagtagggtacgttagggtagggcatcttggttatgagatgcctgcagcaagtgccatcagggtggctgccagctgagtcatctccctcaaagagctttcctggaaccactctccccggtgatgtcagctccttcacctccattgctgtctctagctgcaggggtggttggagacccagtattttagctaggccctgccagaggccattgggatagcaggtcaatggatgaaggaggttgtataggcaaatgggagtaattatctctgatcttgatttttgtaggaaataggcgtagattaaggcatagataaatttgaaaaggcatagatacattaattaattaattagagatgaggtttcactctgtcgccctgtctgaagtgcaatggcgtgatcaaggttcattgcagctttgacctcctgggctcaagtgattcccgcaccttagcctactgagtagctgggaccacaggcaggcaccaccattcccagctaatttataaattttttttgtagaaacagggtctcactgtgttgcccaggctggtcttgaacacctgggctcaagggatcctcctgctttggcctcccaaagcactgattggcaggcatgagctgctgcgcccaaccaggcatagataaatttaaagacaccttttactgtagacaatttggaaaatagagaaaaccagagggaaaagaaaaaaa

SEQ ID NO: 39242 - DNA, 3544 bp, Homo sapiens
gccccaatttctctgagacagccccacaactttacccagctagatatcggaagccactcgaacttttcgggaaagtatttggcaatttcaatcttctccacgggaagacgatagaaatcggcaactctctgcctcagggagccggcagtcccaccctgggccgcgttccacaccaggtccagggcaggggcataggtcctctcaccagggatgcgcacctgtgtcctcagcagcacgtcctgggggctgtaccagaaaaccgtcaagcgccagatccaaacaaacaaacaaaaccacgtggtaacttgaggcataatgggcaaagcttctcctccagcttttctggtttttataaggagagatttttccctaaatgctggatgctagtggcaaactcttattccgcatttcaatttcctttaatcttggaatgaagagcggaagtgaagatcccattctcggtacacagcagagcccccccagacgtggtagggaacttcctcagtgcgggagaaaaggaaagaggtggcggcctgagcaggtacgatgtggcagagagggacagggtgagagaggcctggcttgatagcccggcagctggcaggaggagagcgggctcgaggtaggcagttatgcccttgactctgggggctgtaaatgtgagctgccatgaggtagccagggagaagaacctgagggttggaattgggaagagagacacagggcgggtgagacacaaggctgcagctgtgggagatgggaaaccttagcaggaggagcagaaagaacaacactcagcaaggcaggaggaacagggacgtgcagaggtcagcacaggccatggaggaaaagctatagataagaactggaaggcagcaaggggaaatgaagactggttcttaggatgctgagacaatgaatgatttttagatgtacttctattaagtgtttttaccatcaaaagaggtcacgcaatgagaaatgaaatgactggaagaaagagagttcacgggaagatgtgggcccatggaatcaggggagtgcagagtgcaagagcagaggctgcacagccccatgtccccatgggggagggggctgctggccagggagtgaggccaaggcctggagcccagcacagtgcggccagaggacagaaagggcatcggcacagatgctgaagttgccaaggaggggacagaggctgctggagagaaacaggagggactagaggcctccttgagagcaggagtgccctggaagttggtcaaggacagaaaagcccatggaaggggcctgaggaggcacacagctgctcttcaaaagggcaaaaggcactgtgcctatcaaaacctgacacagcttacaaccattgtgacaaagggtcaaaatcataaagagctcacacaaattccaagagagcttttcctttagacttcattacagaagcagtcaaaatacacgaaataactcaatcatgcactcacaaaatacagtttgcaaaaatgcctgaacttattagtcatcaaagcactggagaatatgagaacaagataatcatctttcatttatcaatttaggaaatacctagacgatgaaatagtcaatgctggtttgtgggtgaggtaaaataaatactcatattctggaacaacttgcctgaagaaatatttaactattttaagaggtttaaaatgtccacaccatttgatcctggaattcccctccaggaaactatttctggttgtacaacttgtattaagaatgtgtttttataaaaacactaaaattaaatacatgttagacatggttgaaagataactttctcatataacaagcagaccacaagaaggatactcatatcataataggtagagcaaatcttaatagttcatgatatttacaaaaggacttgtaaaatattttcctacagcgaaaaaagaacaagatggtttgattgtagacaattttgggtgtatctttatttaataaataattattgactatgacatgggcacaattactattctaggtattaaggatatagcaatgaataaaccaagtacttatattctagtagtgggagacagatactaacaaataaatcagtaagtacagatatgtcaggtgatactaggatgaagaaagtagaataagggggcagagcgacgggagcaatgatgaatccgttggatggcagactgtccgaacacactgacaacagctgcgggtgggcctcttgctgacacttcagggccatcatggggtcaatatgcacctggtgattactgaaaaattaattctcccttactgtttttatgggagaataagtcccaagttttagatgcccagacatacaaacatatttctagcacacactctgtttcaagttgctaggctacttagaagcagtgaaaaaaatgctacactatgaagttgttaaagcttcaaaaggcaaacgaggttaagatacgtgtgtgtcacttcagatgcacaggagaatttcttaccccaagttttcgcctttctgaaggggctctaagcagatctcaattctccgtcctagtttatattccctgataataagtgaaacaagataatattgagtgacataacatttaattttcttgaattttttttcccccaattttaagcttttttcttaagcaaagaattgttttctgagtacttataagaacacccaaacttttggaaaaggggaaaaaatgagaatccttgctgcggtgattatttagatacttgagtcatttcttactaaacatgtaggtctggctctgggaagatggccaaactgccaaagaaatttccctctgttcagccggggttaagattctcatgccagtcactttggggtggtaatcagaaccgattaaaagcagccttggccaggcacagtggctcacgccagtaacccagcactttgggaggccaaggtggaaggattgcttgaggctaggagttcgcgaccagactgggcaacatagggagacctcgtcaaaacaaaaaattagcctggtgtcgtggcacatgcctgaggtcccagctacacaggaggctgaggtgggaggatcacttgagcccaggaggttgaggctgtagttgagccatgatcacgccactgcactccagcctgggcgacagagccagaccctgtctattaagaaaagaaagaaaaggaaagaaaggaaagaaagaaaagaaagaaacgagaaagaaagaaacaaaaagcctcaaggctgctttttgcaaaggaaatgacccaaacctgctctttaagttcaaagtttcaggaggaggatcagctgaatccaacatttctgagtgagaaacagccactcctactttccatctcactccaaatgcttttaagttatataatgtcacagtcactggagcacagaaaaaatatacaacactacatttatacttaacatggaaaactgaaggcctgctggagtttatgatgaaaagtgtcacccaagtcacaagcgtggcatgaccaggaatgggctttgttgtcactcag

SEQ ID NO: 39243 - DNA, 945 bp, Homo sapiens
tatcactaaccccttaaaaagtaacaaaataggaatgttggccaggcacagtagctcacacctgtaatcccagcaatttgggaggccgaggcagagggactgcttgagccaggagttcaagaccagcctgggcaacatagagagaccagcacactctacaaaaagataaaaaaaattagccaggaggttgaggcgggaggactgcttgagcccaggaggtcaaggctgcagtaggccgtgattgcgccactgcactccagcatggatgacacagagcaagacgttgtcaaaaaaaaaaaaggtttcaagatgatgaaatggtggtaaaaacatcacaataatctgcatatgcttggaatgaggcagacctggctttgaattccagctcctggttgagcaatcctggacaatttacttcatctctctggctttagttgtaaattgggaatacgaaacaagtaaaccttctagcacaatacacacagtgggttccaatattttccagcttagcactactttagctacattttacataatttgatatgttgagttttcattaaaattcagttcaaagtattttctggtcttcatcccgtatggtctcattcacttgtgttgacctaaggaaattctactcatctttgcaggccaggctcagattaaatactcctttctatttcctgaccatccaagttttcaccccattttatgaaggtattggggaacatgtcaaaattccccggtaagttattttcattgccttttatttccatacatgccatcttgcagaagtattttaaatggacttaaaaccagaaatacagatagtcctaaacaatgcaagccaaaaataaataatcaataagtgatggaaaaatatggcaggccagatacaaccatcctgctacaaaattactaaaaatgctagataaagtaaaaccaaaa

SEQ ID NO: 39244 - DNA, 1836 bp, Homo sapiens
attggtctatttgtgattttgcataattaattacatgtaaagaagatggtacatattgctagttaaatgtacgtaacatagcatacctctgaattcaggtgtgaaatgaagagtctgaagaagggaattgaggtaacaggttccaccctgatttctgattccgcttaaattggtgaattctctaggagcaggtggctccaaagctttagtctttaatttcttcccttttccatactgattattagacacagtggaatactcctcttcaaacaggtccccaaacattgtgaaactaaatactacccttaaaaaaagtgacatataaatgcttttatttttaaaataaattttccccaaatccccctaccttacacttgggagtcgattctgttgtttcttagaacacaggactactgtttctatgtacagtagttgggttttggaggcagcaagatctagatttttttcatccctatcaggaccctaactacctgtgtgaccctggatatgttaatctgttttcttatgtgtaaaataggataccatctgtctcttcgggtcatttaaactatccaatgacataacgaaagaagggcagttagtgtacagggtttggcccacaataagtaacagctgtttttaaaaaggcacgttcacatcactaatttttttaaaaaagaaaacctgttgccacaactaatccactgctgggacggcaaagccaaccctaaattctgagaatcaactctctaaaatctctgcttgtcacacccttcagtactatataccagattatgacatttaaattaaacagatcaagttaactttttttagagcactttagtacagtcccgaagctgttgggccggaagtcagttcactggggagggaggggggaaggggagcggagggcggggaagactgccactaaaattatcaagcctaaaggccttccagtatgtatccactaatcccatcgttagccctgggggcctaggtgacttccccaaggtttcacatcgagtgtggcggagggtcacttggagatgagaaacgtaaagcgcctagcataggtaccaaatgacaggaagcgctgaaatgcaattatttttcttttcctcagaagaaaactaaaaaaacacaactcgagagtctagcctcgagctcgttgtctgcattcctgaattcccaactcctacggccggccgaggccctccaagccaccacaggcccaggggcgcaaaaaggcagaggtccccgtggcccgaaaccactgccccgactccaggagagcgccgcgtcctcaggcaggcctgggcagcctctcgcctcgccctcctcagactgggccaccaacactgtccctacgcttcccacgtccctcccaggatccccgggcgccagccgcacttactgcctaaagcccagacccccgccctggccaaaacgcgaagcgaacgaacccgccccaactgggcgccgccatgttggcgagggcgggtctccagaaagtgatttatggatcgtggactatgcttcccaggatgccccgctggagcgccggcccctcgcacggggccttatgggaaatgtaactcttctgctccaagagtttgggaactggagcgggagcgggagcgggcaaggtgagctcgcttacaagtccgctggtgagttcgcgggtccactcggccagcggaccactcattcgttcacatttataagattatagctatatgatcttatataagattatagctatatgatcttatataagattatagctatatgatcttatataagattatagctatatgatccttatataagattata

SEQ ID NO: 39245 - DNA, 1866 bp, Homo sapiens
agcatatgagaggtccagctgttcacactcaccaacactggatgtcttagtccgtttgcattgcgataaaggaatacctgaggttggttaatttaggaagaatacatgtttatttggcttgtggttcattcagggtacaagaagtatgacaccagcacccacatctggcgagagactcaggctgctgccactcatggcagaaggtgagggtggagggtgctgatcacatggctagagagaagcaagagaaaaaggaggcaggtgccaggctctttttaataatcaggtcttgctgaaatgaatagatgggaagttcactccttactgggagggggcactaggtcattcatcagggatccacccaaacacctcccactaagccccactttcaacattagagatcaaatttcaacacttgatttgggagggacagataactcagctatatcatctgatatggtcagtctttttcattgcaactattttaatgggatatggattaaacctcagttttagtttgatttccctaatcattaattatgttgaacatccttacatgtgcctgtttgccgtctgtgtaccttctttggttactgtcttttgaaatctttgctcatgaaaaaacatagatgtctttttaaaaatagactttttattttacaataaatttagatttaaagcaacggtgcaaaaaacagcactgagaattcccatatatcctttgccagtttcccctattgataaatcttggattactatgcacatttatcacaactcattaaccaacactgacatattatgatgaactaaggtctatgttttcttcagatgtcattaattttcacctaatgtccttgttcttttctgggatcccatccaggataccacatgacatttgctcatcacatttgtttgatctcctctagcctgtgacagtttttcagactttccttggtttttttttttttttttttttttttgagatggagtcttgctctgtcgcccaggctggagtgcagtggcgcagtctcggctcactgcaagttccgcctcctggcttcatgccattctctggcccagcctcccgagtagctgggactacaggcgcccgccactgcgcccggctaattttttttgtatttttagtagagacggggtttcaccatggtctcgatctcctgaccttgtgatccgccggcctcggcctcccaaagtgctgggattacaggcgtgagcaaccgcttccagccttccttagttttgatagcagtttgtttactggcactgcttcttctatggcttctttagtacctggtacagattcaaaagcaccaatctccttcaagtcatcttctgctgattcctctggtgtggtgtctattcgttcttgaatttttcacagatccatatcttgaaagaccatatcccccaacttttgttgctgaattagagatgttgggtttgcaggcaggtagaccactttgaaaccttcagtgttgaactcgtgggttctgggcggctaggggcattgtccaaaatcaaaagaactttcaaagacagtctcttactggcaagacaaagcaatgtagaaccaatccagaagaagtgttcttgtcgaggctttcttgtacaacaaaaaagctggtagtgggtattgatcttttcccttcaaggtgtggaggctagcaggtttatagatgcgggcagtcctatttgtaaatccaatggcatttacacaaagcagtagagttagtttatcccttcttgccctgaatccttgtgtttgcctctcttccttagattagggttacggttagtagcctgcagaaacaatcttgaatagaagcggtaacagcccctcagtcc

SEQ ID NO: 39246 - DNA, 415 bp, Homo sapiens
ttaagtcatttctttgtccttgcatctaagtgtaggtagttacaagcagccaggccacatctggaatactttactgcttagaaatttcttctgccagataccctaggtcatcactctcaagtttaaagttccacagattcctagagcatggactcaatgcagccaagttctttgttaaggcatagcaagggtgacctttgctcaagttccaaataacttcctcattttcacatgagacctcattagcctggccctcactgctgatttttctatcagtattttggtcacaagcatttaaccagtctctaagaaggtccaagctttccttcatcttcctgtcttcttctgagccctccaaactcttcaaacgtctgcctgctaccaagttccaaagttgcttccaaattttcagtat

SEQ ID NO: 39247 - DNA, 6516 bp, Homo sapiens
aaacatacgtgtgcatgtgtctttatagtaccatgatttataatcctttggatacatacccagtaatgggatggctgggtcaaatggtatttctagttctagatccttgaggaattgccacactgtcttccacaatggttgaactagtttacactcccaccaacagggtaaaagcgttcctatttctccacatcttctctagcacctatgtacatttatcacaactcattaatcaacactgacacattatgttgaaccaaagtctatgttttctttagatgtcattaatttttacctaatgtccttgttcttttctgggatcccatccaggataccgcatgacatttactcatcacatttgtttcatctcctctagcctgtgacagtttttcagagtttccttggttttgattactttgtcagttttgagcaattctggtgaggtattctgtagaatgttcctcagtttgagtttgtctgatgttttgattatggtaacacaggggttataggtttttaggaggaagaccacaaggtaatgtgttttcccgctttcttgcgaatggatacccaactgttgaagagtcatcttttccccacagaattgcctgtgcacctttgaaaaaacttggttgctcatacttctatttctgggtattctattctgttccaatgatctttttgtgaaatatttgattactatagatttgtaataagtcttgaaattaggtaataattgctctccatttttttttctattttttaaaagttatttttgctattgtaggtcttttacatttccctatgaattttagaatcagtttgccaatttgtacaaaaagatagcctgctggaatttagattggggttgtattaaatttatagatcaactaaggaaaaataacattttaacaattttgagttttctgattcatgaacatatctatttattcaggtctctcaccaatgttttgttgttttcagtgtacaatctttcacatcttttgtcagatttatctgttagtattttttatttttgatgctatttaggtgctgttttcattccaattttcaattgttcattgctagtacatttgacccttgaagaatgtgaggattgaggtaccaacccccgagcagtaaaaaattagcatagaaaggttttgtgggtttctttttgttttttatttttgagacagagtcgtgctgttttgcccgggctggagtataatggcgtgatctcagctcaatgcaacctccgcttcccgggttcaagtgattctcctgcctcagcctccagagtagctgggattacaggcatgcaccaccacctgcagctaattttttgcatttttagtagagatagggtttcaccatgttggccaggctggtctccaactcctggcctcccgtgatacgcccaccttgacctcccaaagtgctgggactacaggtgtgagccaccacgcccagcacacatagaatttttgactccctaaaaatttaactattaatagcctactgtgcactagaagccttaccaataacagaaacagttgcttaacacatatttggcatgttatatgtgttatatactgtattatcataatgaagtcagctagagaaaagaaaatgttattaagaaaatcttaaggaagagaaaattaagtattcattaagtggaagtggatcatgataaaggtcttcctcttgattgtcctccattgagtaggctgagaaggaggaagaggtgggttggttttgctgtttcaggggtggcagagggggaagaagtggaggaagaaggaggagagacaggtacacttggtgtaactttacagaattacatcataattattatttgacttttttgcctttgcaattctttgaaaatgcttttttacagtactagtccttcttccccatttgctttagtttcagtgcccattcatggaagggtttgtgttgtaaaataagtcaaaagtagtcttaataattggaagcctttgccaaactgtttaataggaatttgttttctggcatggcttcttctatgtcttctttagtatctggtactgattcaaaagcactcatctccatcaagtcatcttctgttgattcctctggtgtggtgtctattcattcttgaatttctcacagattcatatcttgaaagaccatatcccccaccttttgttgctgaattagagatgttgggtttgcaggcaagtagaccactttgacaccttcagtgttgaactcatgggttctgggtggctaggggcattgtccaaaaatcaaaagaactttgaaagaccgtctcttactggcaagatattacctgacttcagggacaaagtaatgatagaaccaatccagaaaaagtgttcttgccgaggccttcttgtacaacaaaaaaactggcagtgggtattgatcttttccctttaaggcttggaggctagcaggcttatggatgggggcagtcctatttgtaaacccaaacatacaaacatacaaactatgtcaaaggcatagcatgggtactgtgaaaggagggtgaaaacacaaagttgacatcacctctgacctcaaggagtgctcagcagactgagagagacaagtacatattttcctgaaggagggcactggagtgatggcgtgtttagaatgtgcaagttgagcggtcactgagaggcagctcagcagagtgctctcgcaaggattgggcgggcaacttcccactgcgtgcgatgtatcttaggaaagccatttaaaataggagacggttactttccatcaagtccctggtatggtccatggaagcagggttgtcagtctcatttcagcattttagaggcttctcagggtttggaaatggaagaagagaagcagcaatatgtatgcattgcagagacacaggcgagccccaatttaggaggttaggaggtcagtgctaagggccttgttttctttgcttagagcatgagttgccatcttctctggacagagagtatttggttgcctaaaggtaaaatctaaattttgctctgggacaaattccaaaaaaaattagctttaatcaaatttacttttactttatctttctgaaccttcaaggtccaaaagcattggttaataattctgcttctaaacttaacattgcagcacagggcatgttctgcccccaaggcaaagaccataagctactgttgtctggaaaacatacaaatagatatctcagcaaaagctactcatatattcttgttcttttgggtaaatcattgtcagtgactgattttttttttatgaaaggataaaaacacgccctctattggggtcaggttttgtgctggtatttctcccacctactgtatcataggagcttagattcccagctgcttgctctcagctgcagttctctgatggcttgcacagggtggaccagcccccttcctctatgtgtgtgtctgctgctgacctgtggctttgccgaggcagggaagctactggtagtgcccatggatgggagccactggttcaccatgaggtcggtggtggagaaactcattctcagggggcatgaggtggttgtagtcatgccagaggtgagttggcaactgggaagatcactgaattgcacagtgaagacttattcaacttcatataccctggaggatctggaccgggagttcaaggcttttgcccatgctcaatggaaagcacaagtacgaagtatatattctctattaatgggttcatacaatgacatttttgacttatttttttcaaattgcaggagtttgtttaaagacaaaaaattagtagaatacttaaaggagagttcttttgatgcagtgtttctcgatccttttgataactgtggcttaattgttgccaaatatttctccctcccctccgtggtcttcgccaggggaatactttgccactatcttgaagaaggtgcacagtgccctgctcctctttcctatgtccccagaattctcttagggttctcagatgccatgactttcaaggagagagtacggaaccacatcatgcacttggaggaacatttattatgccaccgttttttcaaaaatgccctagaaatagcctctgaaattctccaaacacctgttacggagtatgatctctacagccacacatcaatttggttgttgcgaacggactttgttttggactatcccaaacccgtgatgcccaacatgatcttcattggtggtatcaactgccatcagggaaagccgttgcctatggtaagttatctctcctttagcaccttaagaatacttcacctttggaaattaaaaaaggattctttactgaactgtgatttgacattttcatttgtttcatttcaaatttctttccagtttaacaaattattttgtgccaatgcgtgtactcgtcagtagcaaattttataaaactgcccttcttgaagatatgtatttataacttataaaattgtggaacatattcagcctacatttttaagtaccatgtttagaaaagtaccaaaaaccacagtaagaaatgaaacttcccttttttgttaattctatatgcccgccccagaggaaatggtcttagttttgtgaacattcttttaatgtttttaaaaaagtactttaggtatatacaatatctaatgtaaattctcacacctattttgttaaaataaaatctagtattgggctggacatattcttcttttctttgcatttttcacttgccaataaattataaatacctttatagaccaatacagacagatttgacaagttctattaataattgcataaaatactttactttggatgcaatgtagtttttaaccaattaatattgatatagatttaggcattttgcattttttgtctttatgaatagggccgtgtaaacactctttaatactttccttacatgaatatatttccatattcttgcttttatcttagttgactagagccctacatgtagggttacaggatttccatgaattgagaaggattggcatttttttgctattgtgtcttcctgttcaggaatatgtatgtctcactatttattcagatcttgttttatatacataaataaaatttttcactatataagcattttctgtttcttattaacatttattcctcagcatttcattatttttgaaactattgggtacaggacaatttttccatttctacatgtaactgactatgggtaattaaggttttgttttttgcatatgtatcttgtatccagccacattactaacttatcttattattttgtagtatacagtagatgtacaatatacaatgtcaactgcaaagaattcccttctctgatatttataccacttattttgctttgctggagcttatacttccaaagcactattgagtaatattgtgagagtagccagtttaaattttaaatagggattcaatcacttgtgattgaaaagtccatgacaaataccagaataacattcttagcaaatgtgtagttggctgaatccagattaaacacctaatgtctaatctcagtatattattttggagggatggagtatacaatttatctattgttctggctccttacaaggttcagtagacttggtaacacagtcatattctctcacatattggcagatgtttggtgaaagagtgactgttcagccaactcatgggaaagtgaaataatgctctttctaaaaagcaggaggactacagttgtaggcctttcaaaattaggcatgactttcggatcttcacaagactaggctaggagatgcaaatggcagaaatctaagaggttagacttgtctaagcacttttctcccctttaccctccataaattatagtatcctccattaattgtagtaacaggcaccacttatgtgttgcctgcaccccacaacctttggctgagggtaaggccctgccacttcctgaacccacactgaatttattgtgcctcacagcgtcacccagaggcctttagagatataaaaacctatatatgattttatatcacctatgatagagggttatctataaaatatgaaacatcaaactatatatggtttcatttattttgattataaatatcttttatgagatatgaaataaatgtgtttatgtgtctattaaagaatatggatgtatgaaagtttttatacttgtggaagattacatatattaatgtatgtatttatgactatacgtgtaaagccagcggagttctcacagaggaattcagaactcaaagaaggctttccggcaaagagccttggatatggcccaaccacagaagtaaattgtcattgacagaaggatggacacttcatattgctccttccttgtttcagatgccaggatgtgtctgggaaaagcatgcagttggttacatcttgctgggaaacaggattcagagtctgtgtcttatctgtctgatgagaaggaagcattacttgatgatggagtatg

SEQ ID NO: 39248 - DNA, 502 bp, Homo sapiens
atacaagggtctgaaagagttagcaccttagaagcaaacctctccatagggtccacgtttccagaccttcctattcccaacatgaaattaccttcatgcacatctttgggtctctcctctattcaaaatgccagctatcctccatttactttttgggaaatctgctcttgccaacagagatttgttttatcttaggatctacttctttcaccccactggaatatgtcccaagcctgagtcattcagcctgcagcaatccctgagaaaaaaaaaaaatcggcctttgcctggacactcaagtgatacctgaggacaccttgactcctacagcaccaaccagggcaggcctgggtctccagcggagctactctttagggatcgtcattatgacgaacagacatgccagattcctctggctagtgtccagtgcagacatacacacacacacacatacacacacacacacacacacacaccattcttagtacagtcaaagctcaca

SEQ ID NO: 39249 - DNA, 8697 bp, Homo sapiens
ccccatatcttgttctttgtactttttcctctggctattcatccgtattgtttgcaatatcctttgtaataaaccaaacctagtaaataaactgttttcttcagttctgtgagccattctagcaaatgattgactccaagaaagagggtgtgtgaacctctgatttttgccaagtcagacagaagttgtgggtaacctggggacctactacttgcaattggtgtctgaagtgagggcagtcttgtaggactgagcccttaacctgtggggtccgtgctaactcagaattcagttcagaatggaattgaattgtaggatacccagctggtgttagagaataggtccgtgtgcaagaaaaattcccgcacatcatggacataacagacaacgtcaatgatgaggaatccagcaagttcgggatagagaattggcagggggtcctcaggggtctctccaagtcatcttcaaagtgttgctataacttttcagagagggagaagcagacttgtggagctgaagagaaacacccagaagctcaggtgaaagctgacacggccatagttggttcatattaaccatgtgattaaaatggttaaatattaatttgggttcttacatatcaaagggtaaaattcagagcaagggagaggtagacaggacctgtgaaaagcagtggttagtttagggaaaatacctaggagccctgtgatttggagagtgaaaactctttattaccgttgttactttaactctttccaggatggcctgcctccttcgctcatttcagagaatttctgcaggggttttcttcttagcactttggggcatggttgtaggtgacaagctgctggtggtccctcaggacggaagccactggcttagtatgaaggatatagttgaggttctcagtgaccggggtcatgagattgtagtggtggtgcctgaagttaatttgcttttgaaagaatccaaatactacacaagaaaaatctatccagtgccgtatgaccaagaagagctgaagaaccgttaccaatcatttggaaacaatcactttgctgagcgatcattcctaactgctcctcagacagagtacaggaataacatgattgttattggcctgtacttcatcaactgccagagcctcctgcaggacagggacaccctgaacttctttaaggagagcaagtttgatgctcttttcacagacccagccttaccctgtggggtgatcctggctgagtatttgggcctaccatctgtgtacctcttcaggggttttccgtgttccctggagcatacattcagcagaagcccagaccctgtgtcctacattcccaggtgctacacaaagttttcagaccacatgactttttcccaacgagtggccaacttccttgttaatttgttggagccctatctattttattgtctgttttcaaagtatgaagaactcgcatcagctgtcctcaagagagatgtggatataatcaccttatatcagaaggtctctgtttggctgttaagatatgactttgtgcttgaatatcctaggccggtcatgcccaacatggtcttcattggaggtatcaactgtaagaagaggaaagacttgtctcaggttggtgggtttatttcttttggactgccttgtttcttccaggctctgtcctccctcactcatttggctccttgagccgactgtcccttggaggatttcctggagaaacggtggggggaagtgatacccggctcggagcagcgggaacacataggagacctgaggctgaagtgatacagaggcattcggatgaagacagggctcatgcttggcaagagtaggagatttgcttagttggataatctgggacagtcacatactcattgaatgagccttagaaatgtcccagttcaaacagaggtgaaggcttgactaagggaacaggtccaggttaaaatccattttcccaactctgtcccatgctttgtctctggaccttgagccagggaccagcgaactacagcctgtgagcccaatctgcccaaaggcctgttttttgtttttttttttccttttatgttgagacctgtttttatatggcccagagctaagaatggtttttgtagttttaaaacaatttaacaatgaagaatatgtgccacagaagtatttggtctgcaaagcctacacatttactgactggccttttcagcaaaaggggtatggcctctgacctaagacaagtgtttacagatgccctcctgacatgtaggaaaagggcccagagttactttggaaaataaaaatctgtgagttttaaatttcaatgtaaatatttacaactttgaagggcttcaggcaactccctctatcttttatgcctcaattttcttttccagttccttttttatcagagagaaagcctcaaacaggtcccaaagacccttacctctcttctttacacctgctgatttctctgttaacaatttgaacagttggcagtagccactgtgaaaaggcaagggtgaggggatggggataactgaaatggttccagggattctggggcatgaaataaaaacatagaatgtcaggattcttttaattgggacataatatagttgtacacatttggggggttcatgtgatattttgatacacgtatacaatgtgcgatgatcaaatcagggtaattgagatatccatcaccttgaacatttattccttccttatgttgggaacattcccattcttcatttctagctattttgaactgcagtatacattcttgttaaccatagtcaccctactgtgctatcgcactttggacttactcattctatctaatggtgtttttgtgcccattaaccaacccttttcttttcttttttttttttttgagacagagtctcactctgtcatcaggctggagtgcagtggtgcgatctcagcccactgcaacctccacctcctgggttcaagcgattctcctgcctcagcctcctgagtagctgggactataggcatgtgccaccattcccagctaatttttgcatttttagtagaggcggggtttcaccacgttggccaggatggtctcaatctcttgacctcgtggtccgcccaccccagcctcccaaagtgctgggattacaggcgtgagctaccgcgcccggccttcttcttcttcttttttttttgatcaacgtgctttattggccctttagatgtttttctcttttctatcaaagtttttggagtattacaaattttatttcttttttctttttcttttttaaattttaaccaaccattttcacccccccttccctacttaccctttccaccttctggtaattaccaatgaactctctacctccatgagacccacttttttagctccacatataaatgagaacatgtggtatttgtctttctgtgcctagattatttcacctaacataatgacttccagttacatttatgttgctgcacatgacaggtcttcatccttttttatggctgaataattttccattctgtatatgtactatctgtgagtggaaaacaaaaccaacaaaaaactcaaagggtttttcctgttttctcactcaacaacaaacaacgcagaaaacttcagtgaacaaatgtgtggggttttttttctccacacaccaagcaagcaggcaattctgccagataccagctgggtgtcctctaattcagttctgaagatgtccacctgaagatagcatcaggtcccacagacatggggctcagtccctaatttacatttgaagaatgtaaattagtacagccactatgaagaacagtatggagagtcttcaaaacaaaacaaaacaaaaagaactagaactgccccaatatatcccattgctgggtatatatccaaaagaaaaaaatatatattgaagagctatctgcactcccatgtttattatagcactattcacagtagccaaaatatggaatcaacctaagcacacatcagtgaatgaatggataaagaaaacgtaggactgtaatatcgtgaaatatatatttggtcttcatcctcatttccttatacagatctttcacttccttccttaaatttattcctaggtattatatattctttgtacgttttgtaaatggggttgatttccttttcagttttttctctgttggcatttataaatgctactgatttttgtaagttgatcttgtatactgcaactttaccgaatttgcttgtcagttctaacagcttttgggtggaatgtttaaatttttctgaatatattatgtcatctgagaacaagaataatttgacttcttcctttccaacttggatgccctttctttctttctttctcttgcttaattgctttggataggacttccagtactatgaagaataacagtgctgacagtcagcatctttgtcttattccagattttagaggaacagttttcagttttacccttttcagtatgatgttagctgtggatttatcatatatggattttattgttttgaggtatgttccttctgtagccagtttattgagagtgtgtatcataaagggacgttgaattttgttgaatgttttttcagcatctacaacatatgagttctgtcctaaattctgtcaatgtattcatatcaatatatcaataaatgcatcaggattaattatctttttaacatattattggatttggtttgctggtgtttcgttgagatttttgcatctatgttcgtcagagatatgggcccgcagttttctttttttttgttgtgtccttgtctggttttggtatcagggtaacactggtctcacaggatgagtttggaagtattctctcctcttcatttttctgtaatagtttgagtggaactggtattaattcttttaaaaatggttggtagaattcagcagtgaatccatctggtcctgggcttttctttgatgagagactttttattactgcttcaatcttgttacttatattggtttgttgaggttttctatttcttcttcattcaatcttggtagattgtttgtgtttggaaatgtatccatttcctctaggttttctaatttgttggcatatagagttcacaataatcgctaatgatcctttgtatttctgtggtgtcagttgctgtgtttcctttttcatttctgattttatctgagtgttttctctttttcttagtctagctcaaggtttgccaattttgtttatctttttttttttttaaaaaactttttgtttcattggtctttgcattgtttatttagcctcaatttaatttattttttccctgatctttattatttctttccttctacaaagtttgagtttggtttacttttgcttttttagttccttgaggtgcattcttaggttgtttattcaaaatatttctgctttttggatgtaggcatttattgttaaaaacttctctcttagttctggttttgctatagcccatagattttgatacattgtgtttccattttcattcgtttcaagtaatttttaaattttctttttaatttcaagaaaatctaattaagaagttagtaagcaaaagttatgcatttatttaatgatttcttaccattgattgaatcaaatctattgactccttctcctagaagtctagggtattggaaaaaagtaaatgaaagctatttattcttattacaaagaaatatttggtgtaagaaggaaaaaatatcatttctgcacattggtaccaattatcttattttttcaaaaagttgtactcagttatattgagaaactgggctctaatgaatgtactttttgagccctgtgaccctgtatctggtgcttgaccttgtttgtgtctcaactgtattcccagcatgtcgtcctagagaacattctgtattatgatatgtaattatcaacatgcacttttaattattaggaattaaattaaagtgatcaaaatagaatttcttttgtccaataatcaaaccatttcaacactatgaaaaaaaatgtgtctttggacagatggaaatgtctggaaccagatagaggtgtcagttgcaaaacatgaatgtgctgaatgccatgaaattgttcactttagcgtggtgaattttatgtgacttcatcgcaataaattatttaagaaaagaagatatatcacagatcatagaaaatgaagccctgatttatagcttaaaaatgcagtcctcattaggcaaatcacataatcggcaatacataaagtaaacagaacacgagtggccaacaaaactttaagaacatgtttaatttcagaaataatccaagaaattcggattaataaacagtggaattcaattttgcctaacaggttagtaagcatgctttataggtaactattggcccaactataaaacaaatacatttctaaaaaaaatgtgcaaagccttttgaaaaccatagcttggtgaccattttttacataatgctatgattcagaaagaaagagtatcctttctcatggtaacctctgggctcccagcctcgccttgtggaagagtaaggcaggatcacttccctcttattcccatgttggtgtgactttgcgactttgaccaaagccttacctgcctcctctgcccaaggagggacgtggccgtctcagagggctgcttggtttctgtccaagctggcccttggggaagccctttggccacccaggtggtgattcctgctgtaagaacatgagaggctgagccaccaggcagtcccagatgtcctgaaacaacttatcccagccctgcccagggccttctctctagccctgtgcacctcatcacctgccccaaaacagttctacttatgtcagattctcatgggtgccttgcaacctttctgtctgtctctctgatcctcacttcttcttcagaatctcatgctgttgcatgaaaaaaaaacaaaaacgaacttttgtttttaggcccctttcctcttcctataggggcttgaatccaggccagatgctgggacactcttatgctgtcctttttgctattttgttgagtttcatccaccctagggctaacctcttttcttattggtatggctagatttcaaatatctcaattttagaagagaatttagctttgcatttcattattagaagggtcattggagtgttttccttagaacaaaggaggtcagaagtaaatcctagtctcttctacttgtaatacaaagaactgttcaagccttccgaaggacagggccattcacatcatagagccaggtcatggccagagctctggctctaggacatcctttcttcccagcctggtctatagaaaggaatagaatgcaagctcaggcctagagcctagctaggcctgaatacaggctgaaactttctcgctgagaggtgataaaaacaatgaatgtggttttcttgcagcattttttacggagcgttttcccagaaaactagaccccagttcctcaggactagttctgttcccaagtttcctcctctcatattctggagtcatctaaatagtagttctcaaatagaactaatttttcccctaggacagatatgtctgaagacatttttggtgttgcaattggagaggcgaaatagtcagtaggatatacgtagaggccaaggatgctgttgaaagttgtacaatgtgtgaaaaatacccgtcccccaactcccaacaaagaattactctggctcaaaatgtcacgagtgctgaaattgagaaactctgatctaaatcaattccaagtgaatccagtggtgtctacccagcaaggcccccagcctggaggtgtggagggcagcaaggatcctgtgcccaccctctgagctgtttgtctccctataggggtctttacaaggaatgctcattcaggctgaaatctcagcctttgttggctgagctgtgggttcattctaggcaactcagtagaacaaaagccccaaaatgccaagtcattcttaataggcactttttaaaatacgtgacttaggccaatgtctacaatgcctttaaaattctgcctctctttcaaaaccctgtgcttatctttatggctgattatctggggcatttccaggcatgtggaacattttggcagcagtgtttctgttaatagataattatctaaagagtagctgaatgctagaatgattcagctaaaaaaagtattcaacatgagtacataaaagcctagaaacttgactgtctagtaatttagataactctaggagaatgagaataaggggttataaaaatataactttattatgatgcaatttattatgatacaattcactctttttttgggggggttccagtaagatttaatgactttaagtgtttacatatttctacttttcagcacaaattcgtgataatatataaactacactttgaatgtttttttctttttttaaaaattttattattattatactttaagttttagggtacatgtgcacaacgtacaggtttgttacatatgtatacatgtgccatgttggtgtgctgcacccattaactcgtcatttagcattaggtatatctcctaatgctatccctccctcctccccccaccccacaacagtccccggtgtgtgacgttcctcttcctgtgtctgtgtgtgattgttcaat

SEQ ID NO: 39250 - DNA, 2397 bp, Homo sapiens
cttcgtctgaaaaaaaaaaaaagagagagagagagagaataaaggggaagtatgcattggtactgccttttataactacatgattactattatcagtgctttttttctgtatgaattcagattattctatggggtcacttgctttcaacctgaagaacttcctttagtatttcttgtaagttgagtttttcagcaacacattctctcaatttttgtcttattacatggggttttgcttttattttgtttgtgcctttaaaatgatactcatcagagacttgtcttcagaggtggctcataacttatccttcagaattgcacatattttttagcagacacacatgaggcaaatttaatgataataaatacctttttaagaatcagggtggggagattaccttcagctgtgaagagcagctggtgatattgcttgtggcaagggatagaaatggtttatggatctgggaaaggctctgaagagagaagaaactgagttgacagttctaggaagttgaaggtcttctcataaattatagttgtgagataatattcacaacgactggtataaaaattcaccagtatattgttatcttttaataccctgagcaggtaggtcggtaacagatcagctgcatactttgagtgtcttagtgcaaaatgccccttgttcaaaaattattaagaatttcaggccgagcacagtggctggagctgaagtgggaagctgaggcaggcagatcacttgaggccaggagttcaagactgccctggccaaaatagtgaaactccttctctactaaaaagacaaaaaattagctgggtgtggaggtgcatgcctgtggttccggctactcaggaggctgaggtgtgagaatcacttgcacttggacctgggaggcagaggttgcagtgagccgagatcacgccactgcatgccagcctgggtgacagagctagattctgtcttaaaaaaaaaccaagaatttcaggacactgacagcaaagtattaaacaaagcatgagaaccttctaaatgtggaatgtggtgtgtctgcccaggctgctcctccacaaagctggcccaggcaggggcaaatgtgcagctgggagagtgagagaaccagggcagctggattgcccaacctcaggggtggggcccagtgccaggtactatgtagatagtgccttttggaactattcaagctggtgaccctgaaaaaacattcttccaatttaggccattgtacaaaagcagaggccaagtacatttaccactcaaacttcacgtggtctttcagccacagacttggtcaaagcaaatgaccattgaggtttcaccataggctgggtacatgagggtgtccaggctggtgtgatgctgaggattttacagcggcttagaaacacagctttttttctaggtgtttctcaaaccttagggtaagagtggagatgggaggtggacctaagtatgtgataagaagactagagaaatgagtgtttctactgtgtctgtgccccatcactgtaggtctgatttctactccccaccccactccttcttgtcactgaaaagtcatggaattctggaatctcagggttgacagtgactgtgaagcagagtgccgtacactggtatccatctctgggagagaaataccatgcaccaattaggttgggttgccaatcccagggcaggactctaaacacctcagcagtctttactaagattcctagacctggcacttcccagctctggttggaggcattttacaatcctagctgccagagtatgagtctggtgagatggaatgcttgtgcaagtcaggcaaagaaacttgattcttcacagataggcagtaagaatcaacaggaacctaggatccatggtcagccagcccccaaggtagaggaagctgctcaggtggacagagtcccatctgcatgtgctccactttgcatggcagctgagggacccccaaaatactctgcattaggctttctatcccggaggtcactgcagtttatcagcacccagacatccatcctgggtgcctgccctccgttctattccctttccatcttttctctgacttttgtgatgattatttctcttgtgtttttcttcatcagcatttattttaagttccagggcacacatgcaggatgtgcaggtttgttacatagctaaacatgtgccatggtggtttgctgcccagatcaacccatcacctaggtattaagctcagcatccatgagctattctttttgatgttctctctccctcgactatttctttgcttttctttacaattttgccacctaaatttgcatctgtaaataatacagatgattttacctgtttcggtacttaacataaatagaattttactgttt

SEQ ID NO: 39251 - DNA, 894 bp, Homo sapiens
tggattgacttggagaagagcctgaccataatcttcaggatgaaataaaggcctggatgactgaaataaagactggagccttcggcattcagaagaggaattcagactgtgcaagatctgaggccaggctccagctcccccagtcccttggtgagcaggagctccctgaacccaccatgggtctttgctagggttgtcttgcccatgtgtgctttagatagcagcacctcttcttccatggtgtatatggagaatcctcaacaaagtcttcccaagaatctgatcatcacatcttgagctcagcctccctgcagctttttctatattgacagccacttcagagagagtcctctctgatccttacaagaaatatcctggtgcgaaaaacgaccaaaaccacatagccagcctccacgctgttcagagaaagctggcttagcaatgttgtatggtttttggatgcgctgcgttactcatacatgagaagaaagtttcaagggttagcaaatagggtcacatccagcagagagcatatgactgggggctagggcaatggtgactcctcagacctcagctgctgcctgataaacatggttaacagagaagtaggagacagtgacatgaaatgggtgttcacagccttgtgttgggaattggatgagaaacaagagcttgaacttggatgttccccagagtgagcacagggtcagacgtgtttttcaagatagtcatgatcggtcttttccagggtggggcccacagtgaaaaacagtgatagattaatggttaataattaactagaggagggcactctgtcttccaattacacgttgatttgctaagtggctcagtgacaaggtaattaagatgaagaaagcaaatgtagcaggcaca

SEQ ID NO: 39252 - DNA, 915 bp, Homo sapiens
aacgtgggatgcagtgattatttccactagaactgctatatcatgaccatgaattttgggggaatttttttgagatctgagttctcttcacctccttattctctttttgacactggattcttttctttgataaattgtgaggcaatacactagtaaaggtcactcagttctaaggggaaaatgattaaccaaagaacattctaagatttcctatagggtattaggtctaatggggatgtgttatgtcaccagaacaaacttctaagtttatatagcctctagtgacataacctgagacccggacttggcacttggtaagcacacaatgaacagtcatagaaagctggccgagggtagagttcagtgtgaacaaagcaatttgggaacatcaaagcaagtttggagaacaacaagtgatccagaatggctggagggtaagaggcagagggagggggcaagcagaaggggtggagaggaggaatgagcttagacaggggggctggggtctatcccagagttttgagagcaaggcagaggactctgaattttcttctgtgcccaggaagctgctgaccaaggttccagaagtgttggtggggtggcgtttttcagggagcagctgaggcagtgattcagaagggacagctgggggttgggcaactgggggacaggggccctgaaatgggaccatgacagctgggtctgagagacagtggtagaaacatccagattcagcacttacttgctggcttggatgcagggtctagaacgaaaagagaagaggagtcacttctatacagaaacatgtccagagtgcttactgtctgcaaaactgtggactggcacctgagtgatagcatgattccaaagccaaaatcttgcctgtaaggaatatatgtataggatatagctata

SEQ ID NO: 39253 - DNA, 785 bp, Homo sapiens
cacttttcttgactgctaaaacaaccagggagatcctctcagacaaaaggaaatacagcactatttactgtatcgaaaccattaagacttgcaggccgtgtgtatagcactggggataaacatgggatgcagtgattatttccgctagaactgctatataatgacgatgaattttggggggactttttttgagatctgagttctcttcacctcctccttattctctttttgacactggattctttgctttgataaattgtggggcaatacactagtaaaggtcactcaattccaaggggaaaatgattaaccaaagaacattctaacggttcataaagggtattaggtgtaatgaggatgtgttatctcaccagaacaaacttctgagtttatataacctctagttacataacctgaaacccggacttggcacttggtaagcacgcaatgaacagtcatagtaagctggccaagggtagagttcagtttgaacaaagcaatttgagaacatcaaaggaagtttggggaacagcaagggatccagaatggctagagggtaagaggcagagggagggggcaagcagaagggctagagaggaggaatgagcttggacaggtgggctggggtctatcccagagttttgagagcaaggcagaggactctgaattttctgtgcccaggaagctgctgaccaaggttccagaagtggtggtgaggtggggttattcaggtggcagccgatgcaatgattcagaagggacagctgggggttgggggacagggg

SEQ ID NO: 39254 - DNA, 5499 bp, Homo sapiens
ttctaaaaagccttctgtttaatttctggaaaagaagcctaacttgttcactacatagtcgtccttcttcctctctggtaacacttgttggtctgtggaaatactaatttaatggatcctgaggttctggaagtactttgctgtgttcactcaagaatgtgatttgagtatgaaattccagccagttcaactgttgttgcctattaagaaacctaataaagctccaccttctttatctctgaaagtgaactccctgctacctttgtggactgacagctttttatagtcacgtgacacagtcaaacattaacttggtgtatcgattggtttttgccatatatatatatataagtaggagagggcgaacctctggcaggagcaaaggcgccatggctgtggagtcccagggcggacgcccacttgtcctgggcctgctgctgtgtgtgctgggcccagtggtgtcccatgctgggaagatactgttgatcccagtggatggcagccactggctgagcatgcttggggccatccagcagctgcagcagaggggacatgaaatagttgtcctagcacctgacgcctcgttgtacatcagagacggagcattttacaccttgaagacgtaccctgtgccattccaaagggaggatgtgaaagagtcttttgttagtctcgggcataatgtttttgagaatgattctttcctgcagcgtgtgatcaaaacatacaagaaaataaaaaaggactctgctatgcttttgtctggctgttcccacttactgcacaacaaggagctcatggcctccctggcagaaagcagctttgatgtcatgctgacggaccctttccttccttgcagccccatcgtggcccagtacctgtctctgcccactgtattcttcttgcatgcactgccatgcagcctggaatttgaggctacccagtgccccaacccattctcctacgtgcccaggcctctctcctctcattcagatcacatgaccttcctgcagcgggtgaagaacatgctcattgccttttcacagaactttctgtgcgacgtggtttattccccgtatgcaacccttgcctcagaattccttcagagagaggtgactgtccaggacctattgagctctgcatctgtctggctgtttagaagtgactttgtgaaggattaccctaggcccatcatgcccaatatggtttttgttggtggaatcaactgccttcaccaaaatccactatcccaggtgtgtattggagtgggacttttacatgcgtatattctttcagatgtattactttggatcgattaactagccccagatatatgctgagcaagcattctgagataatttaaaatgccctcttttgttaatttttgactcctaggtttgagtctgtctttggcatcatcttctggatgatttcttggtatctgagatttcgggaaagcattccttggacattttactctgtgtgctccagtggatagtaatcaattagaaacaacaagctgttaaatgccataggcacagaatgctgggtttggggcaccctgcagaaaactcagttgaagcctgcaccttgccctggattcagtcaggcaggcaatgttcaggactgatgaaatcattctttgatgatgatagatcctggaaatgaaagttgcctttgtgaccctggttaaagctccagtttctaaatattctgataagaagctaaatcctgcagtccgttctcttctaatgagtgaatcaccagacagtcaggttctgacatgatacagaaaggttgtaggtttcattctcaagctattaggtttatttttcccctacagagtttgaagtatgcaaaaagtagcattcacatcctcatcgaaatctcagcagaggatagaaaagaacaggagaggctccttcagatggagcgttagggaattactctttgaggaggtgacatttcagagagcgttcattcacttatcctgcaaagattggctgaggatctactggcagcccaggcacttcccaggtgctgcgtctggctcccattaaggggactgatatcaccttcggaggtgaccttatttccactatacctccaatgtgatttgtattttattttttttaattttctgtgcattttccttcatagcacatcaaatatggcagccatttcacttagatagttgttgattgtccgcttcacatcatgagccatgtggggacctgtgtgactttgcattaatcacatccactgtatgcggcgtcctcaacacctgccaatgggtctgcatgtatttggcgccccataaatctcagcacctaaggcacagaataggcacccaccgaatatgtgttacattaatgaatgagaagaaaggtgccaaccgaggtctagttaatgggtcgagagtaatccacaatagctctttttagttctttgtactccagctattacataccaatatgtatatagaaacatatgtaaaattttttggttgctttttctacaaaatagagtaacagtgtattcccactgcccacttaccgataatgtcatggatatcactccagttttaaatgctattactttttaaactatgaaatagtatttcatggtacttgtgtaccacagtgtattctgctggagatctagtctagttccccacagaggaacattacaatttgtattccaggagttttgttgttgtgacctcaaacacttcctttaaaaagataagctattttgtagtttaaaaaacatttgttctgtttctttctcattcatcttttcttaagtattttacacggttttttttttttggtcactactgtgaatgtgttatttttttgcatttctatctctagctgattatctactcattactcagctatctcatcaaaatattgattttcataataaaaaataataggcagtcatttgctgataaagaaattttggtttcttctcttataaattccatgccaaatatcagggctattgaatttattagaatctctaaaaacagttgaataattctggcaataggaaagatgcccgtcttgctgctattttagtggaaattgattatcatttcattattttgcattatgttagccattgttttctgaacaggctttattgatttagataatttccttctttgcgtgaggatgtttgtaggagaggcaccgaactttatcagctgcctttctggcatttattgatataaccataaaagtctaagtggtgaactgtgttgactacatatttgttgttgccttgtttggtgcagtcaggcttaggtgtgaaaatatgtttttaaattgtaccttttagtaacctgttttgtcttgttgcatgttttaatctgaaattccactttttggatattaatattaccacttctgtattatttttgtttacatttccctagcacatctttagtactcctttgtcttcaagctttcttcctttttaaacaacatggcactggtatttttaatccagtcaggcagttgctttaataagtgcattttgcctatttgaatctaacaattaatagatttgattgtaactctctcagtttactttatgtttagttgactttgccattctcctttttccggatttctactggttggtcaagttactgttcttattttctctttcttcctttgttaactaaaaatgccactctgcactaccattcctcttgtgttgatggtcctattctcaatactcttgataaaactcctgaactttaagaataaagataaaacttttattgcacaaagaagtccatagagaaagcacaacctggcattggcgtgtctttggtgtgtctgaaggaaaagagatagtggaacaacattgggagaaaaggaatgaaactcaagaattccaagatgttcctcccctgccagggtaagatagcagtggttcacagacaatcgcaatgctgggtctgagaaaaataactaaacagaagattagtgaggaccaaggcttcgagatggccaggagaggaaagcttgggagcagggaaggttgagatatatgtgggttactgggaatgcgtgatggtgaagtcacagatgacccacatggtgtctaagtgctaaagaagaattctgggaaaatgaaatgcatttgggaagggaaaatctaattaaaagcctaaactaaaaatacaaaattcttggtaaagtttaggagttatgttaaatgtctcattttggctggtgaagtctcatcagaacagggaaattctctcattcaggggcatctcatcttttctttgaagggaatcaatggtgggggattggagtgttattttcagttaatatgttgcttcactctttggtcattccggtaactgtgaagtcagggtgaagtttaagggaagctttgccaagtaggggatggacttcacctttattgagcctcatagtagctggctcaggtaggagttggccgtgatgacaacttctctgcagtttgccctgcgtgaatctccagatgaacttttgtgccatttaaactttcgtgatctcctgctatttaacttcgaatgtttatggacctgtgggttcaattttgtgtgaatcacatcctgctgattgctgagtgggcgtgtgggagggtgtgcctggaggagaacttagactcggccttttccagatgagcttcagtgtaagagtgggtttcatgaagagcaaaggtcctaggaaatttaagtaagccatttaccaacgctcagaagaaagaacttgaagagcacttggaaatgagctgtgtctccccaagaaagagggagagaaagaggggagagatgtggtgcagaccctagggaggaaggagttcagaaaaaccatcctcagggtgttcttgctacaaaccaaaaaatgcagcatggtggtggggaggatgactctgtcctccctgacttttagatgagcccaagggaaaaggcaaagacaaagcccttaagagccagaggactcacgagggcctggggctggtgagagtggcggggagagagggctcaccttgggagaaggatggtcagtgtctggggctttcctggtcatgttccaaatcaggcttggcaggagtcctgctgtgcaaattgcgtttgctgagccctgtcagaggtctcctgtgtctcacatctagggtgaccagcatcctggcttcctcaggactgttcaggttttagcactgaacatcacatgtcctagggaacccctcagtttgggcaagccctgccacatcacacaatcatattagtgccctcagtattctttgcaaacataaaaccatagactcagtaatcccattactgggtatatacccaaagaaatataaattattctactataaagacacatgcacatatttgtttattgcagcactattcacaataacaaagtcatggaaccaacccagatgcccatcaatggtagattggataaagaaaatgtggta

SEQ ID NO: 39255 - DNA, 966 bp, Homo sapiens
cccttccccaaatgggtgtttcagagcagggtttgccctatcaagttgtcctttacactgcccctgggcagccccaggtgtgcatgagagcacagaggtgtgagccccacggtctcctgtccctcagatccacctaaagctggggcagtttggcacaatggtcggactcattgccccgtgcacctgtgatgcccatcaaagaacccgcatggcctcaatgaatgtcctgtccagcctgctagatcttcacggtatgagagggcaggacatgaggaccagctcctctgggagggagagagggctgactccaggagtatgggctgcggcctgccctggagggaaggatggcctctgtgcaggcaggcatggagacaaacacaggtgaccatcagagggagcagtgaggggagagttcaccaacaggccatggaagcttccagaaggagaggttcattagcccagattgacccatggagggcatgtgctgggcactgagggcctggctgggagaaagtcagctcccagatgccaagcatgtgacagagctggccagagctgagttcaagggagagcaggcctctgagctgggcggagaggtggtgcgggcagaggccgccacagggaaggaccagtgagagcaaaggtcagaacgcctgggacgttcacatgctggagggtggctcaggcctgcaaagccagggcaggaggtagccacgaagggggggtggctgggccttttgtccctgctggtcatttctgaagttgtattcccgacagcaagccagacctgctccttgtggggcccttccaagcagaaggagcttgagaaatgtaagggggacctccagagcacagatgtggagaagatcttctgtgcatcctccagaatcgccaaggtgacagccggggagcctgcctgggctgccaggctggtctcagggcccttggccgtctctcagggaggga

SEQ ID NO: 39256 - DNA, 710 bp, Homo sapiens
ttgtgaggacatggtccagtcatggctgaaggccttctttctgggggaactgccacgccaacctgtgactctaggatggcagtggtgtgcaagagaatgagaaccttttattcgaacccttcctgctcagagcagatatgagggcagaaagaggaggggctcgcccccagggccacacagggtctagagtaggccagggatgggagttacttctggggtcctagtcactccggagccgccctcactctagtcccctttgtaaaaaggagatagacattgactgattcactgacaacctcaaccaagtccccaggaagaggagggagaaacccagagatgttacgacatctttccggggttatcttgccaccagggtccaggcaccgatgtggccctgcccagctcttggcaaacgtcaggcaggggtggggccgcctccacgacctggcactgtctctcctctgcaggctgtgcatgcagcacgtggagggccacaggcagaggctggccgagctggtgctcaggggcatggactcagaagtcctgagctgccgcatcagcagcacagcggtctgcgtggaaatgaggcaccgggtgtgggcggggtgcaagcggaggggatggggtccctggattcttctggggatggcttgtctccaaggcatgggagtcggggggacaggcgagcgcccctcctctgagtgctcatt

SEQ ID NO: 39257 - DNA, 595 bp, Homo sapiens
aactcctgacctcgtgatccacccgcctccgcctcccaaaatgctgggaaacaggcgtgaggcaccgcacctggccaatctacgattttcactgggctcacgaagcacatgatcttcggctacccatctatcccagcttcagttccaaccgttacaacggatcagctattctgggatctttctgcctttttcgcctttcccaacaataacattaacaatctaggtcggacggcgtccgacgggagcgtcccacgggagcctacgcggcaccaggctgcacggcaggggagatttaacgcgaagagagaaacccaccgtagttaaaaggcctcctccgtcggcggcttgcgtccgcgtcccgggcgcacacgtagcgccggctgcgcgacagggcgcgcgcgacgctgccgacggcgcatgcgcggtccggcatgccgggcggaagccccatttgatttctaatgctatttatttatgtatcccttgtctctctttaattaattatgttgttgaactttatctgttttactggtcttttaaaggaaccagcgcttaatgtttcttgatcacgtttttgtttttattttctttaatt

SEQ ID NO: 39258 - DNA, 701 bp, Homo sapiens
tttttcctctgtgccttatctgccaaacaaccttgccaagaaggcgtagagttcaaatgagatggaggaagggctgctctgattacgggggggtcggggggcggcggtggggaggtgcagaaggttagatcccttctcagtggctgaggctcttctgcctgagcccagatggaagcccatcaaagagaggggctccctctgtccaatgcagctcaatccagtgagcagttattgtcacctgctgccatcaggagctctgctgggtttgtcttgccttcagaaaattctgctattcagtaacaaattgtgttgtgatggcattttctatgccttttgtaagaatggactcacgcacaggctatttttggattcaggggttggctgggggtggaagcaggacagtttcggtcatgtgcagctcttacaccagcttctctctgtgctgatgtcgctgtagagctgttcactgagtgttacagcagcgatgaagacttggcagaacagctgctggtctattcctgtgaagcttggggtggaagcaactgtctggagctggcggtggaggccacagaccagcatttcatcgcccagcctggggtccaggtaaaccatactcagccaccagaccacacggccagaaatggggcttttatgtcagatgctactagcagcattaaacaatagtaaaaacaaaccttatt

SEQ ID NO: 39259 - DNA, 10788 bp, Homo sapiens
ctctggccttggccagcccagaaaggggctcccacagtgcagcggtgggctgaagggctcctcaagtgccgccaaagtgggagcccaggcagaggaggtgccgagagcaagcgagggctgtgaggactgccagcacgctgtcacctctcagaagcgtaaggtaaatgactcatgtcagtgttgaacagcaggattatcaggcttcacctaccagcaattcttgccccaggacggggccctgctatgtgcagggaatttccccaactttggatcagccccatgggagtcccatgcactgccctgggaagtcacagctctgcccaggccatgccctcggtattagtctgtagggctgccaagatgaagcaccatagacctcatggctttaataacagaagttcattgccttatggttctagaggccagaagtctgagatcaagctgtcagcagggctgactccctctggaggctgtgcgggagactctgtcctagcctctcctctagcttttggcggccagctggcaagcttcaccattccttggcttgtcgatgcatccctctgatccctgtcctcatgggtgactcctgcatgagtgattgtgtccaaatctccgctctccctggggacattcgtcgtactggatcaggggtcaccctacttcagcatgacttcctctttacttaattagttatatctgcaatgcccctgtttccaaacaatgtcacatgccaaggtactgggggctaggacttccatgtttgaatctttggagacacaatttaacctgtaacacctaaaacgagtctctttctcttagctgccatcctacttcctagctctgtgttgtgccttgctatgtatgtgtcagcagcagcgagggaatgggaatagtctgtttgagggaagcagagaaagactgaaggagattcatcatttaaaacagggtgggcccagaccagagtgaggaagtgagagaagcagccctcatccagctaggagccctggagccacggtgcgggagctcactctgggtgaggccctgcgttttcccttctcccgacctggcgtggtttcctccactctcacttgtagttgaccatgacaaagacccttttcaaaggcatttcagggacaaaaagacagcattcccagcttagcttttgcaagagggaggggctgaaagggtgagattgggggttttgtagcactggagggggaagtgtcccaacaccccctacctctcattccctctgagggactggctgatgtcttatcacggactgggaacaactgggacagtgtctgccccacaagtggggtaagtgccaaattttttttgttttttagtttttttgttgtttttttttgagactgtatcttgctctgttgcccgggctggagtgcaatggcgtgatcttggctcactgcaacctccacctcccaggttcaagtgattctcgtgcctcagcctcctgagtatctgggactacaggcacgcaccaccatgcccagctaatttttgtatttttagtagagacggggtttcaccatgttggccaggatggtctcaatctcttgaccttgtgatccacccacctcggcctcccaaagtgccgggattataggtgtgagccactgcgctcggccaccaaaaggttttgactggtctgtggaaatttttaaccttggagggcagcccgctggttcctggcaggccttttctggcacagcttcctggagaggcagctggaccacctgggaggtcacacaggcctccaacccttggtggtgactcataggcaggatcttgagctctgtgggggcagcagagtttgctggaagaggcacggcatctgtaggaactggagcagcacactgcatgactcaggcgaccagcctgacatctcaaaggtagccattgagtagaatcaagtgacactggattcatagcctggtggggaaatgagtcatgagcacaaattagcagagagagagagagagacagagagagagagaggcagaggagagaaatgtggaggtggggagggagaaaaaaccatctggaattgcaaatggctggtacaatagtaacttactgaattttttttgacctgcaagaggttatttagagaataagaggatgggcgtctggcatggtgccctagtgcatctcttcttgcatcaaccccactgggaggtcctttgagcttttccagttcctaacacatactctgttgttgctcagaattgcgtggcatgggaatgatttgatttagatgtttatttcttattcacatttggtcctcgggctagcacaggtgttggcaccgacacgtttctgacaagcatgtgtgtttttagtaaatgcattgatgaagcacggtcttcataattcaactcaagggctgtgtgccctggagtggccatggtaacactcaggagaccagcgctggggagctggagaggaaccctgcccacagccccacagccaggagctcaagggtgttctctagggcagagggcgctttggtggcctcttctcagaatggttgatgaaaagtcaaaagtcttttttctgctacttttcacccctcaggctcccaaacatttctctacctgtccctgaccctgcctcccttgctgcattaaggcttggaagctgctgtgcaagtccagacgttgtttgactcctttaggcatctaaagaaaccagaggctgggcacggtggctcccgcctgcaatcccagcactgtgggaggccaaggcgggcggatcacctgagctcaggagttcgagaccagcctggccaacatggcaaaatcccgtctctactaaaaagtacaaaaattagccgggcatggtggcgcgtgcctgtaatcccagctactcaggaggctgaggcagtagaatcgcttgaaccctggaggcagaggttgcagtgagctgagattgcaccactgcactccagcctgggtgacagagtgagactccacctcaaacaaaacaaaacaaaacaaaaacaaatgaacaaacaaacaaaaaacacacacacaaaaacccaggaatctgagagagaggacttgttctgggttgctttggaaggcagaccttggcctggatggaagctgcagggagatttgtcttggcttcatccaaatatttcattcatgcattcttcctttcaacaaatacttcacacccctactttgtgccaggcactgttctagacagcaatggaccaaacagacgaagatctcttcccctatggagcattctaccagttcctgatgatttccaggagctttcgaggagaggagatgagcatcggcaagcagcactaagtgggcgagtcttacacttactgggaggttggcccagaggacttgcaacagtaaaatccgaagtctgtaaatcacagacaactctgtgccaatttcctgtgtgcatttagctactaagtcacctgtttgggtcatgcaggaggagactcaggagaggtacattttccttggagaaaggccctgggcagggttagcatgaggtgtttttgctcagggaggacacagggcagggacatggggtgggagtagacaggggcaggtgcgcaggagaactgaggaaggacaacgtgctgtgagtaattcccaggggctgcgggaggaagggtgggggtctggctgacccctacctattctgtctgctttcattgtgggtgatgctggctatggggggatgcttactaagtatctcttcttgttatttttaagaacgatctttgagtgggccacttttaactcagcaatcctgggtatgaaagcaacagtatgggaagcaccctgtgcttagggtcagcagtgtgtgttccaggtggctctgccatccgagggcttttctggccttacaactctgattctggtacatgaacaggtctgtagaacatagccatggagattcttatcgttaaaataatccgacacttggggtcactgtttctcttctggtctgcagactcatgcatttgacatcctaaatgggattgctttcctctaagaaatagttctgctggcctggtgctgtcttaattaacctagtttacacttgttaggggaaaaaaagaaaaaagaacccaagcagggtgtgacctgatttagattgtgtctgatttagattgtgtcaaaaagtcatgctcttccgtgtgtacctgtgtccctttgcctgaatgcagatgtcgaaatgctgatttggaattttgaaacgaggcagtcaataagtgcaaatacagttgctaaataatccttgggtctgttaaacagacattggggatgtttatttaaaatggatgagtcccatcatgccttcacggagggcaccattcaattttgaggcacgttgaatctccaaatcctgacagatatgatgaaatagtgtcctgggattttatgaatacagcttatcccaggcattctgctcagagaagaggcctcttttcctttaaaaacacattatctccctgcgatggtaacttggagcctcaggattgacctatttccgacgtcgctcttcatgtaggtcaggcttctgcaagtctcccgggctgaggttgggctggggcagtgcctacctgcctcccagagcagggcattaagcggggagctagcagcagggagggcctttcccaatcccccttatcttaccaggcaccagaagagcaaatggttgttggtgaggggtccctggggctgctagcaccagcaaagcggacagttcctgtggcctcccccgaggagcctgccttggtttctgagcctaggcagaatgtttgaactgagtgaatagggtgacaagaatgttgacaatacattagcagatctcttgtccttcattatggtcctgataataatggttattggcagagacaactgtagcacaaatgaaaatatcaaatatattttagctatatggcaagatgtatctgtttcccctcgatttttgtccatttttattttatttagttgtataaaatcacaaagtaataatgcttatcacaagtgggactacataaagaataatcctgcccaatctagagtataatcttccacgaccttcttcatgcccataaagatatgaatgtatgcaggtgttttgtttgtttttatccaaatggaatcctactgtgttcatcaccttacaatttgcttttttttttttttagaatttctcatgggcattcctgcaagttaatcttagacatagatcttgttttcagcctagtttcttgtgaacacacgtatttcacagaaatggaatattatagtgtgtgtgtgtgtgtgtgtgtgtgtgtgtgtgtgtactttttaagttgagcctttttttccttctttgttagtctccctacggactttctcaacctttactctaaagacaaggcctctcaagctatgttaataaactgctgtgtctctttctgcttttatttggtccatgtgctatgtacacacactgtattacatcaaacctgagatgtcatttttttcactttttaacatctctgaaactgcaatttcttacaatctgaggtttaatgaaatagggtaggcatatgtatgtttgggggcttttttcttcgttcctggttttacaaaaacaatattctgtttcccatacttttctgcattttgctttctcttttactttgtggaaatctcttcaagacaaatgacatcactctgttcctttttaaaaacatgattgtagtatattcaatattccttgaatgatggaccacatctttttcctagattatgcttttccctgcaacaaaaatgctgcaataaacatcctatttactgaataaaaaagagagagagtttagccttcacacagtgactggactgttgacacaccccacggtgctgccccaacctgggggattttaacatttcctgggtgcttgatttcatagtgccctcacccccttggcccactcaagttgctattcgaatttataaatgaaggaaaggaaatgcttcttgagaaattaatgatgtgtcttgaatcccttccacatctgagactgtaggacctctgtgggatctgaagaagcagagtgatgtggggagaagcaactgactcgggctcagaatcatgaggtctgccacttgctgagcgagttccttagcctctctaggctgtgattttggcagcaaagtaggaaatataatatctaaatatcagatggactcctattggtgagttcatttagtaacattaagaagtgccctcttgctttggtgacatttctttgatgttatttccccgccttgcacaagtgttggtttccatatgtgaattcacgtagggcctcggtctcatcctcataccgatcttcgtgtcgtttcttttcaacatgtttaacatctgtctttcccaccaaacagtagattccttgagaattagcattgcacctaatccagtgtttctgtgtgccgggagcctggcacaggtgtttggaattccatgtgctctctgtaaatatatttgaatggatggacaaatgaaaggattagctggtcactctggaattacccaaatccagtttatggattgatttaggagtcatccagatgtggtcttctcctttccctcttcgggaaaatgcgaaaagagaaaggatactctctgtttatttcagtgttttcctgacatactttcttccaaagaatcatgaccaatacatacacgtcggtccctgaggcacactgttcctgtcagtcctttctgcgaccacatctgtcctcacagaagttatatacagcacttatgtgcacattttttttaaaaaaagatttcttttaatcaagatgttttactgccatgtggcagaaaatttttacagtaatgacacaaatctatgatgacaacaatatgagtaataccctctaggactgtgtagtgcacagcctgtaccactgtacatggtggctggacagtctacatctgcctacggagggtgtactcaccctctgcaggttcctcttgaaaaaatggtgaggatacatccatcctttttcctgactttgccagcagacatgaagagcagaacagccagtgtgctacctactttccaatcctcctggattagcgtggggcacgtggtagggctcacttggcatatgaaagaataaacaaacacgtcattggctcaaaaaggacctggaagaaaatgagtggacatttaaaaatctggaaatggttgatatttccaagctgctgatgtccctctctgtccctttctgtacgcagtggtacgtaaatggggtgaattattttactgacctgtggaatgtgatggacacgctggggcttttttacttcatagcaggaattgtatttcggtaagtagtctcatcacttttcctaattttctgtgttttgactacaaaagtggagaaaagctctgcagacatttcaaacccaagggaagtctattactcattagagattattacacaagaccatggtgtctgctttatagagatacaccttggttgtcgtgaagttgagtcccctctcttccccctcccactgatgtgtaatttaaaaggggtcctgcatgatttttctctttgttcttaaagactttggggagaattattttttttaagtagagatgaggtttcatcatgttgtccaggctggtctcaaatgccagggctcaagggatccacctgcctcagcctcccaaagtgttgggatcacagacatgagcctctgcccctgatcatggggagaaataaatagaaattgagaactttgatttgaatgctggctgtggagtctgcccttccagttacaagcgtatttcctcaatggcacagccagagtgtgggattagaaaaaccaaccacaaattaccaccacaaaaacaatgtgtattccacatcgtagagagattagggtatgccccaaaccatggtttgcattgcctagcctgcatcctaactggcctgtcgtccccaaatagcttttaagataaagctagcaactgggcatggtggctcacacctgtaatcccaacactttgggaggatgaggtgggaggatcacttgagcccaggagtttgagaccagcctgagcaacatagtgagaccctgtttcaattttttaaaaaatataaggctagcaattatatatgagtagtactttcaaatgatgtcattttgtaaagaatcttaaccattcatatttacacttatacagaatgagatggtttacaatgagtgttcgccctccaatttgaatggggtaaaaacatcaatttcctcttcagatagcctccctttctggttgggtttaaggtttcagcatttgagccacagttggttggatatgattctagatcactccagttagaaagcacagatggctttcaatgagcacattagcaggtggttagataatcaaatgatctggtgcaaatgaggtaagtttcattaggggaaagctggcagggtgaagtcccaagtggttatgggggtgggctgggggttggcatcgttatagaagccttgtgagccagggaagttagcaatagcacggttaggttcctgctgtagtgtgtgaggatggcgggctaaagagacaggaacctccgagagctcagtttggtgagatgtctttgcttttcatgtcttttcatgtccttgactctacttgaggccatgaaagcggaagatcatggcctctgctgggtggtgtttctggcctattttcactcactcaaccttccagctcttgcctgtttcttgaaattgggttatttttagaaacaaaactttggaatgttttgtcaatatctcatgaattctgttccttcttttccccctaggctccactcttctaataaaagctctttgtattctggacgagtcattttctgtctggactacattattttcactctaagattgatccacatttttactgtaagcagaaacttaggacccaagattataatgctgcagaggatggtaagagtcaagaatatttgtagtcatcatttttcttgcggggcccagagttcttttaatggtcgataggaggattttgtccttagaacgactgttgcatttcaccatcagtaacattcgctttctttgatgtatttcatcaggggcctctcccaggttaaaatttaatgaaagatggttgtgagggcaaacagtgtcatttagtgcattgttaacaaataacctcatacttacttagattttatacttcacaagttactttcatttgagtcttgacagtttgctaagagtgtaggcaggggagggacttttatgccaatttgatacctggggacagttgagtccaaggaggagtgtttgtctagagacaagcagtgagctagacgcatagtgaggattggaacctgaatcatgtaactgtgtaatatagatacagggaaaggctatagcagtctcgttatatacacgcaatagaaagaattacacatggatggtgttgctttcctaaacttgttttccagatgacccaaacctcccctgtttctgtctttaaatcagacgagcattgagatgagctcatctggaagctccattccaacactgaggttctttgagtttgtggttttaattcaaagcatttctgggacatccagtcatcatgaagtcatgctatgtgtgcacaaaattaaaaaaaaattaaacggtccattcttgtctaataaggatagcttttgttttccaaacaagcaaataaaccaacaaactacaaaaataattttggggttaaaagtgtatcaaaatcatgaggtacagggacagagaggtcctccaaaacttagattcctcctttgctctagagctgggctcccactcagaaagctgctgttgctgggctggtttggacatcagcaagcaaaaatgcatcaaaccggttttaactctggaagatagatgtcttaagatccaaagatgatgatgaccgcttttgtcaattagtcagtgaactctgggtgacttagatgctctgagccctggaaccgctgctcttctccatggtccactgaggacggccgggccggggggacttgccaactgtgggcacggtcctgactccgctctcctgtcctcccctgacagctgatcgatgtgttcttcttcctgttcctctttgcggtgtggatggtggcctttggcgtggccaggcaagggatccttaggcagaatgagcagcgctggaggtggatattccgttcggtcatctacgagccctacctggccatgttcggccaggtgcccagtgacgtggatggtaagcctgacttggctcagatggaaacagcttggaggaggcatttgctccctgaaccaacccccagggctgccccggagaccgcacttcagaagcacgcgcgtgaaacggagtccaacataacagagtaaaaactcactcctcaaaacctcttctttgctcttaagcaagattttacatcagccttgcagatggtgcccaacatttcaatttttaaacctttttaaaaatagtgattctggtattttcaattaacaatgtggcaattgaaggcaacaagacttactagtttagaaaccagggttgtgagttgtactcatcgatgtaacagagtggctgggctcccatttctttcaaaaagagcaacattggaaaatccacattggaacctggaatttagacttctggcgtgcgttagcccactgccaactggtttttggaggcag

SEQ ID NO: 39260 - DNA, 1263 bp, Homo sapiens
cttttcctggctaatacctgtctggggacaccagaacagcgagagacgccgtgttgttatccttaggttaaatccttggaacactgtttctgatcatttttaaagttgttcagggcttactctgtgagcagatggccccaggatgtgacccttccctggcaccacatcaaaatactcatttaaaagcttaaccatacacaatggcaaccttattaactgcaatgcaaatgtacctttgggaattctgaaggagtattggagtgctctctagatggtattcaacagagaaaggaaatggatgtgaacatctgtgattattctacattaaaattatcgatcacagggcctgtgtggcttatcagcggcaggaagtgaatttaaagtcagtaaatgactccaggtcgacttaccaggagctagggcatttataagcattgtgccctgaagataagttcaccccaggcagttctgaaaaggactcgtcaaacatgtcctgctgtagaataatttctaaaaatgtttttcagatcttaggagtaatataaacatgcagaaaagtagaaggaagaaaataatgacctgatacaaactaaaggtttgagtgctgtgtgaacagtctaagggaggttattgaattggggtgaaaagaatagaaagaagagcgcagataattgtaatagtaacaatagctaatatttattgaagctttcccatgctgggcacaggttcaagtgctttacaggggtcgcctcatttaattattactcatttctgtgtaggtgtgtagccggtgggctagttcaggttcttgactttgggacagaaaataatttgaaagtgagtcaaaagcaaaagcaagcaagagagttgactgcaaagccaaagtacactctagcagccggtcagaacgggccactcaaaggcaagacagctctgtctaatactgggggatctccctttatgggaaatttgcatgattattcatgaaggggtggtaaggggtgttgctattaagcatgttaggagtggtttcttaggtccacatgtgcagtggctgtacatgctagtacatccatcgcatgtcttataagcattttaaatctccacctgggggtgtgttttttactattataatgagcacaggtcagcccaaggacactaatcacgggtttctgtgcttgtacaaatgtggggatttttctcttctgctcctgcctttttgctgtagggtgttctaaccacgagctcaggatgcggtctgtg

SEQ ID NO: 39261 - DNA, 1274 bp, Homo sapiens
tatttcactttcttccggagagagagaatagtagcaaacaaatactaggcctggaatgttagatccttgcttagcaatggtcgttggcccaggatcgtgctgcagtgtgtaaggggtactggcatcggaatattagatctttgcttggcaacgatcattggtccaggagagtgctggggtgtgtaaggggtactggcattggaactatctcatgtgttttagaaatgtgtcctttgggatggtgggagccaattccatcattaacctggctaccaggccccagctcagcccatgccttttcagagcactgcctttccttgggcattagcagaccagtagaaatagaaacacacgtagtaaggaacacggctgtaggcagcaacagagacgtcatggaagatgcagacggaggctgtgggacccacatactctgcaccctcagccgagcctgtttctgaaaacaaacatgatctacttccttcaagccggaatccaggtgtgtcattaattttctgttaaacaaagagaatggtggcttttttgagtggagcacacctgtccccacttgtggagttgcagaatgtgggcactgccaggattccctctcagctctcacctctgtagaaatcacggcacaatacaaacaatggaaagctcctctattaaaatgtctgggtgccaccgcgaggcttgcagcagaacaattttggcctctctccagaggcaggtgtgaccggagccaacctgtctggagtgacttttttactatgaaactatcagcagcatggacgagtgaaacaatgttgcattatttggagcccctgggaatgtgcacaccccttataaatggactgtgtttacgctcctgtcccttcacagctgggattaaaaattgccagagttcaaatatttaatgttctttcctgttttctatccctggaatgtctcagtgtcgtctgacttgttgccaacacgtacaccagatttttcctcccttgcccaggttatcacatgtatgagaagctggacggtcagttcttgtcacctttggtgatgtcttagcctgaaaatcagccggtgccctcctcaagtttggaggcagcctcctagggctattctgttctgtgttatttttctttccaggttgcaacaagatatttaattttgatcatgagaataattttatattgcatttcacaatatgttatttcatttcctcagtgattttggaatgttagtggtcacaaaaggatgtaggtaagagaagtgggaaa

SEQ ID NO: 39262 - DNA, 1333 bp, Homo sapiens
gtccgccgcagcctcccaaagtgctgggattacaggtgtgagccaccgcacctggcccagtgtttgcttcttacagaatgattgcaagccccccttgcagtcctgcctgcctttctaaaaaacgtgcattgagtggcttcataaggaaatccagagaccttggttctctgagtctgatgcagctacagaagctgtgcagatgcgggtgtggaattattttaccctaaaggacccggttaacactcacacttttgcctaaatcctagactggaggcctgaagttttcagttcatgaaattagacaaggagctggggttcattccaagtttccctttgcccatgaccctggcattctttcttttgacatccaaatagacactcccttggcttccattcaacagaaaattggcatcctgaaaagccagataaaacctgcctcaaaagggaaaacaaaattaatgaacagacaggaaatctgagaattatttttctctgaagtaggatgcgggggaggtaatggctttgtgaataaactggaggaggagggagagagaaacaaagctgtgtttccaaggttgattccccagctgctccgggtgtttcgagctagagggcactcagtggcagagtttgttaagcaccatggctccgtgggctcccagggccccaggctcgtggtgacgagagcaaggcttggtattttctccaggttccagtcaattatcacagttaaattggaacatgcatgtccttctgtggacagaagtgcaggagctgccgcagcttcttccaaaatagagctctcctggctgctgcagctgctgacgtcttcctgcatctctcaacctgctcttcctctcctttcttcccaccacgccatctcccctcgcctgcttcccctcacttggactggggcccgctgggacatcacccagtctaccaccctggtgtctcagagggtgggtgaggtcactgttttccattccaaaccacacctggtgttaggaacattccattttcaactcttcactggtttgcttctgtgggggcagaactcagattttcaagaaaatgcattacattgtaaaaggatctttcagattacaaaaaaaaaaaaaagaaagaaatcaattcaccaagaatcccaccacatacattttgtgtctcttgtgctccctttaaaatctattgtggaaatcctcccctgaccaagaatgggaatactggctgaccgtggctactctcagatgattaaaagctctgtgatcaattccagtgctaaaatagacccacgtctttaattaggatgatgccatgttgcaggatacatggg

SEQ ID NO: 39263 - DNA, 1937 bp, Homo sapiens
actttctgctgtcattagctaccaatgctaagggtaaaaatcaaactatgggatactgatagaatatttatttatttatttatttatttatttatttatttatttgagacagggtctttctctgtcacccaggctggaatacagtggtgcaatcacagctccctgcagctttgaactcctgggttcaagcaatcctcttgcctcagtcgcccaggttactggagctacaggtgcacaccacgatgcctggctaattcttttatcttttgtagaaacagggtcttcttttgtgggccaggctagtctcaaactcctgacctcaagtgatcctcccgcctcagcccctcaaagtgctaggattacaggtgtgagccattgagccctgtctagaattttaaaaaagcaattcgtagtatcgcagttacaaatctcaagactgaaactcctagatccgtgtgtgtggcagcctggtgccgtctgtgtggcagcttggtgctgtctgtgcagttgaaatagccttgacagccttgagcccgtgcttggtggaactcctgctgatgcagtgtgaagacacacttcttgtgtctggaacacacgtctcaagtgtaaatcctctgttccaaacaagtttgaatacgttttgttttattttgttggctactaattcaaacacttgtcctgtgttaatagccagtgattaatttcgggttctttttcatgtgggaattactcaaagctcctctcaaaactatgctgcattcatcagcgtgactcatctttttccatttccagagcaaacagcagggactatccagtctgtacttcaggaaatgagcgagagtgaagtaagctggcaaacgactgctatttctcttcttttgagtttgaaatgaaaggttttttttccagtataagattattcttaggctgggtgcagtgtgtgcctgtaagcccagcactttgggaggccaagatgggaggatcacttgagcccaagagtttgcaatcagcctgggcaatatagtgagatgcccccgtctctaaaaaaataatttaaaaaaattagccaggcctggtggcgcatgcctgtggtcccagctacttgggaggccaaggtgggaggattgcttgagcctaggaggtagaggttgcagtgagctgttgttgtgccactgccctcctgcctggattacagataaagaccttgtctcaaaaaaaccaagaaacaaaaaacaaaaaacaccctacttttttatttaaaaaatgttttacttattatagtaacataaagaaacaaacatacataagaagcatatagtgggattgattttcccaatgtgaacccactggtgtaatcagcactcagagagagaatcaaaatattagcagcaccctagaagcccctgtaggccccaatttctaaattcatagatgagtttgtccatccctgaagttttatatcaatggatcacatgctatatactctttggtctgggtgtttttttttttttttttaattgctgttaggtttgtgcattgtatccatattgttgttcagcaattgcttgtttcttttcattgctgtatagtattcataacaatccacagtttatttactggatactgttaattctgtccttcatgattaatgatgtgaacccccactttcaagtacttatcagccaattattcaataacttttgttcatttttctactagattttttccttcggcttaattttttaatttctgtcttttatatttttttaatttttaattttgaaaaaatgttaatctacaaaaaagttgctagaatttcctactgaatactcatagatcttttcatctagattcatcagttgttaaccattaatcatgtttgttgtatttttctctccatctctctatatattaacttttttgtgaatcattgagaa

SEQ ID NO: 39264 - DNA, 1110 bp, Homo sapiens
gtggggaacacatagagatgcggtgtgagaggcagctgcctgggagaattgttctcccatccctgttgcggcaaaatgttgcttacaggctcagacacgtgatgctctctccacggtcaggatctacctactagaagctcctgtttcacctgtgccctaattacagccacccccgcgcccttctccaccatcacctgagtcaagtgcctacacctctctgttccctacgttagggcccacgaccagctgagcctaacatcaaaagttccctctgtgaccagaagagggcgcggtggtgcaggatgggcgtcccaggaaggccaggacttaggttcaaattcccgttttgtccattcctgtaacctgtgaagttcacgtgggtaacatgcgtgtgacaacacctcatcacggggttcttgcgaaatcaaatacaacagtgacatacaaatggcttgcaagctgaactcctgtgactctgagggattaccaacttctgtcaatactttattcagtgttgaacccccaggtgatgcgtggctcactttacctgaaccttcacctcccagagaggtcttggcatctgcctgcttgtagggactgtggcccctgtccatgccctgctcctgccctttgagttccagggtctgtctgctgtaaaagcctgctggactctgctcctgactcagtttgaccagctggctgggctctggtgtggcccacagcctaggaggaaggatgttgtgtcccggccaggtgctcatgggctcagtgagcagcactttgaactctaggcgcagtaacaagggcctccctcatgacccctcatgaccaaatgaaccctcgactctggggagtggtcctcatcttgccactctatgcctttatacccagacccaaatttcctccagggcagtggtctgttcttacctgcctttccaaatgccagtcttccaccctaaattccagtgtccatggatggggacccatcactgctgtccaggttccgagtcaccctcctgcctccattttcaccacatacccagcccagcccaagagatgggacctctctgatgggagctctcaggcctttgctttgactctgactcagag

SEQ ID NO: 39265 - DNA, 596 bp, Homo sapiens
tcttttcctactctcttcctaaactcaaaaaaaaaaaaattgttttccttgagagaagctttaaacaaaaatgatggctttgatccttctgtaaagaattgtcttctcatcccagcacatcacggccattctgcatccatccattctgccctgggactcccttcctttggatccaccaggtgtaaaaggcaccaagctgccctgatctggcccggctggtttcgtttatttgtttggtgacaaggtccatttactgctctcccccctgctgaccatcctaaatcacactgccattccaacctgtgggatgggagacttcaaagggctgggtctgagccctgcttaacatttgtgaatgctgagtcactaagacacttgaaagggaatctcagcaggtcccttgagaaattgccattaattttgtagccagaaaagctttagaaatatttactgcccgtcttcccttttgctgaggtttttagcaaacattagaagcagcactaatgagctccacaatccagcgtctgaaaagctctctgcagtgaatgttcaaccccagaggtggggcagcaactcagaaaagatcaccattgaaa

SEQ ID NO: 39266 - DNA, 989 bp, Homo sapiens
ctcagcctcccaaagtgctggggttacaggcatgagccaccgcacccggcgagtaccaactcatctaaatggaagtgtgctcagatagcaagcaggagacatggacttctgtggcttcccatgataactgggttatgaggaccaactttaagcctatatgtcaatcagtttatatgaggttggactgatttctactgtgtgcagcctctacaggagcatttatactggtttcctttttttttttctttctacctgtagatatctttaagataaacaagctgaacaccattaactatggtaacctctgccatgctgtctctgttccttgagatcagatagagcccggacagcaaagaagcacgtggccctgatattaagatacaagcatgccaacagcttgcattagtatttgtggaatggatgagtgagtcatgatatatttccccaagcttcagctgggtgtgtttttcatgtaaccattactcataaagtgtaaaggtcaattatgttaggaaggaaggaatgatttttgtcatccatgcataggacactcaggtatgcttccctgagcttcatggagcatggttccctgagctcactcctgcaaaggccacgcctattcatgaatgttgacattaaccagaaggtagggactgtatatgtgaattgagcttaaatctgagctgaggaattctatgacaagtaacttcaaacacgtcactgagtttgagtttaccataatgcataagactatttctaaaacttgtaattgcttctgtttatttacagagtttgatgcatatttgagcatttatttacttattcaaaattcaaaaagttccaagaagtataaaaatggctgaacagtggcaagaattttagaaaccatagaaaaaaacccgacattattagggaacaaaacaaatagactaggagataaaaatgaagttttgtgttgcagaagctggcagggatccccagtgagagaa

SEQ ID NO: 39267 - DNA, 993 bp, Homo sapiens
ggcagcgacttgggcaggtcctgcttgttggcgatgaccagcagcggcgtgccctggttctcggcgaacttggtcaccttgtgcagctccgtcttggcctcctccagccggtccacgtccaccgagtccaccacgtagatgatgccgtccgtgcagcggctgtaggacttccacagcggccgcagcttctcctggccgcccacgtcccagaagtggcagctgatgcccttggccgtgccgttgctcagcttgatcttctcggtgttgaagccgatggtgggcaccgtgttcacgaactcgttgaacttgagccggtagagcaccgtggtcttgccggccgagtccaagcccaacatgacgatatgcagggactggaaggccgagatgttagaggagatgttgcccatggctcctggctgcggcgccagccactgcggctgcggcgggagggcgccgccccccgagcagtcacgggcccgacgcggccgggcgcacctgggccccgcccgccgccgcccgcaccggccccggggctcggcgtccccgcgggcgcacggcttggcgcgctcagacgccgcagtccccgcgccctcgccggccgggctcgcgatcggcgggcatcgcgtctctacgcgcggctttgtctcccgcgaagccgcctcagatgttcggcgccctccccaggcctgggctcgctctgtggtttcctcgggccgcgcccccgcgctccggcagctgcccgggctctccgctctcccggcgcccggcgctcgcctctggcctgggacggcgctgctcctgctcctgctcccgctcccgctcccggagcgcgggcttccccgggagtcgctgtccgctcggcagcctcacagtccccgcgccgccgcagcagccgccagcctgcagcggccggagagctcccggacccgccccctcgcgccccgccccggacccgcccccggacccgccccgggccccgccccgcccgccgcc

SEQ ID NO: 39268 - DNA, 1923 bp, Homo sapiens
aggttcgtaaaagctcgctctgcatgagctcactctgtggtcgcgaggaggatgtggctggaggggtcaagagcgcaagtctggttaagaggctgctgcagagcccagagaggagatgaggctgatgcagcctgaggcagtgaccaagaaaggctgcaaaggtacaataatcaagccagaaacctggaacccatccctgacaaccacctccaccatctgatccactcacaagccaagctgattctatctccaaacagagatcaaatctgtttagtcttattctgaccatgacggcttcagctgttttcacttggccttttgccaatactcccaagtagtcttctagaccattcctcatggggttccaagagtcatcttaggatagatgtaggagcctgttaccccctcttgctcagacccctcattgaatttccactgcctctaggataaacttttcccaaactcattctgcggcacccacctcagccccaagcaaaagccttctggtcccctattaggtgccttgatgtgccaggtgggcccgcctggcaggtcggtcatgcaggctcttctctcccagtgcacagagcctcactcctgcctcccagacacacacatactaacacccctgcctacctcctactcttctttatcatcccagcttaaatgacattgttttagcaaagccttccctgaccaccctttcccagcaacttaaatcaggccctcctattctatgcttttatagcattctaggctattccttcacagaagttgtagcttataatgctctgtgtgtgagtgtgtgagtgtgtgtgcatgtataagttataactctgtgtgtgtaaatgttatagctctttgtgtgtgtatgtgtgtgtgtaattgacatctgtggcacattagtcctgggagagcagaatatgtgtattttgctcaccactgaatcaccagtactgagcaaggttccaggcacagaattggcatttgatgtttgcggaataaataaatgaaatgaatagctaaaacaatgacagctatccaaattatatttctaaataaactatacagagtgcagttaacagatgacataaatacaattttatatgaaatatattataactaagtaaatggaatgctgagactaccttccaatccccctatcctctaagaaataggaaatagtccattcatttgctgttaaaatctttaccaatcattctagtccttcttgctctatttgcattgtgtctcagctttaggcaaatgagaaatgggaaagtgactcaccaggtttgctcagtggccagctcggaaggaaaatgcttggtgtcccagcagttatggacatcacaccggcagaggggcaggtggcctggtcctccctggcaggatgtgcctttttcagatggccccacgaggcatcctgcaccctgaggcctggtccatctcccaagttcacacttccaagaagagaaggtgggctggggaaggattcagagctgtctgggctgtgttcactgccatgtttattaatagagctgctgtgaaactacctggactgaaaaaaagggactcaggtacaaaattcctgcatcagctggtgctgagtcagcctcagttcatgatcaggaatgttctgaattgatcatcagcctgagtcaacatttgcaccctccaccctgggcaggtccagtggtccctgtgcgtggagcccagcactggctgcagtgcaggagctggaactagaaacacggaaggcaggtgtccaatgtacaggtgaggtcagcctgcagggaagtgggggggcatggaggtcagggcaagaagcaagttcctaccaacaggctcggcaggcccttttgggatttcatctctcgctctgcctcttcttataaggtcaccaatcccatcatgaaggcc

SEQ ID NO: 39269 - DNA, 1842 bp, Homo sapiens
cactgcagggaaagcaaccgtcctgcttgatccagcccccaggtatgaagtccactggcctctcagagagaaagaaccaggaggaagggatggttggcttgagcctctctctcccctcttctctctgtcagcaccctacccccactacacagttggcacatggagaggtaggtgaaatgaacaaacccatctgccagatcatagccccaaggtcagtaagttaaaggtcaagcagagagtatggagtctctctccttaagaggctttcctttgagtagattggctggattcccagactctctctctactgggctgttctaagctccctctgtcttctcctcatgtagctgaggttagaggttcatatgagaactttcctggcctttgagtgtcctgagacagacacccaggaccaactttgtgttggcctcagggtgaaattgcctctatgacttcatctttaggatcaaaattggttcatcatgtgctccaacccttctgagctgcagagactacactggaacttagtgcatggggctggagcttcaacagtgatgttcccctgaaattgttctctgggcatgtacctctcttggagaccttaaggggaggaaagacaaagtaaggttgaagtttgggtctttctgggtccactggcccaatattatctcataatctcatctctgtccccacaaataccaatctagatcccttatctcagaggacaatgctctgtccaagcccagagtggaaaaatgctgagcccatctcactgtcaactctctaagcaggaggaggggagagctgtcctgggaagactgctctaaagctgtaccaggcatcgccttttggaagctctaagattttgtcataaaaagcaatatggaagagaggatttcattaagacaaaaagacaaagccaaaatatattccaagctcacattcaaaaaaaaaaaaaaaaaaaaaaaaccgtaagactccttttgagaagctttataggagcttttcatgtcattgagctcttctaatctagatactaaattgctttctgttcactcatcattcttagcattcctcatgaggacaaacataaaataaaacaaaacaaagcaaaaccaacagctaaacatggctaggaagccagtcaaacagtcacaccacacaaggcagcattcatgcccccacacatcagggaagatacactgagaatcattgctcagttgttccctgggagatacagataccagtgggctgggggagatccctgaacaccggtgagaccttgaccccagccggtgcccaggctcttgacatcctcacgagaaggaattcaagtatgagtcagaaaatagtgcaagtatggagatttatcacaaagggaaaagtacaaactctaaaaagggaggtgtgggtgtacttcagagttaagtagatggagtttggggctgctacctttatggatttctttaatcaaggggtggaatattcatgaaagttcttggaaaaaggtgaagagttcttggaaaaaggtgaagatttcttggaactgtggtgccatccattttttacatcaaatatgggtgttctcagaaccatcatggtgctggtgggtgtgtggttagtatgttaatgagcacataatgaggtcctaggagaaacctaggtcaaatccagtgccatgttggttccagtcattctcatccagcttggtccacaccctggtttttcagggtcttatcagcccatgggctgtagtcatgtgaaactcctgcctgaaatgttttattctcttgtgaccaacctatattattcctgtctcaaaacaatgacctcagaataaca

SEQ ID NO: 39270 - DNA, 646 bp, Homo sapiens
aaaaagctaggtaaatgactaggaagaccatcttccagtccccaaataaaataagactaaataacagagaagttcaatctccttcagggagattggcaaaaaggatggagttgtcaaaacaaagaggggccactgctttttctattgccatcattttagtgcctttgcaccgtctaaacttgtatttgctcaccaccgaggttgaagttgggataaaagtgggggggaagggaaggcaaacatttgcttgagtaagagatcattgtttccatagctgtttgctatgttttcttcctgagccaaacaccacacacctgtctcctaaagaaaagacagagcctgtttaaccagcagcataagcaggtgttctcttgctgttctaaatggactgcttattcttgcaagcagaaacatgctgctctaaacaaatgccatccagttgcttctaaatctgtatgtctgaaacacctaggggagcttgctataaatataaattcccagactgtacctcccaagattctaatccagttggtctgggcaggggcctaggaatctgaatgttgagtaggcacttctgctcctccctgggaatgctgggagctaggcatagcagttattctgcattcccatacctcacgttagcatt

SEQ ID NO: 39271 - DNA, 499 bp, Homo sapiens
cagtttgagtgatgtgtagacccactgtgatgcattgagctcatcactttattcatttagaaatgcctgcagtgcacgtatccatgggtttctaaccacacagcccattaagcagagctgacaaaattgaggccctgtgatattcttgcaggtactgatagagctggcacaaggacccaggagacctcccacacagcatcctttctacaccaagacacagccttgatgactcatcctctgttgacatgaatttccaaattattagctctttcctgagtaatcagtgacatctcatctttcctgggtttgcatggagtcttctggaagatttggggtcagtctctacagcagctgcatcttaatgtgatccccccatgagtcaagccttgtgtgacccttccccttgagtggaacctgcgacttgattctagccaatggagtatgtcagaggtgatgggatgcccctcactaaaggtaatgttacatgcaaggtggtatt

SEQ ID NO: 39272 - DNA, 1975 bp, Homo sapiens
aatgcacagttgattctcattatacaccatagttatgttctgtgaagtcaccatgaacaccgaattagcaaataccattgctgctatggggaatgcagggttaggttcctatgagtctctggtcacaacattttttggtcacccaatcaacacgtaaccttgttttatgtgtgtttctattgacaggcacctgatttaatatatattgttgattcgttacattgaacaactcgtggccaacaacgccacaactcatgcctgtgtgaagcttctctaacacacggatttcctccaggaagcacatcacagccttctcatgcttgggaacaccagacggctcttctgtgctgtgcttgggaccatcttaaacagtgaaatcactatcaaaaacacaaattggtgacaaaccatggcactaaatagactgtgaaaaggacaattgtttacaacgtgcgagctggagcaagaaggcagagcgttgctttgctcaactcagtgggatgtgtgccttgggtgactcaaatgtttcaaagctctgtgcacatccaccagtgagcatgaaagcacctcgggtatcaattttggggttactaatcgatttcagcagtgggagaattcacaaatacggaatctgtaaatgatgaggatgggctgttttgttgttttcagctgctgagtttgtgatcacttgttaggcagccatcgccaactaactcagtctctcactgccgtcactctgcctgccggcaaaccccagccaagctccctctcagaaataaaattctgtttccggtgaacatgctgtttcatactctgactttctttgccttcagtcttcctttgaacgtgactcctgttctgcacgtatgaggatgttaaacaaatactgttcttctgacacaacctttctgttacttgagtgttttatagtacattcctagaactcctatgtattagaaaagcacaaggagctggaaggctttgctgcacttcataaaaatatggtctctgtagcagacacaactcattccctcagcctggcttaaacatgaggtcaaatctcctttattcctcattttaaatcatcacatggtttaagcttttttcgtatcccgcaagatcatttttcttgcttttgcaagaatcccacttcctttccctgatggatcaaagaattccagagctcactcaccatgactcacccatgccccagccaagttcacagggccgacagaaaaccaggaaagtcgttctgtcctctggccagcccaggccttggctgcattgctgtggtcattgacctgctgcacaatttctcaaccccagggtcaccggccaccagcgactttcctttcctctcttctataccattacagaaaattggttgaatatctccatgtgactgaagcagggactgtcccctctcacatctgtccctcagtgcaggcaccctcgccctttggacacaatcctgaatatcagaccagccagatgtgtcccacattcattggcagaattgaagctgaaagaccccagatcctgctctgtacagcctgggcttagcgctgtctccagtaactgagctgagtaggttgacacctgtgcataaagccattgcttctcccaaggcttgcacagaagatttagtgggcaggttgctagcaccttctactctccactcaacattgtctcagagaccatcatctaactctccacattagtgcacccctcaccctccgaatatggaatctgcccctccctcaatcagtcctcaaaaccagcctgccctcaagacagggtaaaaaaccctcccgggtgcatgtacagatcctcctccttttacaacggggttatgtcctaataaacccattgtaagttgagaatatcataagttgaaaatgcactcaatacgcctcgcctacccaacattatagcttagcctagcctagtttaaacatgccttagccaacagttg

SEQ ID NO: 39273 - DNA, 1688 bp, Homo sapiens
ctcaccacaccaccatgccaccacatcatcatgccaccatgttaccatgccaccacatcatcatgccatatcacgtcacacaccatcatgccaccatatcaccacatcattatgccaccatgccacgataccaccatgtcaccatgtcacaacatcaccatgacaccatatcaccatgccaccatatcacatcttgccacaatgccatcatgtcacatcaccatatcaccatgccacatcaccatgccaccatctcaccatgatatggtgagatgttacttactgtaccactgtgtcatgatgcaccctgtcatactgaactatgttatcaagttaccacaccaccatctcaccctgtcaccatcccaccatgcaccatgccactatgttacctgtctcctggtaggtgtttgcctgtttatttccctcttgtcccttggactgtgggcttcacaagggcatggacctttctggttttgttcaaaattttgcttactagcacaatgccttggcaccttgcaaccattcaataaatgtttattaactaaaggggtgactaagtaaggtgctctttttttggtaattaattctttatattgattgcttttatgttggctagaatatctcttaactaattataaaagagaatgtgaatggtcattttctaatccccaatgtaaccaaggatgaccctgtgttgtaaaagtgtggctgggtatgatagtctttgtacctaactttgactcaatttttacctcttagaagtgtgtgaatttggggacatcatcccctggcttttgcagaaatgtctgatgtcagattaatttttgtttgtttttaaataatctgccctcttttctcttttgtctaaatatatgtgaatttttatctttttcctttaaaaaaatcccatgtagtgtgttggtcttgcctagtatatggtgagtgttcttccccctgtggattaaatgtttgttctacccagagaagttttcatgaattacaacctcccttgaactaccctgtccacgtgcaggtggccaagtgaccttcccccacccaccaccatgtcgagaactagagctcaaagatatagaggaggaataaaggtagatgaaagtaggaacaccgctgatagcttcagagatagtccttgtgcagtgaccttgtgcagtgagagggtgtccgctctgttttctgattaatgtggactcaaacaaagatcacccagggggtcaaagtcttttcctaccttctctgggacctgctatgctgatctcatgcagcggacttgggggaattccctgtgttcctcaattaaacccaagctctgctaaaatatacaaatagtcatcctaaactctaggtccaacattggcctagaaactctaggtcctaattttccaagctgttagatgtttttattttccggattttttttttttttttttttttgagacggagtttcactcttgtcgcccaggctggagtgcaatggcatgatttcagctcctgctcactacagcctctgcctcctgtgttcaagcgattctcctgcctcagcctcccaagtattacaggtgggattacaggtggccaccaccatccccagctaatttttgtatttttcggaagagatgggtttcaccatattggccaggctggtctcgaattcctgacctcaggtg

SEQ ID NO: 39274 - DNA, 722 bp, Homo sapiens
caatgtgaaggagatatgcagcagtttgcacagagcagtcctggtgaaccaggaggcaagagggcaatttaagacctccttcaaagttacagcagacagatcttgctgatgggttgggggttgggagcagtagaggagggaaaagtcaaggagattccatgttctgacttgagccactgagcagaaggtggtagtttcccagagatggaaaagcctaaagtaatgttaatgcgtaggctgcaggtgagaggtcaagaaatcagcttgagatttggaaacactgaatgcctatgagacatccaatgcagaggtcaagtgggccattcacaatatgagtcagaagctcagaaaaatgaaaacaaccacagatcatctgggaggagggcagagtagaggcaacagctagaaagggcagtttccatcttggcttcctgtgcctgggatctgccccagctgacctttccaggaagtctctggtggtcacctgccgaccttatcacaaagctctccaaaacacatcaaccttaatttcaggttcaggttcacccaagaagaaaaacagtaggcttttgtcttatatccttttgcaatcacttacccttctccaaatctgggccccaagcaattatgagtttactttctcttgcgatagcttagctttgcctgttctcctcctcggttctttgaatgtgcctataataatctccaacaggtttctttga

SEQ ID NO: 39275 - DNA, 5438 bp, Homo sapiens
atgattaaaccttaatttgggggtgattcctatgagatgagtaacaatggggaagatccgcatcagcatggcgggccctgacacagcttgagatcaccccagtcttatctaacccgcttctgttgactgtctactccctgtagacacagtactggcttctaggtcgcctgtgagcaaatctcatcaaattcatctaaatgaccaccaggcatgaaccaggatcacattcttaaaggattgctgaggacttcagagtacagtactgggcctctaaacacccacatgcgccccccaagtgaggggaggatcttggctctatcagctaccacttccagctctgctcctagcaggcgccatccatttgtctgcccctttgggaaactccttccaatcacgtggttccactgggagctgctgtcttcctccagaacctgactccctggccacagtggtggtctagggctgaaatgcccacctggctgatcacagggctccaatctctgctcacaggtgactgatccaaatgtaagaacctacacaccatgattcaagccatcttttcccaggattttctaccaggaatcaagggaagccagtcagttcttctcgagtggccaagatgggctgatgtgagcagccaggtctcctgccctgtggggctgggaggagagagagcagcccactccgaggggcactgactaggaagaaggacagagcccaaattccaccattgccaaggccagctgggctttcctccctgaggggggtcacaggaaacacctgcccctttgctggagctacttgggttgggtcttcattggcagaaaccaaagagtcactctgattagttctaaactacaggagccattcagtcttctgggcctcagtgtgaactgggaatggccacacctcccttgaaatcttaacacttatggtggagagtgagctgaatgtgtgtgaactgtgcacacattaccttccccatggatcctatgaagagcagataagactttataacccagaaaaataggaaatgtgtcagatgtttacttatttttctaatcataattatgaaagttgaggttacttgggatcctgttgtactagaatgagggatgtgattggatggattacaaagctcatgcatgcacacataaaacaaacataagcagacaaccccttgagatggtatatgcatgtcctagaatgactatgacaaaggactgtaaaactgggtgacttaaaacaacagaaatttgttctctcatggttcttgagatgggaagtccaaaatcaaggtgtcatatggccaagctccatcttaaggtcctagggaggaatccttgcttggaggatcttaggcaagaaatagcacctggtggctccaggtgttccttgatttatggcggcatctctccaacctctgcctctgtcctcacacagccttctgccctctgtgtctgtgtcttcatggggtatttgtgtgttcgttctctctctctctctctctgtcttttcttataaagacacccgtcacattggagtaggcccactccaatccaggatgacctcatcttaaccaattacatttgtagcatctctgtccccaaacaaggtcacattctgaggaaccagggtttggactcagacacatcttttggggacacaataaacacactatgatggtgcactcattttccaaacttcttagtgacaaaaagtaaagtagtggtaaagtcaccactgcagcaaatgtcaccctggtcaggcaccagagcacactgctccctgcttcaagccatgccctggaacatcaggggaaaggatgagattggggtcatggaagtcctcagacggggctcccagaagaaccccagcagccaccacagaagggttacgcctgcctttgcctctggggctccaagtgcaggtccgcctgagacaagacaacacactcagatctaaaaaatcagtggaatcctcttgttcctcttaggttcatgcaaagccaattcaagagtctggccaactcgttcctctctgaatgaagtgagctttggaacatgacccaccatttgagagttagtcatggggtggtgactgccagacacaattctacccctccctttcctttctaaaataaccccaacccctgttggtacagccgggtacagagacagcctgcgagcccatcccagccatcacagcagcaatcacagggttcagtccagggctggccatgacccccgagccgtcacctttcccaggacaaatgcatgtgtgctggtagcaacagttgctctctcctgcagtttcaagttgggaggctgtgaagctgggactcgattcaccctcttcctcccctgagaagaaggtttgccctggtctcactgaggccctggcccctgagcctggttctgcagacctgctggctctccatagctcccatggcgctctgtttctactcctgagactttcaacctatttgtaccttggttctgatacaacctccagtgtcactcctattgagacttgcccatagagctggccctagaagtggacgccatctgccaaggacagtccccactccagccactaccacctccctccatcacctgccccacaaataccttaggtgtaatacattttaaactaatttaacattaattaaggctaggcactgtgctcatgcctgtaatcccgcgcttttcaaggccaaggtgggaggattgcttgagcccaggagtttgaaaccagcctgtgaaacatagtaagacctcacctccaccaaaaagcaaaaaaattagctgggcatggtggtgcgtgcctgtagtaccagctacttgggagcctgaggctagaggattgcttgagcccaggaggtcgaggctgcagtgagctgagatcacaccactgtactccagcctgagtgatagtgtgagatcctgtctctaataaataaaataaattaacaataattttgcttatctccttagaattcagttagttaattgggtaggctattttttttttttaagttaagagaagttcaaatgtggtttcttctgttctcccactttgaaagcctcccagaactcttgttcttacagctgtcctcaaatcagggaggcatttcccatagatcctttgctggatataaatatttcaggcctcacagtggatgcccgtgtagctgtttgaaagactcttttaagaggatcagatgcgctttcttatgttttagcttttgctctcttttcctcccaataacctctgcccctcagctcatgccaagaagagcctgggaagcagaatgaagtcacaaaaggaaaatgtgcaggagttgggagggaggacccgcacccctttgcagggggtacttactggctgggggaattcagcgctgataaaaagagatctgtgctgggaggctcttcgcccagctgccggctgggctgcctctctctccaccttcccacagcctccctgaggccctggccagctgcagatgctcacggcacagtcaggctttgtggaaccagaaaattagtgagtcaaaggaccagagaattagagcaagtatgttaattggatatgagtataggcctcagtggacggctgccaagtcccctttctccctgcgctctccatgccatccttaccaggagcccggagctccctgctgtgagtgccgcattagcccagctcctacagcgcgtgatcctgcaccaggccttgtgtttgtatccactgtctcctactaaccccacctagcaatcccacccatctccattctgaatataagctaagtggcttgtctactttacccagctagtgcgagatggagctgggatcaagatcaggtctgtctgccccacagcctgcactctgctttctcctgggacaggccaccaacttcactgcgttacctgctggtggtcatcatcctcttagcctggagagttccacttggagatgggtgtaattgaaagcctcccagaactcttgttcttacagctgtcctgtaagagctgtggctggccctgcaatggagatgactgagtggtagggggcaggggtggattttgccccacaggagaaatttggtaatacctagagacaatttgggttgtcccaacctaggagtggggggttgctcctggaatctagtgggtaaagttcagggctgttggtaaaaatcctacaatgcacaggacacctcttaaacaaataattactcagctacaatgtttccatcttggtgaggttgagaaaccctgccctacaaaattctgccagaacaaagtgcctaccagcatccaaaattagccaaaaacatggctaaaagagagcagggacagatctatttattcattcatctgacctgtatttaccgagtgccagctaggagccaggcactcctcttactgctgggggtttaataatgaaccagacagacaagtccatgccccccaccccccaaccggggctgatgttctaagaggggttagagtggaaggcagaaataaaatgaataacaagacactgataagggccattccgagcattgcaatggggtggtgtaaggggtgggatgagatgtctgattttgagctgggggtcaaagtggccccctgcagaggtgacatttaagctgagatctgaaccacaggaagtagtcagtcacagaccaaacaggagacagggcttcctagaaagaagagagggttactgcaaaatctttaagatggggaggagcttgctgtatctaaggaacagacaaaaggctgaagtaggacaggaggaaggtagggaggtggatgggacaagataaatggggcttctgtatgccagccagggataaggggctcagaatttcagttcagtgcaagggaatcggctagagggttgggacaggagaatgatgggctctgatttgccttttcaaagaatgctcactgctgtagggagaatgaattagacggctttaagggttgaattgtgtcttcccaaaaaagatagattgaagttctagcccccgcagtacttcagaatgtggccttgtttggaaatagggtctttacagagatgatcaagttataatgcagtaattcaggtgagcccttatacaatacaactggcgtccttatgaagaggggaaattgggacagagacagacacacatagagggaaaatgatgtgaaaataatggcagaagccaaggtgatgctcctctaagccaaaaaactccaaagattgccagcaaacccccgaggccaggagaaggtcctagaacagattctccctcatggcctcagaaggaatcagccctgctgatgctctgacctcgaacttccaggctccagcaccgagacagtaaatgcctgtggtttactccacccagttggcggtgatttgttacagcagccctgacaaac

SEQ ID NO: 39276 - DNA, 2220 bp, Homo sapiens
tgttggtgatggtagtgatggtgatgatagtgttggaatggggatggtgttggtggtggtgatagtgattgagttggaatagtggtggggttaggatagtgatagtgttgagatgagggcagtgttggtgatggtattgatgatggtgatgatagtgttggaatggggatgattatggtgattatgatagtgtcagtgatggggatggtgttggagatgatgatggtgacgatgatggtgataagatggggatggggatggtgataatgaaggtgctgggatgggaatggtgatggtgatgggggtgttgggtaatgggaatggtattggttattatgacagtggtgataatgatggtgatgatgatggttctggtgatgatgttgtttatggtgatggtgttaggatggtgcgtttgaaagctgacagagtgaagtgccataacttggcttagtgcgttgctcacaaggaaagcatttagtaaatttcttttgactgaatgagtggaataagtggctttgggaggccttttactctactacactttgtctcaatattaaattcagcagccaatgatatcagaacccaaactgtatttacataaatgtgaaggagagactggctttctggggactgacatttttgcttgatactgattaacttatatatttcaactgaaatctggtttcaaatgtttgagattttgaatgttttgccttctcttttttcctttgcccacgtatgatctcagtttgctttgtgacccctgttgagcaacgcagaggactttccagctgtggcctagggccgatgctctagtccctccgtgcctgactgcacttgaatgtaagacagagctgatcatgaagaatactctcctttcccgtaagcaccactttggagcaatgactagaagaaaggtccaagctcagctctaaaattaaaattagccatgtttcatcaaatgtagactttggcaaagaaaccatttctgcctcatagttaaactctgagtgtaaacaaagaagtcaccaaagacatgtgactccttcttggccagacaataggggtcactgcccatgtctctgagtcagaggtagtatccattcctccgccagctggttcttcccaaccaaacacccacactgcaacttaatgattagccattattctttctttcctcctcctctaaccagccctccgtagcaatgtccaggctcattccacagatgtttgtgtgagaacagatctatgttaaatccagatgagaaaaatgcctgaaaaggaggaaatgatttagtttaacaacagaggacttaagtgcaagcagattgacattagtttgtgcctagaaattatgacacatctgcaatcccacagaggaattgtgctaaatgggcccacacagcaggagcactggcctgaaaaacagcctcataacatggaatctgctcccagatacagaataagttatgtgtttttttaagaatgcgatctcgttgcacacatagaagcatttgtgttatcaactcacttcctcaaaaatgcttgttattggcataatttaaattaagaccatcaaactaagctccagaaagagcacagtgttgtaactaaggagaagagacaatatactctcagaaattattattattattattattattattattattattttgaaacaggtctctgtcacctgggctggagtgcagtggcatgatctcggctcactgcaacctctacctcctggattcaagcgattctcctgcctcagcctcccaagcaactgggattagaggcacccaccaccacacctggctaatttttgtatttttagtagagatggggtttcaccatgttggccaggctggtctcaaacacctggtctcaagtggtccactctccttggcttcccaaagtgctgggattacaggcatgagccactgtgcccagccagaattcttccttaaggaccagagatatcataaccaaagttacttactgagaagtgcatcctcgacttcagaagtgattttagttttgatttttggttacatctgtcatctgttcattcattcactcatgaattatttctcgatcacttgctaagtgccaggctgcatgctgttctactcacagtataattcttctttaagcatttattacattctaaaagaaatttcctgcaaaaaaaaaaaaaaaaaactataatatgtg

SEQ ID NO: 39277 - DNA, 2166 bp, Homo sapiens
acaagcacacttttcagaagagcttttcctgcactaaacaccagctgatttgtggagcatgattggtagttgagctacttaattggattcctcagaacagggtcagtaaaaatagatgcaaatccatagggtgacatagtcacataagattgtggaaattgtaacatgactggctctaggacacgcacaaattttcatatgcagagtcctgagaagagtcatggtgaagaaacccacttaagcaattccaaagttaaatgacaaggaagactgcactaatgtcctaaggcatcgggtcctgcagaacttgtttgttagcaaaaccaccccagatggaagacttgggtggcaattccaaagggccttttcctgcattcctgactgaccttaattgacagtgacgttgacatcgcaggcttttctggccatccaagtagtgaatgaacttgcagcaaaccttggaaaaccttatgcaatcctgtgtcaagaatctcgtgacaaagtaaagaatcctttgggaatgggcatgtccacctcttaaattacatacttgctgtaaaacaaactggcagagctactgtctggtgaccacaaaggtaatttgcctacaactcagaatgaagatttgtcccagaatgagttctttttaccaatagagaatatttgcattcagagaatctgggccagaacttcctcatctcttttgaaaggtatgcttcccgaagcctctgggttggccctggtgactctctgcagaagaggagggtgagttcttcactgcagtttaagatgcacccatcagggccatgacccgttcattatcgcacatggcccttggcccaggaccaaggcagaaagaggcacagattgctcccctcttctctgggcctcttgacaaccctgagctctacactgctggatatatacataaatatatatagtcccatgttcttaagtctcactttgaaaactacaaccctcaagtgacaactgggcagagctctggagaagatgggcagtgactgggagccctactcagggacacagaaccatgagtggtgggtcgcctctgtaggttaatattgagtgtcaacttgattggattgaaggatgtcagactccaggttcttcagctttgggattcagactggcttccttgctcctcagcttgcagacggcctattgtggggcctcaccttgtgatcgtgtaagtcaatactccttaataaactccccttcatatatacatctatcctatcagttccatccctctagagaaccctgactaatacagcctctttctcacttttcctcttccccaggaggtcctggccatgcagtgccgcgtggaatcaggacagatgactcatgctccaagaattcttcactttgcttagaagaccagccaaagaaaggaaactcccttgcatctggcctccttcttgggggagtggggactgcggtgctctctccccgcctgggaggggagggaatgttattctttgcagagctgcagatgtatctatttcctggggttgctgtttattctgttagagattgaaaatactgggtgaaaataaagtttaacccagaaatctgactgataggattcttggagggaaaggcatgtgaaccgaaaatagtcctcagtattgagtcccaaggacttttactccttttttatttcttaaacaaaatttcaattggtggataatagtttatggacaagactttatggaagaagcatgtgtgatggtcacaagtacctgcaaaggtcaaaaagcatgagtcttttatatccagcacataaaaatagcatagatggttccagaaaactggccctggtgccctatctgccatccccaaactagagctttgaggttcgttcaagggaggagtctcacagatacacgaaaagaaggctacattgtgacaatgatacaggatattaaagttaaaaaaaacaaaaagatagtttagcccattcacttcattcaatcccagacctctagtttggaaactcaagacaagagaaattgccacagaaactctgtgcagggtgaaatgagctccttgcttccaattttcttgcttgtcagtacccatatcatacccagaaccaacgtagccacgaggaacaccacacatgcctctgcctagcaatgc

SEQ ID NO: 39278 - DNA, 1582 bp, Homo sapiens
ggtgttggggctgcgggtagggacaaggaattgaggagtctcacacttcacacacttctatattgactgaagtttgtataatatatagttactttactattttaagcttaagatatgaaatattaacttttaaaaggcatgcaatgggccgggcgcagtggctcatgcttgtaaccccagcactttagcaggccaagcgggcagatcacttgaggtcagaagttcaagaccggcctggccaaaatggcgaaaccccttctctactaaaaatgcaaaaattaatggtggtgaaagcctgtaatcccagctactcaggatgctgaggtgggagaatcacttgaacctgggaggcagaggttgcaatgagccgagatggcgccattgcactccagccttggcaacagagtgaaactccattcccgcccccaccccctccccccagaaaaaataatgatttttttccaaaaaaaatagctatttaggtgctctattttgtaacactacagtagaatctgcaagaaaacaagcactcagctaataactttattctgaatgtaatgttcaagttagaattcaactcacattttctccccaaaaggacatgaacatttgaaatttatgcttcccagctcctacagtggtgttcggcagccaagcagtttttcacagatgccatgggtagggttcaatggtcactgtactctttacttagtgagggtggcattgtcatatttcaccaggcatggccaggttgctgggatgacacatccagccgctctgagctttgtttgaccttctcccagcctgcagccttaagagggaaatcagaccaacctatgacttctacaaaccccttccacggtggcaccgtgcactcacttggcctccttatctggttctgaggatgctcaaaggtgttatgactcccactgaacagaacctcgcatgagaggagagcacaaagcctccatgctggcccggagaagcacacacattaagctttgcagttgaccaaaggcactcccaaacactcccagagttgacaagttatggcactgaacgctttctgacttagtctttacagaagttgtgatgttgcttggacaggtggcatttcatttttgcggtgatggaagttgagattcacggagaagtgaattggccaggtccattccactggcactaacctgtgttcttcccagcccactagcatatattgaaccagaaagtgaacagtctggagactaattcaaataccactgagggggatgggggattaaactatcccatcgtttatggaagtaatttggaaaattaaaaattctcatgtcctttgacaaagcatgtctcttccaggaatttatcgtacaaacgtccccatgtatcgaaatgatacgtgtctgtgctattcattctactattgtttgcattaggaaaaattggaaacaatctaaagaccctttgctaaggaatatttaagtaaattaataaattgaatctatgcagccttttaaaaagaatgaagcagattgatatgcccccatgtggaatgagctcctagatgtcgcattggagaagggag

SEQ ID NO: 39279 - DNA, 1780 bp, Homo sapiens
ccactttggccaactttcccagacacacctttagtttcagtgtacttggagttgctttgctaccaggactatgatgaaagcaaagaggggtccagagagacgtgactggaatcctacttccagagagagatgagtggaatttatgtatgagttatggctagatcatggaatctcagcttggaacagaccctcatgtcccgttaaccaatccctgccagacaaatgaattccttccatataccctgaccctgaccattggcctgaacacttccgtctacagaagtcatgatgcccgtttcatgttttccacaagcattcatgagaaaggcacatgaaaacaccttgctatgtgcctggcacacaacagatgttcaataaatggtggctctgttgaatgtgaataatgcaaaacattagctacttggaggtaaagccttcacactcttttggtattctgcccatttcacctgtcacaagcattgcctgtagtgctttgttgttttgcagtggctttataatattctactcatggggaactgtcattgacttatctgcacatttagtctgctttgaaatttacagagagagatatatacagatgctcctcaactcacagtgggattccatcccaataaacccgtcgtaagttgacaatatcgtaagtcaaaaatgcattttatgtctcatctagcaaacatcatagcttagcacagcctaccttaaatgtgcacagaacacttacattagcctacaattgggcaaaatcctctaatgcaaagccattttataataaagtgctgaattgctcatgtaatttatcaaatattgtaccgaaagtgaaaaacagagtagttgtacaggtgcccaaagtacagtttccactgtattgctttcacaccatggtaaagtcaaaaaattgttcagttgaaccaagatagtcgagaaccatctgtacataaatacagataagcatctttttgcacatagtgttattttttaaatgtctttgttttaagaacacaaatatcagtcaaaagagtaaactttgggggtgtgttcatgaaaaatagcacgttgctaagccattgatattcagagtcacccggtctaaaaaccaaagtccaaaataaatagggagttcagcaaacatgaacatgagccaaacaggagccctggcaaaaagctctaaagattgggctggatgaaaggaccagcttctatttatattatcaacccacaaaccttctcggacaaccagagccctgtcacatttggggacctttatacaatatctcagctaaaagcaaaaatagcaaagagcctggcatttcaaaaggataaagagacacagtgccaaaattcagaaagttttcatttcattccatccccaaagaaaaatgtattatctgttgaggcagaaagagaatagaatagcattttggagacagaagagttggtcgcccccacaccctgggcaggagcctggggtagaggagagacaatggcgggtgacaatgaatgaggtggagggacctgtctgagcccctgcattcataactgtgaacctcctgagcttactttgagaattacatgagttgggagcgctataaatgcaggcccccaggatcaccttccttctgaaattaaacctccttttgttgatgggagtcccaaggccagggtgctctcaatgtagactccattcctccctccccgcacataatctctgttttcggcactggcttttccttgctcaggaggtttcttgggtctgttgctg

SEQ ID NO: 39280 - DNA, 1930 bp, Homo sapiens
ctttggggaagtgataagcctctcccactcccgaagcccttgtcctgccctgccccccaccactcccaccccaccccacctccacccctgttaagctcaaccatttcaggccaagtcgtctggttatagaatgaaatgtacagagccttcccaaacacggcctcacccaagcgagatcccggaggaaaaagttggaagagaaggtgcaacaattaattctggggtaaattaatggggcaaattaattctgagcctatgatgagctcctaggcaagaactgcatatcaaactaaaatgcaggcattgtttaaatctgactcaggggaggttggggagtttgctactgaaaagaaagggttttgaagtcgagtctctctttaaagtttaattgggtcctcagaggacatgagtttgccctacagaggagattcagtaaacgtgcctcaggctccaaaggcaaatcccaaagcaagtggcctccagaggtgcgctgagctccacgcccattggaatggcagagggcttttctgaaggggccaggctcagaggaggagatggggtcctgagaagccatgggtccagcaaccagggctgggctttcttcccaagtaagtgtgctagcaaaggcccacaggcaatgcctctcaaaaacttccaccaaagcattccagacagaaaggtgaacacatatttcaggggtggagtcatagtcctaaagagttggcacgaagtaggtctctttatttatatttaaaattcacaggaaccctgaatccaattccataaacacacacacacagagatgcttgtttaacaacgtccaagaaattaccatcaagtaccattaaggtgctgtgtgctccttggggcttcatctcataacttaatttagcacctgctactctcaagtgttgatccctgacctgcagcctcagcatgccctgggagctctaagaaatgcaggatctgggccccatcccaacccagagaaccagaatctgcactttttttttttttttagatgaactttggctctgtcacccaggctggaatgtagtggtgtgatctcagctcactgcaacctccgcctcccaggttcaagcggttctcctgtctcagccttccgagtagctgggactacaggcacctgccaccatgcctgggttatttttgtatttttagtagagacagggtttcaccatattggccaggctggtctcgaactcctgaccttgtgatccgcccacctcagtttcccaaattgctgggattacaggcgtgagccaccgcgcctggccagaatctatattttaaccagatcctggtgtgactcatttgtacatcaaaatctgagaggtgttgctctgccatgtgttgtgaagggtgtgaacatccctgcctaggaaacatagctgcacagacttttctggaagttctgccagtgattcttctccatcctaccgctcgttaaccctactctccacttcgttgcttggttttatcttctccagagcacttacctgatatgatcttgtttgtgtttggaatacagcttcaggaagcaggatttgttacagcttgtgaaacaacctcacttacaacagatgctcaatgaaagtgttttaagtgaatgactctaacagggaggagagaaggaggagatgtggggtgggttgtaaaaggtaagtcaggggtcagtctttttatgagaatttctctacaaagaacaatgtattttttctcttgaaaatgataaacaaaatgtcatattggaatgtccacaccataatctgtacttaaatgttcatatcagatttattcataatggccaaaaacagaaacagcccagatgtccatcaatggaagaagagttaaacacacagtggtatgtccacacgaaggaatactaatcagcagttaaaaaaaattg

SEQ ID NO: 39281 - DNA, 3718 bp, Homo sapiens
actaaatgggagcactataaataatgcaagctattccaaagccattacaacaaaggcaagcttgaaaactcaaatgcctgcaggggctggacaggaaaaggagcgcgtgggccaagcaggactgtgtgaactgaagaaacaaactgggtctaagggaaccttctcagctgactgctccctggggacacggagtcaccaaatgtcccagcttctcaagacatgccagaaacctgggttttcatgtaaaatgcactgctttgaatgtaataaaattgtttaagacatcacatgcacgaaacaagacacaagtgccaacaacatctgacttgttcctaccagtccacctcccccgcaagccactgtccttaagaaagaaaggcaaggaccaggggaaagccagcaggtcagtctgggccacgagacagcagctctgctacccttgaccttgacatttgtcctcaggcctctggagctgcagtggcagaggaaagcgacttcacaggagagagaaaccagattgagcgacattgggagtttgaactggctccaccaagaatttttaaaagggaccagggcacagtggctcacacctataatcccagcgctttgggaggtcgaggcaggtggatcacttgagtccaggagttcgagaccagcctgggcaacatggggaaaccccatctctaaaaaaatacaaaaattagctgagcatgctagcacatgtctgtggtcccagctacttaggaggctgaggtgggaggatcactcgagccagagttgcaatgagcccagatcatgccactgcactccagcctgggcaacagagccagactctcaaaaaataaataaataaaactaaaaaagggatgagccggaacataatgtattaatgtgagcttttccaaccttccatcctccaatccaagaggggaggaaagcttgaggaacacgatgtgcagaccggggctgaggctgggggaccagggaaggggagggtgcggtctgagaacactggagggtgagtgcagtgggtttaaggaaagctgccagggactaagattagatcatctttactgtccttcaagaggcccaggtaaaagcggaattacttttgactgttacactgtgtgttagaattcaataagaccttgctgagactcggccagttcaggtgaatctgtttactgtgtagaaattctttcagttccatctgcaaactgaaggagaggctttattccccccgtagtctgcaggtctaaggatgcgctctgtaaaatttcgtaagcctctgggacttgcccagcgttctcagtggtgactgtcttaaaagcgacaatgttgtttgggagcatggaggtgaagtgaagagagggcagctgctccacttcgtggcctacgtggggaggagagaaactccccctcaggttaagggcagaagacttgtgtagggaggggtcatgtcatgaggaaaagctgcacctgtgacatgggggcaagacagggcttgtctgataaactggtgagactgcccggctgaagcccattctgaggggggattgacagacgagcctcttggaagagaattttcccaagggaagagagccaggcaggcaaggtcaggccggaacaaagccttagtcatccgaggacgacacactccgagtccagcccacgtgaccctgatccagcccatggaatctggctgaaatcctgggagaaatgacttggagccaagatgaaaagaggtgtgctcatcacaagtcagtcagaccctgggggtgccagacggggagaggggcttcatccctgcttcttcccaaagcagccctcagctgtgctcccatatgtgacccgcccccaccacctcaccccaggaagggcccacaggggtcagagaagcacctgggtgcctggggaaggagggccagagtccacaagggacactcccaggacttccaggacttctgggggtggggcagcctaaggtcatcaaataacaggaaggggcaagaaaacacatgctccaagagtgaaagtgaccccaagctaacatccaatctaggaggcccaagaaagcccagaagacaggcgcatccacatgtccccccatgattattttttagggtatcatgttttactttactaaaattgtaagctccttgaaagcaggaatctttgtctcttttattcgatgctccgttccggtgacagaaaagtgcctggtgtatagtaaagtcaatacttattgtctgataaatttcccatagagtttcaccatcatagggttttttttttttttttaatcaattgttctcaagctttttgtagcagcagatggtcttcttgaaataaaacctcgtggggaagctcaaaaagcaaaacagataaatgtggagttcctctgatagaagaggagatggaatgagggatctctgtccaacgcagcccagcccagccccatgccttatggctggccctgagaatgcttcaggcaattccttaggccacaaagaagacagctaaaaacacaaatatggtcattttgttaaaaacgaagctgacagagatgcccatgcaacctttccccctggtggcatttggaaaaaaactcagtgatatgagatgaagccccagggaaaggattaatgctagcttagcatatggacggatggagaagctgaagtcagggcacccttcagttcattatgcagggacggagggcagagcaacccaaacctggcacatcatgctcctccagccaacatgacagcacccggcgagccctgacacctcataaatattcatggcctttggctcagcagtttctgaatattcctaagtttgaactctgcctccacactgcccgggacaggaagccaggtggaattgagacacagcccttgcagttttatcaaatggtgagtttaattctattattattttatccttccccagaaaactccagttttgcatttatattgagttactcctggctgtgtctagcaacaatgacacaatgtccctgtcaggacacatcccaagccacgggggtcatcctctatctcccattcatacgggtgtttctaacttttgccgagtctaattccagagtaagaaaataacactagtgcctgacaaacagccagcaccagggggtcgaactgcatagattctagagttgcagggcctgggaccaaatggcagctctgtcatttttgcttgtgaatgttgctgatttgggcaacttatgtggtttctgtaagtctttgttgagaatctctacagtgtgggtaatcatgcctgtatcagtttcctattgctgctgtaacaaaagaccacaaacataggaacttagaacaacccaaactcattatctcattgttctggaggtcagagatctgatatggatcttactaggctcgatcaaggtttcaggagggctgcgttccctccagaggccaccactttccttggctcatggccccttcctccatcgtcagagccagcactggccagctgtgtcctcccacgctgcatccctctgacttcttcctgctgcttctatttataaggaatcttgtgatcatattgggcccatgcagggaatctaggatgatcttgctattttaagctcattgattagcaaccttaattcaatctgcaaccttaattcccctttgccatgtatggtaacatattcacaatttccaggaattag

SEQ ID NO: 39282 - DNA, 1288 bp, Homo sapiens
ttcctcttatggttcactaaaaagcttaggctagggccgggcacggtggctcacgtctataatcccagcactttgggaggctgaggcgggtggatcacctgaggtcaggagttcaagaccagcctgaccaacatggtgaaaccccatctctactaaaaatacaaaaattagccaggcgtgttggcatgcacctgtaatcccagctatttgggaggctgaggcaggagaatcacttgaatccgggaggtggaggttgcagcgagctgtccagactgggtgacagagcgagactctgtctcaaaaagaaaaaacaacaacaacaacaaaaagcttaggctaaatcattcgcctgaaggtctcagtgtcctccagttttcatgtacaaagatggcgtttccaccttctcaggactatcatctcaagagcagactcaggcacagtcctttcatattgactcccgctctacatttcatcacctttcagagaatgcgcccagaacaacaaaagactgtttgcagttctaatgattttcttgctgacctttgaccatgcagacaacactctgttttctctatcccaaaatgtgtctgtgcataatgccgtgtgacattcacctctatctttgaattgcaatgaattagggattagagcctcagtgaacgctgctgcccttttcaggctgtttcaactctgcagggatttatttgccccattttatgtcagtaactttgcctttgcaagctttacctaggcttctttaaaaaaattatttttttaacttatagaatataaccagagcaaaccttcagagctgtggggcagggaagactaattggtgttcaaaccactttgaagcttttagtccaagggcagtagcatctccataaatgttgtgagtatccaagggcctgatttcactccaagaatatgatttgtgcagtttgcaagttgttttctaattgtaggatgtgaagaactgtcggctagagtctagattgattctgatgagagcccagagacacaaattcatcttcacttgccctccttgtttcacgtttagatggccacagatttcatctccaagatattttaaaaacactgttttccctgtggtccctaccccgtcatgaccatccatgtgtcctccattaaatgtaaccaatttctgtatctttttgaacttcaaaatatttcacaatcaattgtctagataaacttacatctcatttaaaatggcataaaaggcgagagagaagcttgcttgcttcttgaatctgattacaaaaaa

SEQ ID NO: 39283 - DNA, 4047 bp, Homo sapiens
cagcctgggcgacaaggcgagactctgtctcaaaaaacaaaacaaaacaaaacaaaaaaaactgccaagactgggtaacttataaagagaagaggtttaattgcctcagcctcttcagccagttccactgaagaggcctcaggaaacttacaatcgtggcagaaggggaagcaggcacatcttacatggcaggaggtgagagagagagcgagaggagggcagagaagagaggagacaggagaagggtggagagagagacagggaaagagagcaggaaaaactatcatttataaaaacatcagatctcatgagaattcactcactatcaggagaacagcatgggggaaccacccctataatccaatcacttccctctctccactcctggggattacaggtccctccctcaatactcgagggttacaattcgaggtgagatttcagtggggacacagagctaaaccatatcagccatattccattgtgttgtgtctaacagtggaagctccacatatgcagctagtgtgaaggaggtgatcttaaaatccattcgaagaggctcaactggtggaagtgctcgaatgggtcctatgtgattcagctccattctcatccacttgcagctctggatcgaaaacccagagatgagtgacattctgttcttatgggtgcccagagtggtagctggtgtatttgaggatggcagatagtgctataaaacaagagtcccgttgagactttgctcaaacagagcccccgcctgtctgttggagattctttgtttcacccttttcagtaaccagagccacagcttctttgctcacgtccaaatggagaaaaaaaaatggctgagctttgcactgcctgggtcacccctaactcaatccctgccaccaggctgcagatttgggtagcagtttgttgccctaacacaggataactgtgattggttgatatcaatcaagatatgtccctaaagacccagaggagccaatctcaatcaagccttggctgcagcacagtgagaagtcccctggcatggccaggagaaacctactttgcccaacaggtacgtatccatgattggaaaggaaaaaagaccaatttgtactgaacctatattgagtactgactaaggagcttttaccatttaatttaaccccaacagtccttagggggagggcttgctatgcttatttcacagataagaaaactttagctcagagagtatgagtcatttgcttaaggtcccacagctaatatgcatcaaagcttatctcaccgatttcatatgctgcttggcacagcttgttaatgaccctgaagtccatccaagctagacctgggaaatacattttagatcccattcccccaagttttgttgttaaaactcatgtagagtatttggaatacatatatatggaatatgaacatatatatatatataaaaacatatatatatatggtttagactaaagttggaaggaaaactaaagatatgttttttccagttaagcatcttctaacagtttaagtaattggtttgtgttatcagattgtggtctaaactagatcacaggaatgaatcatagctgatgtaatgcacacatgtcttagcacagctattatgtggtacccaggtgcactgaattttacaatatgaaaccagagctctgcccttgaacccggtgagcaattatggcatcatgaactaggcacttggatgcagttcaaagagctgagaacaagttacgaaaacgcagggaaagtaaacttcggagttccagagaggtcactcaatctcctcctggccttgcagagatgccgatatcagctccatgtgaaaactggtggggaaaacctacaagtccaggctttcacttttcccttaaaagaacaggggttgtcctgagctgtgtagcctctgggatggtgagtcttccagaaaattttctcccaggggacttcacggaagaagaaattcccttcaaacttgggcttttcagttctgttactagcatttgggattggaccaatagcccctgatggcaattctggttgggcaggggaagtgtgagagtgtggtgggcaggtgggtagaggtgggaaacgaagcaaagggacagagacatgcaggctaatgtggatggtggagacctcccagcaagggcagcactgcctgcagcaatgccagaaagacagcctgaaagagaagctttctgcaaccttagttctttttgctcaggaagtactaaagttagaacctgctgtcttttaaaaagaaatgatgttatttcacagatccgcacatttaaataacaaataagccaagacaaaacaaaacaaaatgtgaagtcctaaaatttagttaagatacatttttcttctaagagactgcatggaaattttgttgttgaaataattcactgtgctgagcttcacttgaaatgcttaaataccttgaaaccatttccatttttgcctttactcaaaataagtggttactttctaatgaatgaaaagcccagtatgtgaaaagtgtggcttaggccaataaaaagggaggtaacagcattttagtagtttctcagaagcagttaaaaaataacacaatgaagtttaacaggctgaggaaacatcacaccccatcattaaaaacagcaatgccaaaaatacccaggggtgaacagaggtgagggagactgccaaaagattattgcttgaaggattgcctttccttgtacgggtacctacccagggcagttgctccaggttcatgcaggggtggccatattttgtatcacgtgatcctcagtccacaagctgattggaccagaggaggccacttccccagaggctgatcagaacaccgtgatacagctccctgcagggggcgctgcgctgtttttgcagccaaatgcaaaatgaaactgtaagtgctctcattcaaaaagcaggagaaacgtgccatggaatgtagtaaaagataaggcttttccctttttctacagtctctcaatttgttatggtgtttttactttgctccttgaggtcgttttgagtaaagaaagaatacaattttaaatcattagcatgaattttaccattactcttcatattgtgcaatttcacgtttaaatacaaacataagtacatttaactcatatgcagcatcaccaaaattacacaatttgtattttgtggcttgtacatgcatatatatttcattcttagcagaacattggaaacactacaacacatgaactcaactgtctttatttcacttcttggtgcacacattttctactaacaacctctacttttggcttattgatgaataaggaaagacttaaaaaaaaaaaaaaaaaaggaaaaagcaagtctggctctcttgccctttccttctaagtcctcgttttcagcataaggggttagctggcatagctctgaagcctgaatatctgagacagatctcagttaatttaggaagtttattttgccaaagttaaggacatgcacctgtgacataacctcaggaggtactgatgacatgtgcccaaggacatcggagcacagcttctgagaaaccattaaaatggtgtcacctccccttttattgtcctaacccacacttttcacatactgggatttgcattcattagaaagtagccaccacctgatttgagtaaaggcaaaaatggaaatgttttcaaggtatttaagcatttcaattgaagctcagtacaacgaattatttcaacaacaaaattttcatgtagtctctacagagatatgagacatcaatcaatatatgcaagataaacattggtttaatactgaaattccaggtcataggtagataagagacaaatggttgcattcttctgagtttctgatgagcctttccaaaggaggccatcagatatgcatttatctcagtgaagagtgggatgactttgaataaatgggaggcaggtttgccctaagcagatccagcttgacttttccctttagctgagtgatttggaggccccaggatctattttc

SEQ ID NO: 39284 - DNA, 4626 bp, Homo sapiens
ccccaggcagtggcgcagtggttagaccccagcctctggagtcggcctcggttcagattctggttctacccttctcctctgtggcgaaccaaccctccgagctctagtttactcgtgtgaaatggactagccaaaattgggatttttttttttttttaggattagatgtgtcggtccatagacgttgctggccacatagttaagtggtgcgttcactcactgggcattgatggagcgcctactacgtgccaggcctgttttacgcgccgggggcccagaggcgcccaggtcagacaaagtgtaaacgattccgaccagagcccttcaatctgcattccgcttcgcaggaaactctcctccttttatgattttcagccggactgccttccctgttgttagtttgtaactttcgctccggcccccgcagcctcgcgcctgccttccctccactgtcctcagccaaggtgtagtaaagcgtctccgaacgcggcgcgaccctcgcccacgcccgctcgcggggggaccgcaccgccccaggggtcctcgctaggggttcccggagaaggggtgggagatgggggtgcgggggggcacaggagcgcgggccagcacccagacctgctcggtaccggggacccagacccgaggatgccgggcggccaaggccccgctaccctggccggctccgggcggaggaagaagaggaggcgcccagactggatacccgcctggacccggagccgcggcaccacccccagcccgccccacgctcgccagcctcagacggccgcgccccgccccgcccctctcccgaagccccgccccggcgcgggaccaccccctccgcggcctcagctccggtcctggccccgccccccgcgcccccgcccccgcccccgcccccgcccccgcccaggcgcgggaccaccctccgcccgccgaggcgggggcccagcgcgcccggcactctcggcggtccgggcccctcgccactaccgccgccgccgccgccgtgagtcccgcggagccgcgcgcgcccccggctgggccgagccgctggccgacgagcggagcctcaggagccggcggggacgccatgcgagccaggtaggcaggcggcggcggggagcgcctcgggcggcagggccctgggggccggcgggggcgcggggtcgtgctcgggggctttgcactcccttgcgggcgcagatcgtgccgcgggcgccgatcgtgccaccgccgcctgagttcggggctgcgcgggtgcctgggcgtggggcggcttcggggaagcctcgcgcgcccctcgccgctcccccgggcgctcgggtctccctggtgctggtgggcagggacccggcccggggttccgggcgccgagccgcagccctccgcgtgcgctcgggccgccccccaaccccggctctggccacttcccggcgggcggccctgcggggtggcctccctgggcaaccggacgcgtcctcgggcgcaaatcggggggcgcgctcggctcacgggggccgtgggggccacgggagggcgtggaggggtcggggcgcccccctcgagcggcgctggggaggagggaaggacgcgcggtctccggttaaacttgttggtgacaatgcatatttcaacttcttcggagatccctcctgtgaggatgaaattgaaaactccggtttctggcttggcgatcgggtgaccgagcagccgcgaggtgacagcgccggcggcccgcgggcggggaccggctgggatagaggcgcgttgttctctgagcgatgtttaccgagaagcccgctccgcggcacgggcgggtgtcagttgggaccccaaccctgggtcccgcggctcctagcccggggcctgcggtgtagacgggggttggggacaggcccagctggccctgaccgggtgtcgggcgcccagagatgccgcgcgggaggagccgcgggagagccgccggactcagcgagcagagggtcgtggagcctgatggatcgatgagatctgaaaaagaacactgtgcgagattgtattcctgcttattctttccaagttagtaggcagattggaactatagaatttatccgtgataataataaagttcgcataacttttgttctgattacagaaacaatgtatgctcaggacagaaagctagagataaagagaaatataaacagcaaacaggaaaccatccccaatcccacattttttaccagccttgtcacagcctggcagatttgaacattaagttagaactggagccattcttgcctaaaccagagaatccctgaatgcagccgccccttctcacccttgtgaccgtctctgagctccaaagtttgggttttttccttgctccctacccgggcagaatctctgctggccacgagtccccttcccagtgggctgggggctttccttgagatccgtggcccagatgaaatgatgggagaggcctggatcctcaccgccctctgtggttttggttccttgccttgtaaaaatgaaggtaatgattctcaatctgcttctcaagccaccataaaaattaatgggtggtttgcagagcgttttgacatccgtggatggacagcggctgtactttaaggcgctggggaacattctactgttcctcattgcagtggtcatgcagtgtaataggctgcctctcacctggccgtcctgcccaggaaacagactccaggaatgtccagtggagccctgaggacaatattcctggttccttgctcagtgccctcgggactcggccaaatccctcagagtgggaagcttgggaagaggcagcgctctccaatccccctcctccacctctgctttctgcttgtaggcggatttcttaaagtaagggggcagtgatatttaggcgggaccccagattgcccactgcctgatgtttgtgggtctgtggaatgcccgggccgtgcttatccaaaagaacagttagttctgggaggacgcataaactgaacaaacctggcttcctagagatttgtatggctcacttgtttactaaatgaacaatgaccggctgcggagaagcccaggacacttctgtgagctttattattatttttttcctgttgtcccaagactacattttagtgatcttataaaacaataaataagaacccatgccatttgttaattctgggtaccaaaggcccaggtggggagaggtacttcacagcatgccttttgtccccaagcacccatgccacccccacaacaacaaagtaatcagggtagaagatcctctttctgtaaccgtctgtcgtttgatagtttcattttttaaattgtcctttccaccagcacgtggatctgatcagggtctgtctagttgcagatcacagctcaagagggggttttggaaagacccagaaagtgggctgaaaaaaatgctgataaagtatccttcaccgggtgccttgtctgttcatgtattgtgctcttacttttctctgtggagggaggaccttcctggcttttctcccttgctcttgtttgctaatccggcagcctggaattatttccctctgggctgcttgaatagactttcttcttattctaatgctggattctagtctgatcataagatatgcgaatggtgaatgtggtttacgcccttgaatcctgggaggtgttcctggttttaaatcctgggatcctggccagttaagagcccctggctcccctgaaattgcgtgggaggtgtgtgtgctttcttttcctggggagcttcttacagagcccttgacccaaacaaggttgagagctccagagtgcggccctggcagacctcgtccctggaccctggctccaggcagacctcccagttccagcctcgtttcaggtaccagccttgttttgaccgagtaggagctgctgtttacaactggccagccatgtggatttcccttagctttattattttcaaattgcacacctaaattgggctgtgttgtgatttttcttctgcaaattggactcaggcccctgggacatttcccaaggccctggaggtgggcatcaggtcttctctgttgcgaggtagccgcctgacaaccaggaatccgaaaaggtcaccgatcactaaatagagttctcagagcactctcagtgcgcgggtcagctttgctcctggccaggagcgagcctcaggccaagcaacgtttacactcagcttctggggagctgggctaggtctctgggctccccagctatttgcacgaaagaagcctcacattctgccaccaccctgtggagcagtgacagaaaaacaattcatctagcccccaaatacccagggaacaatccagctacttgattcagtatcctccaggaagccgaaaccagctcctcggtgggccctgagggcgtccacgtgttacataacccagcacctgatcccaccgtgacctcgctaaagggaaaaagtctcaataatcagtcttcagagggcgagggagtgcagaatatgctttagaaagaggctgtgtgccgtgttttaagaagggtaaaatcccatgtagaacatcacagcctcccatcttccaggtgaacagtgcctcctgaagtcatcaggaagca

SEQ ID NO: 39285 - DNA, 6708 bp, Homo sapiens
cactgcagtcactgcgggaccaggtactcttttcctgcgccccacactgccccaaggccccactggtcatccgtccagcactctgtgctcgctgactggtgcggtgaactctccggctgggctcctttcctgctgcaggtgccgcgtctctttcttaagcctgtgtagaaagttcttttgtccgggtgacattggcatgattgaatcagtgccagagccaaacaggatgtggttctgggcgactcccaacttccagcaaatccgtggttgttttcagttaccttaagagggacaactgaaacagagacaagcaccccaacagtagggtgcttcgaggtcctggaggggagccctggccctgtggagagagaccgagtcgtgcagcgtccgtggcctgcatttgaaactgaagggcaagaggctggtgagatccgagagtcatgccgctgcgtggaggaacatgctgaacctctggaggaacggctctacctccaggtcaggctggaggcttttgcatttggtttggcgaggagagacagcaggatttctgggtgccggacatgcttctcggtcagagctggtgcgtttctttgcagggcaaggtggaggcggggatgccagggaggcatctgctgcatttcttgaggtttcacagggtgcagagcccctgtcctcactgttctgtggggtgctaagggagcaagccatgtggtccctgaactttgagtagatacaggtaatatttgaaaatatttgggaatgtttacacaatcacaaaaacaatgaacacttgtgtagccactactcaggccaagaaatggaacttaactttgaaattccctttgcccctcccaatcccagcttccagctcccgatcctctccccttcctgcaaaaatgtgtttatcagataaacctgaagcatttgagggagtccctgtcctgaatttcgcagttgtcattctctgctgttttttagttttatcacatggggttgtgtttctaagcaacatcgtttgtttttgtttttaacttttatgtacatggaatcatgcagtatcttttgtggctggcagactctgagatggccttcagtgatccacacctcctggtgttcacatcctgtgaagtcccctccctttggcgtgagccgagctagcaacttgcttctaaccagtaggatgcatccaagttgatgctgtgccttcctcccgtgattacattatgtgggcttagaacttcttccttgacaacagatggtctcccctgctggctgtggtggagcaggctgccatatagagaggccatgtggcaaggaactgagggtggcctcccccggcagccagcatgcagttgaagcctcagtcccatggccacaagtaactggatgctacaacaagcagatgaccctggaggacccctcccccagatgaccctggaggacccctccccagtctagccttgagatgacaccccagcctgggccaagactttgatggcagctctgtgagaggccctgaagaagagagtctcttctttaccagttaagccacatctggattcctaacctacagaaactgtgtgataatagaagtctgttgtttggggcgatttgttacacagcattaggtagctaatacatagtcttgcaagagttcgttttttggctgagcattatgttcttgaggttcatctgtgttgatacctgtagttgtagttcatctgttttcattactatgtgcctttcccctgtaagtagtcccccccttatctgcaggggatacagggcccccagaaggtgcctgaaacttcagatagtaccaaaccctgtatgtactatttattttttcctatgtatacatgcctatgagaaagtttagtttgtaaattaggcacactgagagatgaacaataatgaataataaaatagaacaattatagcactatattgtaataaaagttgtgtgaatgtgttttctccctgccagaatatcttattgtactgtagcacctgttttgggaccacagttggccaggggtaactgaaaccatggaaacttggggtgaggggggactgctgtatgttaatgccttagcttaattattctttctgctcctaaaggacaataggttgtttacagcctttgctatcaaaaaccacacttgctgtgaaggtctttgtacatgacttccagctcagcgtgcaaatgtttatctagggagtgcggctgggccttggctgccagtccagctccacttcccacagcagccttcaggttcgcccaggctcctccgcatgctcccctccctcaatattgtccgcctttttttcacttggggggatggtctgatgggtgtgagatggtatctgagtgtttttatgttctgccagaagctaatgttcactgaccattctgatttcctcccatgcggaaatcctttttgtggtttttgcccgtttttcttactgaattgtaggagtgcttttcgtttttgtttttttgagacagggtctcactgtgtcgcccaggctggagtgcagtggcgcacaagctctgcccactgcaacctccgcctcctgggtagctgggattacagccttgtgccaccatgcctggctaattgtaggagtgctttgaattttctggaaaataagcctctcttagttacgagcattgcagacactgcatcccggtttgtcccttgccctcatgggcttttaaaatcaaatcaggcacaattctgaatttttctgtcccgggaggataatttgcagaattacacttttgcggcattcctagtcctggcctgtgtgtcctggtctttgggtcatggactggtgcctgtggactcggcccctgtttatcgctcttgcttgatgctgccttcctgaggtggagactgctgggctctgttcccgtctgtggctccccctctagtctgggagtgctttcctgttcagatagctcattccaacctcttagtcactttggagagcctcgttcagtgagtcagcacgggacctggagctcggggacccctcacagccaggccagtgcacacttggaatctgcagtttgtcttaggcccctgaaggtgattgcttgaccgcagaggaatgcacgggtctggggagaatttgcccagcgtgtttagaaggaatgcattcctggagaaagttaaaattagaaaaagctgctacatttcctgccattcagtcgcagttggctggtgtttgtttgcacaaggattctttggtaacaatctgcagtcggtttctggcggaatgtgaggtgaagtcacgactgactttcgggatggaggtgagcggtttccacagggatctttgttgtgggagtgactgctttgttttccgagttgttgcagaatcataccggagtggaaaaatattaccgaaacaatcccttgttgatagttagcaagaagattattttatttattctagaaaacagctctttagtgggaagcaaatatcgtggagcgcatctctttgtaagctcggctgccattttcccgtccccgcctccttcctgggtggccacctctgatgtcgcctcctgaggctgggctttttgggaaactccctctgactggcacaggcagtggggtccaggttgagcaaatacaaatgcagaatacccgggtccatttgaatatccggggtaatgtacactaaaacattattagttgtgcacctgaaaattcgatgtaaccggctgttctgggttttgtctagagacctctcccggcccagctacactttgaagcccgctctgtcctggtctctggtggtgcctgggcctctcccagctgagcggggcatcgctggcaccaggtgggctattggcaccagtgggcacacctgtggctttgcagggttttgtccacttctgtgttggtgccctccgcctgctggtgctgggctggggtcgtgtgcccactttatggaggcggaatggagaggccggagggttaccagcctgtccagtagtgtgcagctcgtaaatggaactgttagtctataggtctcaaagcccagcagctggagggcacaggagaaattaaaccatcttcttccctggggagcaaaaaaagatggtcagaaactcacgcacagggaggaagtgctgtggggctgagagtctgggtggcaggtgggctatccccgagacctgggaacacaggctgcggggaagcctcagtgtggggcttgagggagaggcagtttttgcacaggcagggaggggaccaaggaggcattccctagtcacaggggcagtgggcaaatgggaggaggtgggatatgtataggggagtttgagggtggggccgctgacctggctggagtgaccagtggatgccatggagtctgtccacgtggggtagggcaaactgcagagaaccccgaaatggggcagggaagcctggctccaagggaggaagaggcaggaaggagcaggcaccctgtgctcttgagccggggataatacaatgatgatgaggcagtggggctgtaaatttggtggagagatgcagctgagaccagcggggaggtggtggatcggtggacctgagaccaaactgccgattacaggtgcttgggaagcttccttttctgttcaggcagcaggtgctattgatgcagctgctgctgagcactagtgcaggcctaggggctgggtggggatacagaagtgagcaggacaggtgggttcctgcccgcaggccatacaggccaacttgcgaaacacccgggtgccaattacccagggcactccacacagcccgttcaaggtgcttcttgtttttgtccccagatttgtgcttgagaagctctgagttcccgtctgtccacctgcattggcatatgggtactctataaatcatccatccattcaaacattggctgactgcacctgctatgttccaggttgttcctggtgaacaggacaaagtccttgcattcatggagcctgttctggtgggagaaaaaggagagaagtaaatgacagatacaagaatgtcaagagcggtggacgagaccaggggagggagtgggcagcaatggtgtgcttgtgtttttgatacggtgtggtcggctgagtaatcccttccacaaaaaacatatttctatcctaatgctcagaacctgtaggtgttaccttatttggcaaaagggactttgcaggtgtgattcattgaaggctcttgagatggtgagataccctggattacccagatggaccctaaatgttatcacgggtcttttaagagggaaatggagatcttaccacagcaggaggccctggaatggtgggagcagagactggagtcccgagctttgaagatggtggaggggccctgagccaggaatccaggcagccacgggatgcaggaaagggcagggccacagaagcagctcaccccctcggagcctccagaaggcactggccctgtcgtcagcccagtgggcctggtttcagatttccagcctccagaactgttggagagtcaatgtgtgttttaagccactaagtttgtggtagtttgttacaacatcgataggaaagtcacgcagggttctgcggctttgagggagttacgtttgagcagagccatctgaggttggggctgggcttccctgctgacacgtgggctggggccacagagcctgaaccaggatccaggcctagctaagggtcaggaatccctgctctggcagttgtcctcagcctggaagtgacccacagggcatatacacgtgtatgagttttcgtttgtttgtttgtttggtgcggggcagggtctcattctgtctccaggctggagtgcagtggtgcaatcatggctcactgcaacctcgacctctgggctcaagtgatcctcccaccccagcctcctgagtagctgggactgcaggcacacatcaccatgcctggctaatttttttttttttaactttttgtagagacgaagtcttgctgtattgcccgggctggtctcaaactcctgggctcaagcaatccccctgctttggctgtccaaggtgtagaaattacaggcatgagccactaagccctgtccttttcagtgtaaaaatgtcagatgaggaatcaatcccctttgctgagtataagtgtatcttattaacagaagaaaatatttgcttggctttctaaattgggaatttctaacaatccgtaacagcccactggctttgaccagaaccgactgagtgctcaggaccagaaccgaccgagtcctcagttacatcactcagctgagtgcctgtgtcgtggacagaaaacccagtggtctagcaccatttaccatctgtcctggtttacaacccctgaaagcagagcctgagacaaggacttgggtgctgatgttttcggggagatgactggtcccagcagtccatccaaatagaagagggtgagaagagggaagaggaaaagctaatcgggggtcagctactgagctagtggccactgttaaccaactattagggctccatcatgctggagacgcatttgaggagccatgagactatgccctagaattgtctttctggaggccaggaggcgggggcgtcgaccccagggcagccctgggggctatatgtctgcagcgcatcctccatcctgcaggctgacccgggcttggggctgtggtgtgctgggat

SEQ ID NO: 39286 - DNA, 6984 bp, Homo sapiens
tacctcatagggcgggcacagcctccagttttttagaaaagcaacatacaagtctttccccaccaagtagaaaggattggatctaagtaaacgctacgtttggatgctcaaggccaaagggggagttgagaagccgcagctcacagtgggattcctttctgggccacgttggaattttaaaagcccttctaaataaagcaggcagctacttgcactgtttcaggtttttctttaaatcctgtaaactgagggtagctgattggattttatttcaacttctccccccaccctttctgtcctgtctctttgttttccagtatctgcctgtgccttaggatggagagaaggtttgagatgttcaggaggaggctcagggcttttcatagtgacgtgaggaattcaggagttctctggtcccagggtcagtcctccgcccactggggcctcagcgacttgaaacacttcagcccaggcagaggccaccagcaggcctttccttataagtgcagcccctggccctggaggctgtggtctctttgggctgcggtgaaccctcctgaaaggcatccacattcctggcattctttctgcctggcattggtcagaaagcgggggtttctaaaatcaaaggcgagcactgcagcttggttcttgtctgtagataaactggagagacaccagggggttgtgcggcatggttctctttgggcccccacatggactggcctcgctggactttgcatttggggcatcgccagagcaggccccatcctgagcaaagcaggaggaggttaatgggggtccctctcgggctccagcagttccttgggcggcacgcatgtggtttgctttttctgaccctgtgccagagttactggggcagcaagacatctgggaagaggaacgggagggtgggacgggtgccgccatcccacagcggtgcccgcttgtctccgtggcgggcacacaggcttccgggagcccggtgagggaggtgcacccagacttgccctggatacagcgggcagagcgttgcatgtgcctctgggtggggtgtaggggtgcttgggggcgtgggtccccacagcagttagagaccatccacaggccaccacactttaagctgattttcgttttgccttgttttcccagaggcatacatgtagtgttttcttggtgcctctgaatagtcacagtctgatttgcctgggggtcagtgagagacacggctacccagggtttccatttccaggccccgagttttgtccgtggcaaatttcgtgatttgcacatagttcccacctcatgggttcaagttgttaacctgatcctgctcccactgtcatcaccatcagaggtagtttatcctggtgcctggtgtccttcaggatgaaggaggcagcagaaatgctccctgactcagttcctgagaccagaatgactgaggaaacaggaggcctgcagcagagcacggccgattgctcctccggggagtgtcagctaggggacggagccggtgcggagatcgaggccccacaaggcctgcccctgtggttgttcccactgtcccactgatggctgggaagggtgagctccagcccccggtggcttgaacaccctctgtagttgtgtctgctcaaggcctgggaacaccctgcctgtttcacagatgagaaactcatctcagagtactcagaaacccagaatacttcattcaagttcaagttcagagggtgattaagaagaatcagaagactgggtgcggtggctcatgcctgtaatcccagcactttgggaggccgaggtgggcggatcacgagatcaggagatcaagaccatcctgtctaacacggtgaaaccctgtctctactaaaaatacaaaaaaattagccgggcgtggtggtgggcgcctatagtcccagctacttgggaggctgaggcaggagaatcacctgaacccaggaggcggagattgcagtgagctgagattgcaccactgcactccagcctgggcgacagagcgagactccatctccaaaaaaaaataaaaaataaaaaagtctcggagcccagcctgcagaccggctgcatttgtgtgtcccctaaaccactcctctgttcctttagcttagctgggtgcctgggggggcacgtgaaccacgtgggctggtaccacaccccctctagactggccaatgggaataaatcatgagccacaaacaggagacgtaaaaatgaacaggtaaacataattttttttcttgggattgtaaattcacacgacagttgaaggtgcagtgaagaaatgggtggtagcggagtcacccactcttcgcagggcgactggccacgcaggctctgcctgcacacctcctgcctggaccatgtggaaagtcttcaggggtcacgtcagactgaggttctccaaagttcctatccctttgtgtgtttggtgagctttttgtttgttggttttggtttcgaggtgaaagtcacataacctccagctgaccgctgcagtgggcattgagtacattcttggtcctgtgtcaccaccgcctctctctcgtttcaaaacttcgtcatcaccctggaagagcaccctgtactcactacatgaccacacccgttgcccctgcccccgcctctggctaccactaattggtttacttttgaggtttgcattgggctatgtccccatggccttcgatctgtgacagagatcctggctttcatacatccttgggacagagaaactaaggccagcgtccttaatagcatgaccaggtctgcttggactgtcctttgaggtgtcctgcaggcactgattctgcacctgccaaggcctgacctccccgtaatcagcagataatccaatagaggagaagggcacttgaggccatgcagcggctgaacgggaagctgtgctcagcgtctctccaagcctctgcattccagtgacaacgtccgcagggcctcagtgaataaaccgctgcaaatgcacgttggtgaggccatcagctgccgaagggaagctggggaatctggacggaggagaaagaaacgtgagctgcactcccggcgacacattggactaagaacggcgcctgccttcttgagaggcttgttttgtggtgtcataactagcctgccttacacctttcttaaagcaagcatgttgtgagttcacaggagggatttttaacatacttgaggctttggggacaaaagacatcagtcaaagaaagattccgctattatttatttcaagagcctttgaatctcttgctgaaatctgctcccattttgaagaagcttcccatcaaatcagaaaagccctgattttcctgtctctgtgtttggaattgtcccccaccctgttgttagttcattccttaaagttgtctgggcagactgcaatttcggaagggcacctggatgcgtttcattcttgggtcagaaaaatacctatgcaaagagcttctgaccaagcatagacagatttcaattattggcacaatagcatgttacataaatcaatttccttgggcctcagttttctccttggtaaagatggaacctgggtctctgaaggttctcaaagactaaaaaggaatctaagacaccctcagacttgctcaagaagaaaacagggcaggattattggaatgatccagaaagagagcacagtgaatcttctcaaactttgagaaatgaattggtcatcaaaaattagactttcctctcacctgtgcagctggctctgtcacgcggcctctgctgctcaccaccagcacatacctggcccaggagtggctgccagtcaatgcgcagcagccctttgcaggacctgcccttgggctgcttttgagtttctgagcatccaagtctcagaagcagctggttgggccagctcaagctctgggtccgctgtggattgattcacctgtacctggtctccaccactgatccatctggagaggggtgaggccacaggggtttccaggctgggggtgtgcctgggccaggcagcgacagccactgggaaccccaggcaataggggaagtggcactcacttatcctcggctgggcttctctgcaggctccctccctccttcccttcttccttcctttcggaactccctacaaccctatcacgttaagcaagtcctgtagcctctctgggcctcacttctcctacctgcttatggagggcccccgagcctgggctgtgtggcttcactgttaacatgttattgatgtgactggggggttgcccctgtgcctgacgtttcattcatgccgttctcccatgcaggttgctctcctgatctgggccccgccctttggttccaggggatatgaaggtcagaggagggattagcatgatccactggccagagtcaataacacggggcccctccttccaagaggggcttagccagaaggggaagcctggatcttgggctcgggctctgatgctttgtctctgagccgctgacatggaggacgtcaagccgcgatgttcatgtccccattgcgtagaggtgggtcctgtagtcccacatgtggtgtgctctgaatctcctttccactctgttggagggtcagagggacttgaaagatcacagagcccagcctcgcatttggcagaagagaaagcagagacataaaggccagggacttgtgccgggtcctacccgctatctggtgccccacacactggggcctgtccccactgccagcagcctctgtgtgggttctgcctttttctgcactggtggtgtctccccatcgccccagctgcttgtgggcaggcgtcaccttgttctgacctctttccttcccccaggcagctctggactttgctctcagtaaacacaacttgattcttttccttcttaccttatcattgcccataaatcccgtttacacggtgcccacttttgtgtctgagctgggacgtacaacctcgtctctgcctccagtttttgagaaattaattataaacagtgttgacagaggctctggcttgacttggggcatctgctgctcttcccggccttggtcttctgaaggtagctgttatcagtaacagaacagatgtgtttatcctgggctcccgggcccttggcgtggccctttgagggggtctgtgaaacccctgaaactgcatgctaaactttacgggtggaggtagttttctaaagagagggtccagagactttgtcagattccttagaggatttgcaccctcaaaaaacgttaacaacctctgagctggaggaaggcctaagacaagcctatcgcacttggagataagataagccgaggcgggacctaatggggcctcaatgtcttggccagagtgcacagctgaaacggagatgacacttgacagaaaccagtgtaaaactctccttccctttatttagcttttatttcttgtgcttttcattaagtacagatactctttgcttgcttacagaacagggaagacctggcttctgaaaattatctttaggtttttcattgaatttggtcttattctgaacaatgcctgaacgtcgaaggtgctcccctagataggttaatagaaacccacagtccagggcaagaggccgcatccgggaagcctgtgtacaggtgactggagagatgagttctcacggaccgttcgggcaacttggtgttccggcctggacatttcagtgctgcatttgaagaggaattatgaattggctctcaaaggagggtgaggtgttttgttttttgttttttattttttttgacatggagtcttactctgttgtccaggctggagtgcggtggcgcaatctcacctcactgcaacctccgcctcccgggttcaagtgattctcctgcctcagactccagagtagctgggattacaggtgtgcgccaccacacctggctaatttttgtatttttagcagagacagcgtttcaccacgttggccaggctgatctcaaactcctgacctcaggcgacccgcccgcctcggcctccccagagtgctgggattacaggtgtgagccaccatgctgggctggagggtacatttttaaacgatgcaattctggggccatcgtcagatttggcgaagaggaagctgcgggagagaactgttactatacaggatttgaagaactctcctgcaggcttattttatatttaaattgtgcacagtggtttatagtttgccaagctgtcttgggtttgttatgttgcgtaatcttctgaaggacaggtgggttgagccaaatattcattagcagcctcgttttacagatgaggaaacttgtgcctcagagaagctgaagtcatcaaaccaaggtcaagctggatgcggtggctcatgactgtaatccaagggaggctgaagcgggcggatcacttgagtccaggagttcaagtccagcctgggcaacatagcaaaacctggtctctataaaaaatacaaaaaattagccagtcgtgctggtgacacttgtatccccaactactcaggaggctgaggtgggaggattgattgagcccagcaggtcaaggctgcagtgagctgtgatcacgccactgcactgcagcctgcatgacagagcgagaccctgtctcaaaaacaaaacaagtaaaacaaaaagggtcaggcatttggcagggatggaccccagtagaatcttctgatcccagtgccgtgacatagggtccccagagcagatgggctgggttcagataacggaaggccacacaagattctagaattgtcagcagagggaggagttgcctgacagcagcagattccagggagggcccggatgaacctccaacaggaatgctgattccgttctgcctttgatctcctgatttcaaaagaacttgaagtaacttgaacctggctgccatctgcccaggcatagatgtgtgccaggaggcaggtctgcctcttagttgctatgaaata

SEQ ID NO: 39287 - DNA, 1477 bp, Homo sapiens
gaacagtgtcgtgagccattaggtgggatctggtgcccggagaggtgtggcacagcttgaggggccaccgcaggatgtgtataagctgaaaggaaggaggcctgtttgccaccctgacctcccagctcagccagcctgaagccctgggttgggacagccccttggtgggagggaggccctttgatgcagctggggctctgtggtcgcctggcatgagctctgggctgcagcctccctgcagggcccaggagggccagagagaaaacgccaggaagaaccagccgaggcctactcaggaaccatggcgaaataaagcaggaggcggagaacgcttgaggtgctacctcttgtaccgcttctccttgtaggtggttattttctcctcattctctttttggtaccctttgtgtagaataatgctccttaggtactttctagttggagacaagaaagaagcttctccaagctccccttggttctggcagtgtcctctggctctggatcactcttggtgccctttccaagcacctctccctactcgctgtaaaaactccaaggcaaacaagctgtgaattatcaaaaggccaccggcctctggtgaactcattctcccgctaggaaacctgttgggtaggttttgttctattttatctccacctggtatgggcttgtagcagaggccctactgaaaaacggggtgattcacacactttgctcatttatgctttgctttaaaaaagaaagcaatgggagcagctggctgctgcctgcctgtttttgtctgactgtcctgtaagctctaccacaccagcacaacaccggggttccagctggcttacaggggctgggctgacatttgcccaagggacaggtggacggacagcttgtgttctctgggattgtctagaaatcagctgatttgcataagaatgtttccccatagctgagagcttaatgttcatcactgacccattggtgagtttgttgaaatagagatggttccgggtagaatatacttgcctcctagcacctgaaggactattacttgggataaccaggcttcccagagtgctctctgggccctcctgctgcccagctcccctctgagctctgcaggtgccatccggcctgcagtgtgtgtctgtctgccgtgggcctccactctgcaaaggcagttgtcccctccacttccaaggaacaaaactcagaggctcgctccagtatggtgggatggttgaaaggaccaaagtgtcactgaatgagccagagataagaggatcttaaaggagagtttgggagaggggccgtggtgtggtgtgcctgggaccctggaggacggagctcctaggtcattgtgtctaagagtgctttggggattcagctccttccgttggcctccattatttcttggcttctctgttgtgtctcttctctctctccttggcctctttctgcatctgtgtctgctctttgctag

SEQ ID NO: 39288 - DNA, 3025 bp, Homo sapiens
actctagcctgggtgacagagcaagaccctgtctggaaaaaaaagagcagaaaaaataagtgacttctcttttgcagcaataatctcctgaaaatataatcggaaaaggagacggcattcatggcgatgacaacatccaaacccaaatttaaaatatcataatgtattaaaaatgttttctgcaaagaaaacattttgagtcctcttccgactactgctgttactactacagctagtagttgttggtggtagtgctggtgttacccaacagttataacatcaaccctagaagaagtgctttttgtgtacctattatctcattgtgttttcattgtttccattttgcagctaaggagtcctttcaagggcaagtgatttttgtcctgagcctcccagctggtgattggtagtgccaaggccccaagtccatcagccagactctaggcagagtgtcccaccctcataatcttgacaccagggaggggcaaactgtagtctgcctcctattttttataaatacatttttgttggaacatgatcctactcatttatttgtatcatctacagctttttttggaccacaagggcagagctgagtctttgtgacagagaatatatggccccacaaagcttaatttactctctgtccctttacaggaaaagtttggccgtctctgccctacactgctctgggactcatatctaaatcaatggggacccaaccacatttgtggaagaaaagatggaatagtataaagatgtcacttcttgtaaagcagtacccaggaaatcccagtgggaatatgtttttgcacaaatgagatggtgggagacattttattaaattattctaaagtttatttggaagagggccgggtgtagtggctcactcctgtaatcccagcattttgggaggctgaggcatgtggatcacttgaggtcaggagtttgagaccagcctggccagcatggtgaaaccctgtctctactaaaaaaaaaaatacaaaaaatattagccagatatggtggcacatgcctgtaatcccagttaggaggctgaggcaggagaatcccttgaacttaggaggcagaggttgcagtgagccaagatcatgccactgtgctctagcctgggtgaaagagtgagactttgtctccaaaaaaaaaaaaaaaaatgataataataaagtttatttggaagaaaaaaaaggtaaaaataactgatgggactttgaaatagaatagtgcatagaagccagaccttccatgtagtccaacacagcagaactatcatggttaaataaaggttgatattgtggtaaatataggcaaactaatgacacagaacagccccgattcagaccctagtgtctgtacacatttaaaaatgcattaagatgacatcacatgagtcagaaggggacaaattgttcaggaattcatgcaggagtaattgctcatctgtttgctagttaattttgtaacatccctccccgagaagcaaaataaattctttgtacattaatgtcagtccacaaaccttttatttttaagtaaaggaaaatagatgtgaatgtttattgaatttgtcatcaagggaggcctttctgtgcatcaaggggaaatgacaaaggaaagattgatatgattaaataattgagactttatcaaattaccaaatggattagtgcaagcaagcacagagtgggggagatatttgcagccgacctgctgagattttaggatgtaattgagcagaaggtgcaaaatgataatccacaaggtaggacataagaagtagttgctacttggccgggtgtggtggctcacacttgtgatcccagcagtttcggaggccgaggcgggcagatcacttgaggtcaggggtttgagaccagcctggccaacatggtgaaaacccgtctctaataaaatacaaaaattagccaggtgtggtggcgcacacctgtggtcccagctactagggaggtggaggcggcagtgagccaagatcgtgccactgcattccagcctgggcgacagagcgagactctgtctccaaaaaaaaaaagtagtagttgatacttgaactatttctgactaatggtcaaaggagggtggattgaaatgttgaaagcgggtgaatcgagacattgacggcccatcccctcgttgtcagataagcaaggcttttcttgacctgctagttaggggtgagaactggacacccgccgctgttgagaggatggattgtcacagtcttccaggactgcttttggcaacccttcctactctacttgaaagcagtcctaagaaaataacccaaaatatggagtatgattagatacaaagatgatcactgctgtgccacttacactagcaaaaatgtggcagtcttgctgggaggagcagggtcagggtggtgctccctctgcagagttgcagttggggcctgatgggtctggttgggccccactccttgaccttgtccctcctcacatctttctagccagtagcccatgtctcctacttagtggagtaataaggccaggagaaataggtgtacctttattttcatgtaacggcaaaatgactttccccaaatcacagagctggagttgggaatcctggagttagatccaccaggattagtacacaattagaggtgctcagtcaagtatctgagagcgtccagaatcagctcagctggcctccttttcacttgctcgtagcatggccttacaaagttgcaaagacctgctggaatcaaggcctcatatttcagaataataatgggaattcaggctgggcacggtggctcacacctatactctcagcactttgagaggctgaggcgggtggatcacctgaggtcaggagttcaagaccagcctggccaacatagtgaaaccctgtctgtatttaaaatacaaaaaaataactggacatggtggtggagacctgtaatcccagctacttgggaggctgaggcaggaaattgcctgaacccgggtggtgggggttg

SEQ ID NO: 39289 - DNA, 4556 bp, Homo sapiens
ttgagcctcagacatggcatgtgtgtgtcactaatgagaactgttggtagaatcaggaacagtattaaaccctagaagccgcctccccctctccagcctcttcagatccagcattttcatcagggaaagcccctttcaataaaagtgaggcctcagttttctcatctgtaagatgtatgtgtggggctggctagctctgcggttttcagaatggcacctaagatgcactttaaaacattcctttgagttaatgtgtactagaaaagatctatcaagttgtaaaaagcgggttgattgataaagaagtattaataacagttgatttttttttaaagaagatggtaagtcagtgagtagtgtttggagggcacaaatccttccagtgccgaagctttgcggtcttaagtggcaggtgggagccgggagtctgagtacaaccctctggccagccccagtcaaatgaatgggcctctctgcttgctgctcttaaaacgtcttcagagatagttgcactttttatttctggtcactggctggggaccagagcttggaagtatttctggtctgggctgatcacagggtcctgcttcacagcctgtttgctgtcagccatctgacacgggcgggccagccttcccatgtgattcaagggggctgacagcagcccattgccacaaatgtctgcctaaaccccaggcttgatgagcacttgacaggtacacactggtgtgtctgtgagctcttcatgattctcagcggcagggtgagggcggggaaggaagatgtaggtgaagagctttgacccaggagcgcactagggaagcgagccaaggtgtctgcggacttccagtcccatccacacccagaagacatggtgggggcccccacccctctcctgtggcattggtttcatgtgtgtgtctttccagcttaatgataagcagccgagggaaggtccgggtcctgctttcccttgtgtatttactggtcctgaatgcacgtgatgctgaattaatgtctgagcgcaacagtcatccgtgccacagatggcaccaagcaccaagcttcggaggcccccgcagtctgtgggagacaatccaagcttgggctgggcactgcgctcaatgctggaaaattataaagacagagcagccaagtcaccagctttcaaggaaacgagtgtagttagggaactaagaaaaaataacaagcacgatgaacagtgcgatgcctgggataaaagcagtaaatgcctagagatgatgacgggtgtccaggagagctaggaaaagaggtggacttccatttgcaaaggcaaaggcactgtttcagggggtcattctccaatcggtaggttttgatgttatagaaatggggagccctgttgggtcttcaagaaagtgggtgggaagaaaggcacaaggtctggagatgttttggaagaaacagtagctgtgtttggtgagtgcatgggatgtacggaggaaggtgtgaagaatctggaaagcttagaatgtctcccacagactgtgggggcctctgaagagtctgaagtaatggttgctttgaatgcaaggagattctgggatctgtgcagtgtgctgagaacaaccctacagaggggatgggggagggatggggccaggaatagaggaagcagaggagaggggaggcaggaaagggaggaggccaggtaagaagctcaggccttgaagagggattcacacgccctcccctcctcttcctgacctgtcgggggatccccagcctcagatgttctcagtctggccagtgaaaacatctggaatcatgactccagccgcgctagccatctcactttttacaataaaaactgagcaagcaaggaacacctagtgacgactcatggcccttgttttccccgcatctctggagtctgagtcaccagcttggcacccacagttaagccttgaatgtgtgcaagttataacccggtgtctggcacagagaaccttagcgctccttcccctccaggtcttccattcttttgttgatttgtctccaatacgggttccctcaaaaccaactctcttccatttatttctgtccctagttttgagcacagagcctcgttgctagagcctggcactccgtagatgttcactaaggtgacctctgtgcgtagtcccaggtagatgtggcacccaggatatgcccacctttctcaaactcagactggaacgtgtggtcctgccctcgttcctcattttttcaccctgtggcgtggtcttggctctgaataaccgctgctacctcctaaattgaactcagttgtttagggaaatgcacccagaggggcactgtgagtgagtctgatcggctggcgtgcctgtcggtggctgcccatgccttccgatgggccttgctgttttctcccccaggaagaggcagcccgcccgagccccaggcagcatgttcctcctgtgccctgggtgcattaggcgagatcaggcacgttcagggtgatatgacgatagacagtgctccaggagcattaggaaaggttctgctgatcaggcttctgtaacaggcggggcatctgctaaggtggcgggaaaggtttggatttcactgcacctgggctggtcctcgccctgagtcgtagccttgcattccctgccaagccacgcccagaagcatcctgggagggacaccagtcgggtgttgactctacttgggctgttgcccagaccagtcggatcaggactaggaggcagatttccgtgattttgcctttggagtgagagaggaggctggggtgttaaccccgtggtctcctcgtggtcccatcaagtgactctgtgaaagccaggagtccctcccacccaccccaggccccgaaggcttctccactatagcaacggggtccaaagctcggggtgctgggtgtcaggccgtcagtaacaggaggaccgacctgctggggcggaatgtctgtgggttttagggtcctccggaatgcactcttgctcgcggagggagatgagcagatgtgatgagtttccatcgacagagctggtgacagaaattacagagagcaggtggaatctcccgctttttgttttctaacccggaggaaatctgatgaaatcaacatgatactccagaaattatcatcaaacatggagaatgagtcattctaaacagggcacacagggaattggcaggggaggagcaagggcagcatttatgcctcgatcccctccaggccagctgctttccttctgcagcgttcaggttcgtggccgcaggagaacggaggagaacgtgaacagtctgtgcgctcagcctgaggtttccctaagaccttctccgccccagacatgctctcgttaggttggtttttctggattggtttgttctctaattgttccttggggtagatcattggcagaggccacagggagaatattctgtgatctggagtctatgcgtggcgtgacagcagccgtagcggagggggtgtgtgcggcttcttgagtttgccgccggaatctgtcagtgattccttctgtatgcagtgatgttgtctgttcagacgctgccctcttggttcctggggaggagccaagagcagcctcttttgtctctggatgaatcagcctttgcacagaaaaaggaaaaacttatcagttatgagctcaaatgcgccttcctgtcttcctagacctgaccccggctgggaggtgaagaggtgagatggagcctgctcttctagggggtcttgagatccagtggtggctgtcctgcccagggtgggccctgcaactgcaggctgtcctggagaagtgaccactgggacctgctgagtagacggtggtcaagcttgttgggctgtccaggtaaacccgaggtgcccaccaagggaacctgttggtgttttgagaatgtgtggcttaggtttcaggaacagagtagaattcctaaattcagtctcctgagtataatcctatcacatcagccatttggctcccttaaagattatcccagagatacctaccgagttacctctgaaacagtcatctttgttgaaaccgaattcgttcattcattcgggtttgagagccaaccatgcacatgacaggagcagaaaaagacaaacagatggtcttatgtcctgggaatgctcagattctcatggagaaattgggccagggacaagtctgtgcatggtgtgtctagcggtggtaaagggcagagaaagaggatggggtgagggccggttgtgttgacatttgagcaaagacctgaatgaagtgaggggatgagagcatctcgtgtctaggctggggccttctgggctgagagcactgcatgtgcaaaggccccgtggtgggaggggcttggtacctggggaacttcatggagaccagaagagtcaagtggaggaaggcagagaacagcaggaaatgggacaggggctgatgatgttgggcttctagggcactggaagctgctgatgagagcccaggagcctttggagggtttcaaacagagtctggagggtgtctgactga

SEQ ID NO: 39290 - DNA, 3932 bp, Homo sapiens
ctaggcgggagtgcagtggtgtgatcacagctcactgcagcctcgaactcctgggctcaagcagtcctcccacctcagcctcccaagtagctgggactacaagcaggtgccaccacacccagctaatttttttttttttttgtctgtagtagagacaaggtttgattgtgttgcccaggccggtgtggaactcattgagctcaagctatcctcccacctcagcctaccaaaatgctggtattataggggtgagccaccatggctggacaagaatatctcttgaagcaagttcccagactctggccgccaggcccgctattcctgtcaatggcgttttgttggaactcagccacacccattcccatctgcatcgtctgtggctttcaggcttcgtgtgtcccacaaaggcaaaagtactatctgtccctttataaagttcagtcaccctgactgaaatcatggtgtactcactgtaacaaaattccagttgaaaccagggtagtgcagcagtccatcgagtgtttcctggtgtacctgtgtgcccataaaaagaggaagctgcaaggatcaagttcatagagctagagcctcctgctgtgaaatttttctattgctaagaattggttggcacccaaaatttgtcctttaaaaatatgcatcagttatgccttgttgatggtgtgggtggtttgtaacaaactaaaccagggctgggctcagtaaaagttgtgtaagtgagtgagggagagatgccttcattcttggtgttggaagtgccgacctctcctttcatctgggatccatggaaatgggaccttggctgcccctggatggagtccaggcgctctccttcccaggggccagagaacacctgtgtttcccaggaccttggggacctgtgcccagttcccctggggagagagcggttttgatcactcgcaccaggaatgactcgagtcagaagcaggtgactttgacctgttctgttacctagaaaatgaggccactttggagccaggcagctgtgcacacagccagattagcttggtgtgtgctgagtagccacgaaagagctgagttggggacattgagtgacttcgtgtcaaaccctgtggtggtccagcacaccttcccaggaccacagacgaggctgccaccacagcaagaaaattaggatctgacagcctaccagctaactacacaccctcctgacacgtgaatacacacgtgtatgcttttatcttctgaaacaaatctagtcaacatttaattttttaaaacaatttgttttgaatatatccaaattcaaatagaaacagaccttcttctgaaatatataaatagttgatatgaagcataatccagaccggtattacatttggttcaattcccaattccatgtggggctcatggaattgggaaggccgctggccgagtgctgagaagtttgcatatttgcctccacgcctgtcacttccagctgtgggacccgggacaagcctggggtctgcaggcttcctgtgcttatctgtagaacagatgccttgcggcccacacagcagggaggacctggggttgggtgcccagaggcagctctggctctggcatttctcggtgtgaaacccacttcccctctctcagcttcttctgtaaagtgggttgaactcagcctctgcttcatggggggctctggggagcggaggagctgagtgtctggctcacagcaagccctgggtttctttttttttcttttcttttttttgagacggagtctcgctctgtcccctaggctggagtgcagtggcgcgatctcagctcactacaagctccgcctcccgggttcacgccattctcctgcctcagcctcctgagtagctgggactacaggtgcccgccaccacacccggctaattttttttgtacttttagtagagacagggtttcactgtgttagccaggatggtctcgatctcctgacctcgtgatccacctgcctcagcctcccaaagtgctgggattacaggcgtgagccaccgctcctggcctagccctgggtttctagtagcttctacaaaaacaaacggccaccaggtcctcaaacccccttctggccagcctcgttggtagccagctgtcagcctctcatatctagggaggcatcagaatgatctgtcgctcctggttctttttaaattccatggattgagatgctgggggcccacctagaaggatcgtgagtcacctactctggctaatgcatgccacaagtcgccaaaaaggtcacctttttgtattgttagactccccccaggtaaacataaagtgtacattagaatgctcagtctaaaacagctgggctcgctttgaagtaagcagcccagccgaccgcatgagcactagcaagacgaccctgctatcggcacaaaatagttggccaaagagcgccggtaccagcggtgtggttggcgggggtggggggttgtttgttttttagcacactttggagtcctaaaatgacaacctcaggtgctgaaacagagcgtagagagaaagaacgccaggactggtgactttcctcttctcttagcaactcgcctgtccaggggctcacgggagcctcagaaaccgtctctgggctgcctcaggccactgtgccctggaagccaagcctttcccattgttggatgagagaaagctttaagggtgggggtgagctgtgccttctatggcagaggagactcagacaagaatcagacccagcatgcggctctcctgccttcctggtgacgtcatcctgactggctcagagccacacgctaaccatgtgtggcctcatttataattaggatggcgccagagtcgcttgcatgacacccagtggcagtcatgtgacttggcacagtgtacaggactagcaggcctgctgtcttgtgctagccaatttgatttgtttctttaaaccagaagtgtgagtttgaccccagcctggggtcccccagatatattagccatatgttcaatgcctgtcccatccagcccccgtttttaggagggaattgagtcccaaggcggccacgtggttgttccagcctcagctgggacttcactgtcccagcagggctgtctgtcctattacctcccctctgacttcctctgtggttagtaatccctgtcctaaagacacagtagaaagttcttgcagctttgacgtgggagcagtcccaccaattgtggaaaccgttttctcatgttgcacagtcctgggggaggtctgtgcatctcctggtcaccgtggttcttggtggtacaccctgtctctgaccagggcctcttctgttctctgtcttcttctccctgggtggtccctgcctgagtcccccagccttctacccgcggtgctctctaactggccaatgtcagcaccgcacactcagcaggtccagctcgccctccatccgtctcggcctcaggctatggtgtctatttggtgaaatgcattcgtttctctctggtgtccccagagagtgggagtggtgacaactctaatccatattcaccctgtctgttagcttcctggggctgccaagacaaatgaccacaaaccaagggacatcaaacaacagacacctgtcctgtcaccattcaggaggccacaggtctcagtcaggggtcccagggtggcctccgtctggaagcagtgggggagaaggggttgcaggcctgcctctcctaagccccactggctcaaccctccttcttttccttggcttgttgccgcatctgtcccgtctctgcctccgtcttcacacggccttcttctctctgcctctctgtctgctttctcttcttatgaagacgccagtccttggtgacttcctctaatccagagggacctcatcttaattctatctgcaaagaccccattttcaagt

SEQ ID NO: 39291 - DNA, 784 bp, Homo sapiens
gtggaaagcggggtttctggaagctctttgattctaaacccatcttccttccctttcggggcatccactattgaaggaggcagacggtcagcccagggaggacagggctgaaaagcaaggaggaagagtctcgaagttgcaggcaccgtgtcactagcacatgtggtggaagatggttttgggaaataagagctttgggcaacctcaagagtgaactctgccagtgttttggcagttagggatgtggatgatataaaatgaaatcacattccaagcataccatttctggtggagagtaaatatactcagtaaagccaggttcaaagaggaatctgtataatgtccgaatgaaatatgaagtagtggtgaaatatttaaaggtcaacttgtgtgcacaacaaaatttgtgtgaagtttttctcagaaatcatgtaagaagtgaactaaaaagaattccagtgagatgctggaattccaatgaaaatgaatggtgtgggaggcagaattctaaggtggcccaggagatgtctgcccccaggcgcacatatcgtgtgcaatccccctgcatttcacctcggaattgaggaacagacactccttaggctaggctttgttatacaacaaaggttagtcattcctgtgattatgttttgtcatataagactccaagaccagccagttggccttgaagaccaaccaaacagctgtgcagtgagctaccatgtcctaaaagggccatttggctgggacttcaggaacgctctaggagttgagagtgaccccc

SEQ ID NO: 39292 - DNA, 1762 bp, Homo sapiens
caacttcatcaactacagagtgcccagacatttggtcagacattattccgggtgtgtctttgaagatgtttctggatgagatcagcatttgaatcagtccagtgagtgaagcagacggcctgccctaatgcgggtgggcctcatccaatcagttgacagccagaatagaacaaaaaggctgactctccctcgagtaagggaagacttccacctgcctgactgcctttgagctggggcattgtttgtttgatttttttctgcctttggactcaaactgcaacgtcagctctttttgggtctcgagcctgctagcttttggactggaactacactcttggctctcccaggtctccagcttgccaactacagatctaggaacttgtcaggcctcataaccacatgagccaatacctttaaaaaattatatacatatatatatatgaatcctattgttctgttcctctgaagaaccttgacttacacaagcagcaataggaaacaaacacgctcctttcacagaagagagatctacaatctagagaagcaaagggaacttgacagagctcacacagtttgtgttaggacaggattcaagaccagatgccctcctgcagagcctggactcccgcctcagacctcttcaccatgtcatgctgctcccacttccttgcctgccgtggctcatgaccaatgtaagatgatcattgaagatgattgactaaagatgacagcaggcccagtaagagaatatcagtttctttaatggcaaagggtaccccacatctggagatgcctgatgtgctccagatgcagagcagctcctgacacctggcagatttctcgctcctggcgggagaggtcagccacctgcaggctcagtgtgtgctgctctgagcttctagaaagcacatgctgggccatctcctgccttaggtagacacctggtccccatgccctcctctattgagtgtctctggtgttcttctgtcagtcaatcatagtgccagtgaccatcatacactcacctgttagaaaagaaaagggcccaaatgataatgaagggctggaatttcttctaccacatggatctctgcaggaccagtcatgttaaagaccacaataaaggctagcactccagggtcactgtactaagaccctcgtcctgcccagtgccaagagaagtcagtgagaattaaactctaagaagccccctgaattggaggaaatgctagcatttgtcctctgaagctgccagctgcatgagtgcacagctgctggttgaattccgtggctgaggttggatgcctgcctgacctggcctcgccaatgctgggtatacagcagaggggatagtctcaaatcaggccatcagaagagtggtgggcaatctcaaagagaaggcacagctgggaagaaaattttccatctgccctgagtagagggaggagaaataggtcaggccagacaatgtaggggctgtccgcggacggtgatctgaaaatgaatcacttctgtgttgagcagaggctaggtcaaattttccagaaagggcagaattcccagttgggtaaactattgggacatagaaaagacacatcgttggcacaggggaagaatcactgaacttggagatgaaagatctgccaattcctgtgcgctgggtgggtaccttacctaaaccatctgagtttcaatgtcttcaactgcaaagtgggcccatgagatgaaataagaaaatctgttttgcaaagtttttttttta

SEQ ID NO: 39293 - DNA, 909 bp, Homo sapiens
acccaaacctcatgttgaattttgatccccagtgttggaggtggggcctggtgggaggtgattggatcaagagggtggtttctaacgctttagccccatccgtctagtactgtctcacgatagagttctcacgagatctggctgtttgaaagtgtgtggcacctcccccttctctctctctctctctctctggggctccaccatggtaagacgtgcctgctttcccttcaccttccgccaggatcgtaagtttcctgaggcttctctagaagcagaagtctgtacagctcgcagaactgtcaaccaattaaacctgtcttcaaagtaaattaccccatctcacgtatgtctttatagcactgcaagaacagactaatgcacgtattgacctcagatttgagtattgtcaggcattctctccactaccttatgactcagagttgttactcataagggtggaatttaaggcttacaaaagccttgatttggaaatactctaccatgaccatttcacctctggaccacagtccagatgacctgtgctctaaggttgttcttgacctttcgtttcatgttcatatcggcctctttccaacatccagactccatccttttttccaagctcacaggccatagctcctgacctaactgtggaacttaatcacattttctccccgagttcagatgctacaacttcttgaaccaaaagttctaggtcacctgtctttcccctagctccagctaatcttggccaagaaacttcactggatgtgaattagaaattttaagtaattcaaatgcggaaaaaattctgaaaaaaacttgcaaatggttgcaaaaccatgcaaccattagtgcatgaaaattactaatactcaaaatattatgtatgttcattatgaaccaaac

SEQ ID NO: 39294 - DNA, 1386 bp, Homo sapiens
ctgcagtgcggtcccagctccgcggggggtccccggggatgacctaaatcggggattgcggtgggacagacggtccaggggctaaggaaccccgtggagcaggcagcggcgctcaggaggcagcagcttgagatccacggctcgatttttaaaaattgtaagggagaaggatgcctcgaaagcctctgtggtattttgtcgcatctcgcacccctgtctaaacttcagtccactcgtggagtgtggacccccacgccgcatgggctcaggaggcgcttcgcctttggaaagaaatcgcatgtattaagggaaagcacgtgtgctactttgagaaaggaggcagaaagttaccaaacgcgggaaggggaggctcgccaaccaagcgaggccgtgggacactggcgagtcgcagaggctcctggagccagccgcttggaaacaaacaacaacgcggcgggcgaactcccgggcagcctcccccgtgccggggcgcgggggccgccgcgagaacccgggcaggagctggcaggcgcggggcctggccggcgggagggtcccgcaccccggcccagtgtgaacaccccgcgcacccccctggcccggcccgccgggggcgcggactacaagtcccaggaagcccagaggcaggcgcggggcggggcctggcgcaattccccgggatccggcgcgctgggaagcgccgaggaggacgcagcgccggcggccggagggcggcaagcgcgcgggcaggcggggcgcgggcgcgggcgcgggcgagggcgaaggcgggggcggggccgacgtgggccggagccctgcgtgccagggagggggccggccgggcaggcggcgggcggcgctcggagcgggctccgcggcttgcaaggcgcctgcgactcggtcccaggtcggcgggcggcgcacggcgggctcgcgcgggggccccggcgcgccgggcggcgcagtacgcagcgcgcggacccacgccacggccaggagcccagagcagcgcggccacactgcccaggggtcggccctcggccccggcgctcggagcgcggcggctgcctgggctttaatggctgctccgcggagcagcgcctagggctggaaggcggctgcggctcaggaagtcacccgagcaagcctccttcggggccggccgcacccgccgcggcgcgctccatgggggcgcgctccccccgggcggcccgctgacccgggacgccggggcccgctcgctcgccggccgcgcgtcccggccatgaactgagcccgcgggccagccccgcgcctgctccgcccgcgcctttcttctcgcgcctcctccgcccgccgccggcgggcccggctccccgggggctgcggcgccccgggctcggcggc

SEQ ID NO: 39295 - DNA, 903 bp, Homo sapiens
gggccgagatccagcgcttcgagtcggtccaccccaacatctactccatctacgagctgctggagcgcgtggaggagccggtgctgcagaaccagatccgggagcacgtcatcgccatcgaaggtgagggccgggccgccttggggcctcgggaaggcacggacgcccgcggcgcggcgggggtgtgcgctgtgtgcgtgcgggtgtccacacacgccggccggggcacgcggctgctccgccgagggagcactgcggcgctgcttgtcttgcaaggccgggcgagcgtcgcctgcgccccgccgcgccgcgagctccgccaggaagatagatcgtcagcgttaatttgatcgtggacaatagagtctctcctgcgggaaagtggctcggtgcctccgcgtcctgggctgccggagcgtcccggcccagcagacgcctgggggcagccggcggggtcggcgccacccgacccctgacaggttaccaggccaggcctgggcgtcttgctggacgttgaagacgtgttctgagaagtgctgccgctgggggcgaggcccgggccggcgtgtttgggcggtgcagggctgccctccttagtgtgtttgcttaattcaggggtgcagttgaacttagtggatgccgagagccagccctagccgcgggagcatcgtgtccaggtgcccctgtgcaaacgctggaaccggtagtgtgctttgtaccaaccaaaagtccggggttggattagaggaagaaccctaccaggagggcagggcgtcctccagcggaagggtctcgctttcatatgtctgcagttggaggccactgaagtggagggtgctgtggttttaagaggggcaggatgcttgggcagaatccccacccgcttccctctgcatgtcaggc

SEQ ID NO: 39296 - DNA, 785 bp, Homo sapiens
taaatccggatgtttggccaagatcagttttcaacaaggtgctgggtgggggggcggggggcggcggtgtatggcgtgcaagcattgtagcccccaagaggacatttggccatgtctggggcaattttcggtttgttacaactttggggtgtcatggttgttactggcacgtggcaggtggaggtgagggatgctgcccaagatcccgcaatgcctggggcagccctgagtcttcgtcatcccgagactgagagccccaggtcagatgagctctgtgaccccctcagcctctgatccacactcaccaaggattactctggtgcacgattctgtttcggtgggagctggtgtaattatctagaggtgtgtctacctgtgtgcccagaggggcccgccctctcggtgagcaaggacacctggttccctggggtctgagccaggccctcagggaggggggcagccaggagccgcagggggctcagccagctcctggccctcaagtgttctaggaaaccggcttctctgtggggatgtgactctccctcactcctcccattgcctgagtaggcaaattccacctagctctttatgactaactgcctggcagcctgagctcagggcagttcctaacgaacttctttgattattaacctatgctgggcccagggaaattactcacttgttttctggccaagagaaaatctcctggaaacttctatatataaatctttttgacaattccgcattcaagagagttcccctggcagttcttctatttgtagggt

SEQ ID NO: 39297 - DNA, 672 bp, Homo sapiens
tggcaggccacttcctctgtctggggccctgcctgggggtttggatcacctgagtcctgccccttggcaagcctcttttaacccacctgatgccttcacaacccagctcaggagtcctgcttccccaaggccattccgatggctcctgctggcgattccagggcctgccacctggtggcctgtgcactttgctgtgacgtgggctgcacgtctctccccagcatgggctcaaggtgctcaggaaccaaaccccggtgtctcatccaggactggacacgtggtgagagctccatggagcttaactgcatgagggaggcgggatggactctggcttgtagggcacagtctgtgtagcaacaaggaacatacctggtgtttagatcagatgttcaatgactcatgtcccagagaaggggcctgcagccgtattggtcagttggggagcttgtatactcaggccattgaggttgccatggccaccattttgggaatcttttctttgggagttgccatcagaatttagggcattaaaaaagtccttaaatttaggtaatgtttgccttaagcagatggtctttgccttttagaactgtcagaacttgtttacccttcaagctgggcactgtggtaagttgactctttgggtccttggttggaaacatgagaatccca

SEQ ID NO: 39298 - DNA, 508 bp, Homo sapiens
atggttaggaaagatgcctcatttaaacgcgcagcaggtgagacatgcccctcgttttgttcttgcaggccaagccccagagtgggcgtggttttagggtgcaggctggtgctgggctgggcccctcggaggctccggtccgcgctgcgtcgatccatcccggcgcttgggcctgcacgccgccgcgctcgccgccgccgccgccgccgcgctcccgggactcggccagcccggctgggcgcgcggcccgcggtcccttgcacgtcggcccccgtcgcccgccccgccccggcgcgcgtttccattttaaaccgccgcccgccgcccgccacccgccacccttcggccgcagccggtgcagctgtccgcgcgtcccggagcccagggagtggcggaggctgcggaaccgccgagctgtgcagccggagcgggaggatgcgcacgggccccgcgtcgtagacaatgaagccgcgggcgccgccgcctgccctgggccctgcgcaccgcg

SEQ ID NO: 39299 - DNA, 2161 bp, Homo sapiens
cactgtgcacaggcagtcaggggaggcgggggagagtgcacctgcagagggctgggctctgtagaccaccccatggagcttaggagtcctccatctttctgacatagtctaaaccatcctggctgggtcttcagtgtttaatatctttgtgagggtcaaaactctagcaccagatctttcttctgagctgtaacctgttacttacaaacactgaagtgttaacttacactgtgagcattcaaatcttcaaattcaatcatactttttgctgtgtgtgtgggatttcagaaaaatgactattgtagtagacaagcaaaagaccaaatgtggaccgacaggctataacagaatcactcctcggaaagctaggtgtgtcctcaaatatctccacacttgccaacaggcacagtcaggagggtctgaagatacacgctccactgaagggctgtggctttagcaggggaaaaatggaaagttcgattttcagtaacttttgaagtcattggatagagcatgtgttaccgaccacagacttggacctggaactccccactggcatctagctgagtgtcgtgaactgggacaaactgatctttctggggtgagagtgacacagggaggcttgtctgcaccatcttcagtgaccttcggatgtgaaaatggcccattggaggcattttgacttggcctttacgtgagttatggtgtctgactttgtgtcctcctctttttcagatgccttcgtgaacagccaggaatggacgctgagtcgatctgtcccggagctcaaagtggtgagtggttccctctggccctggcacctgtgggaagggaggggctctgtgcacacccaagcctgcattcccaggcaactggtcatcgcctggggcccagagtggaagtgtgactctgggtgtgttcctgggaagggccaggtatagttgatagcttgggactagagtccaagttcctgagtgcccctgggacagctatgacagccatgactgccactcagccagggcggtgtctcatgtgcagggcagaggccatcatcatcctctctctcacatctcgtgggtgtgtgtgtgtccacacacacacacccccatgggttgatttgtcctttgcaggatgtcacggaaggctccacacacacacacccccatggattgatttgttctttgcaggatgtcacggaaggcttctgtcatgagtcaccaagctttggtatccatcatttttgaaatgtgactatttaccctgtgaccaagtattggcatgaaattaaaatttttgtcttttacgaaccttaccctttcggtgaaattatgtagagcttcaaattggcacgtgtaaaaagtggtccatcgcagccaccctttccagccgctcccctctaccgtaggatggaaggaaggggcaagtctaactttgaaacaaccaggttctttgtcgtgaaatatgtggcatttgtgtgtatggttatgtatctgtgtatgtatgtatatatgtgtatatatgtctaatttccgtgtgtatgtttatatttatgtaggtatctatgtatgtatgtatatatgtctaatttctgtatgtgtgtgtatgtattttctaatttgaccgtgaaagcaaagcagatgagctcttgctgttctgcagactccggcatgggcctgcctagtgtgtctgtcctctgcatttctattgatagcaccagatcccctgcggcccgtggactcctccccactgaccccaacctcattgcatgcttggaggacaggacaagggccaggagacaggatccttccggtccttcatgtctgagatgaggagatagagcaacaaagaacttctaggtctttgaagagacttttgtcaccaggaaaagtatttgtttttaaacttaggaaatgaagtacaatgagtgggaggtgccctgaggtgggaaggccctgtggtcactgtgccgtctctctcattggtgtctgacacacccatccccaccgcaaccgcggggtgtcatcagctgggcccatctccttcccggtgtctgccccccgccccattcctccctgaaggtctctgggctgtctctgcagcacttgcccgtgggagacaaagcgtctctcagtcctagtgctgtctcagaagcctggggttc

SEQ ID NO: 39300 - DNA, 1619 bp, Homo sapiens
ggaatctcgttttctcaaaaagccctgcttgcttaccctctcgttttcccccaggcctgttttctgggacagggtgggaggcccaaggagacagccaagttcaggccccaagcacccagctcctcctcccagggtgggagcctggccagagttcccgacccaccccgccccattccccgctggcgcttggtccgcccctccccgtctggaagcctccagcagccccgcccggcggaactaggggacgggtgggggacgtcgaagggcgagggcggtgaccccggggccagaattctcgcaggcgcctgggccgggtgcccggccgtgcgtgagtgcggaacaagtctgggcgcggggaagggcgtgggtgcgggccgtgggtgggtgcggggcagggcgcggggctgtgggagggcgcgaggccgtgtgtgggtgcggggctgggtgcaggccgtgggtgggcgcggggccggggctggcggggcagggcgcaggctgctgcaaggcggcctcgtggattctggccccggacgcacgaagcgggttctactttttaaaaaaactgcgttgccttttccttcctctacgttagcatcctgtccggggtccccggcccatgtggcctttcttccagcgacagtacacttagctcagaacggattgacacccactctgtgtttccaccgggcgcgcaggctctgcaatgcggagcgcgttctctgaaggacaggccccggagtcacggctacagccacagaaagcggaaaccgagctgcagtccagaggggatccccgtacatttccagcgggctcagacacagggtcccccacaagaaagaaacaggacagaaaaagtcaggacacgtatgctgtggagagtcgaggtctcgcctagatcttgggtgtgggtagacgcagccgctggcagttttcctttccagcgtctctggggagcctggagatgtccttggtgccgatgtgacacgaagagtgattgcgccgccctgcagaggcggtggcgggacgctgcgctcgggctgggaaaggccggccccagggcgacccctccggaggcccccggagagcaggtgtgcacctcgcctcccgctgggcagccagttcaggagaaaaatgtgaagcttttagctaaacaaaatatttctttcgttaagggctttctccacacggagactttctagccacgtgagactttgacctcccagtcccccagattcagcgctgggaccgagcgtctgctgttatttttagtagaagtataaaaagaatctcgaaaagttttagctctggagaaggcgtgaatacagctggtgccttcatacactccacttgagccgctctttaagaactccaggagatcagaaagcaatacgaaagccagagcattgcacatgggatgggctggcgggtggcctttgggtccctatcttatggacgatttttgtaaatggggcattggagatgagtatcacctggatcacatttttaggttgaattcctccgtggggggaactttagcaatacgcatccaaataagaatgtagattgcaataattgtagtaaagtgtttgccagactcatctcagaaaaagacattatca

SEQ ID NO: 39301 - DNA, 1123 bp, Homo sapiens
tcttcctaatgcgtgtctggcactgggcagacactgtagaatactatcttgattagagtctcaaggattttgtacttaaagtcctttacaaataaaagtattcaagtataatctattataaagactcttttctccactttggggatatacggtgtggcatcgattcattggtcataccaaaactgttacttctgttttggaggaattaacaaggaaaacccaggcttagtaaatcaacatcgaagttcagaagttcagagtaatttgtcttgggaacaaagtcctccctagagcgaagaggcattcacaggagctcttggtgttaatgggattattcaagatatacctgagaccagataaatatttgatgattttgccaagcactagggtttctttgcagtttgtctttggctgacgttttccccccgtggggtttggactttgtggcttcaccagattttgcaaatgaaagaaggctggggtttcccaagagtacacttgtgcaggaaacaacagactagtgaggtttacaagaggggggtgtgtgtgtgtgtgtgtctgcctgtgggatgggggtggcacgggggagagagagatgtgggttacaaagctgccatctagaggctagaggctcctttctgcagtgtatataatgcaagtctgcagccagcagagctcacagttgttgcaaagtgctcagcactaagggagccagcgcacagcacagccaggaaggcgagcgagcccagccagcccagccagcccagccagcccggaggtaaggaaacggtgctcgggcagcagctctgctcggaaagaaggcacggcttctgctcttaagccaagtggtcttttcaaaggccttctttaaaatcgctcagatgggtgcttttgagtctgcgggtctggtttctgaaaacccaggctgcacgcagctgcattgcaaagtgcttttgctaattcggagggcttcacctttctcttcagaaagcaaagggcagttttcttaagtcacttgcagaaggaaatttccatgtgtatttaggaatctggtgtttatttgctgtgtggctatttaagctccagtaagcaggggaactttgcaagaacacagactatccat

SEQ ID NO: 39302 - DNA, 1266 bp, Homo sapiens
cagtgcaactgatactcactttacacgtgtgcacgccagtgtcctgaggatccaaggaacttgctctagtttccacaactagcaagtcccagagagagattctaacctcagctacctggatccaagctgggccgtgttctctcttccaagggtttggctcgatgctgggcggtgtccagggtgggacgggtctctggggcatcccctacctcactgctgtcaccccacctgccttttcatgtcttggctgcccggtgccattgtcccctatgtgagggtctccctctccctgacaccggatcctgcatgagaggcagttcgttcccctccctgagaagcttggctcaatgcccatgtacatttggggcgagttagagatcacacagtgtccggtgaaaggtggaataaataaatgagtgactgaccatggccctcccgatctttcgtagatttctgttttgcgtcactggcctaggcaagcacttaatagttaaacggtttctccactcccagccggtttttgttttctttcttctttgttttctttcctttcctctcccacccaccccatttgttgtggtgcctactttgaacttgtcatcagcaatggtgaattcaggaataaaaggcgacagaagcacaggaattggcacttctctgtgtccctgggcagcgcatggcctggttgttctgctgtgacctttggcctatgacaccaggatgaggataaacaggtatacacagtccctgcggcctttgtgaacagagggcgtttgcaaaagacagttgtgtgctgtttctttctgagtaacttccgtggagtcccactgccctggagaaagaggacaggatgtgagggtctgtgcagcaagtgggcagaaggcagcacctgctcctcattgtcaaaatctgagaaggacttggaactggaagaaaaacaaacccctggggacggattggaaccagggctaggaaggagctgcagctggtgggcgggagaggtggcaggatgggtagccagggcctggattgttgctccctcagcacgtgctggcctcagtgcagggaggacttgttgcaggctcagagacagatttccacctgcaggatcttggcagacccactcaaggcctgctctgctcctttcccacctgcctggacgaggcgtctcaaagctgctggaatctccgagatgggcagaagcccatgggctggggcaatgcgtttctactgcgctttgtctcaaatgctgagtggatgatgctg

SEQ ID NO: 39303 - DNA, 1593 bp, Homo sapiens
tgagattttgccactgcactccatcctgggtgacagagcaagcctctgtctcaaaaaaaaaaaaaaaaaaaagagagaacttagaagggggaatatgtccacctccgagggaagttcagatttaatttaaaccaggtgttggcaaagtataactcatagtccaaatccagcccatggcttgtttttgtaaatgaagttttattggaatgccaccgtgcccattcatttacaaagtctctatggctgcttccatgccacaatggcagtgctgggtagttgcatctgagaccacatgtggcccatgaacctgaaagatttaatacctggccctttacggaaaaagtgtgcagacttctgatttttaaggcatggctgacagctgcccggagccggctctggtcagagtaagaatattcaggccctgggatgcccctgatgtcctgcgtctcacagcatttttgtttgcatttgaccctaagagagaaaaagaacctaatctaagcatctaggactcccaggctgggagccgcagatgggtcattgaccctagaaagtggggtggctacatcaggcagactgctttgcctattcaggacagtcatgcgggagtgacctcgtgaagatcttcagagtccaggccccaggcatttaccatctcaccagaatggccatgtcatccaagaatgttgctagcctgctcacccctgagatgaatattgtggggtaagaaaccatcgtgcaaggcaaggtcctgtcacctagcatttgaatccagcttaacctcgtcagaaacagcagcgggttgcacagggcagactatcacgaggtgctccttgtccaggcaaggctccctagggcactttaccagagccagatcacttactgggataaagggcatgagtcacaggaccgggcacgtcacctgctgggagatgcatcctcatttgctgtgctaccctcagcaaaggccgatctgtgtctcctcaacctgagggtcagggggattatctttgcttcttctctgaccaaaaggccatataaacattatctgaggggaagcaaaccagagctgcctttcacagcatggtcctcccaggagagccttcaggttacgtaagcagctcagctgactgcagcagctcagcaccagattctctggcccaggctcatggtccatctgccaggaaatagaagctctgttgcattgcctggaagagatgccacaagagggaaaggggcagagagttaaaaaagtttaaagagaacaagtaaatgacattacaagaaataatgcatgagagtaagtttccagccttaaatgcactgaagtctacccaaggatgtcttatgtggcagccagtgactcaaagtggctagtgacttcctggtggttacctggcctcccttcctgggagtccacctgtctaagccagagttcatggcagggaacactttagccccacgttgctttgggcaggttctatgtgggcccagagattcaaacgacaccttttctctttagttgccatcttcaggtgcacgatgggaccatcgcaacctgcagaggaagggattccctcactctcttactcc

SEQ ID NO: 39304 - DNA, 629 bp, Homo sapiens
aagcctcttaggctagaacccaagattactttactttggatctaaaaataaagttcaaaattcacaaaatttataccaggagtttgtgtcttctaaataaattcattttagtaattcctccagactgatggtatctctgtgtatcttaagacaaaggtacacacattcctcttcatccccagctctaaatagaaaaggcaaaagatttgcttttctaatcgtgttctgcattgctttctgtgtttgcccaagtacatacctgtctcatgaataagctctctggtaggagggctgaggcacagtgaacaatcccccagggcgtgagacacagaattgcaccagtggcctgtctgccacccagctctgaaacacaagcaggcttatcccgtcaagattgaacctgtgtgctgaatgctgtgagctcccaggccagcatgagggtggccaggtggggaagataatctggatttgcatgccagctcctttgctggagatggctgatgctttgtgtttgtttcgaatattatttccatggttcttttattaaaatcagctgttgggctcccacaaattattcttagctcgacagaccaaaacaaatgtcaaatagtgaaagtgtcattcgagtc

SEQ ID NO: 39305 - DNA, 696 bp, Homo sapiens
ttccatttcattgttatatcataatttatgtccccaaatcctactacagtgtgtgtaggttggttctcattttttttaacctataaataactccggatgaacagtttaaagctaaatctttgaagacgtttgtgattatatcctcaggatatatctttcatggtggcatttctgggtcaaaagatatatggattttgagtttttggatacatattgttgaatgtttacaataattagagcttattcttttacactttattttgaaataattttaaccagacagagaagttacaagaacagcacttggaactttgtccctgaaccattggagaggatgttgcgccatgtgccctatcacccattagtactttactatgttttttctgcaaacaaggccattgtcctgtacaaccatagcacagccaccgaagtcaggaaattaaagttgatacattactattctttgattcctgtatttctttaaagttttaccagttgtcccaataatgtcctttagatcaaaatgattccacctaggattatgggttacatttgtcctctcttttagtttaattccagaacaacttcctaacctttccttgactttcatgaacttgacacctgtggcggttgcaggatagttatgatgtgatgtggcccttagttttggtttgtgtgatgcttcttcatgattag

SEQ ID NO: 39306 - DNA, 1687 bp, Homo sapiens
gcctgcgcctggcttccctcccacccctaccttttccaccatcataatcactgccactacctcactgagatcctggcgtgcagctctaattttatctctgacctgcagaaggtgtgtgagaatggactgagatgacctgagcacgggtgaaaggtccgcatcaaacccagaaagtcagccgagatccaggggcgggttctcatcctacggcctctctacattcgtttctgagacacaaaaggacttcacagtgaatgttcaagcaaattagagcacaaaaacaaaagggttgtgggcaagcaactgcgaagaccacagctgtgttttggtaaattcccgggcgaggaggatatgccgggtgagtgagggaggccagagagcgacagagttcttgggttaactggaaaattcaattatccagaaccacagtccatcagcaatctgtttagtcaaggttttgcttcaccttccttctttgaatcaatgctctttgaaacaatatccccaggagttattcgctatagagtagaagcacagattttgtctatttagcaaaataggagacgaaatggaatgctgctgggctaattgctttgcaaggaagaagagaggcaatacttcagcactttaaccagattccctacttttgctttttccatttgatcaatttacatgtgtactgcaagaaattgtgttataagaaagctgagccattctggtgttcactaaggaatgtagctttgattagtccttgtgttaaaacaaacataaagtgtacgggctgccacagaaatacttaagtagaaggagctctttgtgggacagtaacatttctgtcagttcccatgtctgttacattattgattccatcattttctaggagctccaaagaaattgttttctgaaatccatgtggctttaggattctgagtacaaatatgctttattttataagaagtgaattaattcatgcagctctctaaagccactagtcaggagtagaaaccattgccagtaagaacaaaaatactaaagagaagcagaaatcctacgcacatgccctttgtaactgatgtaattggtttttaaagtgatgtaatttaaaaaatactggaatgttttgcaatgactcataccttaagccacatggtcggcatccgtgaatgcttggccacaggtatcgttgacaaatcctttgaccctgtcattctgaaacccatgctgtcagagccatagtttccatcaagaaatctggccaacgggatccatatttccagatagtgtccacatcatccatctattcacactctcactcaaaaaatatatcctgaactgttattatggacaaagcgccaaaaatggtggtttttatcttttcttttttttttttctttcggaaatgtggtaattaagtcaagtgtcaaaacaaatgcaactgcttggcaaaaaaaaaaaaaaaaaattggcactatttcctctgaagaaacagactctatgcatgggaattgctgaaaatggggcaaaaagtccccttgtacactctgcagactgcccccctcccctgcaatctaaccctctcatctcttgcctctgctcttgcagcagtttctagactcccctcccagtgtccactctgccctcatcatcgtcatccatagagcagtggcagggattttcacgtggatcc

SEQ ID NO: 39307 - DNA, 1058 bp, Homo sapiens
ctagataacaaaactccaaataagagctctgaatgccaaagcctaaggaagcttcctgtttggtgaacaggtccacatgctgatacaaactccaggcagttagtgttagagctgaaggacactattcctggagcctaaagaaccatagtgattgatggttcttgggagcatgatggacccgattccacagggaaaagtcgggaagatctgtgccaaccacctggaccctcaagaccttgccctgtgtatcccttcctctgactgtccatctgcatcctttaaaataaaactgtaattgtaagtatagtgctttcttgagttctgaattgttctacagaattaataaacctaaggtgaggatcttgagaacccccaaatttgtagcgaagtcagacagaaatgcaagtagcctggggaccccatttgcagagggcttcttaaggaagggcagtcttgttggggacttgctctttaatttatgggatctgatacaaactccaggcagttagtgtcagaactgaaggactttgcccttaactcacggggtctgagcttgggacccaataggaactccaggcagttagtgtcagagctgaaggactttgcccttaccctgtagggtctgagcttattctggctagttagtgtcagaatggaattgaatggtaggacatccagttgatgacagaggattggttttggaactgcagacgttctcatctcctggaatgctaacaaaaactcagaccccagatcttgaggatcagataatctgtgccagggaatcctcattttagggagtacataaatgatactcatacacattaaaatttgaaaaccactgacatacttgttaaagcacacctgtaaaatacaggcaaggagagtgaaatgaaaagtaatcccaatcccatcggggtacatttctttctagaagctccgtgtaagtgtttttgttatggtctggttcatcctatctgtttagtattatgctctgctttttccctttgacatcatatcagaattttttttttttttttgaaacggaatctcactct

SEQ ID NO: 39308 - DNA, 831 bp, Homo sapiens
tgaacctctgtttctttgtctataaaatggaaattatgggccaaatgatttgcaagagccccgtccactgctgctctaagaccagcaggaatcactagatggggaatcccagtcctctccatctcttcattggctagtatcagggatccatgagtcagtaggttgacaaatgcccccttaaacaccaagtcctaaaccaagggctccatgttcccagacagagatgccattagcagcttctctctgccagcaccccagacaggtgcatgcattttcctactgacataaaactcatggtcaggacctacctcactgccccattctcatctaaaaggaatttgaccaaggatggtgtcactggcattaagcttctcatgtgggccaagagataaaaagttcacagactcagctgcaagttacatcctgtttggcactgtgggaaatcactgggtttaggaacttatttctcaccctgaacctctttcaggaaatgatgttgtcctttttgatgccctggctacaaaatgcaatggggattccattgcactgtagttctgctaccttctcagagttaaacctgatgggaagaacaccaatcttatcttactggaaaaaaacacattacctaataggaaagccctgggaacaattgagaaatttccgaactcagtggagaatccaaaatataaattgacgctggtatgtggagatcaactcatgccacctcatttcctttggagatgaagaaagcgtggcacagggcatgcactcaaatgctgtgtggtgatcattttcagagtgaacacaggccaatgcttttcccttcctgtt

SEQ ID NO: 39309 - DNA, 567 bp, Homo sapiens
tttctactgcgtggttagactgctaatttgtcaaacttttatgctctgcttcccttttaaacataagttcaaatttaaaataatctctttgtgagtgcatataactgtacactttcaggaaaagccaggtcacctcttgaatgctttgctgcttagaaatttttttctgccaggaatcctaaatcacctctctcaagttcaaagttccgcagatctctagggcagtggcaaaatgccaccagtttctttgctaaagcatagcaagagtgacctttgctccagttctcaacaagttccccatctcttctgagactgtcttagcgtggacttcattttttgtatcactatcagcattttggtcaaaaccactcaacaagtctctaggaagttccaaacttttccacatcttcctgtcttcttctgagccctccaaactgttccatcctctgtctgttacccagtttcaaattcttttctacattttcaggttatctttatagcagtaccccactgctggcaccaattctctgtattactgtattctcatactgctataaagttactgcc

SEQ ID NO: 39310 - DNA, 883 bp, Homo sapiens
gttgctgcttcccttatttcatccttttgtcccccaaaggatgggccatttgccaaacaacaatggaggcttccccgggaccctgttttcttgacatttcccttctttgggacacttccctcagcactcagccagcagccctggagggtgcaaggcatttcacagcaggacaagggtctttgagggcaacatctctgtgcattgagggtgctgtatgtttggagaccgacctggcttttctcactctcctagcacttctagtttggcttcaccaccaacctcccctggagaccgctgcctttcttccaagttctggggtcactgaggaagccgctgcctgtgcactgccccagctcagcccctcctggtacgaaggtcatggcatatccatcacgactgtaaccagcagatccctggactctgcccacagaattccccgagccgggccctccctcctcctgaccgggggcagctcctcctcccagcctcatctgctctcaggtttctctgctgtctgcctcacagccccaccccacattcatcatgctctttgaattcagaatttcactgaaatccccaaggtctttccttaccatacagccttagtcactaacttcacagatgtcatgaacttcccattcctcttcttcatgatctcagacaaatgttagcatccaactttgcattcttacaacacagctattatttcattatcatgattattcttcatgccacactctgaggtttgtttccgaatcaatagaagatcataggtttggcccctggtgctcaccttgccacgtccacctggctttattttcatagcattattcttttctatttgggtaacgggctggaaaacctccaagttgagaggctgtgg

SEQ ID NO: 39311 - DNA, 1097 bp, Homo sapiens
agttccaaggaaacccatgtaacagactgctgtttgcaggtacacatgttagagatgaacacagtgatcagcctaggactttgggtgtctggatctcaaaccagattcttgcttgccgagtgtttatcagagcgtgtcaataacaatttgaaatgaatgattttctcccactgtcacattcaatatttacctttggagaaaagcagggtcagttctctccaaaaggaagcttagttagtacaattgggtattttacggaaagacgtccttaaactgcaccccttagaaaatggtaagggactttaatagggaaatgcccccttacccagtgtggcaagaaagcacttgccacaatcatttcagtcatcagttctaagtgacttcagcatttcctcatggcaagaacagcgggcttgttgcacaactgcacttttcctcacctctctttgggttcctgttgatctttttttttttattttgtattttggagacgagacagtctgttccaagttctgagttggggacggtagcaattctccatgaccaaaacactctgcagctgcgtcctttggagcagggaacacgagctgctttgttgacccctcttcaccccagaggcgtgtcttctaggttcagtccaggatgcagcctgccagtcattggtcaggtcacaaatatgtgcagcacacagcaaggtcctccctgtgaccggccggtgtggctgtgtgctgtctgtcaccccagcgccctggacctcagtctgcagagaagcagctgtgacaagcacagaaaggcaggcactggtgcctcctgtcgaagcccccaatgcaccagcagccctcgtgttaatttaagaagttgactgaacaatctggcacagtcgctggaaactgaagaaggtgggaagaggctaagcaaaacccttgcttaattaaaagcatatctgcaaaaggtcaggcctggcaggaggatgacaaaggcagtcagaattttaaaatcaagtcattctctcttgcgagatttcttccagaccctgatggattagggatgctgggttttctcttccaacagagcctgcacagctgagtcggggtgag

SEQ ID NO: 39312 - DNA, 3660 bp, Homo sapiens
gatgttcaggacccatgtccaggaggcagttaaaaagtggaacttggaccttgaactcaggatagagacttagactcaggaatgaacctgggggttactaaaatatgtatcagtcagctactgctgcataacaaactacctccccaaactcagaagcatgtgagatggtcagctgtgggggctctgctcattgctgctaagcttggctggactcaggctccacatgtttgttaagactcccaaagcaaatcacatagttgagtccatcttcagttggctggagaatgtatattctgcttctgcttcaaagttgtattgaaaagggtgtggtttcaggaagaaataaaagctatgggacaatattgctctccatcacatggtgtcattccaggtgaagcccagggcatggataaaataccctaaagaaaatatcaatgagataaggggacaccaaagtctatggagcagaagatgggcatatgaaaaaggttttaaaaagaatcttcacttattgattgtatagctatttattgagttccaactatgggttgggctctgtttctatttctggggtgggaaagctgtcaaaaaaaaccctgcatcatgaagcttctattctagtaagacactggggagaccaacaatatacaagataaataataaaacacgtagaatgttagctattaagtgttagtataagaatatttaaagcaaagaggagaagtggctatgtagtgaagggaggaggggtgaaatcatagtgtccctggccagagaaggatgcactaagaaggtgtgaatgaagggtcgaaggaagtcagggagggagccatgcaaataccttcgggaacagaaggaacagaatgtgcacagacacaaagcaggggtgtgtcgcgtgttcagggcatagtgcatagggcagttggcttgaacagaaggaatggggaagagaagtaagagatgagtcagtatgacagggccactcacagcctcgcacgtcatgaggactttggtctggaaggagtgagctggaggccaggggggagttttgctcagaggaatgacatgatctgattgtaacaggatccctgtggctgacttaactgacaaaactgatattaattttactgatgttgacagaaggctatagcaatgcagaggggagagggcaggggagctagatctgatgcaggaggatcattaaaaggctattgtggggagctgggagaagctgataggggcttggagcagggtgggttagtataggggggagaatgtgacctgattctcaagccaaccaacataatctgctaggtagtttcatgtggggtgtaagaagtagagaggaatgaacgttcgctccaaacttaagcaattggaagaattcactgaaattggagacagatgtgaagaacaggtttggtggaaacatcagaagtctgattcaaacatggtgagcttcagatgcccactgaatgtccgagagcagcagatgtcaaggagaagctcaggtgcaccagtctggaattcaaggggaaggccagggccagcgagtatatttgccagtggtcaggatatagatgatatctaaagccaggaaacagcatgaggtcccgtaggggtgagtgaggacagaaaagagaggggctcagaggactgagccctgatgactccaacgatgaccaaggattaccttgactttcaaggtcagagagatgaggaggagcctcagctgtgcttgggggtggggtcagctgtgggtacgggctgcccaatctgaggaaggtggagagcatttcagggaaaaaagagagaggctccagctggatctgaagctgatggggaggtagagtatgacgagggccaaaatcctcctttagatttggtgactgggatgccagtgattatcttagtcagaataccttcagggtgtggcagaatcaaagctaggctgtggcttctgagatttcaggggcttttggaggaggaggaaatggaggtggtgaacttggacaaacatttaagaatgtttgctacaaaaattacaatgatgatgatggtcgctcactaatatccatcatctattctaaacactttacatgcattgaatcaatggaaagcagcacaaagagataaggtggtttcctgacactaaaccgggtcccagaaaggtgtgtgcctttggctgtggtgtgtgtgcaaatacctgaaaccacagagcaggtggacaggctgaagggaaggaggcagtgacagaagaagcaacagacaccgggaggaggggatgactgggagccccagagcctggatctattggatggaattcagagccagacagagggactcacctgagtgaagaaggagatgcacgctctgttcccaaaggaagaagggaagagtggcgagagaaatttcattaacttactaagaaggaggccaggaggccaggtcatttggaggagagagatgaacagggtatgggagatactgagcagccgcagatggcctcattgggaatggagaccaggtgggctgtgtctaccagaagtgccgagcggcccgagagcagggggcccaggaatggatgagcagagtatcggtgccgagaagtcaccagaggaaaaagaaactgaagggaggaacatgaaagaggatggagtgacggcccacaggatcgggcttggcaaggacagagttaaccctggtgggaaacatggagttggggagggcaaggaagggaggaaggatctgagggagctcatgggggagtgcagtgtgtccagggacaagaaggaggcatgggaagcccagggtgcattcatttcaggggtatttgctgagaggccgctgtgcaccgtgcactccctcggagccctgggcacattaggaggtggcatttagagtggcctagggggcaagagccggagtcacagagtagatgagactgcccaggagaccatgagttaagagacaggagactcaagggtagaacttcaggggaaatgtctcttccatgaaaggggtgaacaggagaagttgtgccagagccctagggaaggaggaaagctcccgacccccaacctctaccctacctgccatctgcccacttccatgagctccatgagtgagccctgaaacacaggggaggagagaggttacagggtaaggggactgcatctgaccacctgactgaggaacagtcttcctctacaggaaagtcattctccccttctgaaggtgcggcttagagacgggaggacacttaggaagcagtgagaaattggatatgcagccaccaagccagggcagctgagtccacctggtggccggtgggtgacatgaaggcagtactatcatctcaagtgatttcaagataggttgcagcaaagttatcaaagatggtcagtattaatgacggccatggaagctccgatttgtgtagactggatcttttactaagtcctttcaacatccttcacctcatttgattttcaccatagccatgtgagacttgacctctcaaagatgggaaagttgaggccaaaagaagatttaacgaactcgcccaaagacacacagctggaatgaaagttatttgaaagtgaccctttgcaatgggagcctgaagattgtttaatttattgtgcacggtcctctttt

SEQ ID NO: 39313 - DNA, 886 bp, Homo sapiens
caccccagtgacccctgctccaagaggcagccactcatgctgtggggcagggttggtttccaccctaagcagaaagcccaggactcctggccacaaggagggctggctcagggctggcctatttctgcagctgctttccagcaactctgacacagaccctttttggcagagccatcgtcatcgcctggggcccatcttctagcctcaggtcctgcggcctccagccaggtgaaccatctggaaatctttctcactgatatccatgaactctccacctcttgcctgcctgcctggctggactctaaacctgatacacttcatggctgcaaatgatctgtgtttacttttcttcttgtgggtttggcaggggctaatgtcacattcctctcttctgtaggtgaccttcctgcctggggcttccggggcttggtgacacatgccctgcagcacagaggccactctaccatcactggggccccaaccacacagtcaccagactaggtgcgctgagtgtcttccatttgtccctcccatccactctccatgctctcctccccattatgcctcagaaggccagccgtataagcaactgctgcagacttcctgccctcggcttccggctgggctcagccaatggggatcccccgcaggaggtcagagggagagatggtaggaaggtcctctgagtattgattcctcactccctcactgcctggctggcccttcagtgaaagatcagagtcccagccaagcagtctttgctgggctctactaaatattccctccaattgtcttacaaaaattcacccactgaaagcttccaattgtacaaacatcaccacaatagaagtttaaaatattttcatcactttaggaggctgaggtg

SEQ ID NO: 39314 - DNA, 1989 bp, Homo sapiens
tgcatgtataagctatgaagtacaaattgcataatttctgtgattccacatatgagatcagtgcacttatattagtatttaaaactggcattgcacaacgtaaagatggatggtgaacttcatgctaacaatttaaatctaaatttttcttggaatgatattaaataacacataaaaacactatgaaaagagagaaactgagaggaaagagaaagttttatattttatgacctcagaggcactttctttctgttttttgaacaaggaagctccgcacttttctctgagctccacaaattatgcagccagccttgcagcaggcaacacatcaaagcctctttcctgggggtctagtgagggatgtaaaacacaaatatgttaataatatacaatataatgtcactaacagtaagtgctgtgctaaacaaaagccaggatggctacagcaagccggaggggagctgagaattagatgtaaattctgagggatgggaagggccctagattttagggcgttgtgcagaagagtaaccagatctgctctacgtttcaggaaaggaaaaaaaaattccctctggctgcggttccgagaatagcctggaaggaggcaggggtcccggctggagaagcgtggctccggggtggggcgtgcagggctagcccgggcgggggacgctgcccaacaagcaggtttgcggagactcacaccttagattctgagtttttaagcttgtttcctcagagcagggaactcacgaacgtttcgtgagcacctacggtatgcagggtacggtgcggagccctagcgtcactgacgaccgggacagccgagcagctgcaggatccgtcgtgttccccagcaattttaatatttaaaaattcgttactgttgctgttacttgttttctatgtattggatgtcttcgtgaagaaccctcaaaagtgcaacgaactcctccctgccagagggcggccgcgcgctctgagtacagcttcccgcggagccggccaggtcctccagggcaccgagaaagccggccagaacggcggcgccctatcccggccgcagcgatgtctgacggcgccccggaactgacggtctggtacgcaggggcgctcggcggcaacggcggctttaaacgtcatcgcgggcgcgacgcctgagggacagtctggggtttggctgtccggacggtgcagcggcgaggccggccgcgaagatgccagtggcggtgatggcggaaagcgcctttagtttcaaaaagttgctggatcagtgcgagaaccaggagctcgaggtaaccctttgcgtcgcgctgggagaaactgcggagtagtcttaggccctggggcggcaccagtttccagggtaacggggtctgaggctagcgggctttgggagctcacggggcgggcgtgggaggtggacgtgtggatccctgaccgccgcaacctgctccgaccgggcccggtctccccgaactcgccgggacctttttgttatgtgtcttcagcttgtgagcccgaaaaccctgtgcgtctttgctccagcacctaccgatgagctcatattaattaggcatctttccttcccagtatcgggttgggagagggtagtaaagtgggttttattaaagatcttggtatacacacacacactaacacacacaccgcaactcacacgcacaccaagaaaaatgtgaccattgtaacctttttttaactcacaaagcctttctcgtaatgttgtcaagttagcttgccattttgtcttcagtaagacagatgaaagttatgcagctgttaaagttaatgtttttcttagacacttaaaaagggtttatatcattagttttaaaattaaataaaggagacaacatccagaagcagcagctcactaatagataatagatactttccagttgagttaaaatggaaagaattgtctttgcaacgcagctgtggtgattttctgtctcttattcagga

SEQ ID NO: 39315 - DNA, 1051 bp, Homo sapiens
ctagcacagaaaaagatttgtttctttcaagtttggagtgcaagccttgagccactctggtgtcatccaaattctaaatgtgctcatactcaaataaatcaagacctacgtacatatacgtgtgcacacatctgtgtatggaagcactgactgcatggcagaaatcatggatcaaatcttctttccctcccctgtcttctttctctccctacagcgtcttttcttcctgttgtacccttgctgtctgtgcactaaagcacaacccgaagccgcaccttctctgggacagcagccccctcagcaggcctggtgcaggtgtgaatcagcattgggggctgctgaagcccacctgaaagcctggtggcctcagcttcacttttagggcagataaagggtttgtgttggcaccaggcttgaaccagcttcttgttttctttggggccaggaccctagtctagtgcagcttcacactcctgtgtaagtggcagcccctctccagtcctggatgtaggaggccccatcgggaccctgagggctgcgacatgggccctgtatgcccaaggcccacgcacaacatggggacaccagctccccacggacgctccttgcacgccctccctgcattcccctctctacatcactagtagagagggccctgctttctttccacccctttcccctgcatgccccctgctgcctaagaaagcccctggaagaaacccagcttcttgaagtggttaaataaacaggaggctgtgattcattcagcatggggtggcgggagggggagggaccttgccagatccgtcatgtggtgcctcttccttgtgagcctctgagtcacagggcagcaggggtggcgtcctcagggatgaaagctgaggaggctgtaagcgagtgagtgcatgtgagtctgtgagtgtgcgtgtgatgtgtgtgtgtgagtgcatgtgagtctgagtgtgatgtgtgtgagcaagtatgagtgcatgagtctgtgtgatttgtgtgaacaaatgtgtgagtgtatgtatgtgtgggtgtaagcaag

SEQ ID NO: 39316 - DNA, 1484 bp, Homo sapiens
gccccaggcggctgtgggtgggtccctggaggcctctgcaggcctggagttcctggggcttggatgggcaacggtccagggatcttgaccttgtatttgaggatggtgggaaatcccagcacttccggctccccgaccccagggactcccctagcagaactcagggagcagaaagcccaatggtgcaatgcgatgcaggcccccctgcaaagtcattccccaggggctgaccacgcagaggcttgggccgccgatacgccaggcaggggcattaagagtggagaatttttttaatttgatactaaacacacaaaaaggcattcaagtaatttgtggataaagtctgttggatggaggggcccagcgctggattcccacaaccacttatttatggcttagtgtggtttgactttgaatcccacaaaagggcggggaggagagcggccccacggctgcgtagcgttcggggtaaaggtcctagtggccactgattcccggcagccgcttgctgtaacgaggggctcccggcaacatgacgtggggctggggggctccatttccaaggaaacaatgcgtgggcgcggggctccgaggccccggggtccccgggaagggctggagggccgggggcgcacatctcgggtctcggggtccggggacggcagacgcgggggcgcgcggaactgcggccggggcagtaatcaccccagggccgcccaggccgcgcccagaatggctccgaggcggggccgggccgcggggggcggacggaagggccggggcggcgcggggaggaccctcccgaagcccagccggggccctgagctcagaagcctgggaaacggaggccacgccgggcaggagccgagctcggtttcaccgcccccagcggaccgaccgccccgcctcccaggaccccgagaccccggaccccggcccgccctacaagcaggagctttggcggcgcgcccggctgcagccgtcggcctctgtcgccccctcccggagcggaggagtcacggcgggaaacagcccgaagccggcggggccccgagggggtccgcgctgcctgcccggggaccccttttcttggcagagaggatactgacatcggtctggaggccgtacgtcagtcccggggatgtcgggatcagccttggaggatgccctcgatctttatcctttcctatgtccccagtccctggcaaaaggtagtagacccaggggaaggatgcaggaagcgaggaaaggaattcccatgccatgagcaccatcctagaggtgttgacacacaaacacgcgcgtgcacacaaatcctctaaggtaaccacaacaacagaacctatgagccatttgtgaatacgccggcactcggaagtgctgtggacacactcctactccacccctgactcactgcgcctgcctctcagacaaggacccatgcctcccttcagtcctctctgaagtggggaccgtactggcat

SEQ ID NO: 39317 - DNA, 1666 bp, Homo sapiens
cagctccgcattctgtcatcccatcaagtcatttcccaagagaccctgctcttccagggaagtgctgtgagctcaggccacctggatggtggagggcagagctagctctgtttggaaaatgcccttcagtcaaagttaagatgaaggccagcatcaaaatatgatattatggttattgaacaatatttattcaacacatatttgttgagagcctactatgcaccaagcaccgtggaaggcagcaggacatcagagtgagcatcgcagtccctgtcctcccagagctcagagcaggggagcaacagacactaacccgataatcacacgagcacgggagataaatgatgggcctgatctgcaagaacatgcaggaaccccagggaagccgacagtgggcagggctgcttggccaggacctgatttctgagggaaggacagttgagtggtgatccgaacagggagcaggacttggacagatgaagggaggttgggttgcagggtcattcagaaaagagctggagcccagagagcaagcggaggcagccagggtggggctgtgcaagtagaccaatgtgagcccagggagctgcgtgtgtgttcagctgcttggagggcagtcacatgaggctgtgtgctgacgaactggcaggagcagagtcaggtgacagctctttaaaggcctagggcactcttgcataacccacgatcccccacccagctgaacaacggcaaagccagaatgcttccaaaaatggggtcccccctccattttccaggtttattggaagaaaaaaaaaaggattcagtgtctgatgaaaacatattttcttgtaatttacaagtagtttcctggatatggctaagatttggggcaatattttgcatgtgttctgtttcctggatggttatctcaaaaatccagaacccttgttagcctaatgccatattggcccagagggtttagacagagagactgagggggacgggttttaactactgcctgccagagagctggagcacctgagagggtcagtggatgggaactgcaggccttttcagcactaatcctggactctgccattgcaaaggaagcaggcacgtccagactctgtgaggctccttggtgagccagaaaccttctctcccctaaggttccctatccacgtgcagagaggaggctaagcccaaggccacccctcagtgggacttgcctgaccagttatccttggaactggggtatgcccaggcagtgaaattaaagggtgcttctctgaagcccatctttggtggtgagcttcctgctggcatggccaagtgaaccatcctttcctccctctcatgccagccactaagtcccagcaaaggctgagtctccagacggccactattacgacaaggaagtagggaggggactctgctgtcctctggtgtccacccaccaacccagactttaacagtgtggcttgtgaggctcagggctgaagagatcggctgcctctgactcattgtgtgatcttgggtaaacaccatctgactctctgggcatcagtttcctcctttagaaagtgaacaaggaagggtaggtctcagggcagggtaaaacgtcagggaggtagagggtaccagcgacgggcacactggggagccctgagaagaagctggggag

SEQ ID NO: 39318 - DNA, 1282 bp, Homo sapiens
ctgcagagttagaaatttcgacgatgtgccgcgcgctctagagcgcgctcagcaagcgggtcccaccgtgcccaaggcaggaccgcggcgcgatgtcacctatgcaaagtcgccgcaactcacgggaatcgcagctgtgtgctcaactttcccctccccgccgccgtctttctccccaaactggcttgggggtcgagtatccggggctctcccccgcactggcgcttcccgcgcgggcgccccaggtgtccgttccgttccgccctctgcctggcagggcatccagaggtgtccgcgctcccggagctgggcggagcggggcgcagcccacgtggttcgggcgggaggcgccgggacgtggccagttgcccgcctgccccggagagccaggcgctaaccagccgctctgcgccccgcgccctgcttgcccccattatccagccttgccccggcgccctgacctgacgccctggcctgacgccctgcttcgtcgcctcctttctctcccaggtgctggaccagggactgagcgtcccccggagagggtccggtgagtgcactgagaagagggaacagcggggccagggtggcgcccaggactcggggcttaggctttggggggtgcgcggtgtcgcgtgcagacccactggtgtgaaaacgcccccagccgccagcctcccggcctcggtccaggctggtgaggacagcgcgttcccagccacccagccttagtcccccaggcttcacctggattctttgagcagactgctctgggtgcaggcacgggtgggagtgggatggcgggggatccccattttgggcaaaacggttggttttaatcagaagctccattgcctccattgcgagtctgccatgcagactgggccaaggctgctgatgccaagtaggctggccccaggggaaaggtttcctcccagcccaggagctggtcttggggtgaggaagaggccagatgatcttggcctgggaggaggcacctggcttcctctgggcgtctaaaagtctgttttattggaatcaccttttgtttgcagacagactccctgggcccaccagggaggtgtgggaagtagagatgtgggaagggtctgtgagctgtgagcacctgtgggcttcgtccctactagccccaagtccctacaggaacggaatctcacttgtaaatcccttccccgggcttagacaccgcgtcccactgacattaactggcactggaaactccacctcacttccacacggaacttgggacaggtcctttttt

SEQ ID NO: 39319 - DNA, 1665 bp, Homo sapiens
acatagtgaaaccacgtctctactaaaaaaaaaaaaaaaaaaaaaaaaatacaaaaaaattagccaggcatggtggcaggtgcctgtaatcccagctactcaggaggctgaggcaagaaaattgcttgaacctgggaggcggaggttgcatgagctgagatcgcgccactgcactcctcaaaaaataataataataataaataaaataattagatctaattccttaaatatctaatgtgtgttaaaacttttccgctcatctccaaataatgtccagaccttacacttgcttgctgtatcttttaagtctctttgaatctgtaagatctcttttcagctctgtttttttaatttgaagcttatgtgtagaagaaagctagctgtttacttttgtggaatttttcacagtctggagttagctgaggatatcctcgtgatgtttgcaccaaagttccattgtccctgttttcctgtaatctggtggtgagttccatagaagtggtcctcagagtgctctcatcttgagtgttttagattcattcatatcacttgggtattaagaaggttttaagtacagaaaagattatcacatgttattattttttaatgttctacaaatacaaagtagggccaaagtaaaccttcttgaagggaacattggttaatagtcacagcttttaactccttctgtccccagaagagcccagaacttcttaggcacccatccctgtcctggacccaagggacctggggctgtgcacaaaaggagcaggcctcctcctgggcaccctggagcttgcattggtgctgatttgtgtcttgctttgtatcatgcttgtgtcaagttctcccagtaactgctttctgcatttgttagggtagcccctcagctgtggttatggtagaaattaatggatattctccaaacccaggaagaactaggagaccatgcatagccggacttgggtgactcatgccctgggggaaaggctgaagcccaaacggaacaccctgttttaaaggacacagcctacaaatcaaatattaggactgccaacctgccctggaaaggcaaataggtggtgacgtggatttgtgatctctgcaaacagaggaggttcagagagaatctgtgaagggtctcctagtatgagacacgggcaaaccgtggcttgctttaaaaaaaatttttttttgaccaggctcggtgactgatgcctgtaaccctagcactttgggaggccgaggcaggtggttcacctgaggtcaggagttcgagaccagcctggtcagcatggcgaaaccccatctctactaaaaatacaaaaattagccagccatgatggcaggcgcctgttgtctcagctactcaggaggctgaggcaggagaatcgcttgaacccggggggcaaaggttgcagtcagccaagatcacaccacttcagtccagcctgggcagcagagcgaaattccatctcaaaaataaatacataaataaataataaaaatccatttttttgatcataaggaatttgaaatcacccttagccggactagttggaatcacggacacaggcaactctagagatgaaaaaaataggggctaaaacagggactccgctgccaaggcagggcctggaggggaacattggtctgagatgtttt

SEQ ID NO: 39320 - DNA, 1404 bp, Homo sapiens
agggactggggtgggctcaggaagctgtattatttcaaaggacgcagtgtttccacagctcagcccagagctgctggagttcacacggcccaccagaacctgctgacttcaaaatcatcaccaccaaggggccaggaggtggcgctgtggggcaacagaaaacagaaaacagctgctccttgaacttggattcccagcagctcccccaagcgcccacaggggctgcattcctccctgctggacacctgtaactacaacattaaaacagggcgcaagcaaggaacacaaacactgggaaagctgtgcctttaaaaaaaaaaaaaaaaaggagggtaaaaaagcttaaggttaatgttttgaaacctgacccagccagggcctaatgcagaccttgtccagctagtaagtgggcctctgggggtcttcattgagtgaaccttcagagtgctggtgtttcaccaaggccttccatagaggacgcggcaggctctgcaggaagcagcttcgatggccgatggccaagaaaggaagggaaaacccctggactggtcgctgggcacccagtccccctacccccgtgccttcccttccagtgcctttccctctttccctcggtggtagctttgcctgacagtgcagacctcgcctgacgtcaacactaggttctttatgctcatgtggttttatttttgttttctcctatcaagagtggtcagaaaatctctgttccatgtcaggaacaaggaaaatcttttggaatttttttggtttttttcttttttttagcatgacttgatcagataggtaggataatgttgcccccttggcccaagtgcagagtgacaaaagggaccaacactaaaaggatccctgagatcctgggatacttcctcttcatgttcattgtgggggccggggacatcaccctgacaggtgggtccccaggccccagaaagctcatttccgcatccctgggtgcagggggagttcacggggtctctgcctgttggtttgggatgcgtctcctcaaggcactcactgtccagagagaacaaaaataaaaccaggtctgctctctggctctgtcatctgggcacgttcggagccaaaagccttgaccttctgaaagttcactgaaaaatcatctcgtaaaaggcagattcattggacaaaagatttagaaatgtgtttaccgtgtatacatgggagccttcagaatacagacccacagatgcagggaaattgtccatttttatgcttaggttcaagaaagggtggactgcgtgtggaaagaagattatataacaaggccggacctgctgctaataggctgagtggggaacctagcaaggtctgtctgcctggattcttcttggcctttcctcctccgagaatggggcggga

SEQ ID NO: 39321 - DNA, 1725 bp, Homo sapiens
ggaggcagctgagctcagcaggaaccccaggtgtgctgggccctggcccatctcccagagccagccctggagctccatggctccagatggctagccgaatccaaatccactggcctgttctgtcagggtctaggtgctggagtgcgcacggaggccgatgtagaggaggaggccctgaggaggaagctggaggagctgaccagcaacgtcagtgaccaggagacctcgtccgaggaggaggaagccaaggacgaaaaggcagagcccaacagggacaaatcagttgggcctctcccccaggcggacccggaggtaagactatcccccagaggtctcagcaggaccctgcagaggtaggggcagggatggacagtcccagctggcagccaccctccccagggaggcagcacccacaggagcacaccaagggcccttgatggggtctgcagcgggtggccggctcctgaccaaccagctcccagggttcagagaggagagcaatatcgtggtgagtccccatctgggtgaaaccccacactccctcctgctgctggtcagcctccgtccttctctttcctaggtgggcacggctgcccatcaaaccaacagacaggaaaaaagcccccaggaccctggggaccccgtccagtacaacaggaccacagatgaggagctgtcagagctggaggacagagtggcagtgacggcctcagaagtccagcaggcagagagcgaggtagcccagaaggcacaggggagcactgagttccacaaacacagatggtgaccacacccaggccttgaacatctgccagctctaacatccgccagctcacactgagccctccccattggcccagcatgcacggctctgaaggccaggcatgaacctgggggtttctgggggactcacctaattcgccaccccctgagccctccaccccttccctttttcctgttcaacttggtgagggacaggcagggtttccaccaagaaaaaggtgctgaacacacaatccctgacccaggatgggggcctagaagcaggcctggaatttaggacagccccagacctcagcactggactctgtccggagggccatctgtgagtctgagttgtggctgcagagcttgaatctgggtgaggaacccatcaatagtgcacaaaggtcaaagggcagagccaaagcattcaggcctcccagggacagctgaggtgacttaggcactgctctgtcctccctggagacctacagagaggagagggggtgcctctcggactgtgaggacagccagcccccacggccctcctccacttcccttctcatcagcaggtgcctgtcactccctaaggacaaagggcacgtcccctagagctgttcaaggggagcgagtcaggctctggactttcccttcatgtattccttcttgctttgcaaataagctttaaatgcctagaatgtagcccacattgtgtaggccacggaagatctggtgcaaataccttagacgaagccccagccttcctggagcttgtttttagtggaaggagataaacagcaaacaaacaagatcatttgggttcatgaaaagtgtgattaagacaatcagtgaaggtgagcccctagagtgctcggggcagggcgattgagataaggcagtcaggagggatactaggaaagtaagccagcctggcaaatccagggggcaggaggccgggtggag

SEQ ID NO: 39322 - DNA, 1114 bp, Homo sapiens
ccatgctaggctaattttgtatctttagtagagacgggttttcaccacgttggccaggctggtctcgaactcctgacgtcagatgatccatccacctcggcctcccaaagtgctgggattacaggcgtgagccaccgtgcccggccaagagattcatgtttgtagcaggaggacaaggggcgattccttgtgtcctctgtatgactggttttgtgaagggtagactctgtcctatccagagacctcactcacctccagtccaaagccagaatagctcacccccggccccctgaagctcacaggaattttggggtctgaaaggcaaagctgaggcctgacccttcacatttctccccgccatcctcaccagcatctgccaagcgtggccacgggagcttttcactgtctgcagaggccagccccgcacactggcaggtccttgggcctccaatcccggggtctgtggggcctcatgcgacttcactgctcaggagtcgtgatccctcgagttaggtgattccctccacagaggttagtcctggagcggggacggagggccggcaggccaggccacatgaccctgcagagaggggaacagcacaacaggagcacgctgctgagccaactcccagaaaaggaaaaggacaaagtcctggcctgtagcatgtgccaggttctgtggcgtaaatgctcccaccctggctgatcgcaagctcccagctgatgtcaccgagcgtggggtcaggaagaggtgcccacagtcagctctcaggagccctgacaactggctccagtcaggcaggccacagaagacatgcaaaagtgaagaagggcgggtgcctgcaccagccacctggacaccaacactcaactaggatgtgaggccagatgcccccagctacacagccatggccccaggaggtgccctctgctgagggtcagcatctgagaccccttgggctgttgccgtgtctcacaaaggaaaggcaaggaagccaggcatggtggctcacacctataattccagcatttcaggaggccaaggcgggcggatcacttgaagtcaggagttcgagaccagcctggccaacatggtgaaaccccatctctacta

SEQ ID NO: 39323 - DNA, 1494 bp, Homo sapiens
tttaagtggttttgctttttttaccttttaatttaaataaacagccaattctgctcattgaagccctctctgtagcacttggctgttttgtaaaaatagtgagctgatgacaaattgaaaggaacatgaaatggaaacttattttctgggggctctaggacgtcagccacgttctcgatttagaagggaagtcagctggtgccaagttgaatgtgctcagtacctgtttgtcaccgtccccttcctggaaaaagcccaacaagtctggggttagttgtggcttcagctggcaaatgtgcacacaagcactagatgtcaccatccttccaaaagatgtcatgcagaaagtcagcagcgcacagaatctcccctgctgtggcctgttaggacagtgggggcagtccatggggaggtccagcccccgtccctgacacagcaggggctcctaaagctgccacctccgcagcaggccctggcgggggtgggcgggaggctgcgctcacttggactcccgtccctcggactcccgtccgttctgcctctgctcctgcctgctcttctggctccagccagcacgttggctttccagcttcagggctcgagtccatgtccctttctggctctgcttcctgcttcctctggatggacggtgtcttgccaggagctgagcccaccacctgtgtcatgtcctgctgtgggccccaccccacacacctgtcgactgaaccagaccctcgggagggccccagggacctgagtcaatcctcctgaaggctgacccctcggacagggccggccttggtgaccttaagccacccagggtgacagcaacctttcatggagaggccactccaggaaggtgtttacactcccgtttcacagggaaaaaatccagacggagggaaggagtggcatgcctgtggccatccatcctgtccctccctcggggatcctgcagccaagcactgggcgtgctgcctcctgcatttccaggccgcctgtgaggacagcactcccattctcctctgaggctctgctcctggcctaccctctcccctggacaggagcccagtgttcttgataaaagctgaagccacacgtgacaaaagaagcaggagtgtctgctctcaaagggtttttgtgcaacacagatcactcttcccccaaagcacgtaagttaaaggagtgagcacatcccatctcctcatcctaaaagtggcaatatccacatttataatatgtgatcatgtaattattataatgaggattaataattaacatacactttgggaggccaagggtggtggattccttgaggtcaggagttcaaaaccagcctggccaacatggtgaaactccgtctctactaaaaatacaaaaatcagcatggtggtatgcacctgtaatcccagccactcgggaggctgaggcaggagaatcacttgaacccaggaggcagaggatgcaatgagccaaggttgcaccactgcactc

SEQ ID NO: 39324 - DNA, 2425 bp, Homo sapiens
attgcactccagcctgggtgacagagcgagaatctgtctccaaaaaaaaaggttattttactataaacatacaagtgtcaatataaaagaagcagctacccataactccacccccgtaatacaaccacaaatggtatttttgcctacttctagtttttttctatgactcctaaaaacaaaccaaaacccatagttttaacataaaattattatccgatgggtaagaaatacttaataccaaaggcagtctcacacattgcttcaaaatcatgtttaatggacatataacatttctacaactatctcaacttgctgaaccattttcctaatactggatttttacttagttttaattttttctctgtaataagactgcagtaaacattttcttatataactttttgtgtgattgagtgttgtaagctttcaataatgagaggttggagccttctgtccaaagagaaaattaaaagtgtggcacctgacccccacctccagaatttaatcaagatggggttattagtagtgaaagatgttattaggttgttgaagacaaagatgttttcaggaacaccatattcaagactggcgcttctctagtaatcttaacttggggctttttaatctcttgcacctcccttccactaaagggaaaaaaaacggagagcaaatcccacattagtcttttttgcggggaaggggccattccagggaagggtctgattgatgagtctatcggcaactgtgatcctgtgtcacccttgcctggggcctgtgaagaatattgagattacgagaggtacacctgtacattgcattcagaatacagccatctgatacagaaaacacaatgtagattgtaaaaaggagtttacaagaaaacctgacaagcttcctagatatcactgggtattaaattgggaatgttgatgtcatttgaaatggatttctttaagagttcttctcattaccagaagttttttgtgtttttttttttcaagaccttaaaaccggaactttcccgaagaaaaatgcaaataagaatctccttctgggaatccgacttagtgagccatcagaaatctgaactaggaagtctccgccccagctttgtcctttgattatacacacatgggcacatgcacagacacaaacaaatacagacatgggtacaaacacgtgagcacacacacagacacacagagactcacacacagagaagcagagacacacacacacacaggcagacactccacaaagggcacagaggtttaaacaatgactcacctgttccccaggcccggtcacttgcagggagctgaagagcctgtcatcaccagtccacagcgttgctacctgtctccgctttctcctctctctggtccaggggaaggtttgcttccctccacaggcaggacaggacaggaggagcctctactccaatggaaaacagccgcagagcagaggtcaagagcagcagcctcggaccagagcaatgcccactggaccccagcgccaaggtcaggcctcttctcctcccagaaggtttcagggcaaagtccacagtggtcatgtggtcacctgaggcagggcaggaggctggacctcaaagcaggtgacccgggagcacctgcgcgctgccggaagtcaagtcacattccagtcctgcatttcctggcacccaactggagcccgtttttcagctttattccggggtttcacttccaggatctcactttggcacagaatgtttttcttggctccttccttggagctgtatggaatctttgttgcacttgaaaaaccaacagcccagaagagaaaagaatattccggtcagatgaattaattcctcccactgtcagctagaagccatccctggctgagccctgcactggccagaggcaactgagtgtgagccagtccagggtcagatcctgggctgatgccacctgagggcggggtgggggcgtggcctccgtgcacatgggagactccaggtgcaggagagggggaggtggacttcctcttggtcttcccaagccatgaaacttcctggcttggtggtaacagaagagtctcctccaggtaagatttccagagcctctgagtatggctggggtagcagggttgggcctgaggctgaggagatggaaatctgttgccgtgaacattactccacacagccagtatacgggaagccagctcactttatgtcctccaaactcaccctaacttctcgtttgggtctcatcccgcggggctgctgggaaataagctccgccaccacagtggttcctccgccctgtgggagtggggggctcttatgctggaggggggacactggcctggacttctgctgaggctctgcccctcatccctgcaggacggactagccagtcctaacacaggactagcgttgctc

SEQ ID NO: 39325 - DNA, 770 bp, Homo sapiens
gtgcctctccgtatcttctttcttgcagatgtgaccaggtgacccccctctggccagggaacaatgggccgaagtcctcaggggatttgtggggaagcgcgccccctcctccttggggttttcttgcggagctgctgtgaagactcagctcagctgtgataattacctgaggtcagcttctccagaatgcccttatctcctaaggcctttgagataagcaggaattgtggtgtctgccttgcctccaaacctttatccttgcttatctcagtggaaaattccagcagggatttctgaacaccaagttaaattcctccactcaacaatcagtttggcacgtggctgcccgccagtctgggcagaacagaggggagccaagggaataaacccaagtcctgcccccaggtgcccagagcctggcggggatgggacagttgcctgcagagcaagaggctgccacccagtttcacacaggccagagaggctgacctacctgcccagaggcaggggaagaatccagaggacctctcccggaggaggcacgagaagcccacgtggcagccaagaagagggagagcatcctgggccccggaagcacaatgccaggggcagacatgcactgggaggcacggggccagggacaccttcagtgagcacagggtctgggtaggcttcgggaggggtgagggcggagaggcagccaagccgggttgtgggaggccctgcctaattctgtaaagactaggattagaaacatgacaaaaatgggt

SEQ ID NO: 39326 - DNA, 2258 bp, Homo sapiens
agagagcacaggtaagttcattactttttcaacaactaggagagagctgcgacgcacctgccccgatcctagaggctggggacccaccagagaagtgacaagtccttgatctcagggggcagacagcggggagaaggatggatgctagcacggagaacacgcgtgtaaagacagaaacgcacacatccacaccatgccgctgtgaagccggcgcccaggaggctggccaaggtcacaggagcggcggtggcgggcggatccgagcacctctcggcctgaccccagagcctagctctcaccccggcgagggacttccaccccgactcaccgcggaatggggagcgccaggctgaaccaaatcctgtgctcacccctccgtgcaaacccctcaaggcaactcaggcctctgaaagccttcctacccccccgctctccgctcaggtccccactcaaccggtgcccaccgccctggcgcgcgtcgctccgcgattaccggcccgccaaacagtccccgcaaagtccaccctccggggctcccggtccctcaggtcccgcgtgcccggccctgggcatccgcagcgtccccgtggtatcggacccccatcgtccctgacacctggcgtctccgccccccgcccccgtcccccgccccgccgtccctggcccctgcagtccctggcccgcgctgcggacctccggctctggcttcccccgggtccccgcggcccccgtccccccgcgtccccgcgtccccggcccagcgcccgctgacgccatgacgccgcggcggagggaggggccggggccggggccgggccggggcggcgcgagcggctggagcaacgggccccgcggcagctgcgggcgacgcggtcgatggacatgggcacccagggatcggggcgcaagcggctccccaaccgggagcggctcacggcggaggacgacgcgctcaaccagatcgcgcgggaggtgagcgctccgggagggcagccggggggcgccgggcgggcgcgggggccggacggctgtcagggtctctccggcgtccgtctgtcccgctgtgcgtctgtgccactgcgcgtccggctccaggcgggtgggccgggcaggcgcgcgccggggcgctgatccccaggcgctgcgccccggccccgatctccgaggcctgcggaccccgcacccgttctccagccccgggcccagcccgcgacgctgcgcgccctcccccaccccggccaccgtcggccgctgcgccctcgggagaggagccgggcgccgccagcgcgcgaggtggcccgggctggccgggtgggggcgagcgccccgctttgttgtgcggcatgggaggaggcgggggcttaggcccgacctggaggcagtggacggtcgccggaggccacatggccctgctgaaatggccgagtcgctcaggtgaccatttgtcatccatccatcgatgtcactcaaggtgcagctcagagatgaacttggggatcactgtgatttttctttcaggactgagcctggaaacgggtccaggcacactgaaacgtcttcattaaagtttcctggacagagtttattgtaactaagatcatgtttggtgatgaactttacctgtgacaaattgaaggcgcactagaatgggtatttgtacaaatgcctttttttttttccttccgcaaggattctaccttaaggctaaagaatgtacatgacatccagaaagccgtacagggacagagagcagcagcttgggaaaaggggagccaataggttgcggccccagggggacaaaggaagcttaatttttgactgtgttccctttgtaccatttgaactgtgtgccaggtgggtgtatgaatgcaaagaaagtctctgccttgtaacccgccttacaggttcttttccgtgttggcttttccacatgtgattcttcccacaggaaacacctccaagccatttggactgtggtgtctggctgtatccgtcagatattctgggggatctactctgtaaccaatccttaggtgtttgtagttgtaaatacctgattttgctcttacggacatgtggcagtcactcagtatttgttgactactgagtgaataaagacttctgtttttctctgtatgatacagaaaagggctttccaggcaaacccttattcattcctggaagcccactgtgacctccaggagaccttccagactcagccctctcacatcgcaccaggcctaagtctccctggctcc

SEQ ID NO: 39327 - DNA, 529 bp, Homo sapiens
agcagtggcgcccccactctctggatggagaagactggagagaagtcagggaattaaaagccccaacttgcaccttacctttcaagttcctatttgacatccacagggaaaaataaactacacagttggatctgagtctggaattcaagatctgagctggagatataaatttgggagttgtcagtgtgtcaatgatgtgaacacggctggatgagatcaccaagggcaccagtgccagtgccgagaggtcacagagatgcagaaccagcaaagggagttggacattgtcccagaggccaagtgagatgagaagtgccaaatggatataaaggttacagcaaccttgatgagagctggttcagtggagtaatgcggtgagcacctggttgatgtaggttcaagagaggagattcctcaaaaaagtgaaatagaattaccatataatttggcagttgtacttctgagtgttcaccgaaaagacctaaaagcagtgtctcaaagaggtacttgtacagcagtgttcatagca

SEQ ID NO: 39328 - DNA, 1188 bp, Homo sapiens
gtgttgatattttcttgctgatttgtggattgcttattaacctttttcatagttgttgcaaatattttttttcagtttagattaggaactgaatatcttcctcatgtctttaaagaaatatgcctgaccaggtgcttgataaccctaaacggagtttcctgccgggctttctcttgtatgatgttgaggccgtcacggtttgttgagcagaggagtgagtgctaaaagctggagttcagcagaaccacagtgatgcctccaccccgggtaaatgcttaaccacactcctccctgtaaaaataacggtgtcattaaacatggaccggctgttccatgagctcattcctaggaaacagtggctgagtagcagaagcctgaccggtctccatttccgcccaaatgtgggatgtgtgcacgtggcatagagcctcgcacgttgcttttgggagaatcagcttgagtcaacttctggcaaaagattggggccgtctttggacagatttgaatattagacaccatatcatctaatgaaaaccagctgggaagagtcagttttcctgtgttcttgggcatttgacaaatggtgggagatagttctaattttagaaaggaaaacgtaatgcatattctcatgatgatttgtcaactggatattttgcagagaggaaaacgtctgaaatgtcccaaataaagctatctgctgtcatgagaacacagctggcagggcagaaagcagtgtcgatcaacaggaggtcgtcctgcaccgggacgtcagtgccccgacacctcggtgtgtcccttggctgtgtggccttgggcaggtcactggtcaagcctgagataatgacattggtctgctggggagcagcggccctaggccagatgtactaggaggccccttcctggctgtgattttaagatggaggggaaaatgtttatttgttctgtgaaagccaggggtggggtaggacagagccagcaacaccgacagcccatcatgctgagccagaggtctgctgagctgaattgaagctgtgtcaactacagtacgtgcctcaccgagcctcagtttccacattggtgctgtgcagatgataatacagactttgcaaggctgttgagacttacctgcactaagacatagaaagtgcccaacacagcgcctgcagggccagcactcggtggcag

SEQ ID NO: 39329 - DNA, 871 bp, Homo sapiens
tctttatcaatcctagggtttcccaaaaagcccgacagcacatttgatacagatgccaccaacggggtggagacaaggggcgagggcttcagtggaatctcagcaactaaaatcaagccgacggtcaggtcagagaagcatttggaaagcctccagtgcgtttaggggaccacgccctctcatcatgccaaggcagctgcccagtgaggtacagggtataaaggtgacgtggtcaggagtggctatttgatctccagttattccagaatttccactctcgtgccaagcatgtctctccaaatggctgctctctggcgttcctcacactccccctgaagttcatctaagatcttcattcttcaaaggtgaggcttgtatgttctatgtccaagtcttctctaaagatatccaatttgtacacatggagaacattttttgtactcgaatagttgatgactttgctttgagctatctctcaagggccaaagtgcaaaagggcaaacccttctattagagtgtgggtctatgtttttagtgttatgccgaagtgtgttttagcctttattttcctttatggaaattcattttcttggaaagatcattttggggatgctgttttaggatttctgtaccttcagctggaaggatgctcaccgttcctgatgttcatgtctgcccttcagtcagggagcctggaagccaagttgcttagtggcagtgctttacttttaagccttcgaatacatcttgagtaccttaaacttctctgtatgctatgggtactgtttaaattcagattatggagtcctattctccccacacttcttttttttgtgaatgacatttatcaatgacatttgtagcgtggtgg

SEQ ID NO: 39330 - DNA, 3293 bp, Homo sapiens
aatgtaaatgtgctttaaattttacatttcctggcgtggccaggacaggctgaccttccgattacaatccgcgtcatcccgtcgcttctgcccccagcctggcgaggtcgggaaccgtttcccgcaggactttcattgggagttacgagggcgccctgtgcctggaggtggcgcgggctggagccctcccggaggagaccggcgcctggcagggggtcgtcgcggccgcagcctggacggtgtggaccccgggttctgcgacgccagatcggccccagcggcccgcacccgcaccctgcaagctcgttctcccctgcgggccgccgcaccgggccaaggggggctgtgtgcacgcagctgcgtcgtcctggaagtcggcccttctcgggatgccgcgttagtggggtgcccggccggcaggtgcagcggtgctggggcctaggcttccgcgtccaggaagctcagcgtggcctgagggtgatggatgtgggggagccgggaactcataccctcgcccagccccgggcaggtccccccccggaggggaccccctcttcgggtcgacccctactgggcgcggcatcctccccggagcgcccgcttcccacggcccctgcgggtggagctgcggccggagcctgaggggtcttttcctccaggtcctctttccggcgggggccggaggggtggtgatggacagcccgggaggggcggggcaggaccaggaagatccttccgagacggagcgcggggggcggggcggggctcgcgttaagggagcgcggaagggcgggacaggccgtggggcggggcctgggtggggcggagccggtgggggtggggaaaggggcgtaaccgggagggaccctccgaggcggagcggcgcaggggggcggggaaggcgggtcatggggcgggggcggtggggcgagtcatggggcggggacggggcggggcgtagccgggagggcccctccgaggcggaactgcgtggggggcggggcgggccgtgggacgggcggaggcgcccgagtcccgcttccccggcgcccttccaccccgagcccgactcagcccgcggccacctgcgccccgcccctgtcggccgcgcccgagcccagcgccgcgagccgctccccggcgggctggctcctggccccggaagcgcgagcgttcacttagcggcgagtggctccgtctccgcggacagagcgcgcgccccctggcccggcccgcgaggggctcccggcgcggtccccgagcatttcccgccgggtggagcgggccgagcccggcaggatgaccagccccgcggccgctcaaagccgggagatcgactgtttgagcccggaagcgcagaagctggtaagaggaaagcgcttccgaaactttctttcgtgactgcggcggggtttcaggggcttccagctcgttccgaggtcaatggcaggcgcaggtgcccgggaggcgtggggtgggctctggcgggaccccagcgcggtgggagcgggcgcagtgggcgcgggtccgtgagtggcccggcgagcggcgtccctcatgcgctaggaagcacgctttattgtgggacgccacctccaaggacgaaaaggcacatggtctctccccgcccgaggtgatgggctgcagacaggctctgaccaggtctgcgcctggcctggagtcacagggagctgctagtttgctattttacaaaatacagcatcaaggaccgggtggccagagccggtgccctcacccgctgttggaaccaccggggagcggctggggtgctttggagcactcaacccgctcagcacctggggaccacctccgccgaggactccagacgccaaatccactttggctagtctcccgggtccgcccagcgcggacaggatcctgcctctaggattttgccgttgtccagctcaatatgcagtcgtggggctacggctgtagtttggcattaaaattgggcaggggatgaggcggagagggtttgcaaatacacattttcatgcagcttgtggttgaacatgaatgggaataaaagtgaaagggtgcactttggaaaagaaatataaaaccctagctttccacttaatcaggtgttcgtgggatcttggtaaaagtatgagccccaaacaatcactctttcatcaggtagaaattaatcatctactgggtgtgtgtgtaagatttaagatgaatcagactgccttgaccttgggagagcttattaggaaatgccagagagaggtgtagaagtagagtctgatgaactcatactgaaaagccagttctttgcttgtcagatggttgctgttttttaaatgtccattttagtgtggtttttctgtgacttcgtttaaaactctggcagtgggccagccctctggagccggtttttaccccttcaactaattagttcctaggggcctgggaagagagacccttgaatcaccatcagggaagggttcttgaaagaaggaagggtgggaatgtggttgagcggtgccagtgttctgaggagcagcctgggacaccatagatggcaggaggaggatggaggtgaagagctgcctgctggacttagagtccttggagaagggaagagtaaacattgagaacaggatgtgaggaaactagggacaggctaatcagaggagtaggtagaggcacacctggagcagctaaggcactggctacagggtctattacttaaggctgggagcctcctgggcgggtctgggttcagatgacttcgagatgctgccgggaggaagggagaggaaagtctggactgtgtccaactgagtagttatgtgatcagcccaggcccactgtccctcacccccagttccagaacccaataagctttgaagaccggaaggtttgtgttttgttttgtttttataagtttgtggcagaattttggcagtgagacttgccctgtccaatggggggctagttttggtcttcactgatccctctgagtgtgaattttcttacgtttctctgcagtcttgttgatgtctttgattaagggctgctactctgggttgtaccagaatatatggtgtatgcatcttactacgtttctaatgtccaaaaatgctgaattctgaatcatggccccaagggttttcagagagaagttgtgaacctgtaggagcttttcttggtaaatggtagcaaaaactgtatcagagtgagacatggtgaacaaaagcaaaatgcagttcctgttaagaggctaatgttcaggtagggaaggaaatgtgctgagtggt

SEQ ID NO: 39331 - DNA, 3075 bp, Homo sapiens
aaaaaggctttgggcattttcttaattcaagagattttgctgttgcagagggcacttagtcattaagaaaacttcatttccaactcattttcgataagctgagttacttgctctaaaataaaagatggcaataaatatctcatctttggatatgaacgattcacccaagttcagcctgcatctgactcacttcagtccatttaagagaaataacccacatccaaagggttaaacatcagaatgagagctgactcattcaaacagggccacatgtgaactcgccctgagccctgtgtgcccgtgatttgctgcccgagggctcttgtactcacccaccctcagaaccttcctggaaattgtgctctgtagacatctattgctgcccagtacgtggtgcgtttaattttatttaaatataataatggaaaggtatcagtgtagaatgtagtattgatgactcttcctaatatcaattaaaatttatttcaatatttaatatcaactaaaattaaatatttttttctgtgcgtgaactcaaaagtcctaatttggccccatctcctagttttgtcagttgcctggcccagccgtctttatttccttctgaccctcgttctctccctcccccgtgagtgcatgcctgttactgttttggttgtataaggtaatcgtctctgaactcactggactgatgtacctttgcgatgccgtgagggtgtgagcctctctctcctctctgctgcccatttgctctgattacagggactctccggctccagccttgggcttgccggtggtggcctggctcccacacccctgtctgccccaaatggaagctgggtctgtctccttttcacatcactttgtcgctccttccctttccttctgtgcatcactttaattgctgattacatttagtggatagttcagcctcctctacacaaagtcacaagagcaaagcttagcaactgttttaattggcttgactagtttgctaagacttttgtcaatcttttagaaaaaccatgtcaaataagttagaacctatatagaaaaggagacttaaggaaaaggagggttttattaaatgcatattttcaaaaactcgagtccaaaaaattggtctcttgggtctctcctccttttccagcaattgttccccatttggggtttcatttgtttttttaaaaatattttttctcttgtaaatgtgtccaggaagcaatttggaaggtttttgtgcctaatctgcctccttggtccctgagaagtggacagaacagtgttattcctttggctgggtctccccgctgtttcctgtttttacaaggtcaggttcaggtccggccctgaggtgcttggcctgttagctataggtatcgagtcttattctaatccaaggaagtcggtgtcagaggtgaaagtacacgtcctatttggaggttgaactgtccctctcccttgcatgtcgactggagctgctgagtgatcaccgcctggccgtgcaccttgcctgacttgctcagtgtgccctggaaatgagtccagattctgtcccgtggcacagtctctggacactgggagctgcccttgtgtcccagcctgtcccttcaccagcactgcctccccctgacgtgtgtgctaggcaggattctcctttgacagggctagaccgcggctcctctgggggtgcctcccacaccagctgaggcagccttgcagtgactccctttgtgtcttgaagactgtcgctgggcccctggcatagaaataaagactcttcctgctcctgtcttcatgtgtggacatctgcgtattgaatactgccaagtgtgtcgttaaccttggatttgagctgtgggttttgttgctgttgttgtgttgaccttgtcaccattctgtctcatcccctgaccctttcttccaggaatgcctgaaatgactagaaatgatcgtgttttaaagatgctgggaagtttactgttttaaagttaaaaatcatctcagttatctttcttgtaaattttggatttgcatctatcaaatttgcagaaaacacggtgcctcgatcggtttgtttctgtttaaccactgtacagcagttggctatggtgaatgctgaaactatcgtgatggccttttgctgtcatttgttgctgttttttcaaggcttttaaaacctgccatttgctttcatcctccagccctcctgtctgtacagcgctgcccggccttcggggagttaccgggtgcgtgtgctgcccaccctgctgccccgcaccccctcccactgtgcatgcaccgcccccaccaagcccagagccggggatgtgcctgttcccagccccctgggggaagttgcaccttcacgtggagcttacatgtgccagtggggaatgtctgtcccctttggccagatctgggttttctctcccccgattgttgactgtagctgccacactgctctgtctccaggaagccttgtgtttgctgggatcgttaggcaggaatggaacaacagcaatgtttactttacctattggcagaaagaatggtggctttttaatgctttggtaacctggacagatactaatccatgttactatattactttggaaatttccagttttaaatataagtacttatgctatgcaagaaacgtaaagtaaatactcaaagtagctatattgtcttgttaataaccttttttttttttttttttttttttggagacagaatctccctctgtcacccaggctggagtgcaagggcacgatctcggctcagtgcaacctacgcctcccaggttcaagtgagtctcctgcctcagcctcctgggtagctgggattacaggcacgtgtcaccacacccagttactttttgtgttttcagtagagacgggtttcaccacgttggccaggctggtctcaaactcccgacctcaggtgatctgcctgcctcggcctcccagagtgctaggattacaggcatgagccaccacacccagccattaataactttctgaatttccatcagattgcatacttatgtgtttgatatattaataaatggct

SEQ ID NO: 39332 - DNA, 3727 bp, Homo sapiens
gttgcagtgagctgagatcgcaccactgcactccagcctgggcaacaaggcaaggctccgtctaaaaaaaaaagaaaaaagaaaaaaaagaaagaaaagaaaatataagtatttacaattgacagaagaatgttgtggctttactttcagtgaatcccaaacacgcttaatgccctctgtaccctctgcctggttccagtgagacatgacaattggattttgttaagcattgtctttattcaagcatatgatgaagtctcaaaataacagggctcaatatagtcacttagagattgaaatgacacaaatttctttgtcatacgaaattgaccgaagagactgaaatgatacaaattcctttgtcatgtgttttctaaatttgtataaaatttactcacaggtttattagatgatcataaacagaaagatgtgagttcagccttcctgggcgtcctgggacctgatgggggtgggtgatctccttgtatctgctcttccttccctgaatcgattgctcaactagcaaaggtcagttgattgcgggctggttggcacgcttagggaacaaaggtcagtcccgcagtgagggacaaggctgtcccccatctcatcctgggtgccttacatctgatgaaacctcccgtatgtggttcttagaatgcagagaggtctctgtagagtgcagggcagttccctcgcggatgtgttacggtatcccttgattgatcgtgtcgagaatagaaagacggtgagcacaggcagcatccctggtatctgaagagagcctgggagacagaactaagctagctcatttccataatttccaaaactcatggtcctcttatactaaattgactccatttctgttttctgtcttgggacatttacaccattgctggtatattttggatctcctgggacaacagaaagtgctagtggttgtgtttggccttgttgatgggaagaagccaggagagcctggataggactccccggtccttctgcctgggagggaggagcaacaggtcttgggcagggcctggtgtaagcgtggtggcaaaggtgaatgaccctccagtctggccttccttgaggtcatatggagcaggcagtgctctgaggcagggagtttcagaacccgggttcagatgtcacagctctcattcctggcttgggacatctagctgggcacataaacttcttgtgcttcccctggaaagaggggtcatgatacccttaaaaagcaaaaagaaacccccccaaaaaaacaaaaaaaaaacatatggttactttatttctccttggctggggttagccagggatgggatacagttgttgtagcgagagctcatgggaaatgctcccaggccggggacttcgtcagggacacgtatccagggccagtatgagtgaggacagaggacaagaaaaatatgaagtcagggtcagccctgcaggctctgtagggagtcccgccctgggtttgggagatacaggtgcacaggtgagtgtgtcacacccatcagaggggagggagggagggtggtgctgttaaagggcagtagtaaccagaatgaaggaagtgactgcttgtcccacttcgagaaaatgaaaatgcttcagtgtccagagaccaccaccagggacaagacttcaagttttctccacccacttggtcctcccagggtccttgggaaagcagagagggcatcagccccatctcaagacaggcatagaatactgttcacctcattctcatcttctcccatgctgtggatgagctgtgttttcttcctctccagcacgaccaggatcttctccttgaggaagttatttcactcattcattcagtgtttattgagcacctagaatgttccagaaacagggccgttgtatgagcaaatgcagacttgccccagccctcatgggacgcacagacaggggcagacggatgcttgttgggtgatcacacgttgtgaagcccagcagcgggggtgtgaggggaggcaaaggtgcctcgagagagctgggatccagaggtttgacggccagagcttgggccacacccaagcagagtgactccacctagtgaagccaacagatctgggtcatccaggccccaaaatctcactgggaacctggtgaagccatcacgtttctgaaacatccatcaggaatgtcccaagggcagcctgggtccatatcttccctcgtgtactcagagaagacaggagcaatgaactcagatctctgcccatttggactagaaaaacaacactattttgactcatgttttttgttgcacaaagaggcaggggcagggaccaggtggaaaaacgggtcttgaattacaaacaccagagttcaaagataagtcattcaggctaaagtaaatattattggatttaaaaccaaaaaccgtcaccctagtggtggactgtgctatcatttaaatgtgaaggaaaattacccttaaaatgggtgttttctgagcagtgtttgctgtttgtttgtgtctcaagaaggacctcgcaaggatgttgcttcggtgatccctttttccatccaagtctggtgttgcctggctgggtgttgaggacaggttccttttgtacctgggcccttgagtagggtctctctgggtacgtgaacaggtgccacatattctttctttaggaaaatggcaggcagctggaacatggaaaacttagcgttttagcctcaccaggcatcgtgtgtacaggagcctagatagcaaactcctttagacacagtgttagaaagttggaattaataaaatatttaatgtgctccttgaagcatttgtttttgaaaggaaacttgacgtaaactaaacttccacagacgtgttttagaagtgactgtttccagtagattttcaatgatgtctgtatacactcagctgtggctgtaaaatacaacacacatactttgtaaacctgttagtgtgacgttttcaccctgacctgaaatgtttagtatcactcagaatacgagagtcatgaagctaacaggctgcaatgtgttcggcgctgtcgcccttcccgtgcaggaggccactgtctgcggggtccggtgctttcccgtcctgggctaaggtgggtgggcagagcagcctggaccgtctgcagccaccatgtcctctggacccctctctgcaccatgcccacctcctccaggcccccacaccatgccatgcagtggccgtgacagtgtttagaatcctttcttgtcttccatttcttcatcattttagggaggaagtgctgtgctttatgtcaagatgaaacacaacatctgattccttacctggctctgctagggcttaggaaagggggcttggttaaggtggactctgctgcctgcggcttctgtccgggcccggcccctgcagctgtgacacactgccatctggtggacacgagtggggctgcgtggctttccacggggctgaatagccttcctgtgtttgaggaaagctgacaaatcctttttcattcggaagacacacaaaatgaaatttactctactatgtaaaatagagataggttagacgttcatttgccatcacctttcaacaagagcttaatttttagtttttctctgcatggtctctacttaaaaatatgcccagattttattttgagtccgttgtgttcttcggagcaaggacttttttaaaatgataaaaacagcaaactatggt

SEQ ID NO: 39333 - DNA, 317 bp, Homo sapiens
ggggatgataaatgcttgctaggaaataagtccaagggctctataggacttcacagggttttagtttatgtctctaactttagcaaagctgcattcctattggaatgcatactggaaacagctctcattcctacctttaaagggctcttggaaagcagtgtgacaaccaaggtcactaaatggtgagatcatcaagccattttaagttctttctcatgttattcaccagcaccctgcaggacgttgggcacacatcacatccctcagctcagccatccagccgtctcagtgattcaccactcatttgcttaattaat

SEQ ID NO: 39334 - DNA, 1003 bp, Homo sapiens
tctttggcgctggcactgggcaagcagggaccaccggcgctgttgtagctgggggagtggttcgtggcccagcgaggagaggggccagggcttcttgggagccatggatttctgttccctatttgtaaacctctccaaggggtggcagatctgcatagaatcctcagaggccgatataatataatctgaaagcggatcttgccactttagagttttggctgaagttacgtggaaagcagaatctcgcagtaattttattctctccatttggcttgacatggccttcactgttttcatttactaagaaacaaacatttctttgttagcaaggcagagagctgggttgtggaatattttttacataaataaccaaataaataaacgttctttactagtgtccagaggctgaaccctctaaagcttgtgtaaataaaacactatgtcacgatcacatataaagaccttccttgtttaccgagaaaactattcatgttctgccgaaagtccaaagtcctgtaattttaacgttattttgagtggcctggctaatgttatctcttggaagaacaaacaaaactttatgaggttatcagtaaattaatgtcattggagcccagctgtaattagtagaattactgagcacaggctgtttccttcccaagctgtagcactagccaggtctccttggtgatgaagattttgctaccaagaatggcaatgtggaatttttttaagtactctagtttacaggtttaagaacttatctgtgacaattttacaatcaagctatttgtcttaggtagttattaagaatctcataatccggccaggcatggtgactcacgcctgtaatcccagcactttgggaggctgaggtgggtgaatcgcctgaggtgaggaattcaagaccagcctggccaacatggtgaaaccccgtctctactaaaaatacaaaaaaaattaggcaggcatggtggcaggcacctataatcccggctacttg

SEQ ID NO: 39335 - DNA, 489 bp, Homo sapiens
accacgcccggcccattctgtggttcttgatagatttttgccagttgttcctctaaagaattttactaatttataattctatcagcaacatatgaaaatgcctagttcctcataggctcgtgagtattgagtttgtagggattttatttttgcaggtcaaaggagatttcctctgtagttttagtttgcatgtctttggcaattaggaaagttgaactggtctctgacagttatttggaatttgttttttctcaagtgcaagttacgtcaccatgacctttcctatttgtcctgtgagtcattgcccttttttcctttttttaagactttattttttagagcagttttaggttcacagcaaaattgagaggaaggtacagagatttcccatatgcccattggaggtatttttaatcttcttttacaaattcttttttttgtttgtttgttttgagacggagtctccctctcttgcccaggctggagtgc

SEQ ID NO: 39336 - DNA, 1758 bp, Homo sapiens
ggtactttaaacacatttaagagagaaaagaaggaataaaagggacatgacaagaacagtggggcctgtgggcgcagcacacggtttggggttggtcgtggcttgcgtgtctgaccgcccggtctccctcaccgcctgcactgcaggctgcgggggcctgtccagtcctttgcactccaggtgcggcgctggacagcgggagctccagccacggaggccgctccttcagggaaggatagcccgggctcctccgtgcccctaaaccctgcagaccacgaagtgaacccgtgttggaaccaggtgcaaaacccccagccctccggcgctcgggctccagagccaactcggaatccccgcccctaacgctactcgccaatcagcggcggttgcgaaatccgtgcccgccccctggccgcgccctctgccaatgagcgaggtccgagaggcccgtcgcccagcccagtcccgatcggcgcacgccgctgttcgcgtgtctggttccaaataaagtttttcgcgactttgaattttttttttaaagcgcccgctgctgtctcggctgccgcgggcgagagcggccgagtccccgccccgccacttccggtcccgccgccgggagccggtgcggctgtgaggggccgcgtctcgcagcagccgcccggaccgggcatggtgttgggcgccgggcccgcctcgcctgtctcggggagcccaggtgaggagcgaccgtgcggctctgcggcggggcgaggtgcggccgccggtgcacgggctggcctgcgggccgggcggagggcgcgggcggtggcggggccgcctcgggcccgccgggttcctcacgccgggggcctggcgggcgcgggcacccggacgcgaggccgagcggcgtgaatgggaaggggccgcgggccgcgggccgcgagccgggggtcggaggcggcgtcggcggccggggcgctggcctcgcccggcagtgagtgaccgcggcggcggcggcgggggacggcccgcgccgagcacctggtgtgaaccaggccctgggccgagcgtggcacagacctggccgcgctcacgccccactcgcgggatcggctgcctgccttgtacggaggaagcggggcgtccagcgcctggccaaggtcaccggcccgacgtggccgcagaaaccgggactggactcccgatcggggcaggagtcgcgctaggccgtgaggagcgggggaggtgaggggagtgacaactcgcgcccggtcctcgtacctgcagcgggaagagtaagtatggacgcttacctacaactgggggcggccaggctagtttggaaaatttttaccacagcaaaggagacgaggaaggaagggcatcttggaacaattagtgcagcagagtcttggttccagacctagttctgctggtgtgtcatcttgggtgtggccttcccctccctgggctcagtttcctcatctgtcacaggagagaattgggtccccccactctgcattcccgaccgcctggaagtgggggcaggatgggttggaatagccagagaaagcttcttggaggaggagatgttgggatgtaggtaggaatcttccccttaaggaaggggtaggattcgtttgtgaagggaaggagggcattctagacctgggtatcagactgaatagaagcttctggaaatgaacagggtgttgtgaaggaacaaagaggaaactggcctgcctggtgcagaggaatcctggctgaggagtgagatga

SEQ ID NO: 39337 - DNA, 1952 bp, Homo sapiens
acacacgaaaaatacctagaacactgcctggcatagttcaaggctcaattaaaggtagacactattatgccaaaaaaacaaaaaacaacaaaaaaagtgacggtaggatggcttcgtgaggatttttgctcatttctaccactttctcaactgacttttcttaatggttggcgggacaccaaccattggtggatgtttacacttgtgactgtctcacagacaactcaacatgtccaaagctaaacccatcatctttccccctcccgtcttccctcttacccagataaaggcactaacatcttcccagtcacttgtctaatccttgcttccttcctgtccctcatgccccaattcctatttaacggcctaaacagatcttgaattaatctttcctgcgtttccacgcccacttagagtccctcatctctggccctattttctcaatgccctcccatcctctactccagatcccctcaagtccatcctcgatgcgtgactcttaacttcacgccatccaggtcccctatggagccgctccgactaacggacgcgcaggtccagcggacctgctcatcactgtccagggtggcctgcgggagacccccggggccctggccctgctgccgcggccccggcacttcccctcgagggttcgcggggaacaaggccgcgcggccccggctctcccggagtgcacggtcccgcgctcatgcggctagagggaggcacccgcaggactgcccagccgcctctgctcctcaggtccagctcgggccccgcctgctcttacgccgactaaccggccgcggcccgatggcggccctgccgcagacagcaaaggtcacggggctcccccggaagtgaaagtgcggggatccgccggcccaggagacgcggcttctagcgcccggttcccgggaagctctgtgacgcgctaagccccgcccccacccgtcacctgacccagcgcagcctcgcctccccgctgggggctcggcggccctctgaagcgggtggattggctggggtgcttcgctcagccaatccggacgcgcccgggcgtcgcggccccgcctcctccccggcgctctgggcccgtagcgctccgcgggaaggaggctggatgcccggcagcagtggggcggggatggaggcggccgtggcgccggggagggatgcgccggcacccgcggcgagtcagcccagcggctgcgggaaacacaactcgccggagaggtgcgcgcctttagggcagggctggggagcggccggcgcctgtcgccgattgtcccgcgcgggaggacgaagggggctcccggcctgtggccgctctcgcgtggggcgtcccgcgcggggatgtccgcgaggtcggcctaagtcagggatgcgagcttcaaggaggagcgggtgcgagctgtggccccgcaagggcccacggagaggtgactttggggccgaaacccgagtgacttccaggggtgaggtttgcaggttctggggaagcagagcctgccaggaagagggcacagcagatgcgaagggcaggggacttgccggaggtgaaccggcagagcccctgagcccgggaagaactttggggttcattcggagccttatggggcctcggaagttgatcacggggcgatgcaatttaagtgttttgaaggagtccttctggctgcttcctagaaagtaggggcgcgggtaggcatgggacgagaggaagccgggaagccagttggggatcttgtaacaacctaggagagagatgtggtgtgcgcccagaaacggatgcgttggtaggaagctggtgcactggggcaggtgaaagggaatcaagggttctcccagactgctggcccagctgcaggaaacgggatggccaccgctgagaagcgcggagacccgaagcacgtggtatccatactagttaagtccgagaagagcaggag

SEQ ID NO: 39338 - DNA, 1531 bp, Homo sapiens
tcttctgccccagcctccctagtagggctaatgtttgcatttttagtagagatggagtttcaccatgttggccaggctggtctcaaactcctaacctcaagtgatccacctgccttgacctcccaaagtgctgggattataggcgtgagccaccgcgcccagccagctgtagttttaagcagagctgcagggcagggggtctcacaagaggactaagttggaacaaagacctaaaaaagtaaggtgggggcagggcatgtagtctttctgggcaaagaaactgaaagtgcaaggtctggggccaaagttcacctgccccagggagaagcccaggtcactaggagccccacaggccatcgcaaaaatgagtgtggggaaataaggcgaacctctgatgaagttaaaacagcagacaggaaagttcccttggggaatgtgcagctgttcccctccttccataaggaagaggccagtgatctgccctttacagcagtcagatgggtaatctgggcccaacagaccattaatcctaccaaggggtagaaagagtgtttgttattagagactgggtctggctgtgttgcccgggctggagtgcagtggctattcataggcaccatcatagctcactgcagcctcaaacttctggcctcaagaggtcattccgcctcagcctcccacatggctggactacaggcacaatccactgtgccttgctagaaagaaattttgaaaaccgaaatgaaaatccaagtcctatcaattataaaagaaattgacaaaaactagagtcttagaaattatgcatgcattttccataagtagtgtagatctgtagattcccaagtgcagcttgtggatgcctgcagtgcttatgcagaggatcaccatgcccttgacattatttgctcctgccgatgggatagacacagagcagccatatttcccatatgccatctccttttccttaatgggtgtctttgctttctttccttcaggaaagtttatatggactataatgcaacgactcccctggagccagaagttatccaggccatgaccaaggccatgtgggaagcctggggaaatcccagcagcccgtattcagcaggtaattctagaagatgcacgtgttcactgatgggagataatggggatggggcgctcttagagaaattgcacacccacacgtgacggctttgttttgaataggtttctgttagctgcaattcttgagctgtaatttttgatagtttcttttctgggaaggccccatttgtaagctgagccttgtcgatactgtaatctttaacctttaatgtttaatctttaacatgctgtcctgtcaccctttcccagatgagaaaggtgtctactgagagttccttgaagtagcagtcagtacctgtggagcacttcacagatctagctcagtcaatccttacagaatttgcaaaatatgtcttttaggtcatcaggataacatataatcctggccctttttaaagatgaaaattactttttcattaat

SEQ ID NO: 39339 - DNA, 680 bp, Homo sapiens
ttattttatgtaagtatagtcattccaactgtcttatggttgctgctagcataaatatctttttccatccttttacttttaatccatttatgtctttaaatctgacatgttgtaatacactgttagagacatattgtggctataagattaatgatagccgtaaggcccatgcaaacatcttgcagggctgacactatgtgtcaattagcagtatgatgcaacatggtctagggatttccaaccctggcttgggaatttccaggaggtaagaccacctcagcatagatggaactctcataaaccataaatacaaagctttcccttaccaaaatagcttaactcccttatggaagaaaaacctggtaactgacctggactaaatacaagataagaaaggggaagaatccccaaaactctgagaatgttctctggacagagactttcccggccaggcagtcatctgatacctgaatgtatctgacccttgccacctgcctgctcctgctagctatcttgtaagagcactgccagaataaactgcttgaacatcacacagcatctaagacttatctttgatgtgaataataggaaaagggaaaagtcacctttggggaaggttaactaggcccagcccaagatccctgaacaagacacatgggtctcctgtagattctcttttt

SEQ ID NO: 39340 - DNA, 747 bp, Homo sapiens
tgattgcgagatagtttctctgtctttggctttcaacattttcattatcatgtgtctgggagtgaatgtctttgtgttttatcccacccagaattcactgagcctcttaggtatgtagattagtgttttccattacatttgagatgttttcagccattatttttcagagacatttttctgcccctttctcttgctcctgcccttctgctactcctgttttccctatttggtgccttatggtgtcccacatttctctgaggctctgtttatctttctcatgtttttcctgtcttatatttggatttcgtaatctctgtaaatctaccttcatgttgactaaatgtattttctgccagttccaatatactctggagcccctccagtgaattcttcatatcggttgtactttccaactccaggatttccttttggttctttttcataatttctctcttgtttatcttgaggactctctatttgatgagccattgtcatcatacttttctttatctctttaagtacagtcataggcagtttttatcacttgccttttttcctgcttttccacacactgaagataccagttagaatttttttagttttcctgttcctgggattgcttctatgtgatctagaatcagtcatttacctgttcatcctggtttttcctcaggcttggggatcctggattgttcctgtggatggatgaagcatttcgttgtttgatgtaggggctagggatggctc

SEQ ID NO: 39341 - DNA, 1174 bp, Homo sapiens
ctgtgctgaggcatgagcggccttcctggggagaaagcgggcaggcctcggggtctcagggccagagaggccactccagatgcgaaggagccccacggcagccctgtccctgtctctgtttccagctcattgtgctttgcccaacagacacttctgagtactgatcagtcaggagcgccctggctgcgctaggaggcactcacaccgaaggcgacgggctgctggcggctctgctgttctcgtggcctccccagtggggaaagcgggcacactcaaggcaggaaggagggtgaaggcggggagccagcacgcccatcacccgtctgtcaggaaggcaggctgtcctaggagacccccgcgtcccactggcaggcccaggccccatgtctgtcccagctgcacaggtttccgcaagtcagtgtagaggactgtcacctggctggtgctgtggaccacagcaggggcccttcagaaggcagatgaggccccagaggcagggctggcctcaagtcgctccagcggtggtggccggcaggtcagggccccaaacctcattgcctggctcgaatccaggccctggagggaggccacaggacccgctgctccagcaaaggggctcagtgcaaatgcccaacgaggcagcgccaccctcgggccaaatgaagttcttccctccccgcccctccctcccttccttctctcctctccttccttcatagcaaacacatgtttactcttccctaggtgttttcatttgccatgatgtttgctttcagatttgggaccatggtgtctgcaaattaagctactgcgctcacttcacccccacctggaccccagaggtcctgctgccccagggtgacggggacgcacgtgctcagccagccctgtccggggtttcctgaggttgtaccctgtgccccgagaggtacagccagagtccactttcacttctgctccaagcccctcccactctgtgtgcctcctccctgggaggatggctgctccctctgcccctccttccccaggtcacattcaccgacatcggactcacggcacgggacaatgagggggccacggccctgcactttgcagcccgaggcggccacacgcccattctagaccgactcctgctcatgggtacccccatcctgagagactcctggggtgggac

SEQ ID NO: 39342 - DNA, 1285 bp, Homo sapiens
caaactcctgacctcaggtgatccacccgcctcagcctcccaaagtgctgggattacaggcatgagccaccatgcccggcagaaattcaaaatcttcaagtgctgatcccatcagaaacgcccacaatataacaaggtgtgaggaaagggcgctgacccacacacgcaggcaggctcattttgacaacaggaaagagctggaagcatactaatggcaaatgatcttttactaatgacactttctgctttttatttttctgttttccaaaaggaacttgtgttatttttatcctcataaaaagaaacaagtggtgtatttttaaaaactgcgccactcagtagcaatctcttgatggaggatctgttttgcgcccccggtgttgagtttcccagactgacctgtcatctgaggtgctggggctccgagccccacgacggctgctgtgaggcctccacacttggcaagcagtgctgttccccgagcagagccagctccccgtgacagcagcctgtcatcagaatcccctgtcctcatttcctccagcccgagccaggactgcaaacaagggggacagtacggaaacccaacactctagcgcccaccccatagtggtcctggacacagcgagagttggggtcctccatgagggtcccccacacaacatgaggctgatgcccaaggctggggaaaaaccctgggacagtgtgggacacgagcaggggaaagagcaggagcaggggccaggctgggctgggctacggctgggctacggctggactatggctgagctgggctgggctatggctgggctatggctgggcaatagctgagctggactgggctatggctgggctatggttgggcaatagctgagctggactgggctatggctgggctatggttgggcaatagctgagctgggctgggctatggctgggctatggttgggcaatagctgagctgggctgagctatggctgggctatggctgggccaggctgggctgtagaggaagcatggactcagggaatctctatggaaggtaaccctaagggcaccttgcagacttggcagtaatttgtaggtgagcttcccctccataggctgtgtgcatctcaggaccaggagtggggttctgtctccctgggggccgcctggacctctctggtctgtaagagcattaggacaatccctagtagcatcaagaggccacagccagacccaatactccccagttcctccaggtcgcagcacacctggaaatggtcatactgctcaggcccac

SEQ ID NO: 39343 - DNA, 464 bp, Homo sapiens
ggtgctctggaaagggctgatgcaggctggctggtgtggggccaccaggcaggtcgccaaccatctccttggcgtcagcggctggcaggctccaggaagcctgaggccagctgttcgggtcaggggctgaagagagggggtttggggctgacatcaggagggagcagctgtctctcagacctggccgggaggtggggacgctggcaggaagagcctgttgacggctgggcaacccccaccctggggtgacagagccatgagtcatggggacacggtgcctgcccacagtgccaggctctgctcccagggaggcctggaattccgcatctcccaaaaatggtcataaatagtaaacagagtcttcctaggggacatcccaaaggcctgtgtctcttccacaaacatccaaaatatgtccatttataggactttaccatttccacatttattgtcttgattttcca

SEQ ID NO: 39344 - DNA, 3160 bp, Homo sapiens
tggtggacgagagatggtcccgagaaagggtggtcttgggagggctggtcccaagcctgctgtgctcctgtggcagtgatggggcctggggatggggacggcagctctcatgaggacacacaggctgtgagcccgcagcctcctcaaatgtagcctcccacattttccccaaagtacaggactgtcccagagtaggtagtgaagaggacaaggccctcggcagcgacctccagggcctcctacctgctgaggaagagttaacccactgcctccccacacaacaggctacgaagaacctggtgcctcaggacctcctgggagccaagctggtctggcaagggcgctcaggcctgggagagaagggagcaatggccagtcaccttcaccttctaactaactagcctccggatgaggtggctgccaccaggcccgaatgatccccaggagcccagcttccaaaccccaacatcgaatcaaacatctccatccccaagtgcagtaacacacaaaaaccaaacactctgccctgggaaaggcctggtgcgattctcagtaggactcacacccaccctacctagaagtactgggctggcctgggtactgcatccgtgtgttttgataagggggtgatgtggccacgcccttatctagatttcactttgtatccactgggcacagatattctagagaacttatctttcactcttgtaaaagccacatatccacatctctttcatttttctcagtgtgttatgcagcaatttattaaagtatttattgtctaataaatactgccaagtggaatatatttatataactgacttcgtggggtggttcaagtacttacttaagaactatgtgacacaacagttacaaaacaaaaggcagaccttaagatccggaatcaatcctttagcccaggttcactaaactaagcacagtaaggaggaacctggaaggtgaagtggagatggcctccagcctctacgtgggagggactcccttgaaggctgggagtgaaccttcctgggaaactagggtcaagcctctcgggaacagtgggacatagggatgtatgagtcacagacatcagtgtgcaaacacctggtttgctataggaagatagttaccaaatgaatggttctatttcctgattctggggtgccagggctcttttcttcaatgaggccacactgtacaatgtcccagtcctcaaactgaaatgggtacttggctcttaaaactccctggggaaggaaggggcagcaccaacacttcgttcagttcttacttgtggcttttacacaacagacccccaggaggcatctaaggtttacatgaagcctttaccactgaggtcctcgcagcatggataccaattccactcaatcaactgggtgataaaaccatgtgtgtgtgttgggtgggggccagggaacattacaaaacagattctgaaaacgcaaatttttagaatcttacatcatcctgagccaaacatttacacaaaaggatccaagagctgctttactaaaaactacttacagtcataatgatgacgttttctatataaacaagtgcttgaaaagtattttaaagcttattcttctgagcttattattcttcatgcactcttttcatgcttttaacatctttaacagaagtgtccccctttgaggtgttattgcaaagattaacctcattccagcacagggccaactccccacacctacctcacgtgggaagcagaatttccgggccatgctgagcagccggctgcctgctccaacaggaaggtgcacacctacacccagggagtccagatggaagccactgaaccgagtcctccacagactccttccaccagactgcagctctcaccaatggaatgagaatggctaattctgtactgtttctggcaggtctgatgcatgagtaaccttgtctatgagtctatttcctggctaagcctgagctcatgctatgtaacattttgcaacactatttccatagggaaaactgaaaagagctagagggttcccaaagccctggtctgggcctagccttgactaaccagtcatcccctgggtctcttcattgcaacatgccacttccccaaccagggtcatcatgacagtgaaagcacagcaaaatgcccgtgaactacaaaacatcacacaaccagcagcctgcaggccactacgagccagtccaagatgcctataatggttttaacaaggaaagacagcatattcaaaagcaaacacaatctctgaagggtcaagaggtgctcacagtataataactcaaaagactaggaaaaaaaaagagaaacctttatttacaaccatgggagtcccacaggagtacacaaaacacacaatgtgcacacacacaaaatgaaccttttaagtcaataccatgcgtgctcctggccgcgcgccacccctcagtgccctatccgcaccaccatcacagtgacgttgtcggccgagccccgctgcaccgccttgttggccagcctgttgcaggctgcttcgtagcgggcgtcggctgcggacttcccttcccgggtctggatcttttcatcctaccagatgagaaagggaatgagtgaatggagtgaccccgcaccctgtcactttcctgagacatgactgccaggaagaagagctgctctggtctccatcagggctggcaggacaaactgaccagtgagtcagtaggcagagttcacactgaaaaagggcacaagggctgtcccacaatgggaggaaatggggtctcagaacttctacttctctgaaaactaagacacaattgggacaaccaccacccccgtgtgagatttctcacctcgagacaggacaagatgaagttcacggcttcttctggggtaaagaccttgaagagcccatcacaggccaacaaaatgaacctacaacaccagggagaaatataaacgggttttaggcccaaccaaaaaataaaaaataaaaaaagggcctggagatggagataaaataaatatttgtccaactattcaaaggctaaggttttttttttcttttttcttttttttttttttttgagatggagtttcactcttgttgcccaggctggagtgcaatgacgcaatcttggctcactgcaacctcca

SEQ ID NO: 39345 - DNA, 2305 bp, Homo sapiens
agtgagctcagatctcaccattgcactccagcctgggcgacaagagtgagactccgtctcaaaaagtaaaataaaataaaatgttttctcgcccagaattactgcaaatcacaagcctgaacatccttggaagctcaattcaaacactgcctccttccccagtctctcggtgcccgacaatccctcctcaagagtcctcagcatttcccacagtcattaacttttgccagttttaattaccgtaattagtacccttcagaaagcagctcttagaaagcgaaggctgggccttactcacctccgtctaccctacaacagcagctcccaaaccactggtctccagcccccgctgggttggcctggggatttagtaacagattcggaaaccccactctcagggattcggatttactggggctgaggtgggcctggaaatctgaacgtcttaagttttccaggttttctgcccccaagttaaattttgtaataaggccctaaactacaacatcaagctggaagtcttgcatatgaaatattcacgcgttttgacagatgaaacccggagactgtaacccacaggacgcagggattaacacaggccctgtttcaagctgctaggatgctgagctcaaaccacagcccacagggactcccactggcaggggccagcgcttaggagatgagcggaccccttaacttcaaggagagggggaacttcccgtggaccagaaaaaaaaaaaaaaaactactgttaattatcacaaaatcacaggatgacagaggaggcatcctgtcttccaggcttcaaaaacacgaaggattaagatggtgattaattcaatctccagtgcaaataaaaacgccaagcccctgaacttgcaccggcccggaacgcggccgttccacagcccgcgggtgaagtgcggcccggaagccgcgggcgggcgacgcgcaaggcagcccaggccgcgggtggaatcggggcgcgggggcccgcggtgccgccgggcgttcagagccggtccctcgggtcggcccacgcggtcgcgccggcgcctttcaccgccacgcagaggggccgtggccacgacggctcggccctttccttcctgcgtagcgaaaatggcggagcggcctctccgagctccgcgagcgaccgggcctccgacagggccgccagtgggccggacggggcctggccaggcaggagcaggccccgtgcagcccgcgccgcccgccgcctcccagcgcgggcgccgcctcagccgccccgggcctcaggccgcccccatcccgcctgctctcccttccctggccggcccggcggcaacgccgcttaccggcagccgggcgcggcgagcgctcgggctccggcaggtccccgaagaggtccatggcggaggctgggtggaggcggcagcagcgacagacactcagcccgcgagcagcggccgggctccacaccccgggcgggcggcagcagcgggcgggcgacgggcaggggcggccggcgccgtcagtcacctgcagggagagtcccggacgccaccaatcggcgcgcggcgtggcccggccgccccagagggctgcgcgcgggctgggcggggcggctgggggcggggcggtgcgcatgcgcgtgggcccctcccgcgccccgactgcgagccgggcggacggcgccgtctgggccccgcggtgtttcccgccttggcgaaccccgggcccctcctgcttttccttggctgggggtgtccgatttctgtcaagtttcgttgagttcctgtccaagaagccctgtccagagagaaacgtctgagctcaagggcagcccctgatgcctgggaaggctttctggagctcttgccatctcttcggctcgtcctttcaccacggcgtgcctggtttctggcctgttttagagactgagaaaccgaggcttggatggagcggccctgggcgtcaggacggaaacctcaaaagatgccggagggaaaggaggcattccctgacttgtctgcacccactggtgtctgtggggagcggagaagaggggctcctccttaatggtgtccccctccatgcctgtaaagagaaaggcggccactgacatcggggagctggcctggttctgcagccaggacttggggttggtctggcacaaacagctaggcctgggtgttctctttgaatgtgaacaatttcataaaacaccaacatcaggccgtgatacagatcaagagaaaaaaacagaccactgtgtaatcaagtgtgaacacagacaaaacaggaacactgtccaagccac

SEQ ID NO: 39346 - DNA, 526 bp, Homo sapiens
cagcagccgcagctcctgcaggctctcgttgatccgcgcgcgccgcttcttctccaccaggggcttccgggcctgcggggagcggggcactgaatcccagccccgcacggcctcccgcccgcttgctcgcccatggccccggcccgcaccttgcggtcccctcgcgtctcccagccgtcctcatcctcacggcccacacggtcccggccaggcgccgcgggtggcgccatgcccgctccgccggggacgcggcaggggctaggagcagcggggacggggagcggcggggaccggagtgccggcgccctccgctgccccgcggccgcccagcagcagcccagccgtccgcgctcctcgcggcttccggcccgccgcggtcccgccccttttatagccgcttatttgcatctcaatgcgccgattggccgcgcgggcccggggcggccgaccgcgaggcgcgctgcagccaatcggggcagcgcgctttgtccggcccagcggctctggcggtcgggcagctggctga

SEQ ID NO: 39347 - DNA, 767 bp, Homo sapiens
tccttatcatttccctcttcttagtaaagaacaaattcaggattcattttaatcataatattctaaagaacaagaacactcagccaccaatgcgctcattgtaaatctgtttaccacctgtactggctcctgtccacaaacagggagagctaacggtcgcaccttctgctgggcagaggaaagaaccccaggcctgcccagggaagagggaggtggggcctcgctcccagtgctctccgcaccaattaaaggggataagatcttgcaccacaatcaaccctcctgcgttgatgccagaacagacaactgccactggagggcaccacagggcagcagagacctggacaggttgctgcctgggccctggctggccgcactccaccctgcattttacgtaactggatttcctgaaacgccccctatcgggctatggtggagttcttctgcacttagaaaaatttaagatggcaaacttcttgttttcatggttaaaaatcaaactgctctctgatccaagagcccatagtcatacctaactccggctgcggcttcttgtctcccacatggacgatggtgctgctgtagctgcactggctggtgagcgacgccacactctctgccttgcccggcagtgccagcgaggtcaggtgcgtacctactcccgtgcggctgttcaccctggagggcggctctgcctcttcatgagaggaagggggaacaaacattagtgtgtcattacaatgcactgtgcagatgagaaaccgaca

SEQ ID NO: 39348 - DNA, 1551 bp, Homo sapiens
gaaggtggtgaacacagcacagcagactcagctggcttccccgggttcagcagttgcagaatgcacctgccttcagagaatctggagatcatgtgactcgctcagcagccaaggtgagcacctacagttcctggccagggatttcggccaatacaaggaccaaggtgccacaaagcaggctcttaagagggaccacaggaaggacccatcaaggtggcacaatgccttgtaacctctgagcttcaagagaagagcccagatattattttgggggtggggtagccagaagagctaatggaccaagagggtcaaggtgaggtgagctggattctgtgagtgaggtggcagcaggagcagagactgtggtccagaatgctgggcatacagaggcacagcaagccttgtatggaggctgactcacctggagagtcatgtcagtgcatgtctgtctgagaggaagggaaattccaggaaaagttaggatgggccaaggtggggagggagggatgcccagcacttcatttcttggggactgaggaactgtttggggttctggagcaggcagcgacatcagtgcccttcacaggggcccatgaggctgaggcatggggcaggggatgaggatgggaaggatgtagggccccagacttgtcagagctgttcccactttgtggacaaaaggcagagcagccagggaaaggggagaaggggtcacagcactggtgtggataggggtgagagatgctggcacccagatgccgtgatctgccatgggcagggccggatgacaagcagggtgtgctgagtctccagaaagatggagaccctgcccaaggtgaggtggagaggccaaggctggggaactgcagcggggagtccatcgtacagatgttatgtgtgaaccacaggagtaactgagggggagccagagacaacatctgccctcgccctgggcttggctgttaccttcataaccagagtgcactctctctgccagcagaaggcagcaaagctgactctcagcaccttgttggtcccgcaccttgaccaggtagggcgtcatgcggaaggggtggtagcggatttcattctcgtggcttttccggacactgcggagaagagccacgctctaagttgggaactgtgacacaggaacagtcccctgttctgttccctcctcacctgggccccatgccatgctgcaggtgatgtgtacctctgctctgcctgaggagctgggcctgccccctgccctcttcggtccctccctcagtcccatcatactgaagggcaaatcagagttaacacccccaccagtggggcagcctggagcagcctgcaccctgggttggtaaagcagacagaaaaggggtgctgctcccgccaggggtcctcggccctgactcctgagggtgccagggtctggctcggggtcactcctgacagtgcagctggatgctcaatcagtcaccctggtttggaccaagacccttgtcgggaaagctacgggtctctccccagaaaaacgcacagacaaccaaaagacgcagt

SEQ ID NO: 39349 - DNA, 1293 bp, Homo sapiens
cagctaatttttgtatttttagtagagatggggtttcaccatgttggccaggatggtctcgatctcttgacctcatgatctgcccgcctcggcctcccaaagtgctgggattacaggcgtgagccaccgcgcccggcccctagaaagtctttaatcatgatggtatattcacttttccacacaggaccacatggcaacccctgcacatctgactccctgggtgatgccatcagacacccccatccaggcagaactgactgcttaaaaaaataacaggcacaagaaacatttgaaagaaagttttcaaaatagaatctgaagaggagggccactccatctgagttcccacgtcatcctgggtgtatccggcgggctctggggtgacaagcctgtctctgggtgtcggtgctcatggccacagcggccctcactccaggcgggagcaaaggggccagctcgaggctgccacttgccctcagggctcaacaggccccggacacatgaaacctggggctgcgttacgagtctgacccaggattctgccacgcgtgtgcttcctgcaatgtggtgaggagacctttggacccacagctgggtctcatatgctttcagttttgccaccttcagtaatttcagaaacaggcacatttctgagtatgctctgaaatcaagatataaactgctggaaagtgtggaaaatgtccatgtggcagagcttctgagctgtgaagttactgtagaggccaacagggaaacaccttaaatggacataatcactggagaacagagcagcccaactgatcagaacgaactttccctttggctcctccttccggaaaagggggcctccacaggcacgcaggcccagagcggtgccctccatggtggggtgctcatcccaggggcaccggatttccatgcggtatctttagacctgaccagcaccgacgagtagcccaggcaccttgttctgtctgtatcaaccctcacaaaatggacagtgggattagggaggagcctgcagagaaacttagaggacacccaaagccaacacccaaaaatgcaagagtccaagctagcacatggcagagcaacccttccacacctggctcaagggaccccagagatgagtgctgatgacctgctcactgctgatgaaaaactacccaaacatttaaaaatatgaagactgcttcaaatacgagtttatacccatgattactagtgaagaactttgccctaactgtacactgtgctttgaaacgactgataatagaatacagctactgcttc

SEQ ID NO: 39350 - DNA, 5406 bp, Homo sapiens
aaaaaaaaaaaaaaagagagagaaaacgaaaaagaaaaacagatgggcaacaaacgtaattttggaagagagagaatgaattgtcatggcagctgtctctggcttgtattcttatatttaaaggactaagaactcagtgccacctccagcccaggcagtccttagaggagcatcaggtatctgaagccaccatgctgtctgggccccgggtgctttgcacgtagctctcctggttttcacccctaagtccatcccctgtaagcctgtctaaatacgattcactggtgccccgacattaccttaggtggaagataagtatttttgcaaagagggtagagtaagcttggcagaaatgtgaaagccaaattatcagaaacttcgtcattccagaaaatgcgtctctcagcctcagcggctctaatagaccagcctcattttgagaagctggcaaaaccaacgtccctgtcaaagtggactttgcctcctgccctccacagatgtgtgcccatagccagctggaccagctgttcctggggagctcctaggaaacctgtttccacctcaaggcgggtagggggagggagggtgggcatgcacttatgtgctcagggtaccaaagcccaggagggaaaatggcagcctggttgaaaaggggctgccaaaagccaacatgagcctctgggcgtgaacctgcccttgaggccctctttgcatgtccgcctactggctctgcccctaagaacagtcagactcaaagaaagaggttaagctcggacccctgaccaggtcacctggccacatttttggtagctgggttgcctcaacttgacagagcaccattcagaaagtgcagtccaccacaagaacagagagcctgggatcaggaggaaaagcagctggtgggggtggggaaggagtggggccaggagcagagactactggctggtggggtcgcatgggttcgttaccctatcctccccactttcagagatactcatactttccataatagtgtttaaaaattaggaacgaaagcaagcctgggacccagttccagcctccactgccactgccaggactggtaaagtcttactgtactcaatacctgcaaacctaaggcggaaaagcattttttgtggaaatcagaaatcagtgttcaatcaccagaggagtcccacctcatgaggtcacagcttgatgtatatccacaaacaacatgccatgtcacatgtcaccagaggcaggacagtgccagccccccagaggctcctggtggccctcccagccaccatctaccccgcggggactcactagcttggcttcttgcagcctagtgaattctgcctgttttcgaactttacataatagggctcatacagcatgtactgtctctgcaagccctgcaggattttacaaccccaaatattctaacatgttttctacttcctggtaggagccaactccctgaggccagcctgctgtaatcctgagaaaatgtttgtcctgctaaataaacagccgcactctccatggcaacggttgggtaactgaggaaaatgtgaccgcagccatccaaatatggagggaaggaggtgcaccggggaggcattgtcttggcctcactaggacaccttcaatgatctcaattcagacttttaaatccctacatttttagaactacaagactttaaagcaaataaaggcaaaagtgtcagcctcctagctccccggtggtcagggactgagctactccgaattgcaggaagctcaggcatctgctcctcctgtacctggtttcttaaagagtggattctgattcctctatgtcaccccaggaagagcacgaggaacccttcgaggccggtgagggttcagcacggcagctcactctgtcttgggaactaccagtctctgaaaaccaagtggccttgactcctgtcaccagtcactgctattcatttactgcttctaatttgctctagacttggagatatggtaacaaacttgttacaaatgtgtacacgatgagcataatgagttgaaaggagggcctggtccctaggggggagtgcgtgggctgggggaggggtccatcagaggccccctctagactaattctcccttggttcccaaggtgggccagctttccagaagtgtggcgacagtctctgccaagcttatggaattgtgtgtttctggctccctctgccaaacagagtagttttcaaaaggtaaaagcacacccagagcctgtctttcttctgactaaacgccaagtggccctgccagctgttcaatgacctgacagagccgtggtttgccgagtcctggtgaagttacatcatcgcttaaaaacagcagtgtgactaccagtatttttgagaaagttcagtgggtacgagaagtagtgcacaggagaggaatctttcctttttccttgtaagcactgcagacgtggctcacaggagaacattacttggcccaaaggcaagagcatatcagaagcctctgtctcctgcgagaaacctgggaaaaatcatctgtagggtaacagaaaaccaaaaacctgggaattaaagtagacctctgagactgcccaatctgagcccctccaaacaaacaaggaaactgaggcccagactgggagccagcagcagccagctggctgacacagggctcccccttcccacctggcactccagtctccacagaaagccagggctgcgttagttctgtaccaatgaatcataccaaggcgacagtgacagataactgcaaacacccacggtgccatccccgcgctggcacaccacacagcttccactcaaaaaaaacggagtccctttcttcattatagtcatatagcacacaaaaatcaattcaccttgtattttaaaactcaatttccaaataaagccttcaggtagagtcctgttttcttctcaggcacacccagcctgggaccagaagccccaggtgggggtagagggtgggccaagaagtctagcagtcctgctgtgccatatacaggtgagaggcgtccatgtggggctttagccaccgtgtggggttcttaacacatttcccggacttaaggcccttcctcccaaattccagcccacccaggattcagcacgcaagtggaggccatcactgaacctctgaagctcatcctgccccaggacgatgggaagatcctgcagacagcctgggcctgggcctcagtttgctcatctgtcaggctgaggggttactctgggtgattttcagggtgccttctggctctgttgttctgtatgaatcagctttccaaacgggttccttctgtgtaggttacagaaaccctggcaaccaactcgtcatcccttaccctggccttcctgaagggggaagcaggccacctcccaccccctggtctatgtctgggacttggcagccaaagtacatcccagaaggtaggcgcgactgctgcaccaaagagtggacacccccattcccttctatccagtccggggaaagggaattaatacagggtggtccaggggaggcaaaggggcgaacattagagggtctccccgccctcaggttcccaggcctggcttggcaccgggacttccttgtccctctgatcacccattccaggagacccgtgggtgtccaggaaaagctcctagatcagcgcccctccatggcccttccccagcccaggacttagccctgtggcctcagaagaggcagtcagctccccgagggtcctccagatcccagggccggctgcgctgacccttggtttccttggccttccccatgcgaggggagggagggttcccaaaagagaatcgcccacggaaccgcagcccgcgcgcagtcactcggtagctcggtgccctacacacgctgcctcacctttcggacctcaggctcctgagctgcgaagcgggggttcgagtccccaaccctcggtgtcaccgcagttcaaacgagcgcaccctgcgcgcggctcgaccactctccacctgggacagggccaagggcacacgcccccacgccggcgccgtttcaagccgaggagtccagcagcccaaggaacttccggcggcgcctccgctgcccgagccggcgctgggaccccgacctgcccgaggcccgcgcgccggcggcggttacgtaagccgcagcggggccgcgccgcgccacttaccgccggccgcgcccgcgtcagcccgtccgccggtccctccgccgactcgcggctctgtccgcccggccccgcgcccgccgccgccgcccacagctgcacgtatcccctcagcgccgccgcctccgccgcggccgagtcgccgctgtcacatagtggaaaacgtgaccgcgcgcgccgcgcccgcccccggcctccgccattggccgcgactccgtctcatctgcatacatgaggggcggggcctacgaacgccgcgcgcccattggtggccgcgcccgtcgctctttttacataagacgcacatggaactccatgttcacctcgtcggttcctcaatggagacgcggcgcgttcgtgctacccgtcgtcctccctagtggtctcatccacttccggcgtcggcgccttccattcactacgccctcaagcccgccagctcggggagcgcggagtggcgcgtaccattgcgggcgggggagctgggcgcggggctcctgcgcacctccggccggcctggcagacccggcgcgccgaagccggacgagggagacctccacctccggccaccggccagaggcgcgcccccagcggccagggccgcgggaaagtccgcgcggcatgcttcattcacgcattcacattcattcatttactcattcactcactcattcatcgcggggccccggagcagcccaggagaaggtggcagcaccgccctgcagcagctccgggggcacgcccacccgggcctctgaggtgcctgtggtcgacacttgtcccggcagctaccaagtgacctttcttatttttgagaccacgtgttgcaatttttggttcaggaaatagagtcattgttactctggggaggtacaaaagaaagaaatgatgttgtccctgcccccaagcgcatcactagggagaaaggactatctcataaaaaggaaacttaatcaaatgctaaattgggcgatgtgggctataaattaaccagagctatccccacaggctccgtgagaaaggcagcacttccaaggcgggtaagatgggccctgagaaagggacgccttacaacggtgcaagccgtagagacgcaggagccaggggtaggaggttgtcctgggagacagcgcgggaccctgcatcaccttgtttcggtaagcattgtgtggggcatgtggagcctctaaacttccatttaaagtgtc

SEQ ID NO: 39351 - DNA, 890 bp, Homo sapiens
gccttgcatgctctggggaccaacaaggcctgctgtcattagggtccctgatcctgggtgacactaacaagaatgcaggagcccgagtttggggcttcacattcatacttgagtatggctgtcgggccccccgtggcctgtaaacaagctgtgatggagcacgtgcttgctgtgtttaggcatcacgcttggcgcttggcacacattctcttctttcatcctcaccactctataggacatgcgcctgcattccattgtccctttgcaaaagacattctcaacaccacgacgccaaaggaatcctgtgtgtctgtgttgtatgtcatcaaggagaaaccacctttgtctgcagaaagatctcatggctaccctcaccaccctgcccctatgaagcctgagaaccagctggctcagcagggaaggccgcaaagtcaggagcgaccaaagtccaagctccaacgtgcctctcgttctccaaacattctccccacccaaaagctcctctgtgacttggcgaatgcaggtgctccctgcgttccattaatataactccgctctgagtccacaaggactcacaggtggggatggctggggtgcaggtccatcttggggatcaccagcccaccagcgatgccagctcacagtgccctccttgggagggtgaaggctcaggcctgtgcacctgccttgccctctgcctgcaacaagcactgcttctgtggctcacagagtgtttcctttggtgtttgggtgtctgttttctcctgctggcttctccctggtgcccaacatggaaaaacatcacttgtccctaaacggagtcttgttggttggaagcaacaaagttgttgttgttgttgttgttcttcttcttctttcttgttcttctt

SEQ ID NO: 39352 - DNA, 530 bp, Homo sapiens
ctgttccccgagctccctgcagggcagtggcagactgtgtgccctggaccacatatgctggaaacagaagggggcccagatagtcccgggcttgctagacacggtagcctgggtggctgtcactgctggcccaagaaaggccactgccataggtgctgccagggctcttcccaaaacctttcagtgggaggcaggagagagccagtggataatacccttaccctttgccctctgttgggccaaaatccaaggcatggtttcccaatggaccagggcattggcgttcacaagctgcatgaggacatgccgcgtgtctggcttgcctcgtgtggctcatcaggaagcagcagccagcatggggatgcctcaccttgccttttcttccttttttctccactctccctgccctgggattgtgcctcccaataaagcttttgttctttttttttttttttttgtgatacggagtctcgctctgtcccccaggctctagagtgcagtggcatgatctcggctcactgcaagctccg

SEQ ID NO: 39353 - DNA, 1088 bp, Homo sapiens
gtttgttctcaagacctgccctcaccactgctccttgatgccaacatccaggggcaggcttcaccgtagctagagcagagaggcatatgctcagctctggtcagaactgtcctgttctccaaaggaattgcaaagctaatgtgtgccagcaggagctgaaggaacacaggtgacgctggttcttcgcagtgtggtggcgaaggagcataacgctagatgggtggctggagaagaattcgttggcacaggggcagtcatctgtgatttaaaactcgatgctttggcaaggacaccaggaactgattccaatcatttgttgggctgactccagtggtgtgctagttaatgtgtaacagttggctctctggaaaaataaaaaaaaagaaagaaaaaatatgtagcatttatctatttctgtgacacagatacgcccacatggccaatttcaagctcccaccatgacccccagtgaaagtggtgatgcatgtagggccacatgcatggagggaagaagcctgccctgcttgccctgggttcaggccaacgtggccaacctaagcgattccttagaaaatagagttttgatctgcccagttacaaggagaaatggagctcccaaagttcgacatctagaagactatttttctaaactctttgttagaggattttaaaaggggctgttcttaccaaatctcaataaagtgtccattgtaagatatttctcaaggttattaaggcttcttataaactccttttgctataagtcagttcatgttggaagccagccgcaaaaatgataattttggatttgtaatcattgccattgagacattgtttgtggtagggactggcctttctgtgttaagccactcctcctcttcgtggccttaaaatctaccatcaatacaaaggaggctgttgtctgctgagtgagggcctgggtagggcagcgtagctctcccacatattgatgtaaatcattagggttccagtggaagatgcaggttctgtctgagtgaggagagccagaagtccgggctgacctcagcattttagtccccaacttattccaactcttgaggtcaaag

SEQ ID NO: 39354 - DNA, 1150 bp, Homo sapiens
gctgggcctggtggcgggcacctgtaatcccagctgctcgggaggctgaggcaagagaatcacttgaacccaggaggtggaggttgcagtgagccaagatcgcacaatcgcactccagcctgggcaacagagcgaaattccatctcaaaaaaaaaaaaaaaaaaaaaagtggaagagggagccaggagggccaaagtccgagaagaaggcgtggccatagaaacagacgttaaaatgatgtcgtttctggaaagggtgcatgagccagagaatgcaggtagcttctagaagctgaaaaaggagaagaaatggattctcccctagagcctccagaaggattacagccctgaccacaccttgacttcagcccagtaacacccagtttcagctctgacctccagaattgtaagagattccatttgtgttgttttaaactcccaagtttttggaaattggttacagcagcaacaatgaactaatacaccaagtttctgtccatggggagattgggagaggcagtctgtcagcactgcctttcagggaggccccggagtgaggctgcagtgcagcagctatctatttttaggcattttttgcatcccacactgagccaacccatgcatgaaccaagctcggcctatttcttcctccactaggtggtcataagtgacaccgccacccaacacagcagtgatgaaggtgagggacctccagtggtgcaacagaggcagatgataggagggtcttgtgcagtttatctgtggctctggccctgcataagcccagtgctggatgtgccctttcatcttatcatagatttctgtcgagcatgcctgacctatgccctggaggccctggcagagcccggctcaaggcaggcagctctagtggtgtgatcaccgcttggtgtcttccgctctgctagggtgcagaggcataccagcatctgtcttcctttgctgcagatagcgtggccttactccagaacccccagggtccaggttgtgattctcccactgggggtttgccatgaagttatcacacactcagagatttaaagcaacaaggcatcttttccaccataggtatctctagaaccatagcatcttccagatcatttggcctaatttgctggattgctagcaccata

SEQ ID NO: 39355 - DNA, 1382 bp, Homo sapiens
cagatcttggaggttaccttgttcttaatcagtcctcaggcagtcgcctctaacgcgagcgaacaccggcttcccgaggccgtcgctcggcagaggaggggccaggcgcccgatcccagatcccctttccccgccccgccgcgccccgcctgctctggcacagccgcactcccgcaaatccctcccgcggaacccccactcctgcctgcgcgggcgctggaaggcgggcagggggcggggcgccgcggcgcgtccgttgctaaggccgcgcagccctagtgaccgaacgccctgcggcggccgcgcaggcgctgtggtgggctccggtgcactgtgggatggaaaccggagcggcgcgtcctggcaggaccgggcggcggcggcggcggggccggcggcggccagggacccgggcttaggctcggccaggccggctgaggggcgcgggcggccagcgggcggcggacgccgtcatgaacgcggcggtggtgaggcggacgcaggaggcgctggggaaagtgattcggaggccgccgctgaccgagaagctgctgagcaagcccccgttccgctacctgcacgacatcatcacggaggtgggcgccggggaccgggcccggccaggtgcgggtcgggattccggtgggcgccgaggtcagggcccgggccgggtggcgccgggtgcgagccgggctcgggctcaggtgcgggtcgggggccggggctgggccggagtcggggcccgggccgggtgtgaaccgggtgtgggccgggctcggggtgcaggtcggggacctgttcagggccgggtgtgggccgggcacagggtgcgggtcgggggccggggtcagttccggggtcggggcgagagttctgtgcggcccctgcctgggagcccggcctgtaggcccaattccgcggcgccctccgtgaggaggtcctgcccctcccccggctccgggccgccgcttacaaggaggctccgggccctcaggagcattcttacttcttccctgcctgcccttgtatttccttagagtgcatcttccattattgctggcagagctgcttctgtgactcctgcctcgtctaaccttgcagaacccctctcgcttgccctgaagtatgtagcacgtggaaggcactccctaaatcctgggagaatggaaataatattttttatacaacccttctgccccaaagtttccctccataccacattttgggtgcttaataaatgcctgcgggtggatttagtggaggcggctgtagggggacttggcaggaaagactgtaacagagctgcacagcctgccctacgttgagattggtggtctctgtagctttttccacttgcggatggtgtgctcctccgtgacgga

SEQ ID NO: 39356 - DNA, 652 bp, Homo sapiens
ttcatggcttcaggaccaaatggctcaggagggaagatcagttactgactttcccctggaatgggcatctcataaggtgaagaccagtgcctctcatctccctctcgtggctagcatagcagtggacgttaagtgcatgtcatcaactgttgaagagatgaatttcatcgccagttgaacagaagttagaagagaaagggggaagtggaagggaatgaatgataaaatgtggggaagcacttgccagaggtgaaaaacgaagctatgtgcatttaggggaattacggacatttttcatgctgtagcctctggtgagccccatgctaacaccagggggtgctttaagcccatcacgaggcctctgagtgctagggagcgggcatagttctcttgtaatgtggttttctgccacaatttggacatttgtcgtttggacagtaatatagatttctgagtaaaatgtgataagaacgaagtttactagctttctgatctcagttaatgcgacattgaaagtctgttttttagaggtgctttgtacttttcgtaaagagcgtgaagcttgaccttctatgagtctgcacttgaaaagggctttcatgtgccaggtaaaaaggaaactcacaatattggcagtattgttgagatcagg

SEQ ID NO: 39357 - DNA, 2620 bp, Homo sapiens
tgtgtcaggattcccttcctttctaaggctgagtacgaatccattgtatggacggacagcatttcctttctaaggctgagtacgattccattgtatggatggacggcatttcgtttatccattcatccatccaacaacacgtgaggcggcttcaggcttcggagttgctgaagctccgagttcgggatgtgcagctgtggtggagccaggggctgggcacacccctggctcctggcctggcagcgtcatcatcggagtcacctgtccctcatgccagtggtgctctctgctgtcatcaagaccaaacaccactgtaggaagtacccccactcccgcctccaacccccacagggcctgccaggtctgcccccagtgggccccctggtgcatctgggccacccagggccagcctcagcaggggcactcgcggggctgcgcctgcggcttcccttactccagtctggaatgttgtacacacggatgagccagcagctcacgcccacgactgctggggtctccggactccctcatcagcctcctgctgtgctgtgtacaaatcctcctcctgcatgaggccccgctgtctaactcagcaggggagaatgggaggagccaagggaatccgtgctttaggaccaacaccaatactcatggtgggacgacgctgcgatatttgaagttgggagtgtgcaagaaatgttactcggttgttcacgaatgcattcatttattcaatgaacttcgcgtcagccactggctgtcatcagttaccgacctgattgagggcttcatggaagggatttggaggagcattcatctaaaaccacagcacgctgcgacgctcagccctgcagtgggccctcaccagtccccgcgcctccgaatccaccctcccggggctgctcgtggctagcggggggcacctgcggggaccaagccagcccggccgaggcccgggtcccgcccgccacggccctcggggccccgcccacatctggcagaagccacgccccgtccgtgtgggtggggacggcccgccggaccgaaattcccagactgctgcctcaggcaacgggctttccgactccttggcttcttatgtgaggaaaccacagcgcggccggcatccagagagtcggttagccgcgaagttcccgccggacgaagggaccagccagcgccctgctagacagcgaggccggaagcggaggcgtggcccctgcgcggccccggaaaccagtgaggccggcgcgcgcccgccggaagccgcgaccccgacgcgccccccattgccctcggcgccggaagtggtcgcgggtcgttctgcttcctgcccgaggggcgtgcgcgggtcaggggcggccgcggaggcggaagcatccatggcggagggcggcagcccagacgggcgggcagggccgggctccgcaggtaacgtgcgcgcggccactgggccgcggggcgtgtggggatggcgaagggctggctccggcgtccctgccgaggtcctgcgtcctcgtcccgggctggccgggtccacggggcagccagggagccgcaccctgcaggccgggggtggggttcagcgcggctcgcagtgctgggcgaccccaccacggacgcgctgccctctcctcggcctcgagtgcagtccccgcgctagattttctttccggtggaacttgctcgtaacttccttcccgttagccgatacagatttgatatgacccaaccgcaaaagtaggacgtgggccaccttccagctctgagcgcacggatcaggaaagccagccagagggtagccctagggagggcaggcactttttcaccattctgccgcccacggcgtgtccggtggtacagcggggggcagccttcccacccaccacaggcacagaccagggacaacggggacgccgtctccagcgagctcgtcagtgacacaacatgtccaggggcctttggcccaccagcaagggaggcagatagaaaggctcacacccaccttccaaaataactgtcctacttagggtctccaccttgcagtgtccctaccatgcagatgtgaaggaagcggtcaggacaggttcccgtttcccggtggtgtggtgggagttccttcttgctggatttctgagcttgccattcgcgccaatagtttcgtgtgttctgggctttctttacatgcctatatttgtctttggaggggttcctctcctacttagtaataaaccaatacatttcttaaacatcttaaaagattgacttggagactggtgcagataggcttttccatccatccctccctctgcacctccttccaatcatttaacagacttgtattgaagacctgctgttggctagacccagcagaggatactgcagtgaccagaaaaagccagacaaagcatctaccatcctgggctttggttggcgttgactttgacttcagagacagccaggaccttagggtctaggatgtcatctcatgtgagagtgagagacggaatgatgcgtgttccgtgggaaaaagaggaccaacagctacttcccagtataaagagagttcctggggaataaacactggctttgtcggctgcacaggtctcctttttttttg

SEQ ID NO: 39358 - DNA, 4363 bp, Homo sapiens
cccaccaccatgcccggctattttttttgtatttttagttgagacagggtttcaccatgttagccaggatggtcttgatctcctgaccttgtgatccgcccgcctcggcctcccaaagtgctgggattacgggcgtgagccaccgcgcccggccacagatgcccttcttgcgaaaacgttactaagacatcttactccctcactggagcacgggacattactttcacaaggtggtaccaagaacatatattattctattaaaaagttttctatattctaaattctaagataattgacacttggatagtagagtgatacggttaagttactgaacagtgatgttttctggaaataacttagcttctgccttccctgtgccagttcccccttagggctctcatctttcactgttgcaattttctgtccctctgtaagtcacctccattttgttatttgtaaattcacttgatatgtattgcccatattttagaaaaaaggtacagagtggtatttctgtatgtgcaaaagttatattgatttattgagttctcccagtgcttccttgccagtgatattaaaagcaatagaggaatttggaaaatattcaggattaaaattaactggatctcatccagtatatttttatgagtggatgaagggctatctttcccacagctcagctaataccagattgtcatattgcccaaaattacaaacgttttggaagattttccctaagaataagcagaaaaaaaccatcactgcttgagatctagttttcctttgcttaattggttgggtgtatgaaatgaaatatcaatttcttgttggctctgtgtgttttagaatacttcccctgtcactcctagaatgtctttgagagtgggtggtgtttgtgtttgtagtggaagcttcattgtcatgtgagtgtgttggttggagagtgggtggtgtttgtgtttgtagtggaagcctcgttgtcatgtgagcgtgttggtccgtgtgctggtcctcaggcctgtgcttcctgaaagcagcagttttggttccaggggagcgtttctctggacactcaggatggtgctgaggagacggttagaaagcgtggctgctggccttacctgttggcgagcgctgtgattgcggcatggaaggtgacgcagttctgtcctccctgcaccctgcgtgttctggtcccgtcatcgctgctccccacatattgtcctttcctattacaaatgaaatactttggtggtgacgaatcttgtgagacattgtgggactgtgtgggctgatgaaagctcaagaaaacaggtgccaactctaatgttgactcagattagagtcatgtcatgcgttttgggcaggaatcgcaaagggaggttgtgttcgcattcccctcttatcaggctgcgtgtgatcgcagtgtgtccattactgccgatactcacttccgttatttgattaaggtggtgcctgccatgtttcgctcccgtaaagctattccttttctctctgtaagtagtattttgaggagaggtgctttacaaccatgtatatgtcctgttcatctcagatttttaatttgttcatttattaatttgttagtatagactcatggtttctgatattatccaatgagttataattcattattattgttacttattttgatattcgtattgtctcagtttgtctactgagagctgcttcaagccatctctgtccttttaacatgaccttagtcattctgtgagcagctcctcactttctcctgtaacaagatattctcggctcatcttgcactttgactgcctcagtcctggaataagtcatttctcctaggagtcctggtttcttttagtgaagaatggtgtgcagaaccctatatttggacactaggagtgcctattgcttttggggtatcactgttttcatgccctcctattggaccaagctaaggttgtatgtacattccacatttctgtttatatttctttatatacatggacaggagttcacctggctacctttaatccaggctcatgccacaaggttcatcctagttttctgcctttcgcgtttactattctcctttcaccagtgagaaacccagttcccctgccctccacatactgcctgtgttgtcctgttgtcccctgtgtggcaccagccagccccccttttgctgcctcttcccatacatggctcctgacctgtttgggctctcacctctcatgccaggtggccttctcaccttgtcaggactctgactctgagccagggccccctcattgactgatccctgttcagagtgaaaatgattggtagtttgcacttgccctggaagaaccctaaacgtctgatagagagccgtatatttggtcatctctgagtacagtgacaaggacaagtaaagtaaatggagtcatttagagattggctttggtggagaatgaggcttctaagtcaggtggctcctacacctgccctatgtgagatttgtttcctcccatcgggctgtcactggggattaggaggggcggcctaggggttacctcactcatggctgtgtacatgcccacgtggagagctgtgtgacgctgccctgccgacaagctgtgcgtcctggcctggggccttccaggtgaacgtgacgctgggagtggtctgtgctaatcatgggagtctggatgtttagtgtgcctgaaaagaaagatgtcctagtgggcagcgcatcatggcgccagctggatacctgattgagttcatgcgtttctttttgctttcaatttttttttttttttttgagatggagtctcgctctgttgcccaggctagagaagtggcatgatctcagcttactgcaacctctgccccctgggttcaagcaattctcctgcttcagtctcctgagtagctgagattacaggtgcccgccaccacacttagttaatttttgtatttttagtagagacggggttttgccacgttggtcaggctggtctcgaactcctggcctcaagtgatctgcctgccttggcctcctgaagcgctgggattacaggcatgagccaccgcgcttggccaaggtataaatttttggaaatctagcttgtatccttgtctccttgatcctgttctctccctccccagtagataaccatttaaaaagttccatggtttaccataagcacactgcaacctcctcccccacagaaacagtagtggactgtacactttcactgtgctgctttccctccctcttcctgtgctcggaggctgctccggagcagtgtacagcgaccccctcactccttttcagagctgcacagcgtggcgttgtgcagatgagctgcagttcattcagccagtcccgttagtggacacgtgggtggtttactgtctccagctgttagggatggtgctttaatgaattgccttgtgcatacatctttccatagttttgcagatgtattttggaaatagatcccgagcagtgtgattgatgggtcaaagggtaaatgcatatgtaattttgctagcgattgacagattgcccactccacagggggaaagttcacttttcattgctcaaacaatgaatgagatttcctgtttcctaaaagcctggtcaataaatttttggatttttcccaatctgataggtgagaagtgatatctcagaatagttttaatttgcatttctgttccgagtgaggctgagtgtgttttcatgtggctaagagccatttgtagctgtccatctctctaaattttttttttttttttttgagatgaagtctcgctctgttgcccaggctggagtgcagtaccatctcagctcactgcaacctccgcctcccgggttgaagcaattctgcctcagcctcccgagtagctgggatgacaggcacacccacacccggctaatttttgtgtttttagtagagatggggtttcgtcatgttggccaggctggtcttgaactcctgacctcagatgatccacctgccttggcctcctaaagtgctgggattacaggcatgagccaccacgccccgccccatctctctaatttttctgtagggctattgatctttttcttctagaagctctttatacgttaagggtattaaccctttgtaaccttttcccccaatttttcattgcttgttttacttttacttacgttgttttgtcatgcttatgctatgcaagagtttttcttttaaaaattttcatgttaaaaacattttatttgtggattttgtgtcagaattaggcaaattttacttagaggtttttttctagtttttgcatggtttcatattttacgttttaagttatggtcagtttggaa

SEQ ID NO: 39359 - DNA, 558 bp, Homo sapiens
cgcttctctgggcactttgtgccagccctaccagggagtgctgccccgctccccaggtctccctctgcttgctggcactgggcactcccagcaggcataacccgagcagagctgagtggttatttataaactctcttgaatgccaaagcgccaggaacaatccattccccccgtttgcaggaacatactttcagcataactcatcactttgaagatgggtccaaacttttgttcacatttattgacaggaagttgtttttcaaagctcaagtcagcaggcaggccccgggccaagaggctccgccacctcaagctggcgcggctctgagggcccataaattgtgttagcctcccacccacccctctctctccctttttccgctagaatttgcccagaggttgaacattacgttttccctttgtaaagtttcttcttaaactttttctttctttcttttttttttttttaagagaaaatcacctattggaagtgttaagaggttcttttcctctctgaaattctaaccctttatggtgctcttgaacttcctctttccc

SEQ ID NO: 39360 - DNA, 704 bp, Homo sapiens
actgctgaagtccaccccttgaaagcatccctgactgattgttgttcagctcccactgaaaatgctttcaagttgggataattcgagatggactttggcatgggtgggcaactctctttagaaagtctttccctatactgagcccaaaatgttgttcataaatcttccacatgttgttcgaattctgccatctgggggaaaaaagtgtaaaaaatattttccagacatatttgagaaattacccagaaacaccagacttgaccctcttgcacaaactagggcataatactaagttgcacaactctgaatgtctgcctcatcctctatgtttgtccattgttgtcattgcttagaacagccaggatgacgcttgtgcgggtggaggctaaggaaaggcaactagattctacttcagtagtgtgggtgaggagaaggtcaacttagccaatgagcaccttgattatgtcagttgctccagggagttggggaaaaacatacacggtctgactaatccatgagtcatatgaatgtttattctcattttcagatttttaaaaactcacaaatgcttccctcccacaagcaaacagttgccgttttttgttctagaagactgtagaccagccaattctatcataattttaatctcttaccacatactaatggaatacatgcatttaatttggcctagagcaagatgggct

SEQ ID NO: 39361 - DNA, 860 bp, Homo sapiens
aaattctgggaccacctttgccagatgaccaaatccttttcggagagatgactgaaatatttgtaagtttccatcagcatggggggaaggggctggaggtgaggggggacctctcgggctgtgccgtggtatcctctcttctccacattacaccccaagcacgcgactgtgagcggcgatcggggcctgatcctcagttcgaagacacagatgctcactgctgtagagacataaagaaaccaagaggttaactgccagggttagtcccctccgcgggcctcctgcatgaatcagagccgactgggagcaggagtgactcagagccgtggctttttgtcctctggctgtgcaaataaacagagcaggaaggtttgaatgggccaggcctggagcagagtgcagggttggaggcggctcccagttccaaggcgcgccccacccggcccccaggccaggtcagcctggggaggggagaactaagggcaccaggcagcccacccggcccggccaagaccagcaggacaggggcccagaggctggtaccctccgaggtgcgggagaagaggaggtgggagggtgcggggccgtggcttgctctgtggggacactgccctggggtccaccctgccgcggggtccacttggtataggcacccaccaggcctgcaccctaccctgggaaacacctgtggggctgtccccttctctgagcatctgtgaggggttttcctctccttagggacccctggaaggtccagagtgcagggtgtgtggccaggccaggcctggagatccgccaggagcagagagctccggaaggcctgccgggaggacctggaggatgcatctactgccaggctc

SEQ ID NO: 39362 - DNA, 967 bp, Homo sapiens
gcacacacaacttgaagtgattcttttctggtgaatatttctttcaaaaggtcctattaaatgacaagccgaaactattgaagctatcacgaactttgaggaaataaaactttccttaacaggtcacttaaaaggctttttttcttctgagtaataagctgtatcaacaacgcagcaagctttactcaaaaacgtattccaaatttgattcgaacagaaaataaagtccttccttgccagcattaaatccaaatgcggctgtaaacttgctgccataaggggctccaaagacccttcccacccaagggatgacaccctgtgccagcgcaaggccagaaacagatcagaaacgcctcccttcgcttccctggcttttacggcagcccgtgatgttattctcgtggaattccgtgtgcagagtccctgggtgctggccgtaccagccagggctgtatctggagggagcaagaccatctgtgtgcttctgttccacaatttaatgaaaacgcaagtgttagattttttccctgctccctatttcagaactatccttaaagctctttagaaaatccttttaatgtttctaatttgttctatatccccaggaagaaaaaaacatcttttggaaatatttgcaagctcaaattgagcaagagctgaaaataaaaacctggcatgcagttggtaagttggctttcaagaagtgcacaaatgtacttcctggaaactataaatagaaccaggccttaccccataccaaaaaaaaaaaaaaaaaaaatggtgaaatgtgctttaagttctcatacagaagcgcagccatgaaagacaagcatgacccccagaaataacagacagaaccatccgtctgagatgctgctacaatcacgttatggacaaagcattcctggaaaatctttctaagactctacaattccaatgcaaaagcaattgaatagaaacaataaca

SEQ ID NO: 39363 - DNA, 1098 bp, Homo sapiens
tggaaatgcagaaggcagggggctggttcagacttctgtccagaaaaatcacctgggcagcttgataaaaagtgacttacgcctcccagcctcagttcctgaaccagtaactactgtgtgatgtccccaggggcattaaatgccaatgaacacacggtacgtagctgagtgacagatgggtggccttggtaaggggacctgtggccatcagtgtcctcatcattgctgtaattaggagcaaccacgagtcccactttgagcaggaccttgctgctggctgtggaggctgtgcgctcacactctctgcccagcaaagatcccggagccagtaactctcttgccagcaggaacactttacaaagtaggatttggtagaagatgcatgccagcactaagcaaacattgtttaaaaaaaaaaaaaagggaaaagaaacaaagtctactttgtggaccttgcacggaggagatccactgcccgggagagttcatgtccatgtatctttctgctatgaatgcccagcgcaggcccctcccacgttcagcgcaggctcgccaacgcctaccactcagtgttccaaactgggtgcctttgaaagcactgcacagatccatactaatcctcatcccagcgcagggtctgctccacccacattccccatgaattcatgcaactccatcagcagtgcttaaagccaaaaatcctgaggtcaccctcgactcttctgtttcctgcacagcccatctgcaggctaaggaaatcccatctacgtcagatatctctagaatttgtaccattttctacattcccactccacctacccggactgagccccatccactgcctgggttgctcccagaccctggtgggtctccctgctcctccgatgcctgtcccacgtggccactgcattctctgtggcatacgtcacgtggtgtcgcttctctgctcagaacctccaggagcctccatgtcactcaaagccatgcctaattgattaacccggccttttatgtctcccgcaccgcccactccctcttctcctgaccaggtcttcggcctgcaaatgtctgctcaccttctaaggaggcctgccctca

SEQ ID NO: 39364 - DNA, 1403 bp, Homo sapiens
gggtcgacagcaacaacaacaatgtaacatgtaatggggggggtgataaatgtagataacccaaacaatctaatgtccacccaggatggagaaactttctatctttctgcctcaggcactgcggacagggaaagaaccagttggaaagtgaggccggcaggctcacgggtggggctggcaggcagcagtgtcctgggccgcgtggggaggcacggtcccacctgccagccacagggtggcatttcagagccacagggcatttctggtcaaaaataacagagtgaacacaatcacgttgtcaggatccctccaagattctgctgaaacagtgtgtggattgtttagaaagacacaccaacacaacacacacacaggagatgagagagcagccacaaaatgctggaagtcagaaaggatctgggtgaataaggtatcagagacagcaaagctgacccatcagccagggtgggccaagggaggggcagaccagtctcggtcacacagccctccggggcacaggggctggtgggaccaggactggaggtgaaggagaatgaaatatctgctcagggaatgcagggccccaaccaccgcttaccccacgtggctggcagagcccagggactactaccctctggagagggagatggaacagcactgaaaactgcggaccagtggaagctggccagctacacgtgaggtgtcctggtcttcctgccccagcatgggggcagggcaggcagcattgggccctcccagtgaggtcacaggggctaagcagcctgctggacaccatgccaagtgggaccgggcagcccccagcggccagcaccctgcatgcccctgcaggtcccgccagcctcagtgccctctgctacagatggcagataccgtgctcaccagaaaggccaggaagactgtcatcacagaaggcagagcctggacagacagacaagcaccttggggaaatgcagacagagagaagggaagacaggccctccaaagacaagcggaaggagcgggaggcagccctggagttccaggacaggagggcatgcctcgggtgcggaggaacatagtctctgcccggtgaaatgagcaagcaagcctcagagggctaacaccattaaaagccagaagggccctctgaaggcaaatgtgactgactcagcagcttcacgagagtcatcgccctgcagatcaggtccagcggactgcaggtccagcagctgccactgcagggtggcccgggccctctgctaggtctcccagctgcttccatccaccaggcatcttctcaagacacattttcaacgcaattcaagccctcctgttgttatgcttcccagcatcagctgggctgggtttcacttgagacagttgctcctagggacattgccaca

SEQ ID NO: 39365 - DNA, 848 bp, Homo sapiens
tgaagccctttcttgagtttggaagtgaactgcttatgcctgagcccaaaaggcggatccctccagcaccgagttcatacatgaggcctaattacaagttacttttactacactgaagcaggaagacacatcagatctcagtgcaaccgatttgacttgtaagtcacgatacgtggtgttcctgtatccacaagcatcactcgtgtgtttcagatcaaggtgcagcttagtgggtcttggctcacctacatttctgggcactgggctggtccgcgtcccacctacccttcaagaagacatttattgcatgcttgcactagctggcacaccaaggagaatgccgttcgataacagcatgtggattccctgcgtaaaccagaccttgaccttaacatgtccaatcctgtatactggcgggtggggtggtttctgacaccagccaactggcaccaactgggcgtccaatgatccagttccactctgacaataactgcccagagctagcacacacgccacaggggctcaggtccacaaggctgcccccatttcagacacaagtcctgggcctcctggacttctaaagatcggctataaatcaggagttcccacaagcccctctcaggttctgtaatttgctagaagggctcacaaaactcagaaaaacactttaccatgttgatgggtttattgtaaaagatgcaaataaacagtaacatgaaggcagggtctggaggggtcctgagtgcaggagcctctgtgtcagtaccactggggtcagcaggtgcggctgaacatgctgctcctctcgtctctgcgtcctggtgactggccccatcccgaggctatcc

SEQ ID NO: 39366 - DNA, 726 bp, Homo sapiens
tataaacacatcttcttgatgacactactaagttaaaaaaaaacagtgaagaattacaggaccagacaaaggctggggggtgaagatggcatttggggctgattttcccctgttggtatttgcagagccccacccccagccatctaagaatctttagtacttttgaccgcctcttgcagatattagggttaggaggagaactccagggactgacaggcaggagagaaggagggaaatgtgggttgggatctggaagcaacccctagggaaaaaaagagactccacaataaatggaccctcaacaattgcagctctgcttctaatgactctgtaatccttgaaatagaactgaagtgatgactcattgctagggcccccaagcaccaggcagaaacaaacttcagtctactaatgaggatgatgtcatcatcctaggcctcaaactgtctcaacagattttgcaaataatattttcaacacacacacttacacattcacatatcaggcagaggaaaagacaacccaacaaaaaaaacccaacagaacaacaaacaatagaaaaagaccctcaggtgctccagataatagaattctgagaaagagactttgttacttatttgctgcaataccaggacccataaacaatagtttcaaagtaggaatatcaatagtgttctagtaacgataaaagagttgaatgcaatttaagatcctgcggcagtttta

SEQ ID NO: 39367 - DNA, 2002 bp, Homo sapiens
ggatgctatcacgcccattttacatgaggacactgaggcacaaagaggctcagggatggtccaaagttaatccagcaagaaaaggggagcaccaaactggagcctgcacaggctgacctggagccgtgtccttgagcactctgcttgttcaatcagaaagccaccactctcaaagcacacacacacacgcacatatgcaggtatgcacacatgcacgcacacagaggatgtgcttagctgtatgtgtgccctgggcgtggacaccagcactctgcccagaaggaggccaatacccgcctggaccagggtctctgcagacagtggcacagggcggtcatggccagtcctgcagcgccctggcccagctggttttctggtttttccccatttcactggctacaatggctcctttttcagatgcaggcagccagctgagtgctgacactctaattctaaaggtcaccccgtgacatttcctgcagcctcaactaccttccaaggcctcagcagatcagggtcacaatgctggccggcatttaagagaaactgcgctgttttcttttttaggacttcgcatttatctaatcatttctggatctttttccttgaaaataagtcactaaataacaaaccgaggcagcactgcttaaatgtgtccccagacagggatgaaatggggtgcctgtccactgtcgggccccggagctgtgcttcagtcaggtcaagggagcatgggaaccaggactttcacctccgcccgggagattcttcggggcagatatatttagaaagcgtggattaatgattaatgattaaactcactcaccaggtctgtcaaaagtggacagtcctggagccatttgccctaatttccctcaacattcaatatttgattgtccccgccaaagaagtgatcagctctccagatggctccaaaagatgttcgtggggctgcagggaacaaataaaactcccatttctgtttgttttcatgtaaaaaaaaaaaaaaaaaaaaaggaattaagtcttatgctgcttcctacaagggctggcctatgcatccttgggtcaggggcacgggtggctccccagaagcctctggaccccatgtgctgctctttgtaagctctgacagaagtggagactgaagacaaggcaatcacaaaggtgcctgagcccccaaccttcccacgagcagccagcgctcacccaaaccttggccgcaggatgaggcaggcccacagctctgtcagacagcaacccagggtctctgaagtggacttcgctccagaaagggtcccatgctgtcccagagagcagcgatccgtgccaccaacctgtgggcaagccacaaaggtccccgctagaagatgggacccagagctttgcattgccatttaactcagacactggtgtgacagcatagggttgagacggggttgcagaggtcaagtccagactctgcggctccctggctgcccggctatgagctactgtggagcggtgctgtgctgcggtttccttaacggagggaatccaaagcaggacatgagaacgcctgtgcatcacctgtggtcactgctggctaatgaggcctggggatgccaggccccaatggtagcgcccatcacagtgccaaggacttgcctcgggattgcaccacgctgtcaccatgagccccatcccctcagcaccctctgggctcagccccacctgacacagggctgtgccacaacgaaggccacaaatgcaaaaagaaaatcttagaaagactatgtttatcactttagaacttttgagaaaattgagaccttgaaagtgaaagtgaactttcaaaacagaaaggtaaatagtgttcttagaattcaagcggcaacatgtgcctcttccacagggcccccaagtcaaatcattattcccggtgccgcggctgctaagtgcctctgtccctacatggccaccactactgatgctgagatgagaagacaccaaaaaaaggcag

SEQ ID NO: 39368 - DNA, 935 bp, Homo sapiens
aacagccccagtggaactgagtgaaccaatcacatcctcagagccctggggaagagcagctgcctccccagcactgtcttctgtgagggatcattcaacaatgaaggaaaaggaggcaactctcagacgaacaaaaaacggaacttctgcaggaatttctaaaggatattacttccaaaggatattacttccagaagaaaagtaagagcaaaaaaccagaatatctgatattcaacaagaaacagcaagcaagtaatatccacatataggaaactttaaggagcagtggccataggaagctgtgacaatgaaggcagcacacggccgcagcctcccgttagctgctggaaggaagccacacacacccagatatttcaattctgcaaatgattaagaaaacgaaaccaacaacaaacataaaaatgggtgacccatgtcagaagacactgacagccacagcaggctggcggtcaggcacaggccaggcgagggccacctcccgggaccgagcaaggcgccctggtcagcctgaagacactggcactaggtctaagacggtgtggccgtgctggaggtcacgcagagttaaaagtagcttacccgtgacccggcactcccattcccaggcaggaacctggcaaagacccaagtttgcgtgtgtcagaaaacacacaaaagaatgtccacaacatcatgtttgagagcagccacatctgaacatgaatcaaagttgtgaaaattcacaaaattgaatgcaagacactaatgaacaccagtcaccgacagctacaggcagaaacctggttctcaaaaacagtcctgcctgaaaaagaacccacgaaatagaaaacgtatagtataattctatttacatgaagttcaaaaacataaaactaaaatcatattgtttaggaacatgtgcatgtatgataaaa

SEQ ID NO: 39369 - DNA, 2810 bp, Homo sapiens
cctcttcacgggtaccccagatgaaaaatgttctacaaaaacaagggcaggatgaatgtagtccgggacctcctgacgatctcaaacgctgctgaaaaggccttaagatgaggtttgctgtgagcaacaggaagcattctgtaaggcattctgtccttgagatctggacagtgaggtacttgctgtccagcccctgagtttcccagacctgaatgtaacactgtgcaagcctcacacacagggatctttcttaacccctacagaatgcccactggaaggaggcaaatactcccaacgaggaaaacatcctatccatgagagtggggagctggtgggggaggaaaaagaaacaccaaacatttcaggaaataaatcacatctgtgcccggcatcctcccccagcgagcacagcacacatccgaactgccaggctcggcacctctgagaaaaggactttgtcgggtgcagccatacgcctgacctctcgggcgcccgctggccctctttatctccagcagcccagcccggagctcagagggcaggccagccctggccaagagtcaggagcggtggagctgggcttggtgtttatgtctgatccagacaactgggggtttatgacgatttactgacgcaagagctccccgaagcagcatgccagaaattaatcaagggaggaggaattctttttaagaaaccacttggctgctgcgaacctgcctgaaaggctgggagtgtaagctgagctccttcctccaggcccaggccaccaggcagcagcagcacacccaggacccacaggcagagcccagggccaactcctggccccagatggaggcaggcggcatggaaggtcctgcaatgccaaccccccacatcccccccagtgcagctacctccccaccagccgatcctgggctagcccactcccagaaggactcagaaggggtccacggggaccccaccagctgtgcagaccccaaaggcgggtcctcctattggaatgacaggaaccctccattatctgctagtaaaattcctttctcaggagttgagttttatggtttaccatcactcatcaccaaaagagaaaaaaaggtaaaacatacaagtttgattctgccccgtcatctcagtgagacaggcacagcctctgcagcagcagcttgggctgggagggcaggggccacgtcgggccagcagctcctctccagctttctgcacacccctcctcccaccgggacacccctcctccttgctcccccattcctgctccggctgggggagggaagctggcatcacacagacacccgtgctccatttgttttgtgatctgatgtccaagttattctgaaatttcaaacactgaaggacacaggttatttatatttatcaaaaagggcatgagtctgacaaggctgactaaactaaaccttgccagacactcagggcctgggctgggctacaaagggttctggatcccaacaggaggacagcagctgacatccctgggcaggaacaggcgctgggctccgtgcctgcctcactggatcttcacgacaaccctataaggtgaagtctcttaggagccccatgtctcagagaagggagcagaagcctagtgggaggcggccacgggtgtctgtgtgatgccagcttccctcccccagccggagcaggaatgggggagcaaggaggaggggtgtcctggtgggaggaggggtgtgcagaaagctggagaggagctgctggcccgacgtggcccctgccctccaagcccaagctgctgctgcagaggctgtgcctgtctcactgagatgacggggcagaatcaaacttgtaggggcctggatcagcggccacagagccgatggccggaggccgtatgcaggccaggtacagctgcctggagagccatgggagagccacaggagagccagagggacactgggagtggtgccaagtggcccaactgccagctttccataggagcatcgggaaggggaggtccaaccaggccccagggggaccctgtgccaaaggaagagatgcctcacaggagaccccgcgagggagtggcagctgctaaccctgcctggttccaaaggcctgagcaagggccactggggcctgcagccagcaacctggcaatcaggactgcaagagggcgacaggaaggagtgtggctcaccaaggacacctgaactctggccccaccgaacactggcctggacttccgctccaagaagctcttctccaccaacactgaacaggctgccagtgaccgcgcacagtggttgaaggcagccacgtggcagaagtggcacaggtcagccaaccttcacactctgttttcttatctcagaggaggatgctgattctgacaaacaaaatggctgcttccccataatgctaacatcccctggtcatgaggcctggccttctacagggagaaaaatcgctggcttccttactagactatctgtaattcaatgtgtcaatacaagtatatttatctttaaatgttttaagtgagcaattatactgaataaaatatacttttaaacgtagtatactaaacgtggtatttgtaacccaaccactttggtttaatgtggcaaaagagatctcaccctcagccttctccatcccaaaaaggccactgaagaggacaggctgtgctgccaccccagccccacatgccacgctgctgacacagacctgctgccctgtgcgtgcgcattcccaacctgcctgaccttggctgcccgaaattcggagtggggaggaaggcagatatgcctgaatac

SEQ ID NO: 39370 - DNA, 1041 bp, Homo sapiens
ctgcaacgctttatttgaaaactgtgtcacagcaggtcaatttacaacatgcaataaagaaaacactcatatcagctgcctcaagttattacaaatttttgatgtgcattaaatgagtacactgggttccacccccggcctttccaactgatacgcacggtctcctcctataacagtgtcaaataattcaacgctcaatgtaaatacgagataatttgcttatgattccgtggtgtgttttcgcaacgccggcaaacgcggatcccacccccgagcgggaccgggccccgtctcggcctgctggcgccctgcgggctgagccgagcgggtcccgggcagccccccgccctcccgcgaccccccgggcgctcgcagcggcgacgacaagcgcggggccgcggacccccggcagggacgtttttctgcaaactcacagcatttgacaaagttacataaacggcgcccggccggccccggcgcccgcccgcccccgccctcactcccggcggcccggagcccacctgctcggggggcgcgggccccgcaccgggagacggcgccgctgcctgccgtgcccacccccgcgcccccgccccggcgggcgaagccgcctcgcggcgcgggtggaaaggtccagaaggggccgggcggccctggggaccggcgggtcccacggcgcgcggccagcgctggcccccgcctcccacggccgcgcgcggggcgggtgtggaccggcggcgtccacctgccgcgggctccaaggcctgcaggctgcgcggggcgcggggcgggcggcggacaatggcccgcgggcgccgggccggggctgcgcttaccgcggcgggcggcggcggccggctctagccctgctccggcgctccgcgccgcatctcctcagcctgcgccgccacccgccggcgcgcgggctcgggctcgggcggcgacagccgggacgcggccacggcgccgccgggggcccaggctgggaggctgttcgggcggcggcggcggcggcgcgggcgggtgcgcgggctcgggctc

SEQ ID NO: 39371 - DNA, 1562 bp, Homo sapiens
gataggccaccccgcacgcccgtcagccggcccggccccgcccagccagccggcggctcgccaaccattggctgcggcagccttgcgtcacctccccttgcgggccccgccctcccgcctggtttctaatgaagagctcgtcaattacggctcggccccgcctcccgcccgcccgccccgggcgcctggccggccttccattggcccgctgaaacctgcgcacagcccgtctgctcccacccctcgcccagcggctgctcaaccgcggggccggatgccctatgagcggcagagaggctccacccctgcccgcctccccgcacgcgtcctggacctcattggctgctggagctgccaattctagagggtggggcgtaccaaaagacgctccaggcgccagccgctgggtgcttcgcggttgaggaggcgcagggaccgggggccagtagtggccgtaaacacgggccccggccgtgtccggtcgcactcggtagcccgcatggctgcctagcggtcagcaccgcatgtctgcgagcctaattcgcgcttagagggcacacaatggggtgcaggctaacgcggggagccggccaggcctcgccgcggcgtccatcttggatactggcagtgggtcacgtggtgctgcgtgcgcacggaggcgcagggcggcccggtcactgagtgcgcaggcgccgtgggcctcgccctgccccgcggcgggaacgcggccgtgagggtgtggggtgtaggtccgccaggcctgcaacggctgccgagggtcgtgggatgcgctcgccgcgtccctgctcaggcggagggagcccggcccgccgccagggtctcgagtccgggtccaggcaggcgtggaggtggcgggaacggcgcaccgcccgggtgggcgttgttttaaggccgcagggcttgggaggcttgtgttgagttacaggtcggcccgtagatccccggaagcgcctttggttgccagcaggtgtcggcgagggtcttcagtggccaccctcctggtggtgatgtttccgtttctttccaacaggagtatgacaacttttcaacttgagtgcacacactgtccccggaatcccgcgttccagggaggaagcgcctttgacagcgcgcgccggttcgtggggcccgacggcgtgggcctgtggttgcggacctggcggagatgcgcgttcgcttcgattgtaggccattccttttaggagctgagaaaggatccgtttttacagcattctcgacctgtgattcttggtgggggaaactagttatgtggataaaaatacagttagcaaaataaaaatgccaattttacatttccttaaatatctcattaataattagaaaactttggtcattgcaagaaatgcttaggctaaacttagaaggaaaggaatggtgaattagagaactttaaaacaagatacagctgaagaaaaggagagcaattacggggttttggagacttggctgctgatggaaacggtgcactatctaattttcatgtagaatgaaacagggtctgtagctagctaacatctaga

SEQ ID NO: 39372 - DNA, 685 bp, Homo sapiens
acccctttggctaaagtagcagacagatacattttagattctactctctagatcacaagcctcctagtttcttgtttcgggagccctcgatttccatgcctttgaaggatgctggcgtttcataacagtcagacttctcgctttgtgaaatcccgtcctaatctccaggtcaataaagtgactcatctttgggcttaacgatccttttgtttagggagaaaatagtttctactgagtgataatctatttataaaacgttgcatctgattagccactattttatcttccaacaatgcttaggctttcgtgttttaaggaggaaaatttagtgggggtgtggaaggggaaggatacatttttcttggccaacctcaaaggtgtctgctgggattggttcattttccggaatgcctaatgcttgggattgtgaaacatgccctgcctcccagcaagcaggtacctcacttggcctattgtgtacgacaaacatcttctgccctcttgccaacccgagcatgtcgcaatgagctgggctgctgttgatcccttccagccgaaagcattctgcaccagagaagcttggtatttgcatagcaattagtttgtattcctacaaaaattttcatggattcaaattcttcatagaaagaatgaaccagagagtaaactgaaccacagattaaag

SEQ ID NO: 39373 - DNA, 2096 bp, Homo sapiens
cagcttcttagaaaactagtcttactacatgagtaatcgctcttccaggtattacccaaatgatataaaaatgtatttccaaaaagaaatctgcatgtacacgattacagcagctttattcataattgccaaaaacttgaagcaaccaagatgcccttcaattgctgaatgaattgaagtacatccatgcaatgagatattactcagtgattaaaaagaaatgagttaccaagccacgaagacataagtgaatcttacatagatatttccaagtattcaaggcgtctgaaaaggcaatatattgtatgattctaattatatgacattccagaaaaggcaactatggaaatgttaatgagatctgtggttgtcaggggttggagaaaaagaagggtttaataggtaaagcagaggggaattttttaaggcagtgaagctactctgtacgaacctataatggtggagacatgctattacacacgtgtcaaaacctatagaaccttatagcacaaagaaaaaatccatagaaccttatagcacaaagaatgcgctcaatgtatgcacattttaaaaaacgcattaggtagaaggatcccaagatgtaaggcagaatgtgacaaagcaatccaactgtgttacaaatgtatgaaacgatttcactgaagaaggtgggggcaaaatgctaagaaatgagagtagtcagtcagagtaaaggcaaaaggaagcggacacaagcactgaactccgtgtctgctcaacatggcatcacccaagcacccagcagggcccgacctttaaacggctcttgacagggctgctacgtgaattatctaatgacaagcgcgtgtgcccccggcctgccacctgcacacgggcctcccgcatcagggcagcctcggggccctgatcacctccgcgctccagcgttttgcttaaagctgagataaaatggcctggagaagctcgtggccccctgaggtctgtccacgaccaaagaccaaacaattccggaggcaggaggggtcccccaaacccacccggagagcgacctgggagccgccgccagaggccgggggagatgtggaactgctccccaccccgccaccccgccaccctgccaccccgccaccctgccaccccgccgcccgctcaccacgcgctgggcgcccgccgccacgacccgggcggacgcggacgtcgctgccagcttcaggagccgcaaggccatggctacccggtcagctcaggatcaaggacccaaggggacgcggtcgcgacggggccctctctcgcggccggcgcgctgccgtgacgtcacggccggggtgcccgcggcgcctgtcgggaaccttccagggggcggggccgcgccgaggccctcgggggcttccgcggagacagccagtgcgctgccagggtcctgcgggttggggcgagggccgagaggtgggagttggaggtgaacgtgggggcagcatgctggctgcccggcccctgcctgggttctgagttgctgcggtgtcgcgggagctgaggccgcccagggcgtggagcgacttctgcgtctcgtcccagggtcctgtgctccccgcagaatcccccaggcgcggtgtggacgtcaaagcgacctcctagagaacattcctagctctcagaacgttctcgctggggagggaaagtggaaaaagagggggcgaggagcggagggacggggtgggacccctgtcgcggggcgcctgtcagggagagggacctggcaaggccggcctgggtcgcctccggagctgaaggctaagtggtctcatccaggggacctgctgtgaacacattgaatagcatagaaaacaaaagcacacgctccaagtccatctctttttttttttttttttttttttttttttttttttttttttgaggcagagtcccgctctgtcgcccaggctggagtgcggtggcgccatcgcgctcactgcaagctccgcctccctggttcacgccattctcctgcctcagcctcccgagtagctgggactacaggcgcccgccgccacacccggctaattttttgtatttttagtagagacggggtttcacca

SEQ ID NO: 39374 - DNA, 2019 bp, Homo sapiens
ggtagggagagagtccctacccactgtctcccctctctctggcactgcacgctcaaccatgttaaacgacacaacattcccttcccttggtgagccagtcggcatcccccaacccagggctctgctcctgccgggccttcatcccccactacctggcaaacaccaatgtgtcccccagcatttggccacagagtcgactcctcagctgtacctttgctgagccccctcaaagccctgagggtccatccgtcggtgcgccttcggctttctatgacacctggtatttgcaatcagccgctctgccatgctattacctccacaagcacaagggctgcctctgaccacctctgcagcccctaagctttgagaaagagcacataaggccctgacatgtaggagctggcctgccactctgagctaggctgtggtgctctcctgctgaccataaaccatctcagaacgctcacatcagacaaggtcactctgtgaacacaatagagaccaacaaaaccccaagacgactgtataatcctgtataattaaaaagaagaacgaggccactacgcaaagcacataaatgccagatgtctccttttccgctccgacaggaatgacggctgctccagtcttccctcattctagttaagattaagaggcccaatcggagaattatcctcgcttccaaggcacagtaaagcccactttcttcccccaaatcccctaacacgagctcaaatcccacacgaggttatggagacgcaccgcgggcccccatggggtgctgcagccatcgaagagcagcaaacgcaactcctctgaccacgggtgtgttcccgggggccgtgggggcacccagcaggcactcaaccctcaggctgcgcctcctggtcccccgggctagggcacacgcttcccgccgcggtcggtcgccgcctttcaccaggtgctcggagaaaccgggatttgctctccgcggggcagggagcctgggagccgcgcccatcgcccacccgcccggcctcccctccccgggacccgcgcaccaggacgccgcccttccgctcccccttccccgctccccacgctcggagactcccgccgggcccgtgccacctcgtccaggtccacgtagggcccggcgccctcggggaacatctcgtccaccgccggcttcatctcggggccgcggcgctctaggctcacttccggcctcagagccgcttccggcgcgcgccacatggcagatctagacgccggaggaccgcgcctctgtggtgcccgcccgctggggtgctcccggccgccggcgcgtccgcggccaccggcgtttgtctttgcgctggcgagggcgggcgtctgcaacgcctctgatgggcggccgggcggccacggggagaaaaggctgccagcaatgggagcagtgcctgcagagcacgcctccgaccagaggccggatccagaataaagaaggagcctcagactctgccgcaaagacggccgggttcacaggagcccagggcttgaccttcagacgtttgtctgaagaagacacactcgcggccagtgagcagatgaagaggtgaaagcaaaccagggccccacggccgctgcacccctgggacgcccagagtcaaaaaaacagcaaaacacgggtggaagggtgcgcggcacacggggcccctcgcaccgcggcggggagtgagacgcggcagccggggcgggagacgggggggggcaggtcccagaaaatcaaacacggacacccacgtggcccagcactccccttccgggcacaagcccagaggaccaaaagccgaggctccaaggggcgtctttaccccacgttcacagcagcgttatttataataaatgaaaaagggaagcgtcccccgctgtccctgcccatcgatggatacgtgcataagcaaatgtgggccatgcacactgtggaacattactcagcctttaaaaggaagggaatgccgacacctgctgccacgcgcaggaacattgaggacg

SEQ ID NO: 39375 - DNA, 2116 bp, Homo sapiens
gaagggccctgcacgcccgcagctctgccctgcaccttctgttcagagatcacttctcatcaggaggctgcgaagggaactggtgctccagctaagggtggtcccacagggtgaccttgtctgtcctgaaacggaagctgttgtactagactgggtgccacagaatttaacgtatacccaatggccatacccaggcctgcaggtttatgtccccgtgactttcaatatgcccagcttgtcctagctgcttcactaggaagtcctgagcctccgacaggacactttctgggagaatcacagaggcgtgtctctagcgagcggcttccactctttcttccagacagcccgatttccccacatgcacctgggccttgagaacagtccctggaggagcatccgacactagcaggcccaggagaaccacatcagtccctctctttgggcagcagccctccccctgctgggctggacttcgccctcgtggcacagcgggcaattctgagccaaagccaaaatgccagctcccagcctcctaggaaggacgggtctgtgcggaaggctctgcggccggctctgcccccagggctcccagcagcgggctcccgaggcctggcttctcccggaggagaccccagcttctccagcgttcttacatttctgtatttcagacccaaatagaccttgttccaggttctcaatgtcctccccagggtggggctggtggaggcctccaggtcctggggtgtgtgtgggctgctggagggcaggcccgagacccaaaggcgcgtctccctcacccgcctcgccgacaccagggggcgctggagctcagcaaagggcccggaggccgctctgaaactcaggccttaaaatacaggcaggatcagcctttggagccctccctgccggccgggcctgcccggcgcccagtcagcgtgctgccgggcctgtgcccctgacggacctggcacaagggggcacccaggggtctgcagccggatgatgcgagctcaggcctcccccacctggggtgagacgcccccatcccatcagcgcacccctgcagcagggaagcataagcctggctgcggccccgcccacagcacctctctggtccagccccgcccacagcacctccacctccagccccgcccacagcacctcccctctccagccccacccacggcgcctcccttctccggccccgcccacagcacctcccccacttcaaccccacccacagcacctccctcctccccggctgcagctctcccctcaagccccgcccacagccccacagcacctccccacagccctgcccacaacacctccccctccagccccacccacagcacctccacctcagaccccgcccacagcacctcccgcctccagccctgcccataatacccccctcctctgaccccgcccacagtgtctcccccctctggcccacccacagtgcctccccctccagctcctcccacagcactccctcctccgaccctgcccacagcatctacccctccaaccccgcccacagcacctccctcctccggccctgcccacagtgcctcgcccctcccgccccatccacagtgcctctttcctctggccccgcccacagcaccctgatcctccagccccacccacagtccccccctccaactccgtggctgcagccccgccctcagcacctccctcctcggggggtgccgcaggacctgggacgcacctgatgtttctgggggggaaggggcacccttctgcagtttgcattggtcaccttaacagcggggcactgtggtcacagatcaagtcctaaaggaaagtaaacctctgttcagtggccagggaggaaacaggttgtgagaaataacggaacattcttcagacaggacaacaattcggagtcttacaccatcccaggttttttgacacgagggctgtccccgcgttgctctccctgggcctgtggcacccacttgctggctaaggttaggacccaccctggggcgcctgcccagcggtgactgtgtccacagcactctgggtggcacctgcccagctacttctggttgtgccctggtcacacaggcatggttggggcagagtg

SEQ ID NO: 39376 - DNA, 2254 bp, Homo sapiens
tctctgtcccctgcaggactcagaccgctgtgtgtatacatgtggggtggggtggggattggggaaggctggggggagggggattgggctggatgtccttccctgtttcccatcagagaagagaatattttcttattttccccttctgctattccttgttttaagataacttttttttttggaattattattttgttcttagtgagactatatctcactaaaattatgtactcaaaatactgtttattttttaagtcacagtcacatgaagatttcttggcaccaatttggtaaacagttaggtttacttgttcctgccagtttccaatttgtagggattcctttcttgttctttaggatttgttgttgttttttagcaaagcatctacatggttccagaggagacatgagccatgtgaagctcaaggtcagccccagaattggccccccttcccctcccccaccaccttctttccccacccccactggaggccgtgtttattaggtcggggtttacctgttcactggttattttatatgagaagcccatgcatacccatctccaagccgttctagaagcctctctgacatgtcctgcctcttactgcatttacacgacactgcctttcacatcgcacgcacggctccttctcacgacttcctgttcctacaacgcactccttatgggactgaccaggatttaatcaaacagttgccctggatgggcaactgggagttttctgtttttgctatcaccatgaaagagcggcctgtgccaaagtcgctgtttccctagcgttttcttggcagagattcatggaactgacatcggtaggttgaaggccatgtgtatctgcaacttggccaactatttccctccctaggaactgcctcattgtgcattcccaccagtaatcaataagaacacctgtttctccacagcctcaccaacacaatgagttgtcaaatctttggatttttgccaagctgatcagtgagaaatggaatctcagtgttgtctgaattcacatttcttttatatgagcaagattgagtcaccttttcctatgtttaagaggcatttgcattttttcttttacaaactatttgttcctatcttgtacctattttcctacagatctttggacattttcttcattttgggaactttttgtatatcagtgatattagccttgcatctgtaatattagttgcaaatattgtcttacctgtcctttgactttgaagatggtgtattttcccatataaaggtcttaattttgtggagacaaatttgttcaacttgcctgattgcttctggattttgagtcatggttataaaagcttttctccatcttaggttgtaaaggaagtaacctgatttattttctaatacttgtgtaactccatctctgattcacttggtgtccactgtgagaagtggatccaattttctctttgcatgtggctctgcagcatcccgaaccccttggttacagagtccatcttctcccactcacttgggatgccacccaccttgacaacagcccactgcttgtgggtctatctctggattctctattccactggtccattcatctgtaaacgaatgaatgccatgctgttgtgctcacagaagctttataacatgtattatatggcatagtctaccccaccaacttcaccctgccctccttttccagggatttcctggctattcctgctttctaattcttccctgtgaaagataacatctaactgcctggtcttcctggacatacaccaagtcccttcctgtccacagggctccttgtatgctcttcccacctgctctgcctggcaaactcactctaagagaccctgcacaaaggccccttccctcagggtcccaacccctggcctcaggcaagctcaatcttgcctttggatgctactgagttggctcttctgcctagagcccctgatctccagaactttgcatggatagttcctccccataaacgccagcataaatgacccagccagaaggcatccctggctcccagaccttctccatccattactctgttttatttcctcatggttatcatccatatctaaaataatcttacatgattgtttgatgttatatatgccagaaggtatgagagaatggccttaacttatctaattctgtgatgaatcttcagcatcaagaacagtatagtgaaaggagctccaggtgggtgggtggatggatggatggacagataga

SEQ ID NO: 39377 - DNA, 2985 bp, Homo sapiens
ttctgccgggtcctcagcagctgcacagtctcctcctcctggggcctccctccctcccaggctgcgagccagtggttgaagattttctctggaggcattttcagatctggcctagcacggccccaggtatcccgtcctacctgccaggtgggcagggaccttcctgagacacagtacaagggagtaggccttgccccagggagttctggctgggggctcctgtgggacagctctggggaccccaacacctgccctggggacctccccttcccacctcctgagacactgctgggtccctctgtcaatcacatttctagctctcccgcctctaccaggcaggccaatcagatggtgccacctcctcacccgccccaccttacagtcatccctgcaagggtgggattgacaagggggaaatcggcccagcttggggtggaggagacgttgatgaggatcctgggagacaaggccacctcttcccagccatggagactcctgggatggaccctccctcccttgacccccataaaggagagtctttgggaagggagaaggagggctgaagagggaggagggttcccacaagagtacagcccaagcactgccgcggcagtggaaggccccagcccagccacacggagtctcgaggctgaggacagagaaggcacctgggtgcaaggaggcccttgggtgtagtttgcagtaggaccagtgggcacaagcgcccaggatgagagccacaggctgacggagccccatgtgaaggggtagaggtcagggcagagggggaccctagggaaggctcaggacccgtgcctggagaggaagaccccacggcacccactttctggttcctgaagccttcctggccaccacactgtcccgttcctgacctgcccagggtgggcaccagggctggggctggccacagggacccctagggtcagacagcaagtcccagctggtgccactctggcccccaccaactgcgtggacagccctcacccccgctcagcctccctgagaagaaagggtgggcacaaaccctccgcccccacccataaagggcatgaggagagggcccggtacccctgagcccaagcagccggcggagaaggggctgcagaggcctggctgccagtccctggagatgacccaaggtgcgtatgaccagcagggctgtgacccctagcccagcctgggctgaccacacgcctgcaggaggccacgcctctgggtagtgatgagaaaccgcagcctcagagtaggtgggtgtggcctgagagcatgactcacgctgggctgcccggggtcagtcacgggctgggtgagacctttgtgtgctgagcctggggctccccacactcgagtggtcccccgtggcctcacagagcagcctcagaggccagcctgccaccccctcatcccacacagaaggaggctgagtcctcagcgggggaggggctggtcatcccatggccacggatcccggaatagccgacctccagcccccgcgcacgggtacattctgtacgcccagggtggctggcgtgggtggcggctggccctgaaggccgggggctgtgttcctgtggccgactcactgccctttgcccttggtgagcaagtcttccctgggcctggctgcttctctgtaagacggaggcccagcagggtgggaggggacatcatgaccccgcagcactgagagtactttgtaagctgggaagtaccgtggctccgccagggccatggtgacatcagccattcactactggctgggactggcagatgtccagggaccaggcgaggagggagaaggagtctccctgcaccttcccgccccagctctccctccctcccgctcccactgcctccccatctgggagcaagccctggtttagagattggggtttgtgctgggcagacagaatcagcagtggctctctcccccgctcctcccccaggggtgctgggctggcccttggggttgagggtgacccagaacttgccattggctgccgggtgacagccccatccatctagctcaccctggagctgggtttgggcactgtaacatgttgcaggagacctgtcggagttcagtgccatccactccattagtcataattattttaattaagaagataagaaacacaactcatcaaaggtttaattataattagcagctaacgacactcggatgaatcactggcccgagcaggtgctcattcacacttcccagttcactggatgcgccgtgggagccgctgagacgtgggcacagaaggcacatctccctgggacccgagaaggcaacagagcccccgcatccccccagcacgatgcagaagggctgggcccatagcagctacctgtgtggtcactcagccctgagctcagaagtgccggggctcagaggacaccctgctgttgccaccgggcacccttcaccatctctgaacaaggcctgggatttctctgtgacctaggcccccacagggtacagtggtcctgaccctacatccatgtacagggaatgctgaccgcggcagctccgtgttcacagccctggacacacagaaatgactgtgatgtggccctgacctcagtagtgtagaaggaacccactgaaggagaccgaggtggggaacctacagggcctaatggaaaccccagctgggtgggtggcggccatgcagctgggagtgagtgtgagggtgcctggggatggagacggtgccggggatggagacagacacggtctccatgagaaagctgggcttaatcctgacagagggaggcggcctggaggccatacagggaagaggggctcaggaggtttggaaacaggatttcaggactgcctgcgctgcaggtgggtgctggccactggtctagcctgatctggcaccctggtggtgcatgccattggaggggctccctgtatctgtactgtggggccttcctgtcacagggtgggct

SEQ ID NO: 39378 - DNA, 910 bp, Homo sapiens
cttttagaaatgatgatgctatttgatccaagggtttcaacagatcatcttaagcctggagcctagaataataaaactctagacttgagggacctgcagaaatcatgtggccccaaatgctgatgacactgtgcaaagtgtcatgagggcatgaaggtggttttcattatgaaagctcaaaccggtgcccagaaaggggaagcaacttacccaaagacgcacattggcttagctgagctgggactgggcaccacagtcctgatccctggctccaccctgtcctgagatcgctcttgtgtcaccaaatttctgcctctttccgcgacagcgctccactttctcgtccttacagcttccgtagaagcaagacgagcagttttcgttgctgaattttgaacataataaaaagaaaagtgctttcaaggacattgagtctcttcagttggtgactcccgcagcctgtgatgaaagcgccttgctttctgcccagggaggtgcctgtgcatacctggaattgtacacattcctttggatcatgtgtctgagcaagtttcctcctgagatcaaagctggcgaggtggacaggcccctttgaagctttacgggggttttcagagaggcaggtcctggcagccacagagtttttgctcccaaggaagaaagaggttggaaagtggagccccaacacccctgtggagggctgttacctgtagaaatagtttttctccatgggagcgcttgctggccatgcctggcatggctgcactcagggggcacgtgtgatttctgcctgtctaccattcattccctttcttagggaaaggctctctgtgtttgctctgaaaatgaccctctccccagtccagcagccctggccacagacacatgacccagtcgggccaatcagcac

SEQ ID NO: 39379 - DNA, 1083 bp, Homo sapiens
aactgtgagagatacatttctcttgtttctacaccaccaggtctatggtaattttgttataccaagacaaacagccaagacaggcagagcctggaggggtggggtgagctcaggggtgcccagggcagagcctggggacagagtaagctcaggggcacccagggcagagcctgggggcacgagaggacaggcctgtttcccctgcagcgagcattctctgtcccccactgcattgcacaacaggctgggcacaggcaaccctggctgctctctggctccgtgcctggcaaggcccatcaccttgtgcccagggtcaggccactccacgggcagagtctgagctgctctcagcattgtcttggggccaactcctggtgtcaggtgtctcccggacctaggctggaacgtggggccactcaggcgtctctgacaggtaggatccaggcacaggtggctcacgattgatcgaccgtgtgggggttaaatgtctccctaataagccctcccacacctcctttccagcagctgctaaatgccctcagggcacctcatctgcacaaattaaagtctcctgacccttgtctgtgcaaccaaacttcctgaaggcagcttctgtctcgtgtctgctcagaacaccacagcgggtcccaccgccgtgatgctaagagtcatctgacctgtccccacctgcccttcctgcttcacctgccccacccacgcttgcatcccccattcacctggtcctgaagctgggaacccacctccctacactcagcccaacaaagagcagccatccccaagccctgagtgactatggcccccccacccgcccccccacccacatctggttctgcagagagctgcatgcctccaggtcagggctgcctgctccaaggtcaccggtacccagtccaaggtcgggggcatcctatctaaggtcgggggaccacatgcctgcaggtcagggctgcctgcaccaaggtcagggctgcctgtttgaagttggaaccagacctgatttaccaacactgtgcccagtcagggcctggacacagcaggttttaatatctgtccaaggaatga

SEQ ID NO: 39380 - DNA, 854 bp, Homo sapiens
gggaaaaccttccagagccctctctgccagagagaggtgtgccttgcccaagatcacttatcctggagggacacgagctgacacagacacggcccaggacaaccctggcagcctctcgcctcctggactccctgagtctccagctttgccgtgatgccagggtcccggtccaaggccagcctcctctcagccaggcagcccaccccagcccagccaggaccagctgtgtctgggggaggagggtggccctgcggtgggggctgtggggaaggggcagatgtatgacaagaggggcattgtccacactcctgaccagacttccaggagctccaggggcgggagcagcaaggcaggctctgagctgcaggatccaaaaatagcctggggtgcggccagtggccagggttgggcagctgacttcacgccacaagcatcccgggaaggctcagctgtctgtggccgcacctgctgggcctctacccggaatgctgccctcagcgggatgggcctgtaacgggcccctgggccacccacatgcagaaagcccagctcctcctgaggccccagaagcaccctcgggtgcctggaggctgctgtgtttctcgccctgacttgtccatggaccctgggacagccacggccctcaccaggcctgggccactttgcaagctgtggggggtgctgtctccccattgagagtccctggagatttgccccacgggttggggaatgacagcatgacccccacctacacaaggcagagacccttgttctcctggagtcagtggccctgtgggccccaacgctgggctcgggagagattcgccacatccaattgaaaaatgaagtgggtg

SEQ ID NO: 39381 - DNA, 657 bp, Homo sapiens
aaattttgaataagaagaaatgtacatcctacaaaactacattattcaaaacagtgtggccttagcccagcaatatgcaaaaaagatccagggtgagtctagaaacaggccagtgtatgctggaatgagtatttactggcatttcacataagtgaacaggggaaggaggaaatatttgcaacacagattccaggcaaagagcctaatctttaatccataaagacctcctcaaaaatcaataccaaaaaaaaacaacaaaggtgaaaaatggcaatggacttgaatagacaggccataagaaaacctgacagtggctggtaaatgcatgaaaaaatgttcagtttcccagggagcagggagtacaaacggaaacactcccggatctcacccctcgagcctcaggtcagcaacatcgagaggtgtgatgacccctgctttgacaagggcatgagtcaccagggactgtgcctgactttgtctttttgaaggacattaggccacctctttaaaatactgaaatgtgcaccctgtaactcagcagatgtgtttctcatcatctgttctatagaagccaccgctgccattttaatatcactttgtttgaaataaaaacactcttgagctgaggcatggtaaaacagaggctgcagccctttt

SEQ ID NO: 39382 - DNA, 4247 bp, Homo sapiens
gcaaagacaccaaagcaggagggggtggtcttggtcagagccacaagggtcactgtggtggctgggattcgaggcatcaactatgtcctcaaacccatccacgtgtcctgtgtggagcggccccagggacagcggtggaagagggggctgatcagccttgcccatcctcccagagtcccagtctggaccctgcacccgactagcacgggcagcctggcggctcctgccctggtgacagcgggcgtgtgcagcattgccaggagggaagcaggggtagctgcagctgctcaggatcctgcggctcctcccaggtgcaaacacggcttttgcttccaatgcccccggcggcatgtgcatcctctccagggaaggccctggctacaggtctcctggcctgcggaatgggaatgattccaggacctgcgatggtggtaaggacttccttaggagatgaagccacccaggggtcaccagggccaggcagaggctgccaccatcgcgttctaagccctgctgtccacactgccatccagaggcccagaactaggctggaggaaggacttgcctggaggaataacccaacctggtcagattaagaggaggcgtagacagtgacggggtaactatagagcctcaggccgggttaacctcaagtccagcttcctaggcccaggcagccctgcctgatcccgcagtgcgtgagaccacacagagagagagcgggatcgtgggcccaggctcctgaccgtgctggataaggtgtgcaggcagccacgccaggcccaggcaagaaggagcaagcctggagcatgtactgaacaggggtctgtgagtcacaaaatgtgacgcagcagagggtatgtgggggagggcagggaaatgcacacttggattgggtccccaaagcctccctctccagcaatgactcagtgtctctgggtgaaggagcaaccttctctgggaggcagggcaggaaaccccaagagcccagggggagggcaccccaccttcctgctccagccccacacagcggctgagagccccaggcacagaaggggtagggaatgttgccaccacccccaccacggaccccgctgcagcttccaggtgatgccacaggccctgaaatcaggacacccttgctgtacatgggggtcatcttgaggttctctgccaaggatactgacctctatgcctgcccccaattctgcagctcaggcacctggcttcaccgccaggccttaccatgtggagaacagggggccggggtggggggtctgggagccaaggaaggagtgaagccctccagacaccaacatcgcagtcctcgccccctccctacagaccccatccagcccaactccccatgtgcagctaaagccacgcgccctcctaccatacaaggtgcaggcagccctcccgccttcttcaaagaggcatctgctccggctcactccaccctcctcccccagtggcctaactagtcgccgggttccaaccctatcccttctccagaggtcatctggccccacccagcagcccaaaccagtagaccggccctgccccatcactttggtttctccagcatccaaagaacgtggagggtcacccccccaaaacagctgtcaaggtccaacaattaagccatctgttgccgctccctgggactgggagaggtgaggtcgagtttcttggcgagtttcctgcgtgcagcccccacaccacaaaagcccccggtgcgagccggagcccagcgcgagacggctggaagggcgcggggagggagccgctgcggggtgcaggcggggagaggggcggcggctcgaggcgcggccggcgggcggagggtacggaggcgccgggagagcgttctcggggcgcgctgccagggtgcaggaagccggagcgcgcgggagggagcggggagcgggatgccgatttcggctgggggcggggaggcccctgattggggcgcgggaggcgtgatgtcacgtccggcgggggaagccctgcctcgcgcaccctccgcccccgtccccgcccccacaggtggtgccaccgccctgggcgctgggcgtggggggccgccctcggggaccccggccgcggccccgcgctgcccggctccgccgcctcccgccggggatcgatagagtcgcgcggccaggcgggccctctgggtccctaagagccagaggagcgcccagtgcgccccggcccgcgcccccgcgccgcgccccgccccgccccgcccggtgctcccagtccctcccccacccctgcgctcccaccctgccccgcccctctcctctcccgcggccgcctaggggccgggccggcggcgggggaggcgccgagccgggactgcgctagcccgccgcgctctgggctgcccgagcgagcgttcggacctcgcaccccgcgcgccccgcgccgccgccgccgccggcttttgttgtctccgcctcctcggccgccgccgcctctggaccgcgagccgcgcgcgccgggaccttggctctgcccttcgcgggcgggaactgcgcaggacccggccaggatccgagagaggcgcgggcgggtggccgggggcgccgccggccccgccatggagctccgggcccgaggctggtggctgctatgtgcggccgcagcgctggtcgcctgcgcccgcggggacccggccagcaagagccggagctgcggcgaggtccgccagatctacggagccaagggcttcagcctgagcgacgtgccccaggcggagatctcgggtgagtgagggcgcggcgccgggaacccgggcctggccgggctttgggctccggaccctggtcttcccgacgcggctactcgcccccggcgcgggatcctgccgcctgcgccccgccgcccgggccccgaatggctccctgcgctgcggctcctctgcaaccccacggccctcgcctccaagccccgcgccgcactccctcgccagggtctcctccgccccgctcggtcgtcctccgcccctccccgccccccgcacgccggcttcttccctgcggagctgatctcgccgggctgcgggctcggggcgctcctcccgggccacggctggagctgggcgtcttctgcccgccgctcggcccagcgcgcctgcaggccgggagtcccagccccggggccggctgtcggggcgctgtggggctcggcgtggccgggctttcggggcgccgctgacggtggccgcggaccccttctgctctgtacagacctctctgggaggcgtctccggtcctgcccggggattctcgtagggtctccagcaaaggcagcctaggtgggttttataagctgaccccctcggggggtagtgcggaggggtggggagggagctgggcacttatccgcgggcggaacgccgccgcctcgtagagattcctgtcgaagaacttgtacgcgccggcccccgcctggcgcttgggcagcctcgtgccgcgagtccagctgcaggtggtcggcgcgttggatcccgcccaggggccgtgtcatttctttgtaagaacagcggccctcttggcgccccctaagccctgcagccgcctgcggctctgcctcttccctccctgtggtcccggaggagctttggggacagaagtgtacgggtgggtggaacggtgggctccgtgtgctaaggaactcttggaacccaagcttcacctttccacgtgtgggaaccaacctcggtctgtaccgcgtgccagggacccagtgggcaagaacaaaacagactaggttcctgctctggggggctcctctgaaaccaggggagtgggagtgcgggtggagggctactcagatggggactcagcgcagaaatgcccatggtcctggggattctgagcaagaaggatccgtgcatctgggtgaggggggtctgtggccatgccttgccgcggggggcggagtggtgggaggaggcagtcgggctctggacccctgcccctccaggaggaacagaacccacagacagccccttgcccttggtggatctcccgatgcccccagcctgaggttcttgtaagggccccctgaccgccccccacagaaggaacagaacccgcagacagtcccttggcggatctcccgatgccctccccaccagcctgaggttcttgcaaggacccctccaaagtccccaggacaggccttcctgtgcctctgcagaggcaaccctgtcatttccaggctgcccccctcac

SEQ ID NO: 39383 - DNA, 1913 bp, Homo sapiens
tgagccatgtgttataatacatagaaaaaaatgcaccaattacaaagcgggccacaaaaaggaataaacgtaaagccgacaacgcagtcactagggaaagggtgaagacacgggaaccacgcagcccgccgtccacgtgcaccgggtagccacggggccctagccgaacgacgcggacgcgaagtgggcgggcccggccaagccacgcctccgcgccagacgccgcagtagagcgggcagggcgctgcgcccaagagccacagacgcaagcccagtgccacaggccgcgggggcggggaggacggcgcccggggacagagaacatgggacgcagagcggtccaaggccccggcgccctggtgaggcccaaacctcccgccatgccccggccccaacgagacccaagccccctgtcccggcccagcgcccgcgggggacccaagccccagcctggtccacctcggaggcctctaggacccgggggcgcccggcggcccgcccggctcccacaaatagactcctgggcgggcgcctgagcccccaaaatagatcctcagggcccaaaagcagactcttcggcgggcgccatgggaccggcagaagctgggcgccgcggggccgcctcgcccgtacctccaccgttggtgcgcgtcgcgccctcactcttcctcgggagcgcgcgagccgcgggcgcggaggagcagctggcgcgcgcgggagtcacgctgtgcgtcaacgtctcccgccagcagcccggcccgcgcgcgcccggcgtggcagagctgcgcgtgcccgtgttcgacgacccggctgaggacctgctggcgcacctggagcccacgtgcgccgccatggaggccgcggtgcgcgccggcggcgcctgcctagtctactgcaagaacggccgcagccgctcggccgccgtctgcaccgcgtacctcatgcggcaccgcggcctcagcctggcgaaggccttccaggtgggcgggcctttaggggggcggtgtttcgagaggggcgtgtcttccggggacgagttttccgggcggggccggcttcgggattgggacaggcacttccgggaggggcgggtctctctcgtgagggcgggcttagggaagcagagaggcacttccgggttgggcggggcccactcttacagctgggcccgccttggcccctgctggccattagcgcgacttggggttattcagtacacttcttgtttgcagatggtgaagagcgctcgcccggtagcagaaccgaacccgggcttctggtctcagctccagaagtatgaggaggccctccaggcccagtcctgcctgcagggagagcccccagccttagggttgggccctgaggcttgaagcttgaaggcctgctgcctggaggaaggatgtccctgcactgatacagaaggctggtctttacccttcttcctcactgtcatatcgagttttcctttgtgtgtgtgtgtgtgaaacatagtgcttttaattttatatttccggctgaggtgatgcacaaattatcttacagacacaaaaagaaatacatttggtaaaacatcgaagacaaattaagaaaaagcaaatagggatcctccattatttacactccagaatcttgagtgtttgggggtgccggcgcattctaccagtctcagggaaggacatgagtacagactacagtaatcagaatctgagtcataggtgaaatcaggaaaagcaactcttcttgtgtttatttttagtagtgtcataagaacggactagttcttcctgcgtgaccacggatgcttctgtttgagaaaatgcatacccacgtgggacatttagatcaagaaagctgttgatgaagacattgttgaagggcaacttgggtgattggggaattattctcttcatcag

SEQ ID NO: 39384 - DNA, 3783 bp, Homo sapiens
tctatgccgtgtcaccagccggcaccacccatcgctgtggaccgcggcccccatcacaagctggtgcccagggcagtccccatctctgtggagggcttgcctgccgctggcctctctagataagctcctcatgactcatgcaaccttttcatcaacccggaaggaagcagccgccggtcgccactagtgggtgaggaacagtggcttggagaggagggaggacctgggtctgcggtttcccccgcggctcagccctgctcacaacaccctgatgaaaacctcggctgcccttgcctcagggcagggcacaccctttacctgctgacctggccctggtgacaaggggacaagggcagcagggccccggccaggttgaaggacacctgtgggtcacatcagacctttttagcccaccagctccatctgagaactggtagctccctggtcctctgtcggggttgggcgcggccctgtctgaacactgcttcttcctggaagctttgctgccctccccagcctgctaaaacgctccatgcccacacccacctcctagtgggtgaagccaggaacccctccctcgggtgcatcaggggaaggctggggtgcagatgccgcgcagccacttcactgcgctgatcaccaaaaagctggagtatgaaaactcctgtgggagaaagccagggctgacagtcgcgacgtccaggctcctctgccagggttagagaagtcagaggtgtctgcccaggcctgcatgcggcgtagcctcccgccgccagggggcgtcaggccggcgggggcggggcctcctcgggcggggcggggcggggcggggccggcgcgagaggctcccgcggctcagttgcagaccccgccccctcggctcagccgcgcctcccgctccatggggtgcagtagggcagctcctcacatacgtgcgcggtgggaggcgctcccttgggcccccggggaggaggtgccacagcaactctggactcctgtgtgcagaactggccgcggagaggtgcccagggcgagaccccaacctctgctccctgagcccaatgcggggctctgggtggcaagaccccaagctccctgtggtgacttgccccccggacggccaggcccagctagtgtggcaccgcgtgtgcagaactgaggttcttccagccaggaacatggcccggtgggctctggagagccccgtagaactgggggtgccatcgaaaacagtctgcccttggcactgcagggccccaccgggcagggcgctgggggcagtgaggagggtcccatctcagctgtcttccctgtcagccttggatgcgaggctgatccacacctctgagtgactgtgtaagcctaggggttcctggtgagtttgggatgggtgccccaagatcgtggccgtgtccctaaagagggcacgtggggacctgaggtcctacgggaaaactgaaatgatgcctcagtgctctgtcccgcaaacgtgaacgcacactctccctctcagccttccttcccgccccacggaaggagggtagacacagagggttacacaacgaggagactgagtccagacacaggaaacactactcagggctgacgctgagtcgagtgcggtacccgagtccagccctgcacggccacacctcaatggagcagaagagagaggtgtcctgggttcctggatagttccccagccccagaagccccttgtccctaggaatttgaattcttacttgatgacaacagcgacatcatggtggcccctgttattccacagcctcaaaatttaaccgctgtgagctcactagcagcttctgccaggcgagcaccccttccctcggggctcaggctcctggacaggctcagccttgggcagccttcgccaggtccacagagaatggcgttgggaagggtggacctggcggatggggtggggacaggcgggccagaccctccttcgtaccccagcacagggctcccaaatgagaggtccccagcactgcccagaggaacttctgcgattgtggaaatgattcctgcctgctttgtccattagccactcctcccaggaagacacacacactcactcactccacctgccacgaaggaactgaacttctaactgtatttaattcgcatctaaatggccacacgtggttggtggctgctgtagttgacagcgctgcgtgaaggctccggcgcttctcgcaccgcagggcccacagcacagaccacacctgtagacttggaggagtggcaggggtgccaggagaatcctgccctgcccgtagccccggatgaaaggatgacattgagttcgcgacgctgcgctcctcgggaacacgaaccacacctggaagcagcctgcccctgtggccccaaggttcccgggtcccttcagcggctgccccaggggcctggccggcagtgtctgggagggagcagcgatcccgcctcctgggatctcccgggcgccgcccggggaggaagcgaggggctgggggtgctgctcacccgctccgcgcgcctcggctcccaacacagcgccccggccccgcgccgcgctcgattccccggctccccgcgcccctggctcctggccctccccgcccggcgccccggccccgcgccccggccccgcgcacagcgcccccggcggcggccgagcggagcccgagcggggcggcgcacggcgcggggccgggccgggcggctcccggcgcgacttcctgttgtgcccgcgccccgccgccgccgccgcccggcgcccctcgcccgcggcccggcgcggccgccgcccatggatttcacctagtgccggcggccatggccgcgcagtgctgctgccgccaggcgcccggcgccgaggccgcgcccgtccgcccgccgcccgagccgccgcccgccctggacgtggcctcggcctccagcgcgcagctcttccgcctccgccacctgcagctgggcctggagctgcggcccgaggcgcgcgagttggccggctgcctggtgctcgagctgtgcgcgctgcggcccgcgccccgcgcgctcgtgctcgacgcgcacccggctctgcgcctgcactcagccgccttccgtcgcgcccccgccgccgccgccgagacgccctgcgccttcgccttctccgcccccgggccggggcccgcgccgccgcccccgctgcccgccttccccgaggcgcccggctccgagcccgcctgctgtccgctggccttcagggtggacccgttcaccgactacggctcctcgctcaccgtcacgctgccgcccgagctgcaggcgcaccagcccttccaggtcatcctgcggtacacctcgaccgacgcccccgccgtgagtccggggcgggcgccggggctgcgggccggtccgcagggcgctgctagcggcctctcgccgcacggccaggctgagggacgcgaatctgcgccctacaggtgcccccctccccccaccccggtgattcccagctgttgcctgtgagcccttaggaccctcggatagaagccggagtcctgcggggacacgggacagcatgtcactccgggaagcctcccgttcaggtgtctggtccctgcctggggacatgagcagcttctgtcacccaccgaggtgtacatctgcaggatcctggcaccaagggttgggctggagtgtcagctgcggaagggcctccatgtgaccagtgcgtgcagatgagtccaagccagaggcagaggaaagggccatggagattgtgatgctcggtttggg

SEQ ID NO: 39385 - DNA, 1933 bp, Homo sapiens
ttttggagaactgagatttccattttcccaggcgataggtgtcgctgcccttcacagtccccaaggatgtggcgccaccatctcagtgccacgcacacctggccaacatgccgtggcccagaagcagcacgtctcttctcccaacccgctggccaggcccagtcacagccccactccacacatggcagccaggaagtggggagggcaggaggtgctgggcaaataaccctgataccatcactgtccagtccccagtcaccaaatgtcccactcaccctccttcctgttctggatgccccgcccctcccctcccctcccaaggacatatgagtcccctccagtggcggtggcaactctggtctagggtctggggccgtctctacatgtgttgcttcatgtaccttcttcacatcaggtctgggggaggcgccaccccatccagagacctaggaactagaagactgccactgcccctcacacccagggataggatgactgcagtaacccctgtgaaagcgggtatggagggcacctggcagcccctgctgcatggccatctaaagtcttgccaggcaggcacagctagggcccctgcctgggagtggacaccccactcccccaagtcatgttctctgtggcctggggctccagccttgggaggacccctttcctgtttcttaaccatgcttgatggtgtcctcaaaggagccctgctcagtggcagaactgctttctcagcctcttccccgccaaggttgttttcaagtcccagcagtcacagactttcatcctgggctcttctttcttttgcaattcagctctcgaaatgactctgtggtctgcgggtgactccactccacgtgcctacagccacgcccacagcgccacctccggacgctgctgagctgcgcacctgtgcctgacacctggctttgggaaactcagcagcagtgcccagcgtcatgaccctgggggcaggagggcatctggatccaggatggcaccctcaccacaatctgtcttggctctgtgcccgcccgtggggtacacaggagggctctttcagccctaagtccttgtgttcctgacctttgttcctcttccacccagcttgcaagtgcagaatttttttttagctcgtcgcttccctgcagtcccttgtccaatgcagcctccggccgatactcaggccagtgttgtttcccaacctctccactagatacgcacacttagctcacggtctgcctcatgagtcatcccagttgagctttaccaaatgttttgccccacctaacagcctgcccacattccaaatcctggcaggtcgcacgttttattagcacagcacccctctcctagcggccagcttctctattaggccacgttatgctccagccacacaactatgaagcgcagacgtctcacacaacaaagctttctcatgctgcaggcccacctcaggctggcaggggaaggggggattctcttcaatgtgaccactctcggacccgtaccgatgaacagagatctcaaatgtttccaggcaccttgccagggataagagagctgttgaggggctcacactggcagtggaagttctaaggggcctacaaccacaggggctgcaaccccaccatatgcacaaaagcgggggcagatggcaaacagcactaatgacaacgacggagctgaggccagaatgtgagagagatctgcattttggggattagggcctagtcaggcaggtaggagatgatgttcaaaaagggaaaagaagcgtgatgaaagactggtttctacagagatagattagaaagctgaagcctgaaaaaacagtgaaggagacccatgcaaatttctaggccctggaggtccaaataaggttttctaagtccctcaggccatgacaggttcagtccagacttgtctccca

SEQ ID NO: 39386 - DNA, 2407 bp, Homo sapiens
atggtgcaaccaccagcctagcaaggaatcagaaacatcttccggaagagtcagcaccatagagggtgctgaatgggcaatgaagcatcccggagatgaaacatctgggcagtgaggcatcccacaggtgttgggctatgcagtcactccctttctcagaccgaggcaagtacataagcactctgggcccctaatcaggggcctggggccaggtgggatgaaaacagcagtgtcctgccacctgaacaactgctactcacgcaggccccacctggcctctcagagggaggaacctgggactcctgaaccagattcagtttctccttcaacagccgggacttttcgctcctgactgcagaaaaacagcttcaatgtgaccatccttgatagtccgaggctgagtaaaatggcctgaggaggcaaaatctgaaaagctctattaggtggcaaactgctgtcactagaagagttgaggcccccttctcctcccctgcctgaccgccttcattcctgggaatggaacaggttcttggggcaagggtgaatcctcgagcaggtcccaggatcactatcctcacctccccgcggcactgaatggctatagctgtaaatgtgcgtccacggggtcactgtccagccaccaggaccaggtgcctggccatctggggaatcggaaaacgctcagcgggatgctctggccacctcccctgcccccagttaagatgtagagcgttcaacctaaaatgcctagaaacaaagcccaggcccgggaaggtcgaacgagtgcgacgccgctccctcaagctcttccctcggagccgtctcatttcccaaaactcccaaacacatcacagagagaggtgttgagccaggtggtcactcccttttccagaaccacagcaagaagttgagcctgctgggctcctaacgaaggccctggggcccggtgggatgaaaagccctattaggtagcaaacagctgtcactagaggggttgaggcccccttctcccctgcctgacgacgacggcggcaggaactcgaccggcgccggacagctcgcaacttgccttaccaagcgtaaatctcggttcctcccaactacccgcggccacggcctccgcagcagagcgccggaagcagagacgcgtttcgggaggaaggtgcatgctgggagcggcggcgcatgctgggagctgtagtctgcgacgcaactcggccgaggtggctccctggtccctgaagctcccagagcccgcgtgttcaggcggtcccgacaccccggcccgagcctcaccggctggaggactgaacgcctgccggccctccgggtatgagcggaggccgggatagccctgggctccgccgcccccggaaggaaaaaatacagtgcggtccgccgcccgaccacgaaagagcggagctcgggagccccgccccctgggcctccgacgtccgtggcgctttccgtcgcgcgagtgcgattgggccgcctgtcacgtgacccgagaccccacgcccggttggctgccgcctggttaccaatgggagactagcgggccggcgtactggcctggtccagcacctgcggggccctcgggcttggagggctgggccgggcggggaacgggcggggcgggccggaggcggcggcggctgactcgccttctctccggggctgcgaccccgaggcaaccggctgcagatgggagcccgcggagccgaggatgcgggcgggccggggcgcgacgccggcgagggagctgttccgggacgccgccttccccgccgcggactcctcgctcttctgcgacttgtctacgccgctggcccagttccgcgaggacatcacgtggaggcggccccaggtggggccgtgtggggtgcggtgggcgccgtttctggtttctgagatctccgctcctcgcagggagcggggcggggtgggcggccagggtagctccgaacgcagggtccgccgttgttctcctcagaagtgggcgcccggccccctcttttcgtacctccttcatacccccgcccagaacgagcaggactcggcgctaccctaaggacgctaaactaggtcgtggcctccgcctgcgagagctccaatccaggaggctcagagcgctgcgagaggcgttttaacagagccccaaaccccgccccacctgtttgctttcgccctgaagagcgtttgtgtctgctcctcccgcagagagggccgctcgtgcccctctgaagtggctaggccgagcccacaaagcaaagcgtgatagaatttcagttttggattttgtgcacctgcctttccagttgtaacacctagaaatggcacctccaagggatgccctggccgagtgctgtgttcatatttttagaaatggtttatctgctgaataaga

SEQ ID NO: 39387 - DNA, 1340 bp, Homo sapiens
gaggaggacggaagcactcacactcaacttctgcccccaggccaacctacactagctctgccaggtcggaccgaagtgcacctaatggacagctcagctggctcacaaaactgctaggtctggtgtgttcaaatgaagaggattatttatgcaggtgatgattacgggataacagttaaatttactttcaaatgcttccaatttctgcgtcacagcggagctacaaggcacgctttagagagtggggcctctcctcatgttttgagactccaggaacagtcagcagcttcaccggacaggcagggcaggctggccaggtcacttccccacgacatcctctgaggggccccgcacagtccccgccatcttccgaggggcctggcacaccagccagggcagccactcccaattctattgatctgagctgcagctgagaagtcaccagggacggtggctcctgtgagtgctcctggcaggtggacatccacccgcaccctctcatgccctgtctgcagtgtcctcctggggcttgtctgggggcaggtcagccctctggaacaccctggcccctcaacctccaggagaaaagcccatgacccccttcctccgtcaggcttccctgcgccaggcctaggggacatccttctctcctgagctccctcagcccttcactcagatttctgacatagcttccagcactttcttccaaaaccaccactggtttgctttctccaaaatgaaaacagctttcctagagatttttcctgattattcattcttcggccactcttttccctcccccgcaccctgctgtctcccatgcacgtgcacatccagtgcacacaggacctgcagtgagtgcccatctgccctttacccacacacggcctcactcttgggctccgtgctgacctttgcccccttccccacaacatcgtgtggcactttctcacagctgtaaacacaaactttcaggagcactcaggtccgctgccgggatagacttaacatcccttcagcagctcccagctggcgggcatttgggcggttgccccgggcttggtaaaacagcaccaaggtgaacgtttcaaacgcacacctttgaccacttgctggataaccttcgttgcatttcacgcaagcagcctggtgaggtcggcctcacacgtctcatatccatcaccaggccgtccccagcaagcggcctgggtgcctgtccctgccaccctcacaacctgccttttgcttgccggcaacctggggccctggctttcttggtgcgtcttcggctacagtgggcaggacactgatctcatgtgttgtttgggctctgtggctct

SEQ ID NO: 39388 - DNA, 2570 bp, Homo sapiens
ctcctgagtcctccagcatttaggaggctgtgccgactcccagggaggtgctccacataccccccactcctgtcggggaggaccctcgggctggccggggtcgcatggggaggggagagtgcgtcagggcggccttggcccaggtgggagaggcggagccggaattttccaccacaaccctcgttactgtgatgacctgtggcccctgacctctgccctgtcaccccaggggagaacttgcctccacttcacagataagaggtccagggacagccctgcctccacctggctggactcctggctttgcacgggcaggctgtccacacaggacttggttttacacccagtcctgggcataggtacctgtgccgagcagggatgcagcagcaggctcagcatgggaggggttgttccagggatggggtcacagcataggcatgggtggcagccctcgtggcacaccagacctgggtacagcacccaaacaggtaccccaggacacagcaccagaacaggtaccccaggacacggcttatcatcaggagccactgggtggcatccgttctgcaggaccctcacctgccagaaccaactcctgccattcaggccgtgacctggagggggcaacttgtgccggacaccctcaaggcaccactgcattacacatgcacaggccccacggcccaggggtcccgccctccagttaaggcagtgggttttacaccaatcctcccctttttgggacccagctgctgcctgttgaaggacaaatgccctgatggccacctgcagcctggatgtcccaataggctggtttagccggggttcaattaaaatggtgcatggtggggacgtgtgactggcagaccgcacagcatctccctacagcacctaagggcgacaggctcgcctgccttagtgagacaggcaccagacccaaagaaattgtttgcattattttatatcagttataacaaaacaagttaaacttttaaaagatactcagttcctggccttgtgtgtcaggtagcaggccggctggttccgctggtgacttcatctggggaactaagacaaccccaggtcagtcctgcccaggagggcaaggcaggccagtcccgggtcctgacccggacttcacgccccatcctgccagcccaggcccaccccagggcccagaaaggcggctgagctgagcaggtggtgccctcagctcccgtttcacagctgcgagaggccactcccagggcactgctgctgctggccttggctggaacggcctggccacgtggccaggtggcccttatcccctggactcctgggtgacaaaggtcagttgcctgccctgcagcttgctgtggttcgtagctccgaagctcccaataagctctcggcctgaggaaacaccctcccttggtggttgcaacagcttctcctggttaccttgacaaaggatgagcaaacaacaccttccattctggaacaaagcacacacacctccttggctttccaagggctgcccacccaccctccgggaccagtcagccaactctgtgtccagatcttctatgccctcgcacatgccatgccaggcacacagagctgcataaagggggtcccgccccagggaggacaggcagtcaacagatgatgcaacagatggggtgagtggcctggtggcagctgaggacattggacaattgggatgactccctggggagtgagggggagctgagtaaagacaggagcaagcactgctggcagagagggcagcatatgccaaggcacaggcgcatgggtttgactggagcagaggggagtgtgcttgggggtgggcaggaggcagagctgggaaggccccgtgagctggctgaggacagctaagaccacctggtgaccatcaggcaggccatccatggcaaagctccatatttgaggaatttggaagtaattaaacttccccatcatctaaagttggcacctggttccaggcctcctttcaacctaacatttataagtaactagaatttctagacatctccagaatgcgtggctgatgaaaatcaatgtgcaccccctgccatcactaaggcaccagaatgtctacaaatgtagcatttgttgtgcaaatcacccttcagctcccgccgtggggtccagaaatgctcctaaggaaaatccctggtggtgccgagtcctccggcagaggcacccactgcacttctctgcagcgttctttcttcctaataaaactttcctcttccaaacccatactgtcattggtaagttcttaccagccctcgagtcggccccttcccgaggctggggctccgacacctcgccaggcacctcggttgtgcgtacaggactttactgggatttctcccttcttttccctccctgcttcccttgatggtctggttctttactcggaaactgagggctctgtccaagaccactcttcagtgggatcctgaagccctagagaagagatatctttccatcactgcccttaggggtgaggaattagccagggttcttttccgtttttgaactgccagggaaccagc

SEQ ID NO: 39389 - DNA, 2542 bp, Homo sapiens
ggttccatctggaagggcgggacaacttgaattggggggcttccaggtcataggtagatttaaacatattttgattggcaactgactgaagaattattatcagcagaaaggagtgtctgggttatgaaataggggttgcagggagcagatgatgccttcaggtagcgggatttagagagaaaatagatggtaaatgcttcctatcagacttaaggtctatgtcgatgttaatgctgggggttatgatgtggcatggcctgaacgtcttccgggttaaagtttagagcaccctggcggacagggaaccccattcagatggttgctggggggccttcgaattttatttttggtttacaagccttcccatcagctgcgccagggtcagcaaaccacagtccatgggcccaatctggcctgccacctgctttttgtaaataaagttttataggaacacgcccacacctctggcagctgctttgcaagcacgcagcagggttgagttgttgcaacatagaccacagggcctgccaagcctcaattatctgtgctccgaccctttaagaaacacttctctcacccctgagctaagcagaataagaggggctggacgtgcaggactcagagtgggagcgaggagggctggggtgaggacagctttgtcacactctgtttttctgtcactcagccctgggggctccctctgcctgagggcttcgtcccctgctgcctggccgtgacccgcagcacaagcacagataagcctcagggaacaaaaggcagggctgccacggaagcccatccaccaatcctcacctctcacctctgtgtccgccctgctgggaaatattccaggctttggccaaggccagtgcagccccaggttcccgagcggcaggttgggtgcggaccatggcctctcacaagctgctggtgaccccccccaaggccctgctcaagcccctctccatccccaaccagctcctgctggggcctggtccttccaacctgcctcctcgcatcatggcagccggggggctgcagatgatcgggtccatgagcaaggatatgtaccaggtaggagtgggggtcactcggggggcctgggtctcacccatgttcccacccacagatcgtggacgagggaagggggtcactgcctcctcacttggggaggcggggagcctgggtctcaccctataccacccgcatgcagatcatggacgagatcaaggaaggcatccagtacgtgttccagaccaggaacccactcacactggtcatctctggctcgggacactgtgccctggaggccgccctggtcaatgtgctggagcctggggactccttcctggttggggccaatggcatttgggggcagcgagccgtggacatcggggagcgcataggtaagggagaggcccaggtggggatggccctggatccatccttcaaggcctccctggcctccctctgtttgaagctggcagcccccgttcctgggtgagcgcttacccaccttgtggccctgtgcgcacgaacctcctgccagcccactgcctcctccaggcggtgtcgggcactcatgaggcctgactctgatagggctgggagcagcacaggtgccccgatccccccagtctccttgagctgtttctggagcatgtgcaggacggaactacagggaagcctctggtcccagcacacactcctgagagccccggccgctgtccagggccccaggcaccagctctgctttgtgacagggtggggtttcagaagctgaagcctcccctcaaatctcagcagccttccttctggaatcttgatgtgatacacaaaatatggaggtatgggcagagtattcgcctccggagtacacttttctgggagagacacaggagcaggagtgtgccctgggtttaatgattgattgtggcattgagggacatcagcttggtgagctccacaatggccatgctggttaatacgcgaccgcaacagccaagagggtcccaaccccaagtccacaaacttttcaaggggacccagggtcggcagaggccaggaccccaagtggacatcagggcacgcaggctcagatgcctgtggtatatggcttcccttttccccattctgtccccttggccgcaggttcttcccctcccacaacctggccctgaacagcacacaggatagggcagagacagggagggggtgagggcctgattcctggagtccccagctccaacagaggtcaaggctgctgcctcactcacccctcatccttcagtctgtcatccatcacacctgtggtgtgccagccctggaccaggtacactctttgtgccagccctgggccaggtgcagccctgactcccgggagctcactctctgcttggggaggcactggtcagtgtggcctgagaaagggcatttgagctgagctctgtcaagagtgccccaggagcgttggctccaacagcaggggggtcaagatggccctggctctacacacagagaggctctcattgggcagagtcca

SEQ ID NO: 39390 - DNA, 1529 bp, Homo sapiens
tactgaaagcagggacctggggagggccccagggacacggtgcctggggtggcagggctgtccctggggaccagcacagcagagggagaagctgcgctaaaacgctcaggcctgaggtcatggctgccacgcagcagtgcccagatttgaacccaggactcccttccacatctcccctgctatcgtgtacggattcgtggtagggtcgtagcctaccagcccattagctaggcaggcatcccgctggactggcctgccctgaggtgggactcacccgtcccgagcaaaccacccatctacaggcatcgacatcctgtactcgggctcccagaaggccctgaacgcccctccagggacctcgctcatctccttcagtgacaaggccaagtgagtgacccacagaccctcacctctgtgcagggctgggcttgcagggagctcaggtggcccgaggcgggaggggcgggagccaggcaggaagggctccccatgctcctccagcacctggcgctctcccgcccaccctctgggaggccaaaggcactgcgttcacagggagtggggaggccgggcgaggggagggctgcaggcgtgtgcagggtgcagagtccactgctctggaagttcccagcttcacagcaaggagtgaccaggaaaggactgagggcctgaggcccagtgccctgaccggcctctgccctggctcagcttccaggggctgccccaagggacaacgtgggccacacacagtgccccctgcagtcccaatctcacctcccgctcctggtgtccagattctgagccaggccgggcagggggtaggggaagggggccagacctcacaggcggttcccatccagctgcagcctggcaactggaggtgccgttccccagaacagagaggacttcggggagaagtcaggaattcggtgttggacgtgggaggtctgagatgccagctggaccacacgggagggtgaaggaagcggctgggtgtgagtcaggagcctggggagaggccggggctggcccctccatctggagttgtagagacggacacatttaaagtttcaagcctggccagtgtcccctggggcccgaaagcagtcacctttgggtgatgtgagaaatgaaggctgaccctgtaggaggggctgggggagagaaaggggcacacagagtggagggagctggccttggtgcccccatggcagggtcacacagctgggcccaagggccagcgggactggacagctgagggacccacgacccacccggtcccactctggcccctgagcacaaatgcagctggggcgggccctcctgggggccccaccccgtctcactcccgtgaaacaggacagccagcgagactgccctggccttcagcccaaactgagaggctggtgctcagcctgcttctttctccccagaaagaagatgtactcccgcaagacgaagcccttctccttctacctggacatcaagtggctggccaacttctggggctgtgacgaccagcccaggat

SEQ ID NO: 39391 - DNA, 1005 bp, Homo sapiens
ctgccagagagaggccctcagtgggggtgggggagagaggacagggccccgggtacactggctgcgggcagggccagggggatacagccccagggacagatgcagcaatggggcaggtgtggatgctcccaacccttccattgctgtgtgaagcagtaagtgaggcccagtgagtgggtgggctgggagaaggggaggccgaaggggccagagatgtgcccacagataggtgggcgtggatgtaaagtgagggttggcagttcctgcaggcttgtccagctcctatggcagggcaagagctgagcatgagcacttgggtgtgaccaggggttgatttggccactgcaacatccacactctcaggacactgcaacatccacactctcaggacacaggcggctgagagtggcctcaggcccagcagctctgcaggccacgagacaggaagtcccacctactttcatctgggtcctgtgtcccacagggcccattgccagccaccagtccagagtccaggaaggatccccgggctgcagccagcttcccatgaggttgcaaggccgtgcctgccacgtttgtcctcctgggtccactcataaagccactgcctagggctgggttagtgccagggtgcccctgtaagctaaatgccacccgcacccgcgggggaaggcgaggggtcaggcgctcacacagggaaaggctctagggtcgtaaaggtgggtggggggtgtgagctgggcagagaaggaagagaacaggaccagacagcagggcacagtcaagggcagaggcacagggacctggcagagtgcagattgcaggggcacatgcgcagagaagacgggccagggccagagtagagagcagctgctgctccggggacccacctggggtggccatgagagctggtggctggaggccgggaggacccgtgaccagaggtaatggcactgaggggcccagggctggagagaccacccctcacctgtccagagctgaggc

SEQ ID NO: 39392 - DNA, 1558 bp, Homo sapiens
gggggcctctgcagctcccagcatcctctgggcctttctctccttccctccgcccctttgagctcctactcaccccctgcagcccaacccaacgggcccatggcattgtcacagtcctagcctgtgtgctcatgacccctggcctgaaccacaagacctgagctgcctgcggccgttccagacacccttaccctccatcctgccccaggccctgtctcacaggccctgtctcacagcggcttttcaaaccctcttctcccatggcctctcaccctgcagttgagtttggggcttgggaaccaccatgcatccaacctcaaggggggctggaagctccaggtcaggtgggggcctgagagggcatggccagaggtcacctagggactccggacaccaggaggggcacctctccctcaacactgagccaggtggaggggccagccccatctgtggagcagcgcccggctggccacacactccaggaaggggccagccgagcagaccccaagacagcacagcccccacctgcttcctcggggttggggtgggttggaatccctggcccctgcctgttccttgttcttctcagcatctgatgttacaaagccccagaaggacagggttctgcagaatgtcactgtggcccaggaagcagagagaagggtgtgcctggactctcctgggaacccccagagggaggtgtcccagccaggtgacattcccagacactgggaggaggctggctgggcgggaacactgggctctgtgaggccccaccctgagattctacccaacagtgtcccagggccaggagggcctccgaggtcacggcctagggatggcgaaggccagcctgcggcaccacggcacccgcggccacattcccttgaccctcaggagccacggcctcacctcctcagaacctgggcaggccctcagaatccccccaactccgacttgggactcatagcagctgcctgccagtcagggctggcaggagggacacgcctgggtgcacctacccctgggccctggtgacagacaacccgccgagtcccgccctgggtaccttcaggtggccaaaggtcaggccgtcagtctggccactgtcacgccagctctcgtggttgacccggtcgaggatggagaggctgtccaggcgatgaccctgcagggagcccagctcccccagcagcctcgtgagcaggtagtcagtggaggtcctggggcccagacagacgcactgggtcagcccccgccgctgttggcccccagcatggggagcttctgagccccggaggttcgggccctggccagggtcgtgctgtgctgcgtctgctggtgggacccagccggaacccaggcttctcgggagctgctgtcatcggctgtgcagtgtgcacgcctgcttttcgtggagactccctggccctgaatacggagggatgtaggagcctccaggccagtccggccctttgtgtagacaggaaggtgcctctcagacctgcccaggttggaaccactcagcccgggggtgtgacagctccactcatggccc

SEQ ID NO: 39393 - DNA, 1907 bp, Homo sapiens
cttgatgccggcctctcaagctgtctgcacagttgggctcctccctgatggggacatggtggctctccagggcttcagggctggacactgccctttctacagcatgcgttgtttaaatgactccagggcaccatcagtgtcctgcaccgcgactggctcacaaacggggctgagtggagagggtggtgcatcacatgggcacatgggcacagctcccacccaccctgtgggtccaaggtgcagggtggggtagtcctggtggcctgaggccagagtccccgcggaagctgtgcccacctccctctggaccggatgcttttggaggggctgcctccagctcggcatccatgggccctgttgcccactacccaggcctcctcatggccccttgaccccagagccccacacccaccccctcccagctactctcctgccacccttgctcatgcagcctcagagtggccgccaagatcaaggagagccagaggtcaaggtaacctgtgggtcacccagctgtagggacaggcctggaaagccgagccggtgttgccggctccacgacccatccacaagctcccacctccagcgtcctgggggactcgagcttgttctccttgggaagtttgttcaccatcccaggctggatggcgcagggggaggggtgggaagggcaggtgtctttggacttccatccgtggagcctgggggacagccccttgtccctctgctgtgtgctgctgaggccctgcaggaacagggaaggtgcccacacagccacccaggctggccctgcagagtgggctgcaccagctgtgggcccagggttctgatgccctcacagcccccttctgggagtaggcagggggcccccatctgtgaagtggggaaggcaggtgctgaggcctcaggggtgaaccccagagcagggtggcccttcccaaggactcactgccacctgcagaaggccccgcagcccagcctgcccagggaacaggggccagcaggtcaggacagtcacgaaagccaccagccagcttgtccacaaaggaccacctgccctccagagtagggccagccaatggggtccagtcaccagcccctgctgctattactgaagggggcccagcgccatggagccagggtgttggggcctcccgtggacgctgctgggggtggaggagcagggggcttgcatcagccctggttgcgacagcactgcccggggacgcagagccagctgtgggcacagtgcccaccgtgagtccctggagcctgaggagggggagggaaggaacagctaatgagttccaggaggtcagctgtgaggggcccacaaacccataaaccctttattggtgtctcaggaggggaaacccggatgtggccgtttatttattttggatttcacttttctcttctctttataacatgcacttccaggagtgtaactggatttttaaagaaacaggacttcctttttcagtgcaggggactctctgtttttctcagtcctgaagaagaaaggaacccttattttttgtaaagttccaaccactgaccctgtaacaaactttacccatgcaaattatcccctctgtcttagggcccgaaaccaggcctgctccagccctgaagctaagagggcaggtttgtggtgtgccaagtgtgtgcactgagccccaggtctgctgcccaatcctgggccagggccagcacccgacagagggcattggggccaacagaggactgacctggcactccagcccaaggctgtcacccctgtggacacagccccagcaggcatgaccctcggggctgggcacggcagagcctggaggcagcctggttgggagagcagggcctgggttccaggcctgcctcagcgcctgcctggcccaatgagcctg

SEQ ID NO: 39394 - DNA, 2700 bp, Homo sapiens
tttctagaaaaaagacaaatagaaaagcgttctccctgattcccgccacggtgacgcctggcagctctgttcccaacgctgctacatggggccttgtcctgactccacggcctgtgccagccagaggtgggagcagccctccctgaccagggaggccagggctgggctgaggaaggggttaaagcatgttcttgaggccccacgtatgggcatatgctgcctccgtgcatgtgaataagtatgcatgtgtgcgtggacgtgtgtgcatgtgcgtggagacatgtctctccttgccaggctctcaccgagagccggcctcaagtagggattctacagttccacgccctctctggtgcctccctccaaagacaggaggccttgacctttctggccctggaaccatggctgtgctgctgtcctggagctctgaaagctgggacggtgacctaagggctaactgcgggacagagcccttcccctcccaggcccagtttgcctctctgcaaacagaattgccaccccatgcagggtgggagaggcgccaggggcaagctttcaggaggtgccagtgcagggtcagctcctccttaacaattctgcacccggccctgacaccaagtctaaagggtcatgaacctctgagtgaaaacaccaagtgcaggatctgtgagaaccggcaacacccagtcacacgcagagaaccctccgctgcttcttaaaaataacattgactgtgcctggctctcactgaaaaacaacacgtgctcacttgagatatttcagaagatacaaacgcaaagacaaacaaaaaaccacccagcacctcagtggtagatgcagttaccatcagcccggcctttcctgcttgtcttcgaggggtgcactcttatctttgggggccccagtgtggcacgcagccaacaccacccaacaccaggatctaagagaagagaccacggtgggccgggtgagttccaggaatcagaccctgccatgggcctggggacatagaggtggtcccggctgaggccctgaggaaggacagacaggcagcccaggccagcagcccaagagacagggggcagggctggcaggccacagggtggggaccctgaattcaaatactgggactcagagtcctgcccccacctgccaaggccggtgtcatgcacgcacttgcccccagggcctgagtgggtcagtcttccccacggagggtttgctttacccaggggtcgccccgaggtcccgagcctcccaggaatttctcctgatgcggccacgcagatgcaaacactttgttccatgcctcctagtctccggcccgggctcttcctcacacagacccaggcagggagtgggctccggggttagtctgcccctgtggctggaagcctggcgtccccatgctcagggctgggaagggggcagcacggaacgggttcattcaggcactgcctggccagggtcccctcccgccccccgcgtgatgacacgccttcagggcgggcccagcgtctcaggccttagggacacaggtctgtcccaggacggcactgagggcccaggcgcctccaccagggtagggacccagggcggagcatggccccaccacagggcgcgcgcccgcagagccctcaccttgcctgtgcccacgccaggggactgagctccccgcgcgcccgcgccctcccacggggcctggcgctttaagagacgcccgatttgcatggccccgcccccccgagtgaccgccgggctggatatttaaatcgtggccccaggggcggggctggccccgaacgcggtcccgcccggcgctttcctctgcggagctgcggcgagagcgcggcccggccgaacgggcgcgggacgcggagcccccgacggcgcggccagcgggcgcgcccgcgctccccgcaccccgcctggccctgccggccacccccgcgcgcagcctagtcccccagcgccctgctccgccagcgccccgtcccgcccgcacacctccgcgatgcggcacggcgtcgcctgggcgctgctggtggccgcggccctggggcttggggcgcgcggggtgcgcggcgcggtggcccttgccgacttctacccgttcggcgccgagcgcggcgacgccgtcacccccaagcaggacgacggcggctcggggctgcggccgctctcggtgcccttcccgttcttcggtgccgagcactccggactctacgtgagtaacccccgggctcgcggggcgcccgggaggggagggagctgcgccccggccgctgcccgccgggcccggactcccgccgccgccgccagccacttggcaccggggcggcccgaggtggaatgaggacagcgcttcctcctcggcggccaaggccggacagcggcccgcgggagaggcgcgcgggcggggcgggggcggcagccgccgggcaccgaggcgggggcgagtggagcgcggcgccccggcccctgccagacctgccgagcgcgtcttcccggcgcctgattcccaggggagagcaggggtcctggtactgccctggttttcacacatggcaatgtggccgtgggcacgggcttcccgggcctcagtttcccaagtggggcgccgggcctgcgaaggttgcagcccctccttgggccatttcagccccgccccccgtggacgccagtgcggcccagagccag

SEQ ID NO: 39395 - DNA, 981 bp, Homo sapiens
tccagacccacttgagagcagaaggtggagctcaatgaagggtctcgagctcagcgaagggtcactgggtgaactgagagaaaccacgttcacaaacgcgtactgcggacttcctgccgccctgggacctgtcactgtttgtccatgtaagctacagcattactagcagatgctaagatcgagtgatatcactggaaaagtaggtgaatcctactaggaaactttctactccctactaggacctcaagcccctcagccacacagcaaatgctaatatgctccagtgttagcttagaagccttgtgtcaacaagaactggctcctgagtcccaagcttggtgccacacagcaaatgctaatatgctccagtgttagcttagaagccttgtgtcaacaagaactggctcctgagtcccaagcttggtgccacacagcaaatgctaatatgctccagtgttagcttagaagccttgtgtcaacaagaactggctcctgagtcccaagtgctgtcacaggacttgcccattgggatgttttccacattaaatatcaagtaaaaagacttcctggtgctcaggaattacagttcgttcttgaaacattccaaagaggccaccacagcttttcccatgtggcttcttttaaaaactcaaatggcttccttgaaaatactcaaagtccacccaaggaaattagtaataatagaatcagaaaactgtcaggagcataaagatttctgtatcaaaatgaaagaagcaatcctgagttgctgaattacccatctgctaatgaaaccgggatggactgatcatctaaccaagtgcagactgaggattctacttagtcctccgactgggtacaacaacagcctaggttctagggagggtggcagtgaccgggatgccacaatggaagagaaaatgaaaacactggcacagtgaaatgtctcatttccaaacagttttgcctatggccaagcaa

SEQ ID NO: 39396 - DNA, 1520 bp, Homo sapiens
accccgtctctactaaaaatacaaaaattagccaggcatggtggcgggcgcctgtaatcccagctacttgggaggctgaagcagtagaattgcttgaacccgggaggcggaggttgcagtgagccgagatcgcgccattgcactccagcctggagacagagcgagactttgtctcaaaaaaaaaaaatgtcaactctatatcccacaataattgagcagagccacgggtccaggatgccaaaaccaggtcagcgtgcacggacctccgggagggctccacgacctggccgtgaaacactcggcggccgcggttcctctgcgtcgctgcccgcccgcctgcgacccggagaagcccgcgcgcccagctcgagcttacctgacggccgaacgcagccatagcgcggagaagatggcagcagttacggcgccggaagcagcggtcctcccccgtccttcacttccggcccccggtccgtcaccgacgccgttcccagcgccagcgcggtgtggtggatcgtgattccggcccggagctgtgctgagcgttcacggccccgcggggctcaggtgtcccggggccgccccttagaaagccggaaggccggagtcgcgcccgtcaccgtgccgccgcctctgccgcggcctcagccttcgggggcctcggtgtccggttgttcccgttgcactgccgtgtcccgtttcgcagagctctgggccgcgtgaacgaatgggtcgtcctggcccatacttgtgtttcagatgacctgagaattcctctcaagagtacaggtagaggggaactggttccttgcttcgggaacttcacccgagagcgcagaaatccttcccgaggcaggaaaaatggattccgttccatgtagagatatttaagattttattgtgtaaaaatctgtattcagcgtgaacaccggggccacctacgcacaaaaagaagtctttaccgcttttctttctttttactctcagccagtggaagatgagaatttgccgtttttaaaagacccaagtaaaatgacaggaattacggcacatttccctttataagcaagagccttcccaacttcgaggtctggttccctcttaggatgaaatatagtaaagttttagcccaatgtgtattcattcttaaatttcctctctcgacctaagagcgtaggcatctttcacaaggtgatgcttgtgaagaataaaaaggtgtgctttctcagctgcctaaatcctgccaccaaagccttaatttataagcatttcttgttttatctacttcattctggactgacataaaggatttgattcttgcatgggcacacatttacatatctgctttgcgccaggcatggagtggggtgccaaacaatttatgtaaaactgtcttttgacaaaaggattatgtcaaagaaaaggaaggttctaatccgtgtagaaactaaagaattggttgctttggcagagtgcagtggcccacgcctgtaatcccagcactgtgagaggctgaggtg

SEQ ID NO: 39397 - DNA, 475 bp, Homo sapiens
caagactccgtcccagaaaaaaaaaaaaaaagctacaaacagactgtattcccgtccccaaggaaacagagagagatgccaactaggatatttgccacacagtacaaggcaagtccagggcaggcattgattgcaaatacccacttccaccaggctgggtccggtgagctcagcagcggtagagtgggtggagccgggcaggctggcaaggaacaggcgggtcctggcggctgagtcgcgttggctgtggaggaggtctttcaccagccagcagcagaacagaggtgtggggccctggagctccacccgcctcacctcaaactgtatacctgaagggtgagaaggtaagaacgcacaggcctgtgctgacctggctagacagcagctttaggttagaaaagtccagtccccagaatgcaacagtccaatccccagcagctttaagttagaaagttcaatccccagaacacagacc

SEQ ID NO: 39398 - DNA, 2251 bp, Homo sapiens
cggcgccggctgagcccgcagggacccacacgcccagtgcaggaggctggcgggatccgggctggttctcctggagctcgccccgcagggccggctgcggtgaagagagcgcagggtcccgaggcgacccgaggcgcggggcctcggcgcccaccgggcaggctacactgaagggcaccccgaagacgctgggggcgcggggcccagggccaacggccgcaaccccgccgcgatttgggcacggagaggacgcgggctcggcggtgcgcgaagggcgacgggcgcaggggcgggagacccggggtcgggctggtctaagagtcgggcggcggatcctcctgggccaggggcgcggagccgcgcaggccccacagccgccctggggagatggcggagcccggcccgctctcccgagcgcaggtatctcacctggatcaggcgagggtcacgccaagccggctacacaccacggaaaggagcccttccgcgcttttatcccaccgaccaatcgcacagcgactagcaccgattgacaagctccacggaccagccacttgcgcgtatgggcgggactaagctagccagagtctagaagcccgcgctaagggttgctagggacgcaccaaacacccctacggcgcttcggaggagccaaaggaataatgggcgcctccgcccccgggccgggcagatgcggtttcctcccgactcgcgatcaaaatgggtgagtagcgcagagctcgcctcttggaggcctctttctgaaggcggaggacgcggggcggctcgttcatgggccgggtggctccgcagggtagacgaaggctgcagcgtccgcactgggctgggaacgacttgcaaggggagcccagctggcgccccggagccagccagctggctagcggccccaccagcgcaagtgccccgcacctgcccgcctgctccgagcgtcaagagaaggcggcatttcgcatgggtaaaatccgcgcggggacgccgggagaatgttgttgctcttgccgttcggcccattgtacagacgcagccagcgaggctcgcagaggtcagggatgcacgtaggactggcccgcaccttgcagccacggaaagatccgcctggcccgcggcccctccacgcctccgaggtcgagacagtgacataagtcaactctcaagcccagggcgtctctccactctgcctagacgtccactccgtctgcctgcagctacggctctgtgcgtcccgcttcgactccctctgctttccttcccagcttctcgcctccagactgttccggctccgccgcctgaaattacctgctctgggggaggcgcggcgcgcggcctcatgacggaactacaactcccatgaggcgctgggcccacgcaggcgcggcgcggctgaagtcgccgcgccggaatcccattggcagggccggctctgaggcgggagccctgattggctgaggggtctgaggcgacagattccggaaaggggaagagcagccaacatggcggcggaacgcggcgcggggcagcaacagtcgcaggagatgatggagggtgagcggcccctgcgggcggcggcccaagggcccagcgggcggggggagctgcgggctggaactgctccgtgcctgagagaaactccacgtcctgcctctggccgccgccgcgcggccccctgacagctgacagccggacccgggggagcgggggaggcgctggacctcgggggagccccggcccgggggcggcagcggccgggaaggacccagagctagggggagagcggcggcgcgaggccaggccgggggtggggctgaatgggacgcggtggctccattcagtccagttggagcctcgccccgagcctctgagattgacgggcgggggagcctcctcggtcagctgacgaggaaactgaggcgctgggatctaccagagtctgctccttggttcacgtggtgagggtggagaagggtcttctcttgaaatcgaatggactgttgggaaggggtaacaaggaaccggaagattgagttacacaaggtgatacctgttttcaaagctgtcatagttccaaaaagtctgaattcaactttcttcctcctcattcactttgttggaaaaaaaaaccacatgcatatatgtatatgttatacgtacacatgtgtttataattttctgcatatctgtaggtacagtcatatacgtgcacgtacagtatgtgtgtaaaaatgcgtgcaca

SEQ ID NO: 39399 - DNA, 790 bp, Homo sapiens
gagctccccagcgtagccgcggcatctgtggaaagggagcaggccagttcccagggcgaggagtggacgccctgaccctcctccactgaaccctggaccccaatgatctcactagtaattctcggcgaagacccagaagccccttccaaagagccctctcctaacagctcccctgtggggtgactggagaagctggttgtaaaatcaggagcaggtttctgccccaacgcctgccctgagttagttcctgagctcaccgagccggagaaggcccgtgaccagccagaagcacggagcgcagggcaggacagccggcctgaggccggtcaggagaggcggccctggcgctgcgcggtccaggacgagggagaccaggaggtgggggcggaatgagccgcgatggggtggcggcaccacgtggactggccggtcctccgcggggggcgcgttccgagggctgagggcggacggtggcggagagcccggccgtgaccccctccccgcagtgctgcagttcggcttcgtcaccatcttcgtggccgcctgtccgctcgcgccgctcttcgccctgctcaacaactgggtggagatccgcttggacgcgcgcaagttcgtctgcgagtaccggcgcccggtggccgagcgcgcccaggacatcggcatctggttccacatcctggcgggcctcacgcacctggcggtcatcagcaacgtgaggcccgggcgggagcgcggggcggggcgggggcgcgcaggggcgggggcggggggggcagcgggggcgcgcagg

SEQ ID NO: 39400 - DNA, 874 bp, Homo sapiens
cggggcgggggggcggcgggggcgggcaggggcggggggcagcgggggcgcgcaggggcggggcggggggggcagcgggggcgcgcaggggcggagcgggggcgcgcaggggcggggcgggggggcagcgggggcgcgcaggggcggagcgggggcgcgcaggggcggagcgggggccgcctcgcgctgacccctccggcgcccaggccttcctcctggccttctcgtccgacttcctgccgcgcgcctactaccggtggacccgcgcccacgacctgcgcggcttcctcaacttcacgctggcgcgagccccgtcctccttcgccgccgcgcacaaccgcacgtgcaggtgagccccgcgccaggtggagggggccgcgggcgcacgaggacgaggcggagcggggctcgggtggggtgggggtgcggcggtggggagccgggaggggcgggcgccgccgggcaaggccgggggagggggggagctgggggcgccgtgggcaggggctggggggaggttccccgcggtaagggacggagctttgcggggctggagggcaaatcgtggattctaggtgaattgctagttggtcatagtgtagcaggacgagtcgcagacagaactcctcagacaccggattaaagaaggaagaggtttttttattcggccgggggcgtcggcagactcgtgtcttcagagcggagctcgccgaaaaagaaattcttagccctttgaagggcttacaactctaagggtctacgtgaaagagtcataatagatcaagtaagcgtgaggaacgtgactgtgggctacatacatcagctaacggtacaaaaagttttacggtgctttctcatacagcgtctggaattc

SEQ ID NO: 39401 - DNA, 1301 bp, Homo sapiens
acccggcccgccaaagtatcatgaagttatttcaccataattactaaatgacatgtttcttaagatacttatgaaacctaagaacatacaatcctctctggttaaaggccagaaggatggtacagacatctacagacatttattctgctgttctttaagctaacacggaagttgaccatgtcaaacaggccagttaattcagaaaaatacaccagttttcaagggcatccacagtacaaaggtcaacaaagcaatatcagaaacagaaagacagaaaacaagacaaattcaatacaacaggtgaaaaacgtgtccttacctttggcatctgctgagtgattttggccaggttctgccctttcttgccaatgatgaaacggtgaagccaggaaggggcggcgacagaggagacggtgaagctattggcctaagaaaatgggagaacagccatgggtttgcagagctcaaggtcgtgtcacagtgaaagccaggctgctcacctggggctcagaggcacgctctccccaaacctgggcacctgcactgtgtccaggccccaggatttacaaatcgagagctcatccatgaaggccccgcggactccactcaaaggagacacacttcatgctcggaggcagttaccttggcatagacttcagtcaacgcctgacctaacttttcaggttcgcctcgaagtattacagtctcagagatgctgtctgagggtgggatctcaacggaaactccagttctctcaaggatctcctgcaatgaattgcccttgggcccaatgacatacttgtgttgggatttcttcacttccactgcaatggttgtagtcttctttttctaaataagagcaccataaggggcagtcaaagggaaaggtgtgggaagcgggcaggtgggcatggccactgctgcagaaagcaagccaaagcggcccagactatagatgctgatcccaagaagtgaacaacaagtgatcaggactagccaatccccagaaacttcactgttcaaggactggatttttcccctcagtctagtcacccgccggctgataacttcgtccttgaacactgcaaaacacccaatcctttccctcaattaaggaacacgtttcagacctcaaagttcactaagctgagctaacagcttaatctaagacgtgaacaagtccgggatgtgcatctgacccggggcagcccagctggcagcctgtcagcacagtcagaggcccaggacggcaaggacaactgccaggcagatgctcaacagcaagggggggcgggcaccga

SEQ ID NO: 39402 - DNA, 2529 bp, Homo sapiens
cccctttctggccatggagaacaagtccgctctcctccaaggctccttctggtaggtgagccctatctcctgtctccttcagtccctcccatatggccccagtcccttcgtgattctggctctcccaactacttttcccataggaagctcggatcaatcagtgtccaggtccacctaatgtaaacctcaaactatactgaacctggacttttaattttgtttcccagagtgcaaacatccaaagcaaaaaaggtcacatctcagaatttaactttcagcaaacagaactagaactaaaggaaggagggcaggaaccaagacccctttccgccctaatacgtgtagagcaaaacgtggagtcctgacagagctgtgtgttgcgtgggaaacctggtgcttacaagtttagcacaagtctaacaggtttctgacagcaacaaaaaaggcttcacatgaggggttctacttttttgcttttaaacgaggaagtaattaagttgattcccttgtgataagttttgccaactacatattcaaggggcaacagtcttcgaagagaattatcagtaatactccaggaagaatttcatttcagcctcagttaatgagacccgcaagtgctttaaagcaccagacaggaccgggtatggagggcaccaaaaaagcctccggctgaaacccagacttctcctcttccaaaactaaaattactcaagaccacaaaccaaagttcagaatgggaaaataaaatcctgatccactcagagatcacaagatcgaaatctaggagagaccacaggcgactggcgagcagaaggcaggctccgctccgcacttctcaccaagttctggaagtcggcacccatcctgcatggaggaactttcgcagatgccacctcagcacggccctcccacaggccacgagggcccgcgggcggggacaggcttaaagggacagcaacccctcggcctccccgcctttcatccaaattcggtacttttccgtaatgtatttttcatccacgaccctggggcacgtccaagttgcactccaggcccaagaagagcagctttccccacccccgaacacgtagactgacgcgggccccgcgcggcaggtggaggtgctgcgggggccccgccgcccggtctgcgcccagacccccgccccgccgccacctggggggaaggaccccgctggcctcccagggacccccaccctggccgcacacggcgcccccgccggagcgggggaggggagggccggccccgccaacgtcagcgacctgggctcaggtcggccgcccctccgcgccgtgcggccacggcaccaggggtgccccaccgaagccccgggaggaggcgggggagcccagcttgcagccaagagcggcccagcggcgccaccggacttgagaaagtttgtgcgcgcccctccgcgccacggccacgcgcagaagagactcggagccggccccaggtctggcccggaaccgccacgcgcggtaagcaggacacccgcgggcgggggccgcagcctggggcccgggtgggggccgcggcacccgggcccctccccctccgcggcctccacgtcagcagccaccccccacccccccgcccggcagcccgcccgccccgtccgcccgcccgcccaggcctcccagccccgtgttgcgcgctcactcgtgggcccccgcccgctggtcctgccgctggcttactcgccccccgcgcgggagaagccgggacgctccgaggcgcggcgcccgggccccggctgctatatagggcggcggcccaatcccgcctggacacgtcagcgcccgcccgccccgccgctggggtccccgccgccccgggccgcccagcacccgggaggcccacccaactgcaggcgtggttctgcatccttttttcgggtggggaaggcggtgccgaggagttgggaaattaatcacctccagaaagcagagggagcgcgccccgcaagaacccgagtggaaacaaccgaagaccagaaagggagcaggaaggacggctgctctggaagcagatgtcaccagtaccgcccacctccccaaaatcagaagaaaaacctcaaaggatgcccaccacatcgtaaacggatggccacactggcacgaggtcctacagcgcagtgaggctcccaggcggctccagggctttcattccctcattcctgcgtgcctattccttatgtccctcacttttataaactatccccacccgattccttggcaatcaacttaatctcccccccaaaatgtaaaatccccttcctttaaagcgtgtattacttatggctccatctctacatagatgtatacacgcaaaagaaccggtgtgtggcctctgagcccacggtggatacgcaggactgggcggaacggaatccctactctcggggtctccaccctccgggaaggacttgtcacttctgcatccattgtgtttactaagtgataactgccactgtttcttttaagggtataaagggagtcgagc

SEQ ID NO: 39403 - DNA, 805 bp, Homo sapiens
gcctgagccactgcgcccagccttaaccattattttaaattaaagtatataccattgtttttctaaacatgttacagcttttatatgcactgggaaacgtaaaactcatgtgatgtgctttattgggatgtcaggctttcttgtggtggtatcacaaacctgcagtgtctctgcagtgtgcctgatgtgcactgtagcatttttgtagagtcagaagattaaacatttgcattggttcagtccgggactgggtaaacaaagggtggcagaacacaaagcactatcactgacctccataaacgacctgatgaatgaccaagtctccacccccacagtaaaatattaattgatgtcatgagcagagtgccttctagtgtgccctgaacaccgatccccaccagtgatgatgtgtgcttagtaagactcagttttacttgctctcaaacctgtttatgccagtttcactagttaatgtaactacatttagaaataattcaaaataatgaaggagtgaagagaaatttatctatggatattaaatttaccacactgaaatttcaagaaaaacaagttgccttaaaaaaattatggctggacatggtgactcatgcctataatcctagcactttgggaggccaaggcagaaggatcacttgaggccaaaagtttgagaccagcctgggcaacaaagtgagacctcatttcttaaaaaaataaaaaataaaaacaattagcctgtgcctgtaatcctagttactcaggagactgaggcagaaggatcatttgaacccaatttgaagctgca

SEQ ID NO: 39404 - DNA, 3093 bp, Homo sapiens
caagtctaaaacttgataggttgatgtttcagactcagagattcggtaatccaaatgatggaaataattcttacccaaacaccttttcaactatttttaaatactgttgccaagcatcctaatatcatgtgtacttaatgaatttagcctagggatacttttacatgtcaaaaaatcaaaatataaacctaagcactacgtttcatccagtgtttcagcatcccagatttgcttccctaaatgaacattaagcttattatgcaatgtgccgctaccaggagccttagacaaaaccctaattgtgacttaacctatcttaatagggttttaaggaagttagctgctaagaaagtgactatccttaagcagacaccaaataaatgtgaagtcattgattgagggcttagggtataggtagctatgaatctgaggacataaaacgcaaaactgaggggcaaatcgtcatgttccttaagattacgactcatccacattccttcagccgtttaatttcaccataataggcactgtttaataagcaaagcccaagtcgacttccttcgattttacatggcgtccaaacaccatgtcaagtctgaccctctcattttttaagtcgaatggagaggatatgtagcagctagccttgagcacctaaccacttttcaaaggagctacgcacaaaaataccctagcaacatgccacggtgtcagaaaggctcaggttcccaacaccatgcgggtcagccattaggaactcaggaagtgtttcctctaagcgggggaaacctaggaaggcttcctgaacgaggggtatttgcgccaagccttgacgtgagtctcgaacagttgcagtgcctccaggccacgcgggagggaggaaaggacaccccgggccggggcacaacccgcgggccggagccgcccgcgcccatcccgctcaggccgcagccaggcacggcaccctcccgtccccgagccacgtcgctgctcgtgggctcgcggagcactccccaggtctcacctcgggccccacaccagaaggagaaagctaggggccgcgccagctccgccctcccccgcggggcggcgggccccagcccgggcacaggaaggccacgtccccggggagggacgcccgactcgatggtctgcgcagggcccgtcggccccacgtgacgtgcgcgcagccaatcccagagaggccccccgatcatcgagacggcggcggtggtgggctagacgagtttcgcgcggccgctcgccgtcccccgcccagtcgtactcggcgccccagctcggtgctgccgccatcttcttggaggacaggaggagaggcgaaggctccccctccccgtgatcgctccgcactcccgccaccacctgccctcccgcgaccgcctctctcctcctcagtgggcacttgtctccttctaacaaacggccttccccccactccagttacccaccgcaaggcgaagattctcattacctgttccactcttataagcataagaaaaccgagctcataaggtaggaactgtggcgaaacagggacaagccgccatcttggtaaaggagaagaggctacgcttgacctccccccccacccccagcctctatatggccaactgccgtgggaggagcacggcgcttgcgcagaggcggacaacgcggacgactctgggcttgcgcactcggaagccggccgcatgggggaggggaagaaggccaggtcgcactgagccaggaagcagttggcaaaggggcggggtgacgcggtgacgcaatccgcctgcgcgctgggcggggcggggcgggctggggcgggctgtgagcggaccgcgagcgctgggcgggtccgcggcgcggtcggtcggcgcctgttctcgggctgtttggcgggtgagtgtctcgccggtgtaccccgcacaagttgtgggccggccctcccgaggagctgcgggggacgcgccgctcgtcccatactctcgggcggtggtcggctggctctggggtgccggcggggcggtgtgggggaggggcggccgagcccaggctcttcggcacttatcgtgggctcccccgtcccgggcggtcctagtgccggcgacagtggctccgacacgggcaggcccgggcgcgggagtggggattccggtgaccccttgttgaccctgcgggaattcctctgcactgtcgtcggtgctgggcctcggggcgtcgagtgcggtcgaggtcgggaggtttggtgcttggagggaggatacaggtttaggcccgacaaacacttagagcttgtgtggccatcttgtctttctaacggtgccatttcctccctgaggcgtggaggactggccagcccccaaacctccaagcccatcggctggatgccgtggataagcgaggggagagcgactaggccctgtctgcgggtaccttcggcgaggagaggcgacgaaggtctgcaccagcgaggcacggacaggcagcagggggtagggtatagggttggaggccgccgagttggcccggggatgaggagcaaacctgtggcttccgtggtctcagtggagtcccaactgtgacctggcctactggcccagacaaacctggcttgcttttttaccttttcggtctaattcttgtcagtgccaccagaccttgtcctctctccacggaaacacacgaaccaactacactgaacttcttgtagttcaaacttctgcacctttggccattgcccaaactcttaaatctggctacttcccaccttaactgccttctccttacctagtctgtgcttgtgggattccgcccaaattagatttcctccagacaggcttaggtgtttacctgatgttccagatggtatttgtccagtggactattggtgctgtgagggcagggcacatgttgtcacccatactcattgcctcggttggtgtctagcacctagtaggttctcaaatactttttgaatcacagtgcctgccgatatatttaatgtttcaaaatagttctgccgtcataaagaaaaacatcatggtgtaggggtcatgaaagctgattcttgatacttctgatttgagc

SEQ ID NO: 39405 - DNA, 760 bp, Homo sapiens
cacaaaaatacgtatgtacagtttaataagttactgtaaggaaaacatccatgtcacccccaactgagtccaagttggttgctttagtttcatcatcacagtgacaccttagaatagtcctgagggtatgtgcttagttcacactttactgatgaggaaattgttgccgctccgagagtttaaaagtatttgctgatggtgccatgacttttaaacgatggcctgctgactctagaggctggtcctgcataaccagttaatggcatgtgactggggaagtgagggtacagtggaaagagacaaggatgcctcagcgatgcagctcatttgaagcaggaagcagtgacaggtgtttgcttattttctctgagcttcattttcaacctttatggaatgaaaattttacttttagatcgataaaattttatttctgtatactttctagttttgcagcatttccagtttccaggagcctcatgaatggctttttggtttagttaactttgtggtcatgtaagccctgccttttgctcagtttatgacctttgttaaggagaaaagtagaactgttaataattaacgcagcagacattgcctcactcccacttaagtgtgttttgttttcttttttctagaaaacactttcctggataaaaaagaaaacattccagatgcatgatccagctgtgtgttttcaatccttgggagggtgccatccacattttaacagtacctgtgcctgagaatttaatttttaaaa

SEQ ID NO: 39406 - DNA, 1240 bp, Homo sapiens
ccaagatctagccccgcccagcgagccttggcttcgcctaggacattgcctcgctcagcaagccgacgccccgcccaacgagccgagcgctgcacagatttatatcctacgcagctgcctgcctgctcccgccccttctccgtccgttcaccaatcagaactcgatcttgcgctttcaggccgcgggacgggaaggctccgccctggcgccccgcaggccaatcgactgcgcgtccgcgtcgcgggggcggggtcagggcggggcgcgctgcgcgggggctgccggcgggcagttgggagcaggcgacgccgacgcgagtctggcggctgctgcttgcgactgcggaggccgggcgaggccggtgaggacgcggcgggcgagcgagaggccgagggtgaggacgtgaagcggcctgggcgcgtggggcaggggtgggcctctccgggtgggcggcgaagcccgaggcccgaggcgagaggcccaggcggggggggcgctgaggccgcggtccaccagagatggtcccgcccggcctctgaaggccatcgtgaggcggctggagctcctaggcgggtccgggttagaggagcgtccgtctgtagggagcctgccgcgtgggggcaggcggggcggtgggccggggagtggcccgcgtggactcccgggttgaggggtgccgcgtggaggaggccggtggggctgtagaccggggagtgtcccgcgtggactcgcgggttgagttgtgccccgtggaggccggcagggccgtgggccggggagtgtcccatcccggaaggacaccccagagtgggccatagggacccgcagggtatgggcctggaggtgcctggtggaggcattttgagccgtttgcctttttagcatttctttaaattgtatcttaaaggtgggaatcaagtgttaggtgttaatatttttactccactaagggctagaaatactcataagccagtgggtagcctttgggaaacccatgaaaactggggaccagaatatggcccagtacattacacacccgaattacgggcaccttttccgtttacgctatggcagcaacccctggcctatcatgtgccattaatggatgtgaaaagcagaaattagaacaaggcatcattgaaggaaagattgtcaatacatagtgttaaaaagggatgggcaaatttaaaacccaaggccaaatctttaaagggtggtttttctctctgggtttttgtt

SEQ ID NO: 39407 - DNA, 2632 bp, Homo sapiens
aaggagaataaaaccgaacagctaagatgtaagaaaacccagcggccagagtcaaaaaagtggggaggggtagagaatgcaagtccccaggccccaggttggctgaccccaccctccttccccggcaagccctttggcaccagcagctggtcctcattccaggctaagggctcgccgtagtggctccctccgaggctgtcccaccagacgcttaaaggtggctccatagtggaaacgacttctttaaagaagaaagatgagtctcatgttcgggcaaccgcccgtcgcaggggttaaacggtcctgacagagcagccttttcaccctcccctgggccaaagcacacacgtgttctctgctttccctgcacaccggccactcagatctgcttctccacaatctcagcccctcagcgcccgccagggtctcccctacagcccctgcccagcccaacacggccagaatgacccgcggcccaggccgaggccgcagggtggcccccgaccttccactgccttcggatgctgacatgaggttcccgccccgcgctgggggcagcgccccgtccctgcgccggtgtctcttcacgcacctccaccgccctcgcacaggcggagccaccaggggctcggtttctagaggcctgcgagcttctgccacgcaaaacgccacaggcacacggcagagccccggggccgccctgcgcccacctcaggacggctccgctggtcgcacgacgcgcgctccttccctcaccccactgcccgctccggcgtggcgctcccctctgaacccccaggagactctggagcccctcggtgagaggccgctagtcttcctgacctgcacccttctcacctggttggcaaatccccggaggtgagccatggccgcgccgcctcagaccctccgccagcagccccaggaggcgtctggatcccgcggagaggcgcggagccggctagctcgcccctgcggcgtcagtccactgcgagggacaccaggggcgctcggtgcccagttcagtcatctgagaccgacctccggggcggcgggctccatgggtgggggggggcccaggagaccccccaggccgccggggccccgccacgcccgggcctaacgcccaggctcccgggggctcgccgcccctcccgtcgccgcccccacctcttccaaggcagcttcctcccggtgcccccgccccggtgtccccgccaccgagccccgccccgggcccctccctctgccccctccccaatcgccgcaagcgccccgcccggcagcgcgcccacctccgcggggctccatcccggcctcccccggcccgctctgcagcgcccgcgaaggctcccacccgcagcctctgttcgcccggggaccccgggcctcccagcccgcgaagcaacggtggtggcggcagcgaccggagaaagcccggaggcgacggcgagggcggtgctcggcgtcgcggcccgcgcacggctctctgggaccccgagtcccaccgcccactccgggcccggaagcctgctggcgttggactacaagtcccggcaggctgcgcgagagggggccggggctcgcatgcgcgccgcgaggctctctgggacccctagtcctgctcccgaaaggtttggactgcgtctcccggcaggccgcgcgcctgggcgggcggggcacgtggtcgttgtcgcgtcgcgccctccctgcctcgccctcgcgggtcttctgcgtttgctggcgcctgccaggcgtcgtctccgacgttacggcggccgcgcggccctctcccttgggctctgccctgcgcagccctggttcgagcgggccagtgaggcccggcgccctccccgcctcgccacgaggatccaccgcggccgcccaggcttctagccttgtcgtcacggcacggagataagcccgcgctggccacatcgcgaagcccctgttcgtactgagaccccgcccgggatcacgcgcacaggccagggcgcaccaggccttggagaagctaccggcacagcccattccttgggcgagttgcttcgcctctcctgcctcagtttccttacctgtcaaggggtggtcataggacgtccttggtcacaccgttgtgggacccacctgggctagagcgcgggacgcgcccaggacagtgactgctgctggaagccgtcatggcactccccagggtccgggagggacttgcagatcccaaggctacctggtgcgtccccgtgccccgtgggccgccaggtcatagtgccccctgtgtgcattcccctagtgcaccgcagggatccccacctgtccggtgaggaagatttgtccctcctgcatactgtgtccacccttacaggccctcactctccatgatggctcagcacaggtgactatcctgacctcctcacatccctccttcttcgagagggttctggcgtttctctctgctccctggtgcgtgtcttctcatggtgcactgccgagtcctttaagaagctatgcttccctgtcatgcgtccaggacagccccttgaacccctcctgggtccgcatctctcatcacccctgcttctttacgtactgacttggctttgtttgtgctttgactccccaggagaaagtgggc

SEQ ID NO: 39408 - DNA, 960 bp, Homo sapiens
ctcagaatgcgggactccctcagagcgctgcagcctgtctcttgcacccgcagcacgccctgcactccagaggcttcctgcgagccgcttgtgttcggccccacccagtccctctggcctctccacgccgcgccatgccggtccacaccctgtccggcccactcataccatccacgcccctgcacatactgacagctcagtaccccttaggggctgggctcagaacagaccctctaaagaatgaggccggagtggtagggccaggcaggacccacctatgcctgaggctgccgccgctgctgaaccctccgttccccgcccccgtctcctgtgtctccttcgtgtctttttccctgcaagtatgtactttcccctgcaatgccagcgcgttcagaaactcacattccacttttaaacgctgacacccatgacaagctcttcctcaacggcaagcagcaagcccagcttataaaggacaagcggttcggtcaccttccagcccatcagggatcaccactgggaagaagccatggctccgtgggcctttgtgggcaggtactgccctcctcagaggcagcctgcagtgaccgggaggtgacggaggggtgccagcctggggcacgtgcagacacacactacccagcagaaagattccgggcggctcgccacacaaccctctgcctggttttgcaaaaaaaggaccatctgaaggccaccgggtagtgggtggagaggccagtccagagtgaggtggccggcacaaagtccaaggactctgctgccaccgacccccgtggcctgcaggctgaacgcccgcccagtcccacccacccccggcatggcatccccagtgtacctgagactgggttatttatttatttattctgagatggagtttcacccttgtagcccaggctgcagtgcagtggcacgatctcagctcactgcaacctccgcctc

SEQ ID NO: 39409 - DNA, 3013 bp, Homo sapiens
agcaaaagtaaaccacaaaatagaggaagatatttgcaataacttcaataaatgcgaatccaataatccatctacaatacaaagggcatgcgtccggaccaagaacacgtctccagactctggaaagaacctctacgaacgaagaagacaacccaattttcaaatggaccccggggaacacccaggcggctggggctggctctaggtccccactgctctgccttgcgggggccgctccggcctggtcgccttctccgggcgcatccagggaactcgctcggtcctccttaagcggggaagctcggaaagcgtctccccgactccgcccccagggttgcctttcccttagaaggccaagccccaagcccagcctctcgccagctgggagtcgcgcgctgcccacctcgctgcccaggcccccgacgccgcggcaggagccccccaagagcgcgggaagccccgtggacctggcgctcccggctcgggcgtggacggggcgggcgccggggcggggcgcgcgtcctcgcgggtctgaatggaagggtcgaggtcgtcgtcggcggcgagcagatcctgaagccagaactccaccccggcgcccgcgccatgcggcgggagaggtgagcgcggcgggcgtggcgtccgtgccggggtgcccggggtgccacgggaacggcgaggccggggacacgcgcgcaggacgccagcggcggaggtgggcggccccgggccggggcggggagggccgggtcctggcagtcgccgtgggggacgcgctgggctgtgccctccgcccccgccgcccacgcactcgtcttcgagggcgggcccggcggccccggagcaaaccgccgtctccccgcggccccaccggtccctggcagcctcggggaatgtctgtagctgaattcgggctctgaaagaaggtggcgctgggtttttaaagatttggggcacaaaaaacgagagcggacccggcgccggctacggcccttcccgagggccacgcccagcccggcgccccgcgcgccccgttccccgcgccgcctccctccacccggctgagcgcttgtgcccgcaggtgcggcgccccccacccgcgtcgccgccatggaggtgctgcggcgctcctcggtcttcgccgccgagatcatggacgcctttgaccgctcgcccacagacaaggagctggtggcccaggccaaggcgctgggccgggagtacgtgcacgcgcggctgctgcgcgccggcctctcctggagcgcgcccgagcgtgccgcgccggtcccgggacgcctggctgaggtgtgcgcggtgctgctgcgcctgggtgagtgcgccctggtgggatccccagctgcgcctcctcccctgctgggccgcagcctccctccgaggccgagatgggggtccggcccaggggcgcccaccccctgcctgggacggccaggcgctcgggacagggccacccaggcgggtgctcccggatctgccctctcaggcctcccacgccacaggcccccccatcagctgcctgctcagcccagatttcagtcatgctggccataaacaatagaaagctccagaaagaataatctattagtgggtggctaagcttccacagtgacccttgttctcagctgggcacagaaaccctttgtaggagcacgtgtcccgatgtttattttggaaaacagattcttgctgttactggccgagatcccgcccgctgccctctggattccgaggcctccgaggcccccccattggaaactgcgcccaccgggctgggtagccaaaacctcagtattcgttggtgctgtgaggacatctgggggtgctcggttctggggtcacacacggtccactggctgcccccaccgtctccaaggtctggacccaagagggagggaccagccccactgtgactgtccagtcccctcaccacagctgggctgtggccgtcacctgggaatgtttatgtgatgcccgaagagggcacatggggcgcctgtggctgagcccgggaaggggaggtgacagcataggtgaaactgaatcggtggctctccaggcagggggttggagtcggagggcacgaccccgtgaggggacacgctgcctcctctcaggctggcgctggcatgggctctaggtggcccctgcccttacgtggtgggctgggcccagagagcaaagctgtgtagacctggcctgcccaggagtgtgtgtggggtgcagacagaatccatggggaccagcacagagcctccaggaggaggtggagtcccatctgagaagttcagaaggagggagaggtctctgggtgggagctagggggttggtggggctccatgagatccgccgcctgctgctgcctctagtcgggctctgagaatgaccctaggggatccttttagtggccttctgaaaagatgatgccagacccctggaatggctgggaagaagtcccagatgtctagggggaccccagagggacacagctcagacctgcatctgccctcacggctgctcagggtcagtcccttgaggccagcgctgtctccctgcccttgggcagtgcagacaggaagaagcccgggttgtgtccccaccttcagtctggggccagcctgcagcagccccggagatctgtgtttgggagctgccgggtcagtcctgggaatttccatgtcgtcccccgcccccagccagcctctcatgggctctgctctgcttccagatcttaattaatgagatacagagcagcctttatcagctgggatggtccggtcagcagcattaccctgtttgctttggctggagaactggccgggctgcggactcccaatcccagggccctgtggcattctcggcaccatctgccccgtgcctgtgcgctgctgctgccaagggtgccacaggcagcactggggcggtgggcctgtaggggccatcctcggctgccaggggcagggctgatgcagtgccacctccaagcacatccccttgg

SEQ ID NO: 39410 - DNA, 1492 bp, Homo sapiens
tgtctctattaaaaatacaaaaattagccgggcgtggtggcacacgcctgtaatcccagttactcgggaggctgaggtacaagaattgcttgaacccgggaggcggaggttgcagtgagccgaggtcgtgtcactgctctccagcctgggcgacagagacgttttctcaaaaaaaaaaaaagaaagaaagaggctttgcaaacctcaggtttttgggccggctctctggcctgtgcggagcacaccccacagcgactgccacggggctctggctctcctgggaccgggtggacccacttccactggtgagcgcagcctgcatgggagctgaaccctgtgggaagcggcaccccgggcgctggggagcagcgatccagagtccaggttctgagctgctgcaccggggccgcgatctccacccctcacgcccgagtccccggcacggccaccaccggcccctgggtcccgagggccccgaggaagaggccaaggggcctggcggcgccccccagggtcccagtggaacaggggcaccagggccgcggcgccgggcatggccttcacactccccacgaggcaggacagccccgggctagggtgaggggcacgcgccgcaagtcctgcctctgctcccgggcggccccctccagcctccgccggccccgccccggaagcgcagccccgcctcaggcgccgcatctccgccctctcttgcgcctgcgggaccgggagggccgcgctcgccccccagcgccagggtcacgccaccgcgccctgtttggggagcggcagaggagtcagggcggaggctgggcggcgctgggcggtggggcgcgctcactggctgccacctcacctagcaggcgtcacagggctcactcaagagctccagcaagagcagaggcgggagcctcgccagcccctccacagaccacagcgaccgcgcccctcggcccggaggccccgccctccccactcctgcttccccagccacggggtcttctcccggcccctcatctacttggcagacgcctctcaccggcagcctctgcctccccctggtctttccctcccaccacccaccgtggagtcctctccgggaggccctgtcctccatccagcgctcctcagaggggaccggagaggaggcgctccttaaatggggaagaaagacggacagagccagggacagcgagagacgggacggggacagagacacagagacagagagacagggccagagagacacggggatggggccagagacggggccagagacagagacacagaaagggatcttactctttcttcccttaaaaccagcttctgggggtctccgagggggactctcaggtaagtaacaatattatcaccttccctcccaagaattaaaaaaaacaaaaataacgaaaaaaccttttccctgaacttgattttgagggaaaataggtcacagatacaacccacagccaccaaaacacacatacggatg

SEQ ID NO: 39411 - DNA, 2683 bp, Homo sapiens
atgcactccagcctgggcgacagagggagactccttctcaaaaaaaagagaaaaaaagaaaaaaaaaccaggccctaatgtgcacataagggacagggtggtcagttctaactgctatttgctccacctgaggccagtgtggaccaggacaaatcctaacaggatggactgggccgttctaagcaacaggaccttctaacctcctttctgaacactgtgaggccaactgcaaaggtacccccccacccccaattccgatgtcctttcctcccataccatgttagaccgttgcaacacgttgcctcgttttcaaaaaacaataacaaaacttctaggacacaagctctgaaggaaattgtcaagaaagtgcgctggctgacttgtgaaataatctaatgttactaattcttataatacattgtaatgatttaagacttacagcaaactactgtgaactttcaataaccctataaataacacgtgccattcccgtctttaaaacttaaataacaccatgcaacataaaacagaaacatctccaaagtggtttttaaagtctgttcgcggttctggtgcctcccgcgtgtaatccgcagaaatctcactgaaataggctgaactcacaaggccttagaggggtttgggccctgccgcgggggcccacgtgggaagcggccgagagccccgggccaggctctaagggagcgcaggaggatgccgtccccagccggccgtcccgtagactctccgcgcgtacccgcgtcctgggctcgggggcccagtcccggaaagccctctcgggggctgtcagctacggaggcgcaggtcgcgtctgcccggtcgctcctgctcgcagacatccaggccgacggcccgcgcggtccggagagtcagcagtcgcggccgagcaggacaatcggcccaggacctgcgcttccagagcgtgcggcttctgaagcctaggcgccggccggatcgatcgcgcgcagggcggacccaggcggccggggtgggggcggctgcgctgcccgaggcgcccggcccagagacggcggccgggccaaggtcacacagcgcccacgcccgctcccccgcgccccggccgccgaggcccggcgcccccgccccccgcgttcgggccggccgcggggcctcagtttccccgcagggccgggtcggggcgggggcgtggcggcccggggcccgcgtacctgtggaaggagacggcgcgcttctcgccctttccctgccggttggagcagttcacggccgcacagcagatcaccatcgcgggccttggcccagccgcgcagccaggccccggccctagccgcccgcccgcccgcggaccgccccgagggagggagcgcggcggcgacacggctcgggacgtgggccggcccgcggcgtccgcgccgtacggcaagatggaggcgcaggcgcccgcagcgggcccgcccccgccccagcccccgcccgcgtcctcgccagccgcgggttcgggcgtcttcggaccagcggggcgccgcaggcccctcgcagcgtccgtcggcaggcgggcagacgggcgggggagtcgccccggcggggcaagtccgtaccgcgacatgggcgcgccgagcacgtccgtaccgcaagatggctgctcggacggggacagagctcgcctctgccgcctcgacaactgctcctgggtcctctaagaggaggaagcgccacccatggcacacagtgtcccgtcggacagcagaaccagccgtcgtcccacgacacgaccccatgccgcccgcagggcgccccggggctcgcgtcggcccggccgtacgccaaaatggcggctcccgcgtatttccgctcgcgcgccgtatcgtcttcgccgcctgcgccggcacacctattggcccccgcggcgtcccgtcgccgcgtcgcgttgctggcccgtcggagcgacgccgctcgggtcagtcggcggccggactgggaagatggacgcaggtgaggagttgccgggggtcggtctttccgcaggaggtgctcgccttatcattggcctcccctgctcgggtcgggctgccgcgactcgcctcggggcacgccggtgcgggccaggctgggccggggcggcgggcgctgcgggagcgcggggcggtgttggtgggtggtgggcggtgggagcgggagggggacggcggcgcactgcgccgcggaacccgccgtcggttgcgctggagcttctgcttttccggtcccgtccggagcgctccggaggttgtggctgcacaggcccttgcgccaggtcggccgtggagggcggcggagcctgccgggcggggagaggcgcggcggcgaacggggcggccgcggtccgggccggggacgcgagcggcgggcgaaagcgtagcctttccgcagctgagcgtgaagggatggaagctctttaacttttatgaagttattggtaggttggaggagagaaacgtgacgtgttcatcacagtatacgtatcttttttgtttttgtcttcaatttagtaaccagtagattctccaagctgcttttccgtgacgagaaagagaaacagtgaatttgtatcatcgggtcttagtttcttggggtcctaagagagagagaaagagaaggagtgtgtgtgtgtgtgtatagggagtgttggtttttttcctat

SEQ ID NO: 39412 - DNA, 733 bp, Homo sapiens
cagtgatttgtaaccttacttttaatccaaaaaggtctggatcttctctagaagatgccatacccacacctccagcaaaacccaacatggagaagataaccttactaaatagtaacaaacacaactggtaaagttcaatgttccagaaacacggcaggggaaaggagatgcactgtcagctgtcttggtcagagaggccagctctaccctgtcgaggaagaagaaagcacaggcaaagaagagagcagaggatggtggcgggggaagcgtgggcacagccagcaggtgactcatccatgctcatgacccctagcctggactgcaaggatgttctcagccaaataccacaagtccaccatcatccctacagctgccaagatcacagatgtacaaagacacggggcctgacactagtgagaagcactgctcaagacagagaaagaaaagtccgattcattcgactcagccagtctcactggggccttcaaatcacaggggcacccacataaggagtcaactggcctctgacaaagcagcagagggatgcaatggtgcaaaggcattttcctcaataaacgctgctggaacaactggacatcctcatgaaagagaataaatctagaccagaccgtataccctccacgaacataaattcaaaatgaatcacaggcctggcacggtggctcacgcctgtaatcccagctttcaaggaggcagaggcaggaggattgct

SEQ ID NO: 39413 - DNA, 2204 bp, Homo sapiens
gggggagacaccacggtttcgcgcgggtttacacgtcagtcatcaccataccccgcacttaaagacacgcagcgtggaccgggcgcggtggcgcgcgcctatgttcccggctacccgggaggctgaggcgggaggatcgcttgagcccgggaggtccaggctgccgtgggccgagatggcgccactgcactccagcctgggcgacacagggaaagcccgtctttcaaaataaaaaccgcacagttcacagcacgccagccgcagacaacgaagcggagcaaagagcccctgggaaggcagaggcaccgaaggccgcggcgcaccccccgccgcgcgcacccacccgggaaccggagcagttcggcgcggtggcccgcggcgcacagcgcttccaccagcttgcggctctgcgtgctcttcccggcgcggtccacgccctccagcactatgagagccccgcgccgggccgccatgactgtccaccgcccgccgctggcgtctccacgcagccttccggagctcccattggccggcgtcaacagcgcgcgccgtgattagctagtatttcccggcctcggccaaattcgaagggattggccggggccggggcgaggacgacgcgcggtgggaccgacacccgcgcctgcgccctgggccgcgccgccactggagccgtgtcctgggcttccggggcggaaactggggccccgtgtcccgtgcgggcctccgtcctcgggcgagcagggcccttcgctccgggaggggaggtgacgcggcgcgggctggacggccggagacgcggggtcagggcgcggacgaggggagcgcagggtcggaggggctcccggacgctgcccgcccagcgtcggctctcgttggcccctggctgcgcgcagcgggcccgactctcagggccctgcggtgcccgctgccagcgtgagggctccggtcacgcggcgcgcgagacgaacgagcgagatgcttcccgaagcgcggggcccagtgcaggggctcagccggggctcctcccaaagctcacctggagcccagcacgactgcgttctggaaacgctgtgtttgacagcaggggcaggatggggggctgtgtagacgctggccacgtggcaattgtaggagaaccatgggatcgataaatgttcactgttgtccctgaagcgcaaaactgcagggctctggaaagtccgtgtgtgtgtttttgttgtttttgtttgtttgagacagagtctcgctctgtcacccaggctggagtgcggtggcgcgatctctgctcactgcaacctccgcctcccgggttcaagcgattctcctgcctcagcctcccgagtagctgggactgcaggcggccgccacgacgcccggctaattttttgtatttttagtagagacggggtttcaccgtgttagccaggatggtcttgatctgacctcgtgatctgcccgcctcggcctcccagagtgctgggattacaggcgtgagccaccgcgcctggccgaaaagtccgttttaaaagatgatgtatacaaattatagcacggagagggaacgggcaagttgtttcctctttccatgcctccaactcctctgaaatgtgggtcatgatgataataggaaaaactgtctctgccatagagaggtggaaaaagtcccgcgaagtgtccccggtatctagaaagcgctcagtagtgtttgctgttatcttagggatatcaggctgcctggacatttctcaggtgagactttttgttattttagatatctaaaatactactatctatatgtgccatattgtcagttgtcagctagacatcactttctctgcttagcagaagaaatggtaggaactgcatttcccagaatcatctgtgtagccctggattacagtctaccagacgaggcactcttacctttcgaggcgattattcttgggaggcaccctcagccagaaatatagatgaaattcaaagctgttctgttttcagaaccacctgcctctgatgtagaccaagaaattgctggtagctttctaagtgttgagtttgcattggttttttccccatgagctcttgagaccaccacccacttcagtgctttgggctgaggtcattggcaacaatttcccggactttactcccagcatttgtgtaagctcgcgattatattatcattgcatacctagagtagc

SEQ ID NO: 39414 - DNA, 2281 bp, Homo sapiens
cggagtagctgggactacaggcgtgcgccaccacgcttggctaatttttttttttttttgtatttttagtagagtcggggtttcaacacgttggccaggctggtctcaaattcctgccctcaagtgatccgcccgcctcggcctcccaaagtgatgggattacaggcgtgcgccagcgcgccggccttctccagtatttttgcatgcatcttacggcacacctttgcacgccatcttattaactatatcatactgccgcacgtgccttttcggccaaggcatccagatggtgcgggtcctgcctgcctcgagaggtggcagcaaaggagccagtgccctcactggtgctgggcggggcggccgctttcctcggagggaaggggcggcgttggcgggggaagggcgccagggcccaggccctgagggaggggcagctcgcccgggccacgcggtgccggccctcggctcaggccgggctgaggccccgggggctcggggtccgggggaaaggcgctgagccagacaggtcccaaggagccttcgggaagggagggcctcgtggcggcctgtccgggacccggccgggagcaggggtcgcgtgggcgccgtcaggacgggcgtgaggtccccgggaccacgtgtttgcgtttggtggcccaggggtcgctgacaggtgcggaggggagacgcccacctgggtgccctgggccgcacgccgggcggtggggccgggaacccctgctcctcctcggcctccgatccgctgcggccctgggtcctgctcgctgcccgacgccgctgccacaacctccgcccgggccccgcagcccgccgcccgccggaagctgaaaggcgtgtccgaccccgcccccgggcgcgaccaatcagcgcgcgcgactcatgaatagtgagcgcgctggcaccgccccgcccccgcctcccgcggcaccgcccgcccgcgcagaccccgagcgcggccgcggacgaagatggcgaccgccatgtacttggagcactatctggacagtaagcgcgccccacgggccccgcgcccgccgcccacgcggagtcctccgtgccgcagccccccgcgcgccgggcaccgcatgcagaccccgtgggctcgggagggcggcgggcgcggccgggcgcgacggggggcgcgcggacggggcggggcagggccgcaagggaggggagggcgcggggggcgggcgcggggggtcccgccggctgggtcgcgccaattccaggtgcgtcacggcggggcggggcctggcgatgctgggcggggcttgcggcctcgaccccgcccacatattaggtcccgcccctacccaggccccgcctcatctccgcccccagctccggccccggccccgccaggtcccgcccgtccctgtcccgtctgcaggaggagctggcgcccgctgcggggctccgggccttgggggctccggggtctgggcctccgcctggctgtgcgcccgtgtgcgccggcctcttgtgtgaccgcggctggggagggcgtgcgggccgcggggcgtctctccccggcactggggactgcggcgcggaggcggggagggcggtgccgagtcggccctggtgggcgggctgtgctgtttccaggtggcagcaggtcggcgcccccagcggctgagcggacggtgctttccctcactttacacaccagggaaggtccagcgctgccgagcagcctgctcagggtctcccgctcgtagaggggcagaccccacgcgggacccctgacgtcggcccgggatgggcacagctttggggtcgcggtgtttggggttgtgccgggtggctctggagggcccttgtgggggcgctgcactggggatcctcatggtcttcggcctggcacccgcccaggggctgagacagtggcgagtgagccgtggcctggagctggagaccgctgccctagagggacgcccgattctgcccatgtgctccgctgtctcttgggggtctgagtagtggggggttccctgggtagaagagtcaagctggggagcacgctggaggggaggccttctctatcctggtgcccagccagtgggctggcctcccaaggagggttgactttgtgtgtgtctgggaggctgtgccagccgggaggctgtgcctctgtcctctaggggagctgggaaaacactggggctggaagcatcagatgcataagatagagttaggtttaaaatgattgcctggtaactgtgaacagcagatgggagggtggccaagactggag

SEQ ID NO: 39415 - DNA, 1511 bp, Homo sapiens
tcggccgagcccacgtcccgggcctcgttctggagaaccctccagctgctgcttgggcgtcttgggctgcgctcagcctagtcccttctctacctggagggatgcgcccgacagccggcgcgccggaggccctcaggaaacgcaggacgaggcggtggccgtcgagcctccggtgccagtcggggcggggcttggacggcggggcggggactgtaggcgcgcagggctgggcctggagggcaggcggggcggggcccgttaggcgcgcggggcggggcttcggccgctgggcggagccgtcaatgcgcaggcgcggcgtcgccccgcccactccggctcggcggctctgggcctgcggcgggcgctgcgggttggagctcgggacgtgatcgtgggtgcgtgcgcgcggccgcgcggagcgctgggctgagggtcccggtctgcggttcagccgcgggtcggggtggcggggcgcgatctcgggcgccgtcagccagtcggtgcctgtggggggagggggacggcgctgcagctcgtcacgtgaccgcgtggaacacgcgcgcgcgtccgcgggatcccctcggggggcgagctcggaggaacggggtcctgggcaaggtcccggcgaggccgccccgagcctgcgcgtcgctaagtccaggcctgctgcgtggggcttcgcgcgctcgcggggttgcggcccgggcagggggagggcccgggtgctcggagccttcccttcgctgccctcctgccccctccctgcttctgcaagcgtgtttcaatttgtacaacgtgcataaaacatgaaattacccttggccacttccaggcgcgcagccagcggctccctgcccttcccctccgggccctgagtaccggccccccaccaaggaggagcccgaggtctccgtcccggcggcgatgctgccccgtcggcctctggcgtggcccgcgtggctgttgcggggtgctccgggagccgcgggttcttggggtcggccggttggccccctggcccgcagaggctgctgctccgccccggggacccccgaggtgccgctgacccgggagcgctaccccgtgcggcgcttgccgttctccacggtgtctaagcaggacctggccgcctttgagcgcatcgtgcccggcggggtcgtcacggacccggaagcgctgcaggctcccaacgtggactggttgcggacgctgcgaggtgggtgaggcttgggaagctgcggcgtttccgcgtccctgctccgctgcgccttcccgtggaggcttcaaagcgggctgagaacaacctggatgggggtgccagcccctggctgcgctgagaggggcgtgtgcaccgccacaggctgctggaatgaatgaccacgaacgagtcgcttagaacaacccaagttttgttgttgttgttgttttgttttttcttttttttaagacggagtctcactctgtcgccaggctggagtgcagtcacggagtttcactctgtcgccaggccg

SEQ ID NO: 39416 - DNA, 663 bp, Homo sapiens
gagacagggtttcaccatgttggccaggatggtctcgatctcttgacctcgtgatccgtccgcctcggcttcccaaattgctgggattacaggcgtgagccaccccgccctgccaacaacccaagtttgcctggcgcagtggctctgcctgtaatctcagctgccctggaggctgaagccaggagttcaagaccagcctgggcaacatagccagaacccccgccccactcacctctaaaaataaaaataaataaataaaagtagccggcccaggattgaaaaaacaaaaagtaaaaaagttactccagcccaggagttccagttttagtggactatgatctcaccactgcattccagcctgggcaacagagcaagactacatctctaaaacaaaacagaattcccctccccaccaaaccccacaagtttgttctctaagctctggaggccaaaagtgtgaaatcagggtatcacagggctgcgctccctccaaagcctccagaggaggctccttcctgcctcttgtagctctagctcctggtggccccaggtaccaaattactccagtctctgcctctgtttttcatacaggtttttcttctctgtgactcttctccagttgtcttataaagacacttctcattggattgagggcccacccta

SEQ ID NO: 39417 - DNA, 525 bp, Homo sapiens
aaaaaaaaactcgctctctggggcgagtgaccacttgcctcatctgcagctccccccacgctgtctcataggatcttcttcctgtcacaggctgtagcaaggtgctgctgaggccacggacgtcggaggaggtgtcccacatcctcaggtgaggtggtggctcccggctcccccagccttccctgttgcctgtgggtcatttcctcatggagcctgtgggcagctggggtgacgcggtgcgaagccagccgatgacatcttggtttgtgtgtctcagtgtttgttctgtggtttttcggtgctatctcaatgcatctgtggtgtgtaatcatttccccccatttggcaatgcccatgcccatttcttggcactgtctgtaacagcaaagctcctcccccatgaacacactacagggtggcactggtctccgggtgtccatgactgtggacagtgctttagatcatcctcagcaggtgctttggggcaacgtgcacttactctgttaaactccatccctgggactt

SEQ ID NO: 39418 - DNA, 1117 bp, Homo sapiens
ctttgaaggcacaaatcaggggcactttcatgctggcccagcagagccagtgggtcccgcccaatgcctgggctacttcctgctgtgcctgggggcacctggggctgtcctgcctcactggccaaggcccggctctgtccctgggctctggccactgttctgccatcccaggctgggtacccatgggcagcccgacagtatctgttgcacagagcagaccccaggccccatgggtgcctgacacgaagccccacagcgtgtgcccgcgtcccccgaggtcagccggcggctcctgcccttccctctgacctctggttgggggccggccatttttctgcttgttcctctagctctgctactgggcacatggtccgtgctgggtaggctgcaggccagggtgagttgctgacccgctgaccctggctgtgcacctgccctcctgccctgggtggctgctgctggcccaggggtgacttgggggctttcaagcttctgcccgtgctggccgcacgaccccacgtcccaccctgggtagggacttgtgattctcagagctggggtccgttgctttcctaaggacctccggccctggtcgtggtctaaatgctcactcctgttgttggagaggccagccgggtgacagggaaaagcccagagccccgggcttcccgtgaggatctgggctcagcatgggctgtggggctgcagaggcctggccttgcctgctgagggacacccgctggtagtgcctgcagaggggggaggaggaattcctccccctagtgccctctggaccctgggagagcaagacctctgcatccacactgccttccgctgggcctctggggactggggaagcggacacagtccaggactgttggaggaggaagaggctgcggctgctcttccctgggggtccggctccaggaggctgcggtgaccgttgggccggagcaggccagtgccgggcacgtcctgcccatgacagccctgctgccagccgtgggcacttgttcctggagctccgtggctgggtcctgccgtctccgctgctgccctgccctgccatgttcacctccagtttatccagcaatggggagaggggcttcttagatcc

SEQ ID NO: 39419 - DNA, 1906 bp, Homo sapiens
ccagagcttacacaccttctaagctctgtgtctccgtgtcagtgtgcattcgtctaaagacgtacgtgattcaattcttctcatctctaactgaggtttggtcctgaagatcttcctctgaagactcagtaaatttacttgatctaaatgggcccaggtgtttacccttatcttgttttctgctaaatcatggaggtttggggagttccttctccacttgtttgtggaggcctggggagttttttcagacccccagtaaaacttgcttaatcctaaacgggtcctggtctcgtcatgcttcaaggcccaagaaagccctgggcaaaactcttgatgggcttttgttacgtcccagccctcgtgtgagggcgctggctctcagctttcaggatttcacttcaccctcagtcagtgctgaacagttgtcgcggaggcctgcgtgagtgaggcctggcgtgccctggaaacattcccctgagttgaagaaagactcacagttttcagcatccagttaccctctgagcatcaggcagaacccgccggccccaaaaccaggcccccttggcacatgtgggcccgagtgagtccagcatgaggaggtgccgcttctgagcagagctcaggttgtctctgggaggaggagcgagcgttgggtgcggtggccgctgcgttggcagccctgtccctgagcggaacgcaggtcgtctctgggaggaggagcgagggttggactcagtggccgctgcggtggcagccctgtccccaggcgtggactctgccctcagcttcacagtcaccgaagaaatgaagttacaggaggggcacaccgtccttttgtctctgcctttgaggttggcgggaactgaaactggtacggtctttttgaatagaaatttggggtctttctggcgacgtaaaactgtgtgtagtttgcagtagagagtgttgagaacagcctgtctgggctgtgcattgagaaggggcggttaaaatgctgccacgtcgtgcagcccataaaagggggacacagagtagccgaaactgctcttgggggagggggcacgtcccagccttccgtgtgatgctggggtcagcgtggcccctcggctgccagagctcacgaagacggttaaggaaagcttcccccgggtggctttcaccccacggggacagagccccagatgggcccagggacctctgagcagccgtgggccatggggtgacagttgggggttggtgggacccgtggctgtcatataccctgggtagacggtggcttgtccaggcagagatgcccaggggaagtgggtggcacctgagggcagatctgacttttcaagagaagctgaaaacacgggtttttctgtgaaatctctagattgaaaacagtgggcttgaaaagcctggagcagagggagtgaggcctgctccccaccccagctctgcgggcacaccctggccagacagccctgctccagacctggcctgtgtctcagggtggcccaggaggggactttgcaaggtgacgtggggcttggaggtcccgtttccctgtaagcctgggtacttaggggatggccctggtcagactccaccagtcccagacttgggggacacgagaagggagatgggccacccagttctggttgggctggggtggggcttctgaggggtggggaggttgtcccttcccacccacctgcccctgccccaggattctcggctgtgagcaggaggatgtgtacgatggccaagttgcctggactgggtccgcccctcctggggctgtgagtgcacaggacactgggcccacaggcacctctggggctctgtccccgtggggtgaaagccactggggggaagctttccttaaccgtcttcacgagctctggcggccgaggggcca

SEQ ID NO: 39420 - DNA, 733 bp, Homo sapiens
caactgccctgccaggacggctgctgcctgagaggggacaccactgggttccagacgggggcaggatgggggcctggatccggggcccctgacagccctgagttcccacaatcaccccgggcccctccccacctcaggcagcctcagcccctcataggaggggcccgttgcccgggccctggcagtgctggttttagggggtctgtgtcttagtcccttggggctgccaaaatgaaatacacagaccaggggccttggaaacaacagaaatgtatttatcacggttctggaggctataagtccaaggtcaaagtctgtgatcatgagggcaggctccgtgtctggtaagggcccagtttccggctagtggatggcggcctctggctgtgtcacacacggtgggagggagaggtctctcctgggtctcctgtatgggacactatcccattcatgagggctccaccctcccaggaggccccacctcctgaccttatcaccctggagttaatatttcaacatgggaatctggggtgcacgtgtagatcacgtgctgggtgccttgtgtcacgtgtgtgtcctgacttgtggcccgtgtgtaggtcacatgctgggtacattgtgtcatgcatgtgtcctggctcatggcccgtgtgtaggttgtgtgctgggtgcatcctgtcatgcgtgtgtcctgcctcgtggtgtgtgtgtaggttgtgttctgggtgcatcc

SEQ ID NO: 39421 - DNA, 758 bp, Homo sapiens
gcgggcgtgggtggagctggccgggctcaggggcctgggacacggggcggggccgcgcctctctcgctccgggtcccacgcgccccggcctcctcccggcactgtcccccggggagccccgaggcccggccacacccagggcgctcctgaagccgccgcagctgctgtgcgaggccgggccgacccgcctggggcgcgtgggtggggcgggagcgcagccgcagcccggcggcgacacaggcccggggccagccggggacggaaaaagtgagtgcgcggcggcgcggggcggcctgacgggaaggcgggaggcgaagtgctgactgcgccgcggtctctcagccgccaacacaccgcggacgcccggggacagcgaccgcttcctccctccccgcccgccttgtctctttttgtgagtatcgatctgagctcatgttctttttaacgtactcaaagtgtgtcaatcaattaggctttttttttttttttttttgacagggtcttgctctgtcgcccaggctggagtcagtggcaccatcgtggctcactgcggcctccacctccgggactccagggatcctcccgcctcagcctcccgaggagctgggaccaccgcacctggctaattttaaaatttttccttagagacaggatctcactttgctgcccaggctggtctcaaactcctgggctcaagcgaccctcccgcctcggcctcccaaagtgccaccgtgccaagcctcagttaggtttttaat

SEQ ID NO: 39422 - DNA, 1795 bp, Homo sapiens
gccccttcctttttctctgtgcatcctcagtgacgcggggcacagctctgcccgggggcctaccagagcccacctggaccccacactgggtcagccctggtgcggaggaggccgctgtaggtgggcacggggcagcacgcgttaaggggctggacggggggtggccatgcgtgtgagggcgctgagcaggggcgtgcccatacgtgtgagggggctgggtaggggcgtggcccagcgtgtgtgtgtgtgtgtgtgtgtgtgtgtgtgtgtgtgtgtgtgtgtggctggacaggggtgtggccacgcgcgagggggccgtgcagggggcgtggccacgagcgaggagactaaggggcgtggtcacgcgtgtgaggggctgggctagaggagtggccctgtgtgcgggggctggacgggggcgtggtcatgtgcgaggaggctgaacagggggcgtgaccacgtgtggaagggggctgatcggaggtgtggccacatgtaagggggctgggcagggggtgtggccacgtgtgagggggggctgggccggggcgtggccacacgtgtgctggctctgctgtgggcttccttcccttcctgtgcaggtggtggtgccctctgcgccttcactggggcccagccaagtaactgaatccagccaggagcaagggcagacgctggcacaggtcctgccactgtccccaacctgggtttcaacacagctgaggcctggcatagtctttctgggcgcctctggctggctcggtctgaaaggtgggacagatgcaactggggcctccccgggtgcagcgtgggtggctcctggctggggaagtgagaagccctccgtgcggtgtctctgaagcagccccaggccaaggctgtggcgtgcttggtggtgctgtaggcccaagatgtttatgggtcgagggtccccggggccgggattctgatccctggtgagaggtggctgggaggaagtccagacgtgtcctgagtggccattcctcacactgaggtgacaccgcctctccaaacacgtgacgtggctggaagcagatgctgctgtccggttctccctcctctccgtccctggctgggacatgtggatctcacccgcagccactttcttctggcctctgtccccctgcctgggacacgtggacctcacccccagtctccttctctcctctgccccccgcaggcgcggccaggtcacagtcggcaccagaagtttggcagatctcagtgaggcgttagtttgcatttccttgtgacgggtgagttgaacaccctttcatgagtgtattgatcactgtgtaccttctttgttgaaatgtcgtcagtatttaaagtcacaaatcttcctctaagactatgctacaatttttgtgtaatattttgatggatatttgaaataagtgctaattttctttggatttcttctttgacccatgctttatttagaagaatctctttatgtgtgtatttattttttaaaccctctattctgagaagcatatttagaagagtattgcccactttccaaatatgtggagagtctaaaaggaatcttgctattactgatttaattccattttgatcaaggaacaaactgcaggatctcactttttaaaattacagagacttattcttactgtttaacataagccctatctttgtaaatgctccgtatacactcaaaaattacttgtgttctgcagctgtggggtgggatgctcgccaagagttaatgaggtgcagctggttgacagtgctctttaaaccggcgaatcct

SEQ ID NO: 39423 - DNA, 1001 bp, Homo sapiens
ggaggggggttgtgcaaatggaggctctgccagcccctgagagaacgctggtgcctgccttggacaccaacctccacctcaggggccagagaaggcagcgtggacacacagtcccggggcctgagcccactcctgggatctgcacccaggcaatggccagaggacaccagggcacatggcacatgcaggcacacgcagaggcacgcggaggcacgtaggcacacacaggcacacgtccaggaagcacagggcggggatgaggcagggcccgtggggcaagcactcggtggtgggggggggcctctccttcaccatcgtctgccgagtgcctgcgtggtgctgggctctgtgctgggtccatgtccgtagttgggtagctggtgagtggggaggggcacccccaggctctgtgggaccgcctcgggctgctgaaggggtaccacggctctcttgctcggggcctgagcaccgagggctgcctggagcctctggaagctcctgctgtgtgccggccagtgtcttgcagcaaatgagctctgctccccacccagctgtccctgagcagtggctacaccctgggtcggctcagggtcacccactcagcacccatagacccctggccttggccctaggagagaaaggcgtgctggcttggtatctgccttcctgagcaagtctgctaggaggaggaagggcacaagtacagatacgtcactcaagggcagtgatctcagaaaaacaagccagagaaagacatttcctcctggaaaagttcctgtgatcctggacggagtgtcagggagatggcgggggaagggggtgtgggtgaagggggtgtgggtgttggggtgtgggtgttggggtgtgggtgttggggtgtgtgtgttggggtgtgggtgtgggggtgtgggtgttggggtgtgggtgaaggggtgtgggtgtgggggtgtgggtgttggggtgtgggtgaaggggtgtgggtgaaggggtgtgggtgttgg

SEQ ID NO: 39424 - DNA, 657 bp, Homo sapiens
atggtgttaagacctgtacactgcaagccactctgcactgtagagagaaattagagataacatcaaaacctgaagagagacagggatgctcagtatgcatgagtcatcagttctccccaaatgaaaccatagatttaatgcaatccaagttgaaatccagcaggctttttctgtagaaactggcgagttggtttcatgactcactataaaacaacagtaatgacaccatggcactgctgtaaggataaacacattgatcaaagcaacagcagagtcccaaaatagacccacatgtgtgggatcaataggtttttgttaaaggtgccaaggtgcctcagcagagtgaagaaaagttgctggaataatcatgagtgtccacatggggaaaaaaaatgaaccttgatccctacctcacactatacataaacttaaccccaaaaagactaaaactgcaaaactttagacgaaaatgtcaaagaaaatctgtgtaacttttgggcaggttgggggggccgactttttctgaaatgggcagagtgaatatcctggatttggtgggttgcaggtctgtggcaatgactgaactcaatggctgtggcctgaaggtggtccacacaatgagcatggcactgcgccaataaaactttatttacaaac

SEQ ID NO: 39425 - DNA, 397 bp, Homo sapiens
ctcgtgtaaggcaacagagaaacaaaaaagccatgtcaccatagaaataatcattaacacaatgagcaaacactgataccacatctgactgactttgcggccttggcccactcccggggtttcagcaaaagtcgtgccctttggattgcacatttccagctagatgtgcagcccgtgtgttgcacctctctttccattccttctccacagttagaggtggacactcaaggctccaaaaagtataagactttcatctcagccttcagagggctttcagtctccatggggaactgagttttttttttgtttgtttgtttcattttgttttgttttaagtagagagcagggctgggctaagatttaaataactgaaacaagtcataaggtgctgatttcc

SEQ ID NO: 39426 - DNA, 691 bp, Homo sapiens
gaataaaagtcccaaaatgtgcaaataggtgtcacggacatctctaaaatagcctcaaagaacatttctaaaatgtccccctcctcctccctgtcttctaaacactcatttcaagtaaacactgcttcgaaagcaagtttaaaatgcagcttgattgatggctcatcagcagcaaacaatcacattcaaagccgcatatttacatggtcaatacacaaattaaacatgagatttccctgaagtcactctataaacttgttagatcaaaagtcacttatgcacttcatttcggggaaggaggtcacccagcctgcagaacacagattattcatggcatgaagaaattctttgtttcgcagggttaggcttggatcagaattgcggtaaacctcttggctagtagcagaatattgactaaagctctgtcttccaccagtgcagaggagaaagccctgtcaaaacccacaagaaatctttttcttgtttctaatcatctcaaacactgctgaatactttatctctcacaggagcagacttctttgttctcacagttacgaaatgaaggggagggtgagggcaatctgttctcagccagaagcaaatgaggttttgcaagataaccaggggcatagagacttctcccatacctggtaaaacattgtgtctagggatgccccaccccaggcatgtt

SEQ ID NO: 39427 - DNA, 1004 bp, Homo sapiens
ctgtggcattgcagacaatacaaggaaagatggtttaaccttaggagaattgaatcccaggggcagcactgtgactcagaaaccaaaagggaccatttcttatttgaaatcagccatgcaacttcaccggttttacaatgactctagccacctcttccttagcagacacttccggggctactactgcttgttatctgggtcctttcccttttgaccacagatcctcctggaatctccagtgtgagccttcctttcctcctcctgtgtcttctttactttgacataaaccagttcagtttttgtttcactttctcttgttaaagacacatgcatttctaaaaataaagggtcaaatactttacctatagaaatgtatatcagctttggaagctgatggcatttgtggcactgatggctctgtgttcattaaaaaaaaaaagtatttccttttcttcctggtggttagctacctatccagccttttatgcaattaagggagatcatattatgcaatgtgccctgtggactgaaatgctatgtgtcaccttgcatggtcatgtgttttcacatatccttttttttctgctttcaggtggctggaatggctttaaccccaaggccgtatttggaagccacttgtttaaaattaaggagccagaagctagaaagagctcctgtctctgattcaccacctaggggagcactatctaactatcagaaatttttatcagcaggaaataaacttctattgtgttaagcctccaagattccagggtttatccattaaaaaacaaccaaaatactaacaaatagattattcattcatgatggtaacatttgccatacattgacttaataccaaacactgcataagtagtatatcatttaattgtcttatcagctgcatgaagtaggtatcattctccttattttatagataaggaaggagtctatgtttcacagtgttaaataaactggtcctgacagcccctgataacttctta

SEQ ID NO: 39428 - DNA, 1048 bp, Homo sapiens
gcctctccaggcactctcctctccttatcctaaaaccactactcatttatgcagaagcagtggcctaaatattggccacacgtgtctccagtactctgtcttactctgatggcagttatcatagatcaattaaaactcctttttcctctgagtctctggcattctcaaaaccctaacacagcacctggatagccaatgccagttaggaaggactctgtagtggagtctatttgcaatccctgtctgttaatgatttctcaccttcgcttggcgttttattgtttacaaagtgttcttacttgcatagtctcatttggtcatcaaacctctaaggtgggggttgttatcccttctttacatgtgagaaaactgaggcttagaaagattaagtgatttggccaagatcacagagttagacagaagatacctacttacctactgccttttccactgcactgtaaaagaaaagatcatcaggtaaaaatccagggtgatgggtttcagtactgccctaatcacttactaactaaaaagaagaagaaaaaataataaaacaagaaagtatttaatccttctttagatagttctctctgcttctaataaaggagaactgaacagattttttcctaggatgctttcagctataatctgtaatacatgaactctaagtaaaatctagttgctaagtttctcaattacagcatttgtttattaccaggccacaccctacctcgtggctgcactcccagtttcttcccagatctcagttttttgaaagtgagagagcatattaattttataatttttgctacttctatttgttagcataataagcatgctaacactgtatacatgatcacaagatttaattttctggcctggctttgtttaatgttaagttttaatgagtcaccttttctctcttcctcattttcttttctggaaagcaggattattagctccaagagatgagtcaaatgaagtaacataaatggaaataactttaggaaaataaaatactgtctatgataagatattagggtagctt

SEQ ID NO: 39429 - DNA, 1308 bp, Homo sapiens
tccactcatacagtttctctagacttcagtttcctgatatgtaaaattgaaaaagttggactaagagccctttcaggtttaaaactttgaggttaagaaaggcatctttgaaaactgacatctttgccactactgggatatgactcagaacataacgaagcataatatagctctagaaataaattggtgtcaagaacaattaaagagcaaccatccagagaattctgattgatcatttgtgtaatctgttcaatgagtacctggatttgaaaattgcttgattggtgtcttcttttaaaaataagagccatacatcatttgttgttggcttagagatacagaaaaaagaaccaattaagtgagcttcagagttaatttccaatagatttggatgctgcaaaccaaaaaaaccattgctaggcctttcttctttaatgagtatcacaatacaactagcctcagtatttttcagttgagccccagaagtttcacaatccatttaatatgttgcattccaagtatctgtttactcagttgttaaaaattgccaatgggacagaaactgtctgtcacttccagagcaattagtgtgtgaaaacttatcaaaagaaatctgtcaagtttgagtaagtataaatattgcatgaaagtccctaaggaaatcaaactgagtaggatacacttttgcgagttgcagcacagaaaagtttattttgttttatttacttggctttatttttcagaatgttgatagtgcttcatgtaacccaatggattaatgttttgctctgataaaaacagattttggttcttaagggaaatctcaattgtatattgagcgatataaaaataccagatcttggtttcaaatatgaagagctcttactttgtcctagatgggacactggaatgagagttaagctagaacgagtaggttatagtccgcctcacccctttttggtgctccagcctaaccctttctagacctcagaattttcttatctttaaaatgaagaaataggacaagcgatttgttgggtatgttttagttgtactacactttttgcctgctttgatgtctacattctcattacattatattcctcctgctccttcctgattgccctgaagagataaacaaataaaaatacaatattccaggtggtgatatttgatcgtgaaaaaaactaagttaatatcttggtgagagatttcccctgttttaggagcttagtgcttaggccaacatgttctcaccagtacaccagccaagacttttctgctgaccttcccacttcaggactccac

SEQ ID NO: 39430 - DNA, 4010 bp, Homo sapiens
tcatatttgtccgcttgccttccccaccttgctcacattatgatcaaggaaagatcagcgttttcatccgactttgtactgcgctccagcacggtgcttgccacatggcaaatgttaaattaatatgttggattaagctacattatattcaataaaactgaaaattcttatcagcttaaagagaaaagtaagtaaggtactagctctgtcaaaagctatcagtgctatctctccagactgacagatgaagaaagtttcaaaagatatgctccagtggcattttgtaagaaatctcttaaaaatacagcccctgtggcttctacccaaatgcacttaggccagaatatctgttcagtggtattatctgttttggtctatcaagtcatggatgtaattacatattgactttgatatactgtgacatagccagggacagacgtcacacagaactgcctcttcaaaaaacaagaaacaaacattcaggaacacaagcactccagaatcatcatgtacacttcaaactggcaacaactctgccttttccctggcttttagatttatcttgatttgtctggtatatcttcatagagatgacaaatgttttgtattaaaatattttatcacaaagttagcagactaaagatctcattcttcagccattaatgcccactcattcttaatttccatgagtgttgcatggtgaaaattcatgtcttttccatttacactggagtatataaaatggacactcaaactgtgttactaagcacaaaataggttattaaattagctgttttctgaagatgagagaaaaggggaaatacaaatcaagaagagattgcaaaataaagaggacattcttgttaaaatctattctgtgacagtaaaatcaatgaaattctctctcctcaagatctgggatttggtgactgtatattagactggtaagtgcaaggtgagtatagaatttgtacaatcattttgatgattgaagcacactcaaaatttcacatcctctgtctgcctcagaaaagggaaaaaaagcaaggcaaaggagtttgaagcctgagctgaactaattgctagacttgtcatttactttgctaagagcacatgtagctggcagaactgtatttccccaatattcagcttgtttcttgggcatttcagctaagcagtctggactatgatttcttatttgtacccaaaaggccacagtgagtcataaaagttgaacagtgaaccttggctcagttcctaatacaaatgaggtgtgatgagtctcatgtctgttcactgaccatttaccactcacccgagtcctgcaaaaccctggggctccctgttcccttttccccagctcttcacatggctcactccttcctacatctcagatgatgtctcctatgtggggccaggaggtaaggacacaagccatgaggatcccgaagccaagcagtccaggcagagttcagccccaccatttattagccacgtggctttgaatgtgtcagtttaacctcattgtacttagttttctcatcagtaagataagggtaacaacatctacctcagatagttattttatgtgtcataattgaaagtactttgaacagtgacaaaacagaagtatatcatcaataactttcttacctaaaatatgctcaacaaattatatttttaaaagacagattactatagtgtatagatcatattattcttcttttttaaaatagtggataatgacagggaaaagtggaataatactctccaaagtgactaacgatgttaaactctaaagggtttaacttttagtggtaaattttgatttatttttttctttttgcttgtcattatttttctcacttttctaaaacatagagttttcaaatttttagaacattgtttgataaagattattggacctaataggcacttagagatcatgcaattttatatctttattttttgagaaacaagggaactgaagatcagagaattcggataagaaaaatggcatcaggacagattcctggtccctgatcatcatattatttcactgaggttcagaaaaggctgtttgggctctagatttagacatttgcttcgtttcttttgctttataatttttgataattttatagtgagaattatttcaaataactatattactttgcagtattcacttctgggacacataaaaatatgagttggtagatatatgtgagaacagattttatcagagtttatagttatttatccagatatttttaaatctgctttgagaagataactgatttgggaaagtacacctgttgcttaggaaccatgagagggagaaagtataattgggaagaatacatcatggttattattagtacaggtactaaagtagtccattgatccttattagcacagctgttggttataaatagtgatgagcctgctctgttatatgcttcctgcacagatctcaaagagttatccctaaatttccataaacaaaggtaacagaccactcatatagcataactactaaagaaatagtagccttcgatgataatcatattggctcttctgtctttagccacttacatggctctctctaaaatggcttaagatgaaaagaattagcagagattaggacagtcttgagaagatgagataatgtctgttacactgtttatgcacattacattacacacacagggaaatcatttagcatgaaaattcattgtttagcctttgcctttttttctgttttcctggagactggttggggactggtttggaaggtttggaaggttttttttttgttttgttttgttttttaaattttgcttattagaacaaagatgaatgttgagcaatttatagcctgtgtctgtctgataggtccatgcattgcacagtaattgttaaatatttttgaatattaacccgaattggaactccacatagaagagatgctacaaaacaaggaacaatgagattatcctatcttagagtttcaaattctctctttctctgtactctgtctctctttccctttctctcctccatttctatatttacatacattgttaatcatatacattttggatataggtatgtatatataaaccagatatattgtctttgggggttcaaatgtaaagttaacttctctaaatgtttattatacttcagtataaaattaaaatgtttaaaatgtttatgtatgttctcaaatataactgaaatacctgaccatgttttcccaagtcctcactcatttttcacagcctaatttagccatgaaaaacagtgaataagagcagcattgaagtatttaatcttctcatcttaaatcaagctttcacccagtaggaaaaagcccaaacgatgacctcagcatccttcagtttcacaacttttagtcatgtccaggactaaagtcaagagggcaagtaaagggattctggagtatagtcccagacgtaccagcagctctcataagacaaatcattaccatttctttggtccttagtcttctcagctatgcaaaatgggtgatttataataagttctatctaaagtttcttcttcttgtcttcaaggattccagtcacaactttctagcctacttaactccaatctcaacatttgcccaagccagataatatcaggtttaacagacagatgctgctcattgaatccgatttctcatcaatgctgacagctgatccctgcagaaaactaggtgcattcagtctttcaggccacagtgcgccattttgtgagccttcacctctgtgaccattatacctcctagtggctcagaagactacattccccacaaacttctaaatttaagaccaaaggagacctttaaaatagaaagcagaaaactaaaagattctgaaatattcttgttgcagcatcatgcatcctccattatggtcttgccaactggtcactgtaaactttcctaatactgctccatgctacattagatcctcaactgggca

SEQ ID NO: 39431 - DNA, 746 bp, Homo sapiens
aggtactttttttagcatgaaatttcacaagaaattctcaatatttaatacaaagcaaggctgcagcaaggaagcagccttgcgttgtgttaaatattgagaatttgaatgaatgtagaagggagtgccttccaagaaccctcagagcttcatggaattgagtttgaagacccctgtaaggagactgattggtgtgtggggagtggatgagagtctgaagccagagaagcacagattatcagtgctgaacaaacaccaaagatggaccttgccctgaaatccaacatgcatatttcttgtagagctggtccttcttttcagtgacttctgccaactggaagtcaggggtttatgagaagactgtaataataaactggaagactctcttaagtagcattggaaaatgactatttctcgtgccaatactaggaacactgaatttgaggtaatatgagaatttcttgatgattctgtcaattgcataagaatcccaggcaggagatagagatttgggaagcatctatgtatataggtggtaaactaaagccaagtaattatctccagactcataaagtctactatcattaaaattcttcagcaatgtcagtgaaactcccgcattccctggagatgattcatcttctccaaaattgtgtccgcaaccagaaataactgtgaatgtctacaggtcatctttgtaatagtaatttagagggttttttttttttttttttgctatcacatcc

SEQ ID NO: 39432 - DNA, 2090 bp, Homo sapiens
gtaatcccggcacttttgggggccgaggcctggggaacacgaggtcaggagttcgagaccagttggccaacacggcaaaaccccgtctctactaaaaattagccgggcgtggtggcagacacctgtaatcccagctactcgggaggccgaggcaggagcatcgcttgaaaccggaaggcggaggttgcagcgagcccagatcgcgccaccgcactccagcctgggcgacaagagcgaaactccgtctcaaaaacaaaacaaaacaaaaactacacattttcgcactttaagggctcaacggctgtattcccactcctttgccactctctttgctcttttccgctctagaaagaattaatgaactggatcaaatctaagttctccacgttacagatgggaagcctccgggccaaggaggccaatggttacacaaaccaggtaagaaaataaaatatgcccagtaagttcataggaccggcgggcttagatttcgaatgcgcgtgactctgtcaactgtggacttaaccctatgcagagattagaggagagaatagtcaaacacggataagttaacatttaccgaacagtccgtcctaccctggggtaggttttattaacagtctcgttttgcaaaggaagacagctgccagttgtctcagatcgcacgggcatgccgcgcagatgggcttctgagcagctcagggccagccagaggtctggcgagaagggcgtaattaaacgaacccgcgccggtttcctcagggccccccggggctccgcttcgccccagcgggcctcggcggggctgggaaaccggctgaggttcgcctcacggtggggaggagcgacgggaggcggaagcccttcggtccgggccccgcccccgcactcgccctcgccccgccgcgacttcccattcgccgccaacccatgtgcgttggtgacgtcaccgcgttcaccagcccggaagtgcgcgtggcggcggtggcggctgcggcaacagcggggccggtaagcgggcgcgcgccgctcagaggggcagagttggtggcgtgagttgctgccccttccttcctgctgtgggccagaggcgccaccgcgcccggtcctcgaggaagacgggagcgggacgtggcgagaggcctcctcagcagtgggcaaaatagccccgacgcggaggtcgtgtccccgccacgtttccggcgaccgcaggcgcggattccttggcttccctcagcactttcccctccgcgcggacggccccgagacgctttttcactgggccttgtcgccagcacccggcgtggggggtgagacgcgccttttcagggctggggttccccagagcgttttcctaagtcgaggcggaggtgcgaggaaactgagtgggtctttccgccccacgtggcctgccgggaagcgcggctcctccacccgcttccgtggaatggaatggtttttctctgcaggtttacaccggggtcactcgagagctgctgcggcctccttatgggcaggacccccgtatggggagaacgaggatgtgatatgtagaagggaaggccgcggtgtgccagaaatcagaggagattgcaagatggcaggaaaagaatcaggaaaatgggggcagcaaaactaaattcatgggaaaatacaatgtctaggagctatcccagggtcgtgaatcctcgagtgcaggtggggaagtagggtgatacccacctgtgaccatgacaagttttggagaccagaaactcggttagagtttctagaaccccgcatccctctcatactgcctgaagccctgctctggggagagtgtcatcacagtaccatgtggcatgcgagtgtcgtggtaatgctccccgaccaaaccaccaaaccgagggttgggctgcttattctcgctgcccaataatgagatgcagataaactaggaaagaaaggagtttatttctgtaaccaggtacggggcgaaggcgtggaaaatatcccagaccgactcagaattacagagctttccagagcttatataccttgtaagttgtatgtttatgtgtaagtgtgcattgatctaaagatacaagtga

SEQ ID NO: 39433 - DNA, 1458 bp, Homo sapiens
gcattcatttatctggccctaaatcaaccgcctctgcagttgatttacgtttagttatattctcagcagccccgcctagacagtaaacctcaattatcagattgtgtattacctctcgtttcatctccacaacacctaacatacttgtcatataacgaagggactcaagtaatactttcaagtttggatgatacaccttttggaaagcatctcttgaaaggcattccatgaaaagtttatgcaatattccatgcatttttttttttgttcagtatttcaacacaaggccaaagtctaaacatttcacacaacatacaggaaaaagaaaaactaagtatctctgattaagcataatcgtacatgcctgagaaagaccgatagtaagaaaaacaaaacagagaagtggtttagagatataatgacagacacacccgggttggaatcctgactctgctgtgtgaccttgggcaagtcattgaactaatctgcaaatccaatactcgcttatcaaatcggaaactgaaaactgatgtgggaaggattaaaaggcgacatgcatgcaaagcgttaactgcacggctcgtaacatggtaagtgcttagtacatgttagctgtcactcttattaaaaggaaggagaccagcaaaagtaaccgctgtgaatctgacccggtcctctagtttcagagcatttcctaggagctaaactcagaacacaaggaggatggagaggatgggtttcctgttcttaatagcaaatgctccccccgacaccctggctcacggctcggggcaacagagcagcgaagaaagcgccgcgactccatcgctggccgagggccgacgtgaagcagctttccggtgcggccctgctgggctggctcgccaggcttggcgcccccacgcccgcctcccaggcccagctgcaccgctagcggctccgagcctcgccccactcccgactacagggaactactccgggcggttaccaggcaggagcggcaggtggttgcccatgttgtgcgcagcgtcctgctgatctccttcgccggccatgtctgtttacccgcaaaggaggctgggacagggcggtgccgaagactccgagggagggcccgtgtcgcgcggctgccgcgcaccggggccacagcgccccctggcggccccaggggagcagacggcggcgcgtacccaagcctgaaagtgatggcctaggcgggagggacaattacaggcctgcgctccgtcccggggacagaacgccgtcccctgccatccacggctgagtgcccggcgtacacgctgcagagccctcactttgttccagcccttagcatgacttatttaatcctgatattttgcatatggagaaactgaggctgagagcctttagtctccaccttgtttttaaacgaagggggcagggagcaaatagaaacctgttcatgcagcattagtt

SEQ ID NO: 39434 - DNA, 1335 bp, Homo sapiens
acctttagaaaccttggtgtgcgtttccccgctcggtttagaacgcacccctgcctccactccacaaacgtgcagtgagccctcaaaaacctggacaaatgacctcacctcgaaagccccctctctgatgctcccaggaaaaactaaagcacctcactttgtttcgtccgtaccttacatggttttgtaattatctgtggtgcctctggctgaaatcaaaacgggagccagacccaaaaagtcaaggaagggaagcgccttccaggccactcctgagaagaaacgaactacaattcccatgaggcggtggggccacgggaccacaagtcccagcatccaccgcgcggcccaggactgtcagggtagtgggcgttgcgtgaggcgggtaaatgttcgcggaagcggcaaagacgacacggccttgtgggatggcggagtttaaggagaagcctgaggccccgactgagcagctggatgtcgcgtgcggccaggaaaacttgccggtgggcgcgtggcccccgggggccgcgccggcgcccttccaggtaggggcggggccaggcggcgcgggaggcgggcgcgcggctcccccacgtggtctcctcaagccgcctcgctgggacggcctcccagtcgcgaccttttgtcttctcttacagcgcacccgttggtgcgcgggaataggtgtgcatgccccggcctgggcctttttctgttgacccacggcatcaccttagcaagggtgttgtccttttcagtccattccctgaagcgcagaaccggaggccttgtgagaacctggctttttgtccagtcctgtcctcagaactcaaggaggcatcacggggggagtcatttacctccctggtctcaggtgtctctcacaggtaggataagccgtggggcctattaatggatcgcagccggtgtcgtgcataaaaacagcccctcgagtcagccttagctgtggtctccctcacgctgtgggctcttgggcgagtgtaaattagctgtggctcagccttagagtcttccagcgtacagtggaacagtacctctcttccggagtgctttgaaaatggcaaggaaaatacactttccggtttgctgtaagaactcagtaaatgtttgcttctattaactacctcaaagccctttctactctcctttttctttttgagactgagtctcgctctgtcgcccaggctggagtgcactggcgcgatctcggcccaccgcaacctccacctcccgggttcaagcgattctcctgcctcagcctcccgagtagctgggattacaggcatgggccaccacgcccggctaatttttgta

SEQ ID NO: 39435 - DNA, 661 bp, Homo sapiens
tcatttaaaggtaaataaataaaatcttatttggcaaaggtgtagagcagagaaaaattgtggactttgaaaatgcaaccaatggctcttcaccacaggcaccaaagtaaatgtaggtgaaccttttatcagtgccacctgacaaggaaagccttatctctgctcttctgatagtctgttagtggtttcacttttcccctaagtgttcattcacagcttctagcattaccctgttgaggtccaagctaatatgctagaaaagagttgctctgatcagtcttccattcccctcggcaaagaaaacaaggggtttgtcaaatatggcccagacccaagggcgggagagcaatcctatctgaccttcaattactctgaactggaatcgccttcttccctgacaactgtgactaattccaaaggcccaaccagccttctcataatgatgactctggggtcaattactttgggggcagattagaatctgatctgaagctgaaaaattccgcccccttggtactaatcccttgaactttccaatcctaaatagggcaagtttcaggaaagagcatttctcattttacagcctacctgaatattgtctgtaatgattttgcttaatcaaaaaattaattaaactcttgctctaatggtctaaacacaa

SEQ ID NO: 39436 - DNA, 1710 bp, Homo sapiens
ctcggctcactgcaacctccgcctcccgggttccagcaattctcctgcctcagcctcccgagtagctgggattacaggcgcccgccaccacgcccggctaatttttgtatttttagtagagacggggtttcgccatgttggccaggctggtctcgaactcctgacctcgtgatccgcgcgcttcggcctcccaaagtgctgggattacaggcatgtgagccaccgcgcccggccagtaagttatttatatatcccggcacctaacacatacaggcgctaagcaagacagataaataatagcaataaaacaactacagtttgcttagcccttcctaagtgctaaagtgctaagaatagcaggataaacaattcaagcccttgtcctcaagcagagtgtactcgaggagactacagataagtatacaacaaccctggtgaagatactgagacccaggatcctaatttattccgttaataagagaggaaatggtgatttaaaccataatttgattgccttaaaattatgagatcctcattaagagaacaggttggagggagaaagaaatagggggtaaagaagtaacaataaccctcaaaccaaactccctaatggtcaattaaatggagtcttccggtgaggcacggagaaggaactcctcatacgggaacagcaggtgctcgatttggggtgtggttataacctttacttcccttcctactagtgccttgctttgcctactccaaccccgtccaggaaccgagcagcccccacccgcctcggaggaatcgatggagcacctttgagtgcgcgagttgccgctctccgggtacggggcccggagcgttagcctcccgcgagtatcggtgagcggctgccgaactgccatgggcgccaggccgctggggcgtgccgcagccgcaagaacccgcaagggaccccgcgcccgcaccggtcccggcctcctggctccctgccgctccacacagcagcgagagcagcagcagcaagaggacgagacccagctcagggcaacgtccacacaccagccctagtgcgggcgcagccatgttgtcccgcgggccatgtgacccggttggtcacgtggctgagccctccttaaaggggcagaattttgagctgacttacgaagtgaccaggagagttgctcttcacctttcttcaggtacttctttggcgctgctgcttgcctgtgctaacgtcaaaacgcagcaaaacacaaaactccacaaaactcaaggccttccacagaccgtgcacccctttatgatttcttggttgaaaaataacagtcaaatttgctgggcatttggtaagtgccagagtactatgctaagcacttcactttttaaaatctcatttaatcctcacaaagacccagtaatggcgcgcttgtagtcccagctagtcgggaggccaaggcaggagaatcgtttgaacctgggaggcggaggtttcagtgagcccagatcccgccactgcactccagcctcggcgacagagcaagactccgtctcaaaaaaaaaagagaaatacaatacggaatcagaatccgtggggactggacacagcaatccagggtttcacaagctctccagatgattctaatccacacttaagtttaagaaccactgttctacagttccgtaatcgaacaaaatgcaaaaccaaaacaaaaagaagatgaagga

SEQ ID NO: 39437 - DNA, 1893 bp, Homo sapiens
tatacctacagttggtaaaactcaatagcatgacgcatgaaaactgcatgtggtctgggctcaataaaatcagcctccccattgattattatcattattattactattgttataacagatctttaggcggcgtcaggaagtgcctgtctgggatgctataatgcgtttggctcaccactatgccccagcgcctggcacctagtaaacactcaggaaacgtttgaggaatgaatatacgtcatttgaggcaagacagggcagtcggctgactgcctccgggcttagctcttcccctccttgcaaaagccggagccctaagcagcgtgtagcccgggagcccaggcattacttggcagcgggtgaaacccaccttgccccattcggagctcttggagagcgccccgcctggatgcgcatctctgtgtgagcggctctttcctaagcccttatttttctggtttgcggtttatttacttaagcatttacagctcccaggagcagaggggctgctagaggtacggtcaggactgaggtcgcggtttgtatttattttctgcctcccaatctcagagccggcaagtcacaacacggctcctttatttgtgcaccggagaggtctgcctttctttacctcctcacgggcgataaaagacaagcaactcgggctcagaaaagtgctctcacgcgacttgcctgtgtctccgcttgcgtggaccgtcgctcccaggcttggtttctcgtgcaaacccgagcagggcggagcagattaaataaagacacctcgcgcctttaatccttgaccgcaaacactggcgtttttgtgccccggatttctgaaattcttggctcggggaaccaaggcagggggagggtgggcttgtaaaaacttcccaaagcagaaatccgagctcctagcccctccccggccccagtgacacctggattccagggaaggggggcagccggaggagaggcgtccccaagggttgcgggcgcttcccaggggtgactttgaacggctggctccaagccctaccgaccccagccaaggaacaggctcagcagcctgaaagcctcgcaggacgcccctcccctgtccccgcacgcgtctatttagggcccagcccgggcgcccaggggattctgggacttgtagtccctccccgcagcctcaggcgccgccacgacccgctacttggactacattgcccagggagcttcccggcctatataagccacccggagccgctttaaagtgcagtaaccatgtggatgtgctgctgaagcgtttcctcaagctcgctggggtgggaggagaggaggaggaggaggtggtggtggaggaggaggcagggggtggagagagagaaagcgcacgccgagaggaggtgtgggtgttccgcttccatcctaacggaacgagctccctcttcgcggacatgggattacccagcggctgctaacccctctcctcgccctgctcccccaaaccggcgtggctccccgggcaccaaggtagcggctggggccgggcagagggcgcggggagttggcactggctccccgggcgcagaagtttttgccccgctctcggggagatcttgatggatgtgcatgcacttggcatgcatttgggggttcctttactgcgggcagttgttttggggggagctcatttgaagcttaaaaaacaaatatcctctactctagtgcgtggctttgggggctccccattctggtctgatgtggcattcccccaagttggaaactgttgctgcagctgcaggaaatagttctttttttttttttttttttgaagagaggttgtgggggtgtcatatgtgagtctgctcaaggaaataatctttctaaaaatgtatccctctcttgcgc

SEQ ID NO: 39438 - DNA, 970 bp, Homo sapiens
gataggcttgtgtgaggatgatttggtgcatgtgtaacacagtaaatacctgcaatacagcctcagcactcagtgaagagtggctattgtgactgaatttgcaattagcagctttcgggacatctcttaggaagctcaaacatggcctttgccatcttgtaaaacatcgatatgtccgttttaaaaactcagccagtggagtatacaaaggaatccatagccaggcagactttagccttcctgaattttttagattttattgagtgggcctggtaaccagctatgacagagcttggggctattagaaaagaagccatcagggcttttctctcctcgcacgagccttgatcagagcctcagttactgacgggtcgtttgctcgagatggtaatcctgccttctgtatagaattacaagcctagccagagaggaagttgtgtttatcttaccccaaacagcaggcattccagtgactcttgacagacaggaggaagttattgccaatctgctctttcccaaaagctgcccttccctgcccccaacgtgctccttgcatgtttagagaggtttctgccagccagcctgccaagtggcattctctcccgggctttgaggacagttgcatttgcagaaggaatgtccagaggctacttctttttctcttttaatagatttaggggatacaagtgcagttttgttacttggatgtattgtgtagtggtgaactttggtcttttagtgtacccatggccccggtagtgaacattgtacccaatgggtaatttttcaacccgtaccacccccacaccttttggaacctccagtgtttattattcccctctattatgtccatgtgtacccattgtttagctcccccggtggcggctacttctatattattggccaaggtggaggcatctctccccaaggtgagtggtcagcctggctcttacaggaggcaaaaattgtg

SEQ ID NO: 39439 - DNA, 1596 bp, Homo sapiens
ccacagagagcaggctgtattgattgtctccccaagacgaaggtcggaatggctactaattctcttttgaactagattggattctgcaaacaattgaacagctgactctatgctaagtggaaatgtgattgatattgaaacagaattaaaatttcaacttctagggaattaaattgagtgcaacttcagaaatttggagatgaatgtccaagtggtttgaaaagcgattttcatgttccactaagtatattaatatcaaaagtgatattgatgtttgagaacattgggctgcagttgtttccttgtccttttcatttattgccattttgacctaaggtttgtgccaggaagttcagcttcactcctagtgaatctgagtggcgtaatgctggccccgtcttgctcattgattttcctggtagccaaatccctgtacaacgaactgtaacatatcctcaaatgaactgcataaaagtatgttggagatggagaggagatctataaattcagaggacaaataaatcaaaaagtgaatgacttgtaagaattcataagccaaattcagagccaatttggaaactgaacctcagatttttccagggctgtattcattccttcccctgttggatagatcttctaagagccaccctcaactcgtgagtctgataattgcttttcagatggacagttaccttaatgaactctgactttatgtatgagtagtagtttgttgcacaggagttgttttcccagaaggtattgacctttattccagtctctactatgagcaaacctctatctgttgaatcagctcctggaacctcagctctgaataaataaagagcttaaaggtaaggaataggtgggtcagttcagccaagtaaggccagatagaattagagttgagagccaggtcagagttgagagtggggagaaatagccaggactatttggcccaggaagcctgaatggggacacatgcacacacacacacacacacacacacacacacacacacactgaaacactctgcaaaaattgaggtgtttcccaggttcctaacctcctgaatgcaatgcagattctttcctccaccttcccttcattgttcccatacaactctggcctgtaatcagcccaacctgggcctgggccttggccactactagatattctgttggcaccaagagtagtcaggaccagttttccctctcttaatttcctcctcaggagagttgagtgtttatcatattctcttcttttcctctctctttctctgttcagcttaggcaatcttccattctgcagtctttctcctagctgtgtatcttgagaggtaatgcaatgtaggttaagactgcctgagttgaatcctggcagtgccacttatgacttgaatgacctcaagaaagacatttaatctctttacctcagtttccccatctgtaaaatggggataataatacctatttcagtggaatgttgtgagagttaaacaagttgatatgtggaaagctcgtagggtgtggtctgtaatgtgttcaattagcattaattgaagagaagtggagtctccccttcaattcttacctgagt

SEQ ID NO: 39440 - DNA, 1233 bp, Homo sapiens
taacagctggtgctaaagacattcatttatatgactaatatttgagtgcctgttacgtccagggggatttggatacagtggtgccccaaatgggcacagtgtctgccattctggagattacagttttgtggggggcaaagggacaataatacagattcatgcaagatgacagctctcagctgtgagacacattagaaaggagaagctcatggaatccggggacttctacctaagcagggaggccaggtagcggcttaggagatcaggtgatgacaggtgagtggccccaacaggtaatcatgtgaattgctttcctatgctttaaagtgctgcactaatcaaacggatagttccagcgaagtactcccgaggtggtgagcagaacagtagtccacctagttttcatagatgtgtctgtagaagggattggtgtgtttagaaagcaggtactgtggttcagtggacgtgtctgtttctacgtatttgagatgtgattcccactgaatcactgcctccttggaactgtggaatctctggagccattggtgccagctagcaactttgccctcctgcattgcaacaaaaaagctaaattcacattccagctactcagggcggctgcagcctgcatatgttaactcctcgacttctcctacttgagctgcttctgccggcaaaagatgccattgtaaaattcgaggtagagggggaaacaggagaaacaaagagtgattaaatttcaccttcagggggcgttctcatgacgcccaacccagggtggagatgtcctactttttacattgctgtgaactgctgggttgggtacctgccagtgttcaggcagcagttacataagagctgctttttttcctggaatttaggctcactgctgatgtgtgaccttcagcagtaattgccaataaatgcagtggggctgtttactgttagacactggcaaccacagagcaaactcaactcagaacatacagaacctattgcaaagtcagtggagggatatatatatatatatatttatatatatttatatatgtctgtgtgtagatacgtgtgtgtgcgtgtatatatatatatatatatatatatatatatgcatatcactgagattattccgtaatgactgaagttgtataatttggtcatgtcagaatgtgtttttaaaaaatgaactttgctattgggttctgatgagcttgtcctataaactgtaggtga

SEQ ID NO: 39441 - DNA, 2300 bp, Homo sapiens
tcccagctactcaggaggctgaggcaggagaatcgcttgaaccctggaggcggaggttgcagtgagccgagatcatgccactgcacttcagcctgggagacagagcaagactccatcacaaaaacagacagacacacaaaaaaagaatatttgctttgtcctccttgagtaggtcaggaagtggatgcccagagaggttcagtgactggctcagggccacacagagagccagagctaaaccctggatgagccatagtcacaggatgctcatgcagtgctctggggttttccagtctattccacgaagggatcacattgaaaagtgtttttctggttagacacgattcttgaagatgcaaagcatcctctgttttctcaaacggcttcgtaaaattttcaagggaaaagacagttattaatttaaatttaatttttgttttaagaattaattaaactaattttagaacaagcatgacagcagtttaacagaggaaatagtgtgtcagtacaatcataaaacataatccctgccgggtgattaagaaatagatatatactacctatttctattctgaaagaattcaagatgcttctctggacaaagagagcacaggcaagagaattcaaacagacgacatactagttccatctttattttcttttgcttttgttttgattggcaaaggggtaagagggtagctccgtgcattcctatggtgaatccatgcctataattcttttgttctgatcatattggatcagtataaaggatgctgtagtgggagggtttcccatgcaaatagtagaatataatacttctgtctatatctctgtctgctctaaaatgcatgggaaattgctttaattctgctttttctcatatgttctttttgcactaagggaagatagcaaaaatgtttacacagttttaattctttagcatacagaatgtaagggtagagttaaaaatgcattcttggattgtgatctttctatcattttgaaaatacctttacctgtgctctgcttttactttccttccccactcatgtccttcctaccaccagcactgtccctccccaccccgagcaggaggctgcatgcttcagagggaagttttctccctgagattagtggagttggactcatgcaggaaaggtcgtctgtccagaattgagtgagcaacccttgttgtctttgccgaagtagtttaatgccctggatctttctttcattttctctgttgggaaatagacaaaagacagaaatcattagattacataatatagcagccctatattaagaggctttcttccctcttggggatcaaactatcaaaagggtaatgttgagctggacgaagacaccaccagatttcgtagtgtcactcatctcatgctttcaacaccagccctggcctgccacctgacagccaccttctggccctgaggtgagtgtgctggagccctgttagaggccaaggtcacatagttgcagcgtgagcctcgggtttgtctcgtggcctcagactacacctcacactagtcacaccgctggtgtgtgactttggtcccgagatgcccaggtggggtctggcagttccatctgacatctcttctctgctccaggcacatgtccttttggagggcagattcacggcactgtctgcagatggagcggtggacttttctccaggcacacctttgtgtagcccctgcatgccctctcaccccttccccctcacctgcatgtcctttcgaggcatccttttgttgctcatccatgggctggaaattattaaatcaagggggagggtggtatctgtgtggcatggctgggatggggccaggaaacccagaccatgaagccctcaagggaaacgcatggggtgggaaactcatctccaaagtaaccctgagtgcaggaaaccttgtttctcccagagacactggagcagggagactgcatcccctaagcccaagctggagcctaggtcttcttctctgctgtaggacaggatgtggagaatggagagacatgggagaaagcctaaacccacaggagacatgtggcacgtggaactttcccaagccttgggcccctgctttcatcactacccctgctcccctgagagcctccgtggacacgcatactattgctttccttgtctcggtggactgagacaaggatgtgctgtggtttttcctgtcacttgctttgttttaaagcatcattcctccttggttagtggtagactttttttgtttctttcttatcttaaatgtgttcccccatcgcag

SEQ ID NO: 39442 - DNA, 906 bp, Homo sapiens
accttgcattcttatattttccatccttgcctgccctttagaattgtcctaggtcctaggagtagctgataaaggcacatagctgtccctcatgtcctgagctctcagaggacttggtatggaatgctgcctatgcctgtgaactttgtaattagaaacaggttcaagttttggggttttctttttgccagatactagctgtgtgattttgagcaagttaacctccctgtgcctcagtttcttctgctgtaaaatgggggtgacaatggtccctataccttaggacagtgagctgtgcacatgaagcccttaacacagtggctggaatgtgataagggatattaacttgtagataccttgtggagtgaaacattgaggtgattttgtagacaacaagaggagaaggaaggtattttaaaatccaggcgctaccctcatgccgactaaggtgtgagaggctcacagctcacatgagagggtgatcttgcctgaagcacatgatttttaagtggctggaacctgggaaaccgaaaggtcagttctctctctcctttgtgtgtggcaatgttaactccttagtgccttgttcaacactggctctcttcccacgcagttcattcgcttatttagttcagttcatatcagtggaactcatattggtagagtgaccaggtaggagcttggtttaattactccacatcactaatctaccaattttcattgttttaatgtgacacttattacaaatgactttttcttttctcagtcttaggtaataatgtgtgggaatttctgactgagaccaacatctgatatttgtttgcatactgtaggtgtaaactgctggaaaaaaactggtattatttttaaaaagggttgcacagccaaatgttaaagctgaagaag

SEQ ID NO: 39443 - DNA, 1838 bp, Homo sapiens
aagtgggaaactataaaataagcatttgcttatgaattaatttttggcacacatggggctcagcagggctcacggcactttcatatccgtccttcgagtccttgccaatttctatgttccttcctcctaagatgttcccaccagcgcctgggggaagttcccttcgcttcctcttccttacagaaggacaggggctgtccttacctggaatgaagaggaggacaggctatctttggacatacctcgttttttatttttgttttttttaagccaatacagatgttttgggatatatatgctgacatgaccatagagaacctcctagcacattatggggatagatagttaaacatttttttggactaattgcttctggtttcagaagcactgggaatttcatgtatcaaatggctgcccacgtctattcctatgccaaagtctagtctacagacacacccgaaaagggttttcttttctgcacgtaagcagctagagatggaaaatgtgagaagtgctccgtcaggaaactggcctgcaaattcagcagagagagtgatccctggttcatgaggcctttcctacaccacactctttttttttttttgaggttggcttaagaaatcagcccaagaacaagtgttagataggaaatctcacatcccttccggaagtcaccaacacagtgtgggagggacacgttggttgggctatctctgaccccagttagcaaagagatgagggcggaaagggcaatttgatttgcctctgctggaaatggaaggccagtttgtgaggaagatcagccttggtttgacagggcagtcaccctgaggaggaggaaaagattggtgtgtgagcaagttacgtaaatgggtgttgtttttggcagggaagtcaggaatgagtcacttctgagcggtgttttctaacctcaggttttatccatgtgggaaaggagtgaagccagcagtggagtcagggcagctctcctcctgcacgtgggggttcgagagctgttggcattaaagaaagagggaggcagtgacttgtccccagcaggcgtccccagagacactgcccttctgcggaagctgtgaggggtcagcaaagccaccccaggttggctcaaggaccagcttggctcctttgagaaatggtggcgtaaaggttagggactcagggaggaccccctggaaggagagagcctatcaactgcgggcctccagaccacaatatttgtgctggaattccagctctgcccctgccagccttcagtgaccttggggtttgtcagggccactttgaaactcagtttcctcatctgcaaaatgagggttggaaaagcctagtcccttccttatggagttacgaagaacatgagggtaaagtgtgtggtccggtagacaagtggagctgctgccagggctgctgattctgtggtgtgggtacagcctgggctcaagccctgcctcctatatgcccacctcaggactcctggcgaagtccacctcactcatcccactggttcctgacttggagaataggatggtgacggttcccacctcagagaactcctgagatgttttcacagactatttatagaaagcacctcacgtggcatctggccaatacaaagatctcaagatgatgtggttcttatttttatttgttcatatatatttttaagagatagggtcttgctatgttgctgaggctagacttgaactcctgggctcaagcattcctcctccctcagcctcctgagtagctgggactataggtgcggaccaccatgctcggttctaattaataatatttttatttattttaaatacatg

SEQ ID NO: 39444 - DNA, 4519 bp, Homo sapiens
ctatttccgattagtggatacgtgtgtgagttgtatgcctgtcttatatttacaagaggaagtatcccgtttaattttactttcacaccaaaaacccaagtgttaagagaacgcggtgttttaacactccctcggttatcagctgcagagcggaggttgtatattgtcacatacagtttttggagtatgtttctacatttgttacctggcaacattgctgcactgggacgcgaagttgtattggttcccagcagaccctcgctgttcgtactgtagaaggcagaagttgttttcctccgcggggatttagaagagaaggcacaaggctagtggggtttggctgacagatgggctgatgcgcttcggtgacatgacccagaaccaggcactgggcaggggatgtggactcttgtcctgtcccaacaacagctccctgtaatgcaaggtcacgtggtagacaagggttagtattaggtaaccttgaatactaattcgtgattctttatcttctcaaagtaaaaacaaaagaacaaacttttgttctggtcattttatgagtcatctgagcacttgcagaaccataatggcaaatagctaatacatggcaccttttcagttgctcacattggatacccaattccctgccttcatttatgcattattgtggttttgaccacctactggttctgatgagagaggaaatcccgtagtaggagtgatagccagagcatctcttgctgaggtgaccccctgagctgattatagccctatggggtattttgttttgctgatacataatacattgaaaacactgtatatagaattttttgaatgcttaagtggggcctccatatacactgagatcattttatccccctaccttccactgcacttcactgacacttaaccccgaagacatttgcattggaaacttcgcattatctgtttgaaagtcctctcagttcaagccacacattctaagactcagcaaaagcttattgacaccaagggcattgaattcaccagcacctgtaacgtttcttgaagaatgcttgctagggaaaagttcccatggtaactgtttttaaaagagttttgtagcatcaacaggttagacaggaagtcaaaatcatggagctcagcagcatcccctataagcacgtgctcctttttaaccacccctaacaaagacactgaagcaccctgttcataagccctgatgggcactggagggtctggccaggttgggctggatttcaggggacctgatttgtgtttccctgtgcagtgctcgtttccatcaccatctttaaggaggaggccttttccatccactggactcttaccatcgtgcctgttaaggaacaaaaagacaactgcttaggcctggagggtatgtggaaaccaccagttacctttgaatatacctgtggtgctcgaacctcctttagaaaacccaagatgccattttaatgatgctttgctcttgggtatcaaatttactccttaatttacctcaggagatgttctaagaggaagccacaagattccatacctgctgttgttgttttagagctggtggatttttttttttttaatccgcggaggaggacttgaccctgtgggttcctaacttggatggccatgcagagcacccttaacttggaaatctatatcctgctgtttaaacttcaagatgattcctatctggattaaagtcctcaaccagcaggccgaggcaaactctaaagaaaaacaaggtcatgctgcatttttttttggtaagcacaggaatcaacaaagagatgttatataacttctatttatatcctccttgctcactatctgcaggcagacaagagtcgctgagaagggatttaatgagctctctgggtttgctcaccttcctgagctggtaggaaccagcttgttctcaaatgcgtcagtaaagaatctggctgtgggtgggcggccagggtaggtggactgcgttgttgctatggtgttttttaattcccctgtctctcaaagatctcactccccccttccctgactccttccttttgcccccttcctttctttctttctttttttttttaaatctgtaagcttccttgtttctcacacctactcatgattcttggagctgtctccggaaacagaatattttccctctccttcctaagtgctcagctcccccattgtgtagccccgggacatcagaagttgttttctaaggtgtgttttttccaccctcccttatttcttttcccatgatttttttattaccaatccctccatgagagagacctatcctaggagtcttccatcttgcctgatagaagttttctctggcatattccaaattcagattgctccaaaaccaggtgaagtctgttgctagttggacagtcggtatggcctggaggagaagggctgtttgtatttccatgcatcctcctttgtcctcttgccctgggtgaagcaatgacgtctctgtctcctctagtgcgttataaaatagaaccgcaagaaaacaagagaatgggtttaccccacaatcataattcctggagcttgggtaactcctgttacctgaaggttgcaggttgaaatgactcagcttgcatttaattaaaaaaaaaaatgctgccccatcagattctcagcagggacgacgaatgcaccttgctgagaaccctatggctgcccagggagtggccccctgcaccctggccggcctggtggtggccacagaggcttctgagatggctctgtgttgtccatcacattcccaccagagcagagacacttagaagatgtgagtagggaggttaggatgaaaagttcttagaaaagaatatgtagttccatgaggacaggctgaaaaaatttttaaaaagccaaacccacctctgccttgcccagaagttgtgcaatccttaatagcagtagcctgtttgaataatcagaggcaagctgacttccctttattaacttctgttagagacatctgcataaaatatccccggattccagaccaagtaggtaatttttttttcccctctgagtaacgggagggactttccctttggaaatcttccagcagagttaacttcatggttgagactgttttctcattataaggtgccaacagctagattcctgatgcagggacagtgaaggcgcctcatgtacacacttggatcccctgcttccctgagaactgacttgatgttcacagttgcctctggttcttctgccttgaccctccttttcacggagaaatctatgcccgctcacatttcctgaggtcctctgagttcctctttgaaactgtcagaggctctctcaaagtttctaccaatttcctattcctgggttttagacttttgatcaagatggctctgacactgaaggggatagtcctgtaaaccctctgaagtcttcaagcctcgtttttcccctggaattcaggactttaaaaatatatatattttattgctcttcgaggaggatgtgttgcagttgccctcaccatatggtatttgagaaatatgtttttattagcctccttgcaacacaaacccacaaactgttgagcccagagcttgtagctatcaagtctggggagggagccaggtttggagacggaaggtgcacaaatgatcatccctcccgggctgtagttaatcatgcaagctgctgtgtcactggggccggggtagttaacagttaactcgatggattaaggatcctcagccaggctgagcccatcacagagttacgtgcaaaaaccggataagcccgtagaggtgacaacaccacatcagctgcctttggctggtctgcggtgtgctgcatattcccacttagcaggactttgagctttcacatgcaggcttcttctggccataaagttatacttcagctgccatggatgcaaagcttggcttgagtgtttcggaattgcacctccttcaggattattgttcattcattaatatagtaaattttttaaaaagagagaagaggccttactgtgttgaccaagctggccttgaactcctgggctgaagagatctttctgtctcagcctccggagtagctagaactactggcttgtgtcaccacagccggcttaatatagcagatgtttacttactgagcactccctgggtgtcaggtgctatacacattggcgtcaatacagtcagggatgagaccaacatagcccctgccctccaggagcttacagtcttgtgggagacagagctaggaaatcagctcatcatcagctaaatcagagcttcagagaagtgtgatggggaagcaaacaggcgccacgaagcgtggccagggagggcttctctggggagataccgttcaagctgagacccaacagatgcgaagagaaggagctgtgtgaagagtagcagagggcaagagtatttcagaagagggttggcttgtgcttgggatgttggaggagctgagtgaaggaagctaacgcggtcta

SEQ ID NO: 39445 - DNA, 2991 bp, Homo sapiens
atcagtgtgcggaaaataaacactgtatgtgcatgatctcactcaatcctcatcacagcatggtaggtggtactattaacactttatagatgggaacctaaagctcaggaaggtcgagcaacttttgcagggtcgcggcgctgggaagtgctagagccaagactgaaatccagagctgctgaaccagaacccaccctcaggttgtcctgacccacatatccgcatgtggttacctgtgtgcacatgcacacagccctcctgtcagtctgcagccattggctggctggcggcatctggtttggactggcgcatcttagacttggactggctcatctcccagccccgaccccgagtgatactgaattagcctcctttaaaagaggcaagatgcaggaaaggcccctctgcgggtagagaggagagtgggaaagaggatctcccggggatactgaccggctcatgcataaatcagtaagacaggagttagatggggtgtgactttccgagctgctgccgccagcaaccactgctcagacaaccacttcacaaccctaggggttgttgagacggtaggagttcaggaaggggtatcaagtgcagcccttgcaaaggatgtatctgaaatatatgttaattttgacctgctgaaatatgagaaacttcactaccctcaccttagcttgaaacagggaatgacatgtcctttggtggccagatttgagaggtgtcaaagtaaaaggagaaggacgattcactacaaccacagccagactggagcttccacacccaggtgactcatctgaacgactttaactccctaataattacacatgagaatgtctgctccatcatcctttaagcctggtgctgagtttttctcacagtgggggtagacacctccctactttctctctttgcctctcctgctccctcttccttgccctcaacattccattggagattttccagtttgttccattacgggttagttcacttgacctcttcagaaactagctatacaggatccagaagcaaaggagcaattttccagatcaaaagtaggctcaatgtggcagcaagtgggatgctctcaggaggtggtggggtgcttttgcttaggaggggagagcccaggagcccgcattcctgaaaaatgctttcctgagagctgcgggtaatttgcttcaaaaaaagtaacatgcaaaagagcctttttgcctgacaagcacctcctgggtaacatttccaagcaaataagttctattagctaattcagtgctactaaacatctatgaggaaacattatgagaagattcaaaagcagtaggacatctggcccttgtgcttatctgtatttgataagatgacacaggaagcaaatacagaaagcaacgtgttaacaagggcaaaagatcaaaatggaaacttaatacctgcgtgtcactaccttctgtttaaaaggggaactggctgaagtcttaccttgacccaagagagagcctgtgaaatctgcagacactttctgaagttggggacaacagcttccagccagaggcaacgcaaggaaccaagtgcaggggctggtgggaggagagtttcctgcagatcatgattagataagagtaaggacctaggtttgggggaaaagatggtggcagcagtgaccggagccacgaaatgagcctgaaaattcacacagccatcatggggcgtctcactttaaggaactcagaagttggagtccctgccagacagcacttaggtgcaggagagaggaagggcgagtccaacagggcgtgcacttaaccctggtctgacctttctgcccgcctgtgcacctcctctgtgcatgaagcaggcagctcctggctgttgataaagtgccgtggacaccttctgcttcgtgcagatgcacgatgatgggtttgggcttttattctgaattccagtgaggatgctggcaggaagggagtgcctaggtatgttcctagaatattgatatttcaacattggtagtgctgagcagcagctttccttgtggcctaacctgggaggccacgagcattggttaaaatgtcacctgggctctgacaagcccttaaccatgggtgaggatacagcctgtgctgcctgccaaatacgattcccagaatgccccctgaagttagctggcaccacggcagagtcaagaatatcggagcagggaggagtgaagagggatttggcactggcttcccggtggctggaaacagtgtgtcagcgtcactggactcgccgcccagccagccagccaggcctctctcaccccaccctgtgcacttgggcttgggttcgtgtcagtggcagctgcacaaagcagttgctgagcttaagtttccccacccagccttagaacacattctgccctttagtctagggaggatgaaatcaccccttgttccgtgcagcacttcactggcactttcctttcattgtgaggcacttggcgtttgggccccggttctgcactgacctcccagtgctctcctccgaatttcctacattctgaccttcgtggagggtgtgccaggtgccgtttgtaacaatgagttgagcagagccatgatcctccctgaaggagcttgtgtgctaagggagagcatggggcgtgagtcaggtatacccaggagtctagtctgtgagactgtgcaggacatgagggttatgcacagacattgttccgtcagccactgaagactcgcttcactgtgcatgaaaccacttctccccattggctacttcgtccaacgatgtatgagtttgtacatgcttattatacacatgaaatacctgcatacatgcacgttttcctcaacttggcagatctgataagctccaaaagtacattttctccccaccgcccataccctgacccaccctcctgctcctgccccgacagcaccaccaccgtgctgcccggcttgccctttacttccagacgtcctaactaca

SEQ ID NO: 39446 - DNA, 803 bp, Homo sapiens
ccaatttgaaaaacaactgaagttaaaaaaaaataaacacacctactaaaaaatccagaaatcctactaccacgtattaatccaaaagaaatgaaaatatatgtctatacaaaaacctgtatgcaaattataaacacctttattgatatcacctcaaactggaaacaaaccaaatgtccatcagctagtaaatgaataaacaaatggtggtgcaaacatacaatggcgatggtgtgcaggtggcccacagcccacacacccaggactgctaatgtttgggttgactcacggtacttttaccctttttagcacattcagtgtgcacactttttcaactaagtatttcacagagttgggcaggagggcaagggtcaaaaacctgctcactagagagcaaggtagcactggcagtgaaacttaaaatgatttgtgctcctgatttaaataaaaataatcagttgcctgtgttttagaacttacaaatggaacagtcctgtaggtatgctgcactagtttcccactgttgctgtaacaaattaccaaaaacttaaaggcgtaaaacaacacaaatttattatcttacagttctgcttgtccacgttccttctgaaggcactaggggagaatccattttcttgcctttttcaggttcaagaggctgcctccgttccttggcttgtggcctgaccccatcttcaaagagaggaatggccagttgagccgtttacacattgcatcattctgactctgactctcctgccttcctccttcatttattaggacacttgtgattccattggtcc

SEQ ID NO: 39447 - DNA, 3195 bp, Homo sapiens
ttcaattattagaaataattttttgaatttttttttcaaattattgaaaataatccacctataagtggacccgcgtagttcaaacccatgttgttcaagggtcaactgtaaaataaaatcatgaatatacatggtatattgaaatagtaaatataaatggtacaatctcaataaatgtttattatgattgctgtagttatttatactacattaaataatgtatgttgaactgaaatagtaagaccaaggacaactaactcgtttatgcctatctcaaaaatctggaccattagtagctaaactctgcaactgtttaaaatattaaaatgaaaaactggttaaatggaaaagtcaaaccctggattccctcatatgtgtatttttccccctgtggatctcatctgactggacctcatatgctttcaataatttatttgtaaattataattcatacataacatcaatcaaatggctgcttttccaacaaggagctatgtgtgggcaaatcactgactttagcaaacatctgacagttaatcaagggggtcaggatcggctatttgtacatattttagatgtacggcatcacatactgcgtgcggtcatgaaaggctcacaaaaagctagtcacatcctggcaaaagatgttgtgtgataaacagaccataaacagaaactatcactggcacttaggggcaaactccagctgggtttctttatccctaatcccagtttcagctgcaggttttttccagaaagaacagtagtttgatttactcaacactctgtagaagtcagggcgtggttatcctctaaataatattacaaacggattttctctgaactcctgtagcaacaggatctgacagtggttactggtaggaaaaggtgaaattaagatcaaaataaaagcctacaaaaaataacagcttttaacgaccacctagagacaatggaggtaggggtatttttgagaccaaaaaaagagtgtaacacagcacagaacatgaatacttttcaagctttcaacacagttaacagttgaagagtatctggttttgccagctctcctattactgttttatcccatgttattccaatacactaataacctccacaaatacagattaatcacgtttccttcttgatcattagagaaggactaattgtaagagtaaatttagaaaaaataatcaatgaaatgcttcctttatcttttctaaaacactaaactagaaagatgtgcaaagtaagactgagcagctttttctacggcagggatcaatgggagtgtacgtaataaatgaataattgcattccttctccctggccagccgacagagtggaaatcgacctctgttcggcgggcatgcacaaccggctggcatggtgtctgcgttcccctcctatgaaaggatcagctctagttacatgccctgtgcgcggcctgaagcctgtaaccgggattacgagcccactatgagccagggactaaaggtgacacagatttcacctcttttcattacctttgaaggaagttctgtgccctgacgaggaaactggggccaagctcgcataggcagtgcggccgagtcagccctgtggcccccaagctggggcacgaacccaccgcagtgcttgcaccaggcactggctccgagagcaaaggcatgactgggcacctaaatacccactaggcaggcagtgactgcgacagtaactctcttctttttggccactctcaggccgcaagtcctccagaaaacggaaaactgaggcgcgagccaagtcactttccaaaggtcacagctggtagcaggccgaggagggcctccaggcctggtgcttgcgaccctcaacgaccatctgtaataatgcccagagcctctgccaggattccccagccctatgttcccgcggcctttgaggggaaagggccagggcctagacgttcccctcccgcgtggttttcccgtcagcagctttcgtctgcaagggaaagcggcggccccacccgcagacagctgcgaggcaccgcgccaagcgtatgcgcctgttcccaggcactccctcctccgccttcacccttttgccacctccgccctccacccagccccgccgtgcgcctgcgcgccccggcccgtgggccagcgggcagtctactcacgtgggcctccgcatggcccagcgccgccaagggcaaggcggagcctcgcgatcgccccgccccctccgtgccccgcctcctgtagggagcgcgggaccctcggctggcgcgggcacttcccagcccagcccggggcgccggcttcgccgcgtgcgcgtgcgcatggtggggtttggctggctgcgggatgcggtcgaggccgccgaggccgcaaactccagtgggaaggcggcgtgccgcggccggcttcggtggaggagggggcgtttccccggaaaaggaaggaagtgggtgtcacgggcctcaatacggcccctttgacgtcttgagtgggaaatcacaagatactgctccagattttcccattttatggctaaatccaaatgactcggaccccctgccccatcacatcaggaacttcagcagttccttccaccaaagctcaactattgctgcaagcgctttggtaatcacgagcattatctatgaagctactgctgtggtcagggccccagtcgtcctgctgagtagcagactttgaaagacggtgtccaaggccaccctgctggtcagtgacctgctctagaggctaagccagggcatgcttagaactttgatatttagacttcttacattaacttaacccagttaacaggtttgtgggggcattttttgtttgtttttttgagaccgagtctcgctgtgtcacccaggctggagtgcagtggcacaatctctgctcactgcagcttctgcctcccggattcaagcaattctctcacctcagcctccagagtagctgggattagacgtgtgccaccacacccagctaatttttgtatttttagtagagacaggatttcaccatgttgtccaggctggtctcgaactcctggcctcaagtgatatacccgcccggcctcgcaaagtgctgggattacaggcgttagccaccgcacctggccttgtgggtttttttttctttctttctttctttttttttttttttttttttttttaagagacag

SEQ ID NO: 39448 - DNA, 400 bp, Homo sapiens
tggtactggaggataagtagactagtagaaaagaatgaaaagtgaagaaatagacctgagtatgtagggaaaattagctttagatacatatttaggataaatttccaaaagcgagattgctggggcaaagggtcaatatagctctttttaggtattgccaaattccccttcactggggctgttcttttgcattcccaccagcaggtgagaatgcccatttccctcccagcctcaccaacagtgtgtactgtcaaggttttgatttttgccactgatatagatgaaagtggtgtctcagtgttttaatttgcattctcttattatgagttaagcttaataactttccatttaagagcaatttatagatttttatgtctttcttttttattaaggcataatt

SEQ ID NO: 39449 - DNA, 12199 bp, Homo sapiens
aaaaatttttgaggcttcataagcaggtaaaaagtgatatctgagcaagcaagttgtggggatgtataggggagcttggggctctaaattcttgcacaggaagggcccgggagttactatagatagtaacagtatagactcattcagcacacagtgtaaggccaccaagatgctgagtcccaataggaaagaagagaaagatcccatctttctcttgtacgaaattatgttctctccccacttagaagagacaaaacagcagggacggctacaaaatggcaggattacccagtgcagctgctcagtgccacattgcacaactccagagggtgctctcacacagactgcaatgtgaatagctccccctggagttgagcggtgcacaacccaaacaaccctaccaggcaaccgtaagtatagtgattaagagcacaagctttggagtccaacaaacctgggggcctgtctcagactgaatcccagactatataacctggggcaggttatttagcctccttgagcctcaattttccaaacagaatatgttatacatccctagggcctatttcagtgtctggcattgaataacaataaacacgtgtcaaatgcatcgagctaatactagtacctgcctaaaaggtggtggtgaggagcaaagaaattgacatacgaaaggtttttaatatctacaaaagatgacagactgaaatagtaacattctccaggatggaaagatctatgccacgtaggaattgtttgttcaaattattattttttaaaagccataagctatggagagaataacagagttttgttttgttttttaatcctgatacggtggaagtctggtaggatgggaaccgttcttgaagcttgagaatacattcggaacaaataaaaagtaggaaatgcatacattttgttatttacagttgtagggcaggtaagggcaaaacgtattgataaactcaaagaattttaagaatgatattgtcatgagccatgagccatggaagctgcaaggtttgggctccctcctgccatcgggtggggggtgtcggcggaagggggtacgtgtcctgtcctctcccagtgcttatttcctgctggaaccgtggttttgacgcagccgtgacagcccttcatccttattaaaatcacacaatgaagcaggtcgcccaagattgaaagcgcgtttccagggcggaccccggtccccgcctttggccagcaaaagtacattctggcagggagggatctctgagccccgaagtgaggtcatgccagttagcagttagaaaaggaggcatttctcacacttgctaaagagtttgacgcttgtgaaatataaacaggaagcgggagctctccaaggcgacctgaaggaaatacactgccagtttggtcaacttgtgaatgccagttctctaggtcgtcaagggcactgccagttaagactgatcccctaactgcacccgaggctactactcttcgcccagtctcggcagtgaccccatttttttttcaatccttcccacagccaggtcactcagcagtggggtgactgacccgaagcgcagtgggaagggcttacagtcatctctcaactccccgaacttgcagggcaggggagcgcagaggtcagtgaaatccccagccaggccttattttagtcatgagtttccactggctccctcctctgactgtatcagcgctgctcacaccgcgggattggagtttcagctgttttccctgctcccggctgagtgagaaggtcacagagcccggacctttccgggggaggtgggtggggccctccggcagcctaagtgagattgcagagatctggggccgctggaggaggtccttccgccccgggcttggggctttgggttagcttctcccccgcttctctacctaggcatctcggttacaatgaaattaaaaacaaaacacaaagcaacacaagttctcattgtttttcccctctgtcagccagtggcctcgatacaattttcccagggctgcctttcctttattgctcaatttaacctcttcctagaggttctgcaagttcaagggcaggatccgtgtcggattcatcaactagtgcagcgcctagtgcagagcagggggctcaagaaatacgtgtcgaccgcatgattgctaagatttccctgtaacaggcggtttttttttcttgtctctctcatccctcctgccctgggtgcagaccgcgaacagcgccgccgaacttcccaacaggcagggagagggccgatccgggctggcacgccacgtccccggggtctcagtccctgggtcaacgcagagaggctcgcggtccgcggtgctacgacctgagcccggccacgtgaagcgtcacgccctgcgctgctgcagggcaggcgccgccgccgcggttgtgtaacgctgcagccggaggggaggcgaccggggcgcctctgctccggagggggcagaggagggagggagcgccgggcacagcgcccggtatctttctgcgcttgactggccgggaggaagggggtgacactggggcacccagggggctgcgcaaccgggtgcccgcccgcccgcaggttgtgcccaggagcggagctcctgggagcgaggggccctcggctcacaccctccacggtcaggtgcgcgcggcgtgctcggcggcagcctcagctgcccctgcgcttggccgtcggcccgcttcccatggggtgacatccgccccgcccctcggtccctccccaaggcgggcaattcctggacgcgagggtgagcagtgggggcagggaagccaggacggaaagaaaccccagcctctggggaaggctggggggccgggcgactccctccgcagcgcgccggttcctccaagcgggccgggcgggggaggaggaagagggctgggctggagctagcaaggggatattcctctcccggcttgagtcagacgcgggcggatccgtcctcccccgttccctcccaggagacgggaacttacttcatttccctggggcaggttcgcccacgttaccaacttctccccctcccccagcacccccgtcccttccagcttccgcgccccccacccaactgggcaggacccaggtcgtgctgccaccccctcttcggggaaaggcggccgcagccgcagacacctgggggccggggctgggggtgggggctccctagcagccgccggagcgttgtccaacacgtgagactcatgtgatgaagccgggggagggcgggcaggtcgctccttccctccccggcagtggccagacgtgcctggagtcacagggtagaacacgtagctccaacccacccactcgctcccatttaacccagcccgcagcctctccattactcctcggcttgcccccccacccccccactccgccctaaccgcccccccctcacccgctccctcccgcctccccgcccgccccacttctcattcacttggctcgcacggcgcagacagaccgcgcagggagcacacaccgccagtctgtgcgctgagtcggagccagaggccgcggggacaccgggccatgcacgcccccaactgaagctgcatctcaaagccgaagattccagcagcccaggggatttcaaagagctcagactcagaggaacatctgcggagagacccccgaagccctctccagggcagtcctcatccagacgctccgctagtgcagacaggagcgcgcagtggccccggctcgccgcgccatggagcggatccccagcgcgcaaccaccccccgcctgcctgcccaaagcaccgggactggagcacggagacctaccagggtaagttggcactccttggcccttcaagcctcaactgcagccccatgttatgcgccactctcaacttggagcagctccgggcgcaccgggaggttcttgcccggcagaacgcctgcagccgtgcgcaagcagtcacgacccttcctggtctctcttcctgcaggatgtaccctgcccacatgtaccaagtgtacaagtcaagacggggaataaagcggagcgaggacagcaaggtaagcaagtgcacccctagggaccctgcgctcagcccctcgcgcgcgctgagtttccaagaaaagttttctcgctttgaggttggcgaggggatgcagggtgtgggctcggtgcctcttctgagtgacttggaaaagaaagggcagacgatggttctgggtgctactctgctactctgctcctctgccggactgttgctgcggggctgggaggataggcttctcatctccttccccaagcgcccaccgcctccccgtgcgtcttgcaggagacctacaaattgccgcaccggctcatcgagaaaaagagacgtgaccggattaacgagtgcatcgcccagctgaaggatctcctacccgaacatctcaaacttacagtaagtgagaagctggcccctttccaacccagtcctttgcccagagggcgggcgggtcactcgccgcctgcaggttccgcggggaactgcagaccagactggcggatcagagctggcgggtggctctgcggtggggtcctcctccacagtcctggcgttttctggctgactcatgcaaatgaggcgagaaccacttggacctctccaagttggctccaacaccaactggccttccttttcaggagtttaacttctggtgattttcaggattccctagtttttctcacttaaaggaacacgccaagaaacacacacattttatttaccccttcccctctaccactccccccaccttttttgttgttgttgtcaaataaggggacttgctttggtgtgtgatttttacggcctgtcctttcttgacagtagccctcggctacttcgcagcctttggttggggaaatggaaaaaaaaaaaatagtatttcgggaggaacaaaaaagcctggatgagctggaagttctgaaagggtgtaaggaaagaagtagggaaagcctcttggctgccagacgtaatagaggtccctctctgagttgacaccactgcaggaaaatgttatctctggattcccctgagttaaggtcggcagaggctgctggagaaatttatctgtcaaaggattttcctgaggtagttgcagcttccaaaatgcctccaaagacaggtggcacccgtttttttaaattatttaattatatatatatattatatatatatacacacacacacacacacacacacacacacacatatatgagtgtatctgtctatctttttaaaagcatgacctacagacttaaaacagccaaccaggaaacactattccacttttttttttcttttctcatttctcattgctaataaatgtcccaaaggtgggacttctctgacctcaccgctgactaaggctcttttccttccagactttgggtcacttggaaaaagcagtggttcttgaacttaccttgaagcatgtgaaagcactaacaaacctaattgatcagcagcagcagaaaatcattgccctgcagagtggtttacaagctggtgagtgctgattctggctatgctctctttaagagtttgagtgcaaatagagagcccgtgggctcaacatctgatgtaataaacattactgcaacaaattgcttatgcacgttcattgggggagatgcagttttatctttcctaaaaggtcagacttttcatttgaaatgcattgtgccacctggcatgaatacgtattagtgaaatgataagatattcctgtggcattttagcttgagagtctctgggttctgggagatttccctactcccttttaaaatgccaaggcacctataatttgcattgtgggtgttttacagttggtcttcttagccctctttcattggagaagaaatcatgggtatgccccagcgttttcctgtttctttgcttccttgtcacttggtgtgtggtgtgatcctggcaggatacagcaggagtttttcctgcatttcatgtggttccctgaatagccactaggtatcttggtgaattgcacaatctagcgaaaccactgaagtttcatcattcgtttctactgacttccagataatcggagtcaaccttctaaccttctagtctcacttcttccaaataatactgtacagactggggagaattattctacccactccctcatttcatgcttgtctgccttcctctcgaaggctcgtatgatgaaaattgcaaaaacccagctagtgcttctgcctgtttcctcattcaaaataggaagatggtcatacctaatgtcttgaggatcatggatagaatatgtggagaagacatagaaatagcctaattaaaggtcacagcatgactgcaacttttacaaatcattgaaaataagtttactttaggtgattgttgtttcttcattcttttcctcattttataactatccagcctctgcccattttgccacggtgcaatgttgtatgcattgactcttaggtttataaatacatcagaatgttctttgctgcctcgcttacatggaaaactcacaaaccacctatacaatccaaaagaggggaaacagctcatctcatattaattatggtccatttccatgataggatattatgcaaccattaaaaatcatattttatctgagtgttagtatatggattattttaattatttatacttttcagtgtaattcttctctgagcatactacttttggagttaggaacacaaatcagtaaatgcatttttttttttaacaaaaactaaagcacctggttttttggagtatagtttccaggtgcgccacaggccttctgaaacgttttccttcggatttttctttccccaggtgagctgtcagggagaaatgtcgaaacaggtcaagagatgttctgctcaggtttccagacatgtgcccgggaggtgcttcagtatctggccaagcacgagaacactcgggacctgaagtcttcgcagcttgtcacccacctccaccgggtggtctcggagctgctgcagggtggtacctccaggaagccatcagacccagctcccaaagtgatggacttcaaggaaaaacccagctctccggccaaaggttcggaaggtcctgggaaaaactgcgtgccagtcatccagcggactttcgctcactcgagtggggagcagagcggcagcgacacggacacagacagtggctatggaggagaatcggagaagggcgacttgcgcagtgagcagccgtgcttcaaaagtgaccacggacgcaggttcacgatgggagaaaggatcggcgcaattaagcaagagtccgaagaaccccccacaaaaaagaaccggatgcagctttcggatgatgaaggccatttcactagcagtgacctgatcagctccccgttcctgggcccacacccacaccagcctcctttctgcctgcccttctacctgatcccaccttcagcgactgcctacctgcccatgctggagaagtgctggtatcccacctcagtgccagtgctatacccaggcctcaacgcctctgccgcagccctctctagcttcatgaacccagacaagatctcggctcccttgctcatgccccagagactcccttctcccttgccagctcatccgtccgtcgactcttctgtcttgctccaagctctgaagccaatcccccctttaaacttagaaaccaaagactaaactctctaggggatcctgctgctttgctttccttcctcgctacttcctaaaaagcaacaaaaaagtttttgtgaatgctgcaagattgttgcattgtgtatactgagataatctgaggcatggagagcagattcagggtgtgtgtgtgtgtgtgtgtgtgtgtatgtgcgtgtgcgtgcacatgtgtgcctgcgtgttggtataggactttaaagctccttttggcatagggaagtcacgaaggattgcttgacatcaggagacttgggggggattgtagcagacgtctgggcttttccccacccagagaatagcccccttcgatacacatcagctggattttcaaaagcttcaaagtcttggtctgtgagtcactcttcagtttgggagctgggtctgtggctttgatcagaaggtactttcaaaagagggctttccagggctcagctcccaaccagctgttaggaccccacccttttgcctttattgtcgacgtgactcaccagacgtcggggagagagagcagtcagaccgagctttctgctaacatggggaggtagcaggcactggcatagcacggtagtggtttggggaggtttccgcaggtctgctccccacccctgcctcggaagaataaagagaatgtagttccctactcaggctttcgtagtgattagcttactaaggaactgaaaatgggccccttgtacaagctgagctgccccggagggagggaggagttccctgggcttctggcacctgtttctaggcctaaccattagtacttactgtgcagggaaccaaaccaaggtctgagaaatgcggacaccccgagcgagcaccccaaagtgcacaaagctgagtaaaaagctgcccccttcaaacagaactagactcagttttcaattccatcctaaaactccttttaaccaagcttagcttctcaaaggcctaaccaagccttggcaccgccagatcctttctgtaggctaattcctcttgcccaacggcatatggagtgtccttattgctaaaaaggattccgtctccttcaaagaagttttatttttggtccagagtacttgttttcccgatgtgtccagccagctccgcagcagcttttcaaaatgcactatgcctgattgctgatcgtgttttaactttttcttttcctgtttttattttggtattaagtcgttgcctttatttgtaaagctgttataaatatatattatataaatatattaaaaaggaaaatgtttcagatgtttatttgtataattacttgattcacacagtgagaaaaaatgaatgtattcctgtttttgaagagaagaataattttttttttctctagggagaggtacagtgtttatattttggagccttcctgaaggtgtaaaattgtaaatatttttatctatgagtaaatgttaagtagttgttttaaaatacttaataaaataattcttttcctgtggaagagaaagatggtctcctgagttttttaaaatagctcacttggtgtgatatggctgactcccatgtccttctttcttggctgaagcaaaccagttaatctcagtgtaatttcattcagcttttcatgtgctttgtattcaatcagaataagcttagtcaacctggcaggtaaatattggttcaatttttgtttaacccttgccaggggttcatgatcatcctctacctctttccagagttaagtaaaaagcatattttcccctgcctgctttcatcgtggtccttggaacttgacagaaaaccaaggtatgacaccgtgggcagcagtgtctggggagcctgctggagggagaggcacattgagaaaagatttactggattattatgcaatactaattgatgctaggatagcacctctttgccaaagcagtctagctttttcaaatctagcaaggtctaatggatttgccatatcctgtcttattcctgctggaggcaacattccataattattttctacatccttcctggacttcctctccggtatgtttgtgcgtgaatgcatattgggtgttccttcgacaagtgctcttatttaaaaaaaaaaaaaaaaaattccatgggaaaggtgggaaatgaccctgtcgtgtatttttgcctctctcctttgccttgatttgcaacattcctgtgggatactccctgtcagaggtgtcctgatgtttcctgatggccagcgcctgactcaacacgctccggctcccaaagcatcccagtctgccaggactccctggttgtctggagtacagcagggaagctgcccctagggatttcttagccaggcagaggctccacctgaccatgaagactgtttgcttcacatgtcaccttccctgtctcctgatgggccagcaggtgaaagtgagcattgtctgcttgtgctggatgcatatggaatgcacgtaactgtccccaggccacaggctgttgtgcaaggagccgggaccaggaggtggaagcctggcatcaatagctggtggtctatcacctccctctccacgcctgcttttgactagataaaataagaattccgagcccttctcacaagtcccagagcaggcagatggcaaattctgtaagccactctttctcccagcccaacgcctgggcttccaggtctcatgcctgtgaaacacctcaattgctccatgagttgccagacctctctagctagacttttttggaaaaaacccaacaaatcaaacttaccctggtgatatagccgggggttgaaaaatcaagaccaaactctttttgcataaccctctctttttcccaggccactgcaggaggagtagctttggggaaaggaggaagtggttggagcaacctgaactaaaaaaaaagatttgagggttccacacacagtcaacccagaatcccgctatgggaacctgcccctgtcaaacagcgcctcaagttgcagctgtccctccacttcattttttgcttccagctcgcccttaacctctcttctagcccagttctagcggcatccaaatgcgctcagagggaggtgcgggggaggggcgcgcaccccagcctaatgcccactgcggacaaagaggacttctgtttaaaaagcggggtgtgtgagtgtcagggggcgaagcgctggctccggggccaaggagaggtggcaggaggcaggggagcggaggctgggcatctggccgccttcagacagggcgtgatccgccgggcctgccgggatggtctcacccagcgctgacctgccccgcctgttgacacaacgtcacgtttccgactgcagccctttcatgtgcggcccgcggctaaaagcggctgccggttcctggaagcagacgtgcctggcaccgcgtcagcagaaacctgatccccggggaagctcggcaaggccttgggatcgctcggcccccagaactagggcctggcagcgggcacgggacgccccccctccctcgcgcccagcaggagggaattcgagcgctccccgtcggcggtggggagggaggactgggtggggtagggagctggatttaggcagagcacggggaccagggcttaattgactagaagctagaagcttcccacgggtcatcgctcactaatgcacgtcaaacaacctagaagtatcattatgggtactattacaattcacattttgtagataaataaaagcaggctcagagaggagaggtaactagcccgaggtcacacagcttctgagggggctaaaccttttgtaggatggtggatctgttggtttgtgggtcccttaattggatccaaggagaaggctttcacagagccgagttgttaatgactataatagtacaaatatggatatttattactaagaataattacagcaaatgtgtttgtggcatttactatttgccaggcactctgcaaagtgctctacatacaataacttctttatcactgcaaggccatgaagtaggtaaattagtatacagttaatgaactgtaggcacagagaggttaagtaatttgctcaaagtcacacagctccattgatgacttgtaagttaaacctaggaaatttggctgcaaagtttatgtgcttaactataaaaccacactgcccttctagttaagttaataatagtaaaagtagtaataattacaattattactatcctgttttgagtactttctttgtgccaggtatcaaccacgtcatgtgaatcgcctctacttatagcaactgtgaagggtagatattaatatgccccttttttaagtaaaaaaaattttaaacatgctcattttacaaatgaggaaactggagttcaaagaggggaaatgccttatctgaggtgacacgacacctaagggacaaagccatccttttttctggtatggaactgcttctacgctgagctcctgtcatgttgggctttgatacacattat

SEQ ID NO: 39450 - DNA, 3311 bp, Homo sapiens
ttggttattgttcctttaagaatttttgcttttctatattttcttttttttttattttacaatgaacatggtatttctgtaatatagatcatgaagtgcaacagaataagtggagtgggggacaagaatggagttcaaggttgtcatggacatctgtatccagcagtcccaggggatgatgtggaaaggagaggcaggatgcttttttggttttgccagctcagccctgggcagggccagccctacaccctgggaagaaggcaactcccttcaaagggtgagtggaagatctagagaaagctctccctacccacatgcacataggagcttttaacaaggaccttaacaattagagagatgacaaaagtttcaaaacaggtgcaaagacactcaataggctgtgagggtcctgggatgggggctctaactcattcactgcagcgctcccagtgcctagcttgaaacaaagctgaaattcagtcagtgtttcctgaatgaacaagtgaatctagactctgctgtgtgaccttgggaaagttctttcaccttcctgaatctgtttccttatccatcaaatggggatattagtgatcttgtagagattgccgtgaggatgaaaagaaatccttatgtagaatatacagcatctagctacagtcaggtatgtggtaggtgctcaagcatttgctgattaaatgaatgaaaggagcctgggcaacatagcaaaaactctgtctctacaaataaaaattaaaacattagccagtcatggtgatacggacctgtagtcccagctactcaggaggctaaggtgggaggatcttagcctgcagtgagccatgaccacgccactgtactccagccaaggtgacagagtgaggccccatctcaaaataaaactttaatttaatttaaaaataaaagaaaataaaaaaataaatgaaaagaaagaatgacatttataggaacatattcactctaaagtgtaagtaactgacataacattatttcctgaaagatgctttgtagagggaaaagctgaaagagatctcatacacacacacacacacacacacatatatatacacacacacatatatatatgtctgtgtgtatgagatctctctgatatatatatatatatcagactgtgtgctaagtactgtactaggcactatgcatacattatctggtgcaatctccatttttacatttacagaaattgagactcagtgagattaagtgactcacccaaggtcacacagcaagcagatggcacagacaggatttaactcaacatatgactcaaaagtccttgctgaaagagcccaggatgtcaaaatggacagaggcatgaggagggaagagggtcagagataagcttcccactctgtgcacactgctgaattacccattaggtagacctagtgtgtgctgaaaacactgggaaagcagccccagcttccttccatctccccaaaattggaaaataatttctttttgatatttcaaagaaaaacatggagatcatcttatgattaaaatcaagggcttattggggtttctctaaatttattttaagctttgtgttttcagtttgcacttcgtatggggaggaaggatcaaaatgctcatgtctcaggaccttagggcttaattgccctggggcttagagcctctctagaccttatccagcaaggtgacgctagctctccagagtctgagtgggaggcagcatggacacccacctggcccctgcttcccctggggctcacgtggctgtgtgaggggtgtttcttagggcagtggcctcagctcccctgacccgtggcttctcacagtctgcctttcagacaaggcgctcactgtcccagcatgttccaagccaccggctcaagtcccagccagcccaggcctgttgcaatgagtcagcctttcactggggaaaaacgtggtgactggcctccaagtcattttttccagcttggcccttgtcctgggctgggtttggggagaccttcatttttccctttgggattcggctgcctacgaggtattcccaagggtccctaggaagcaagggggctggaattcctttggggcaggttgagttgctgcagttcagccaaatgagggtccctcaaggtgcccacctggtctcgctccacctccccctgctcatataagcaaaagtagaggccacagagggtaagttcttatggcccttacggttgtgcccagtcatggggaggaggataagaagaggagttataaaataaagtccacctttggcatctttcacaggccatgctagcgcagcaacctcaggtacctggagcttgaggcacacttggcctcttatcaactagtggtgccttcctgaaagatgatgctcccttgggccccttgaattttaaagcaagcaccattaccttcggtgaaccttcctgcccccagctctatgccagggttccggtttcagagctattcgccttaccatcccttctgactcacctctggcttcccagggcttcgtgaggcctcccctgcatggccaggctgatgtggattctccctagtgtgactgggtgggagggaggaagaggcaatgaccattagtcaaagggtggtgagggtgcgtgagggcagggctttggccctcacggatcccgcagtaaattcactctctccggaggaaacattgacctcactgctgctgaagcccttacttagaacttcctattcatttttgcaattagcaaagattaacctctcaataattcattcattcagggcacagatagttattggtacctttacatgccaggtactgggctttggggctacaatagtgcacagaagagtcatgctcctgtttcctgaagccgatagtctgagagggacacagatagcaacctgataattacacagatagataccaacaatccagtatcaatatgcaagaagagcacagaagagcagacaacagtgcctggagtggtctggggtgttcagggaaggtttgcctgaaatagacgggtaagtgggagttgtctggttgagatgggggtcctgaccccaagtacctagatagtgaccttatttggaaatagggttttttacagagataatcaagttaacatgaggtcattagggtaggccctaatcttgactggtattcttatcaaaaggggaaatttggacacagagacagacatgcgcacaggaagaatgtcacgtgaagatgaaagcagacatcagggggatgctggctgcttacaagccatggaatgccgaagatagtgagccga

SEQ ID NO: 39451 - DNA, 3194 bp, Homo sapiens
gctttaaaaaaatgcagaaaaacttttttttttgagatggagtctcgccgtgtcaccaggctggagtgcagtggtgagatctcagctcactgcaacctccgcctcctgggtttaagcgattctcctgcctcagcctcccgagtagctgggactacaggcacccgccaccacgcccggctaatttttgtatttttagtagagacagggtttcaccatgttggccaggatggtctcgatctcttgacctcgtgatccgcctgcctccgcctcccaaagtgctgggattacaggcgtgagccaccgcacccggcctcataatgttgtaaggaagtttacgaatttgtgttgggccaccttcagagctgtcctagacctgtgggccatggattggacaagtttgtatgaagcaaatgctcaagatgccctagttgttgtgatgatcgtttattgagcatatatgtggcaggaagtgtgtcatgtgggacccaaagatgtcaaagcccccgactctgtagttcagcgggagtctgttttccagttttccctaatctgtctggtttatttgtggttattaataacatatcactttcactctcaaaggtgtcctgattcagaggagaggcttatgtcatcaccttatttttgggggcagagtgtgagtaatcgggctgggtggaacctgcaataagccaggagcacctgcccccctgaagccgatgctcccgcaggtgcaggcaatgacaggggcttgtatttgcagtctctaattttccaagagaagttggaaactcagatttttatgtgaaatcatcccatttttaaaataaactatttttttcggttttaaaaaatacaccttattaaaagttttccaaacttcctgcccccagtccagctaaagcacatctgtggcttaggccagcatgtggtctgtttctaatctctagacttgaggaagtgacaatctattgagaggagctagacaagtaaacaggcagttaccacaccggtgataagggtggtgacagcagtgaacccagggtgagtcaggaggcagaggaggggcagacacgggagctggagagtggaaacctgggaagccttcctgaaagggggtaacaacggagctgattcctgagagttgattgtgaacacgttccagaaataatcataatgatggcagggaacgtttccccttgttgctttctgggtgttagatattgctgtaaacaactctgcaagcatcatctcattcaacctgcacaataaccccatgaattaaggaccagtgttattctcatttttctgcaagaggggactgaagcacagagaagctaagtaacttgcccaagggcacacagtgaacagatgtcatgtgatctaccatacatagatttaagcattaccctagaaaactccgtggaagagcagaatgacaagtccaaagactagaaggtaaaagagagcaaggcactttaacaaaactgaagataggccactgcggctgaagtgggatgtattcaccatatggggcaaggagctggactgccgactgggaggcaggaaggtggacaggagagaagttgggtcacgctaaggggctcgggctttattttaaagactagaggcaagattgaaatgctaaaagatttaaagatcagtataactcctactcctctctcccctactccatttaaaagaaagctcagaggccgggtgcagtggcttacgcctgtaatcccagcactttggaaggctgaggcaggtggatcacgaggtcaagagatcgagaccatcctggccaagatggtgaaattccatctctactaaaaatacaaaaatcagttgggcatggtggcacgcgcctgtagttccagctcctcaggaagctgaagcaggagaattgcttgaacccgggagatggaggttgcagtcagccgagttcgcgccagtgcagtctagcttggcagcagagcgagactctgtctcaaaaataataataatagtagaaatttaaaaagctcagaagggctttcttcccttaccctaggtcacacagcccagctctggggccaaacccaggtctctggactcctaccaggagagggccgcaccccagggagagacaagagggaaagggagaaggcctagaacagtggctttcaagactttatattgacgattaaagagttatctcaacaagagaaattaatctgccctgattccattccctcccacaccctgggtggacccaagttattcttttggcctcaccctaaccccacccaccggcttgcgaaaggagagggctaggagacaactctcccttagaaagcccagctctaggctccacacagggcccagcaactcagaaaaggcagcagatcagatgggctggagccagccctttgaaaccaccactgggtggtgaataaaatcactggaaacgaacgaagcttggtctgtggcagcttggtaggtggccccgcccgggatgaaaggcctgccagggctgggctgggccaagctgtgcacagaggcctaacaagccttcagaggcaattcctatctctgctccctggggttaatgcctgcctgtggagagattgattaatgtgcagttgtgaggacaacctgtcaagacctgtggatttagattttgtcttgtcttagcttgatttcagagtggagtggtctcactgtgttctgaggcccttggctggtgggcctgtgccagtttgcatgggcgaattcgaaccacttggtgggctcaagtggatagagggacatttaatgtgtactacagaatgctgccttgtgccacgcactgttctggcagctacaggcaggcaagtccctgatttcatgcagctcgtgttctagtagaggggtgaaggcattggacaaattaagaagtcaataaaataatctcagagatggtggcgatgtttctagatgagactttctcaaccttggcactactgacatttggggctggatacattcttggtgataagggggtgtcctggacactatggaatgtttagcactatctctggcctctacccattacatgccagtagcaaccccactacttatggcaaccaagccaaaaacatttcagacattgccaaatatccctggagtgccagcattacccctgcctggttcagaaccactgctctaaaccagag

SEQ ID NO: 39452 - DNA, 3854 bp, Homo sapiens
aaatacaaaaattagccagtcacggtggagggcgcctgtaatcccagctgttcgggaggctgaggcaggagaatcgcttgaacatgggaagtggaggttgcagtgagctgagatcgcgccactgcactacagcctggatgacggagtgagtccctgtccaaaaaaaaagggcaggtggggggaagaaagagaaggaaaaaaaggaaggaaggaaagaaagaaggaaggaagggaaggaaggaaggagaaagctaggaccttttgaagtgcccaaagaaagaaaaagatggaggaaagtaagaaaagaagtgagtggaagaacggatgaagggaactagattgattgcatagctaatatgttgtgggcgtttcactgtttcagtatttttccttttcctcctcttctgccactttcttcttctccatgtcatgtccatttttcaggcatggagagggaaggtcagagaggctgccttgagtcagagcaccctgggttggagtgtccctagctagcttagtgaccttgaggaggtcacttaatctgtctgatcttcagcttcctcatctataagaaggagaaaataactcttttgcagagctgtggagtaacgagattaatatatgtaacacctagcacatgccgagcgctcaaaacatgctagttacccgcacggttacttttaagtaagttgcccaaggccacacagctaatgaagagccgacattttgactcaggcctgttgagtccagagcgctcgtattccaccacatcagactgactcactaggtagtgacaaatcaggaaagtgccacataaactataaaccctctctcccacaggcatacatttgcacagagggagtgacacccattgtttttgcctgcccagcaaccattcctttttattctggaaacatcatcttatggctttaacaccatctccaggtctagggaggaatatgtgactcaagccaggctggccagggttaatcctgatatttttgttgagaagaaagatctctttctaatgaggttgttaagctcacaaaaggtaagactagagctactgggacaattccttgtcatcttataggcaggcagagctgaaagattaaaaaaacaacaaatctctaacactagcatttgggcacctggaaacagctatgcctgaagccatcagctggatcttttttttccccctgtagctaatttgaatccagtttctgtcttgcaactaagagtcctcactgactaatttgaggcttgcctgataccgaggctcatgtaccttaaaccatcccagattgactcaacagtatagagcctaaagagaaaaaaggaaaaacaaataaagcaaatactttctctttctcatttcctttcatcttatatagatatggtacctctgctaacaattgctggatgagtgtacaaacatgtccaagacaatcccttcacattactacttgttaatgatctcattacctgcataaacatcatgattctttgtgtcagtatcatagttgtccgtatcaaacctgtgtcaattccatgaaaatatatcaagctccatttctggtgcccctttgagaaaactagagttggtgagacataagtaagaatatacatttttctttttcttttttttttttttgagatggagtttcccttttgtcacccacgctggagtatagtggcacaatctcggctcactgcaacctctgcctcctgggttcaagcgattctcctgcttcagcctcctgagtatctgggattacaggcctgtgccaccacacctggctaattttgtatttttagcagagacagggtttcaccatgttggccaggctggtctcgaactcttgacctcaagtgacccacccactttggcctcccaaagtgctgggattacaggcgtgaggcactgtgcccgcccgagaatctgtgtttttcactcatagtttgggattgttcttgcagctgaatacctctgaaataataatcaatgaatatttcattcaataaatatttactatcctcttccgtgtgccagtctcctaagttgtcttaggataataattattatcctaaatcatcccattacttcttagatatttagcattccaacaaacagaaaacgagctctctcctctcccttcccaagggtttatgtctttcatctcctccttggctatccaggtttcgacctcggagttggctttagctgctggagccttcctgaacccatctgttgggatattgagtcactgagtcataaagaggaatgtttctcactaaacatcacaccagaacagatagacttccagctgagccagctggtgacctggccgcccctgagtggagaaaatgggagacgtgggagttggaaggcacaccacgcagacggtcacctcatggtgacgtcacctgccaaaccggtgactcacctcccaattctcccctctaccagccatatcttgctcacttggaatacctgaggggaataccagcctcctgtgtttagtgaaaacacacgctcgtgagctattttttaaaggcatgatgttttcttgctttcaagtgcaggcctgggttaagactgcttctgctttaataagtacccaggagtctgcttttaaagaaagacttggataagcatggggattgctatgtgggttaccttttttttcttaaaatttttcattgtagtaaaatatgcataacacataatttaccattttaacttttttttttttggagacagaatttcctctgttactgaagctagagtgcagtggtgtgatcaccgttcatcgcagcctcaccctctagggctcaatcaatcctcccacctcagcctcccacgaagctgggactacaggcatgtgccccgacacccagctaattttttttattttttggagagatggggtttcactatgctgctcaggctggtctcaaactcctgggctcaagcgatccacccatgtcagcctcccaaaatcctgggactacaggcgtgagccaccttttaaccatttttaagtgcacaattcagaggcattaagtacattcacaacgttgtgcaaccatcactacccattcctagagcttgttcagcatcccttcaattcatcaccaattaaattgttcattgaattctaatcaaacgagaactccccactcctctctccctccagcccccggtacctctactctacttctgtatgtataaatttgtctagtctaggtgttccatataagtggaatcatacaataccgtccttttgtgtctgacttattttacttggcatcatgtcttcaacattcatcatattgtagcacttaccagaatttcattcctttttaaggctgaataatatttcattgtatgtacatactagatttagtttatccattcatttattgttttcacatctcagctattgtgggtagtttactttcgagtccctaaagatcatttgttctctttactagttagaaattcttctttagaaagattctcagagttcacctgtagactgggactaagatgaccagttctaactacttctcaggggtattgtgaagataaagttaactcctgggtaggaaaatgctttataaatactaaaatgtgtctacggtcatactatcctgaatgcaccctatctcgtctaaattctaaaacgccccacaaaaatatttttactttgtttgtactatttgcttagcttttccccgcaagcagaaaaaaaaaaaaaaaaaaagagagaacacgaccctaggctcctttcaaattataataaaatctagacggaaatggtccaaatgaatgaggttttcctgggatg

SEQ ID NO: 39453 - DNA, 1798 bp, Homo sapiens
ggtcgcacctgtaatcccagcactattcgaggacaaggcgggcgggtcacttgaggtcaggagttcgagaccagcctggccaacatggtgaaacattgtctctattaaaaatacaaaaaaaaaaaaaaaattagctgagcgtggtggtatgcacctgtaataccagctactggagaggctgggacaagagaatggattgaaccagggaggcggaggttgcagtgagccaagatcgagacacggcactgcagcctgagtgacaaatcaagactctgtctcaaacaacaacaaataaacaaaataaaaaaatatatatattgcttcactgatagtggacgggccattgactcttaagaggttcgtgagaccctgatctatggcaagaaaggtaagaaaaaacgcaacccaacccaacccaaaccaaaccaaatcacagaggcttgaaaagtcagctctcccagtgacaggctatcctagggctcttctctgggctttagttttctctggcttgtttctaacaccctcaggcgagtgtgctttgaaaacctgacaatcaggtacaatatggaaggtgggccaccgggtgccttcagggcagaatccaggacctgtagtgggtggcctagtgtcctggggcctgcaccctagagccagtggcttcctgagtgggccgtgccccgggtcacttcccgggggcgggttagcctcactgaggcggccgggatgctcttggtctcctagacaacagtgtgtgaccgaggagatgcagtaaacgagaggtgtcatcctgcgaaaccaacccacccccccccgccccctcacagccgggccccggccgcaggaagtggaattcttctgggaaagagactgacgtcgccggtggccgtggtccctgcccctgccctggcaggcgctgatgcaagcgccggctcgcgcctgcaggcaggcggtccccggggagctggcgccgcgctctctccgtcttgctcccttccggccacccccgcccggccttccctgtgagaagtcaacggctcctgggtggtttcccaccgaaaggcccagcgcggggtgtggggggaggggctgaagtgtctttgcccaaacccgttcttctttctccccagctcctcccagactgggtttgggagaatcccagcatctcaacctggccacgtgtctgggtctatatgaagggctctcggtgcctccagccccctccctgggacagcctgggtggcctgagatacctggtgccagcgctgccaaggaaaccgtctggaccactagggaaccttgggtctggatggggaggcggtgaagagcctctggggtggaagtggtccagccaaggctggtctccatcgccttctgctggcaaaaggaagagttgctctgaaatccctcctggaacctcccagaggcttgggaggggtgggggcggggcgcggcctggaatgttagaggccgcccttttctttttttttctgagacggagtctcgccctgtcgcccaggctggagtgcggtggcgcgatctcggctcactgcaacctccgcctcccgggttcccgccattctcccgcctcagcctcccgagtagctgggactacaggcgcccaacaccacgccctgctaatttttttttttttttgtatttttaatagagacggggtttcaccatgttagcgaggatggtcttgatctcctgacctcatgatccgccagccccggcctcccaaagtgttgggactgcaggcgtgagccaccgcgcccggccagaggccactcttttcata

SEQ ID NO: 39454 - DNA, 2389 bp, Homo sapiens
ttaagttaacactatcttttgctactaccaaaaatgtaggacaggaatttttattccacgccaactcttccagagtcttgaagtcttcctgcagattgttaatgaacaattatagcaaaaaatgaatgaatgaattaacgaatgtataagtggatgaatgacgaatgaaccaacaatgaatgaatgtagagaaagcctcaagggggcccgagggtacgctgtgctgcggagcatgcccaccaggtggcgatgccagcggcgggcgggcctggccggattggccgcgccgctcttgccgtgggtgccgacggcggcgccgggacgggcgtggggggtagggcgagtcatatgatccgctcggcttcctgggtctggctgctgccgcccgccggtgtccgcccgtgtcgcgccggggcaccaaggagccgttggagggtccgggcggaggcccgctcgtgtggaagtcgtcgacgccgccgctcgtccgtcctcccgtccgttctcgctcccggccgccatcatgctggcgctcatctcccgcctgctggactggttccgttcgctcttctggaaggaagagatggagctgacgctcgtggggctgcagtactcgggcaagaccaccttcgtcaatgtcatcgcggtgagcgcccgcccactcactcgcccggggctccgcagccaggagtccggcccggcgcttctccaaggcctgagttggggcccccctcggcgcgatgggactgatggcggggggcgtgcgaagctgggcctgtcatctcccgagggccagcatttggaatttcccgcgtgttggcggcgcggggagtagcactgagatcggcagcggaagggttaagtcagtgtagacattttccaagggctgtgtcctcaacgccgcgggggctcggaaagagttaaattgaactcgtcacatttttaaagcgcttggggattggggtttcccttgggtttgcccagtaggggcagccaaagagttaagtccagtctgtcactttcccaaagggtgggatttggcaaatccgtcagccgtacgagaaagcgtaagcattaagagcctctcttaagttgccactttggaccaatagacccattgtgaaagcgggagaccagtgtgagcgccttcctgaattctgtgggccgctggtcccatctaattcagttacttgttttcacccgtcccccaggcgcggagaccaagctcattgctgagctccagctagcccacaatacatagtatttattaagctaagagttaattgtcttaagcgactagataagatggatctgcagttagcataaagttaactaccctgcgaaagaggagttggtctttaaatggtgtttttcacttgaagagaaaagaaggtactgggcaggaacatagcttagcaggcctagggaatgggtggaaggaaaattgcactgaggacttacatagaatgtggtgtttgttcagcaatgattgagtagaaaggtgattgtttcgttttgcttgtttggttggttgggaaataaataggagtgaaagatttcgcctcgatctttatttagagcccaagagttgttgtgactcagttttagctggtagtggcttgtacacgccaggggagttttagaactgttctgaagagagatggcagcagttcttccaccttttcgatgactgttgaaatcctgaagattagctgtccgactggttaggttacacaagatgattcaaacacagctttcatgtttgagaaaataggtaacttgtgattcttagtccttgcactaataaagcaacaggaatgagtaagtcttggagaaaaagagattagcagaaaccccaaagtcctttgaagaatgatgtatataaggaagatttacctgcttgttgttcggctccttttctagtagtattattattaattttttttcttgagacggagtctcgctttgtcccccaggctggagtgcagtggcgagatctcagctcactgcaacctccacctcccaggttcaagcgattttcctgcctccacctcctgcgtagctgggattacagacgtcctccaccacgcccggctaattacttttagtagagatgggttttgctttgttgctcaggctagtctcaaaactcctgacctcatgtgatccgcccgactcggcctcttaaaatgctgggattgcaggtgtgagccaccgcgcctggcctcctattgtaatattatgattttttgcgcttggaatgactatctttccgcaggaatagaagagtggaatgtgtatctaataccactaattttttttttttttttttttttttttttctggtagagacaagatcttcctatgttgccaggccagccttgaactcctg

SEQ ID NO: 39455 - DNA, 2520 bp, Homo sapiens
ttttacacatcctttagggtcttgctttgactcctgataaatctaattcttccgcctcctgtcactgaaattagtttggaagctgggcatgactttatagtgttccatgtgcattttttgctttctttggctctttgtgccaagtgttttaagtctactctactagctgttagtactaccctatgttatctttcctaggaacacttacaaattttagtatttattctggcaggatttggaaaggggatttaaattagctagtgaaattacagcagaatggctgtgggcagaaggatagaggaagtaggcctttgaagtaaatgttagattgtggtaatgatggagagactgagacgcccaagataccaattgattttctttgcctgtgatgcttgtttttgtccgctggtactcctttccccctagatggcactgtcttactcatcgttcaggtcccaggtctgtaaaactttgccctaactcgtctcctcacagcacttgatcaaaattatatttatctgtgcaaattatctgttcattggtctctaccttcagacaacaacctttcaatatttatggcctttaaatgaagcagtgtgcctactgctctgtaattgttgacttaaatagagtaaaacagtatagggtaatgtttaagtatgtgggatcaggcaggcctaaatttaaattctggatatgccagaattctgtgacctcctcaaagcttcagtttcctcattggggatttgggcatgagaatacttgccccatgagctcatggtgaggtaagacagttggcacagtgactggcatagaatgagtactccttaggtggtaggttgatgtgatattcgggggttagggcaggatcatgtgctctactagatgctagatgaagtggaaccccctcacctttcacgtgagcactgagtgggaattcaatttcagaaggtaatgaaagttcctgagtttcagagtagaagtgtactgggcacaagggaccagtttttaattttctcttttttttttttttttttgagatggagtctcactctatcacccaggctggagttcagtagtttgatcttggctcactgcaaacctctgcttcctgggttcaagcaattctcctgcctcagcctcccaagtagctgggactacaggcatgcaccaccatgcctgggtaatttttgtatttttagtagagacagggtttcaccatgttgatcaggctggtctcaactcctgatctcaaatgatccacccgccttggcctcccaaagtgttgggattacaggcgtgagccaccatgcccagccctttttttaatttttaaaaactttttattttttgtggcgacaggatctcactgtgttgcccaggctggttcaaactcccggcctcaagtaatctcccacctcagcctcccaaagtgctaggattacaggcacgagccactgtgcctagcctggtttctgattctgattcttctttttaaatcttctttctttgctcactattattatattttaatggtttctgattcttgaaggttttctgtcattttgagagagaaactaaaatgagaggtttttgttgttgttgttggggatttttttttttttcggtgccataacccatcctagatgtgctaggatgttaggggcaacttggtgaaaaatttactggtttatttgggtttttcttctgctgataaatttggttgtagttaatagttttggcttggtggaagagatggtgattgctctaagtttttttttttttttcaccagagtagaagactagcagagcatctatttacaacctctcaatttatcatggagtttgtattttgttgttcagcagtctaacattgacttcaagcttttgtacaaataatgactctcgttcatttgccaacaaataactgccaaatgcctgaggcattacactaaagtggaaaatcacttttagggcttttaagtttaaacttaggttcaaattccagttttgccactatttagctgtgtgtatgtgaccttgtgaccttgacctcaagttttcttttctgtaatacgaggccagagtaaaatgagtaatgctgagctattatcattattatttttaaatagtataagccaattacatatggcttagctaataaggatgtgttgttgatgcagtcatcacatgtgattgaaaagcattcctgtcactccaacttcttactgcgcttactgcacctgccacactccccaccctgatgatagtaagtggaattttaggcagctactgaataaataatgattttactatctagaaggcactgcagtttggaacctgagaaatgtacagtgacttagtattttatgactgtccatcattttaagagttgagtttcactgtgaaacaatgtcgaaagcactgactggactaatggagtggctttacagtgcttactgtttcttcagtaatacccagagagagctgcagtgtggaggagccggtgaaagaatgtat

SEQ ID NO: 39456 - DNA, 3235 bp, Homo sapiens
gggagggcaaaacttacagccaactccaaatgcagcaagcaaaataaataagcgcctaaaccattgaatctttatgtgaaagccatagccctttagagctaacatttgcaatcttcttaattataggaagtagatacagaggggtaaagttatttaactgggaatctaccccacacctcaaaggttaggtcactaattgcgggtgcacaggagagatggtaggatgggagggacaggagaagacatgtttagatatatctggtaaataatttggtggtggtgggagccttcattcccacccccaacccgccccccccttttaaaaaaatcctatttccgagacaaaagcaatataacataactttgtatttcctgaaacttccagtttctaagaactgtccaagagtacttacacgcacattcccgagaccgttggagttgttcgataggtctagggagggatctggggatacgtgttttacaagcaccatgagcgattcttcaaagttgggtgtttgaatcaaaagagcagaattcatgataccgttttgtgcactccttgagctaaaaggtagtatcccaccctctccataaacagacacctaagttataaaacttatgcgctcgatatgcaaaaatagctcgttttatacagaaacgatcctttccttcttttccttatatatcttttaactgtcatcactcctaacctagacctagagtggctttttccggtcctagctctgccggacacacgctctgcccagagacccgatccacccaaggccaggcggtctggggtcacgtctgtgtccagcgtccggcgggcgctgccgtgccgctctcccattggctggaagttccctcgcgggccggcgcggctcctgctcgccacgccagcccatcgggctacggaccgcccaggggggcggggcttgggagttggggcggggcccgggtgaggggcggggcctcggggcgtcgcggacgtcctggcggcctactgcgtgggagggagtcctgggccgcgccccgcgaggccgggcccaggccgggccaatcccgggccactgggcgggcgaccgtggggcctggccggcccgccggagagcctgggggttggggacgatgggctagttcctggtgcgtcacgggggagttccttaaaggggaagcgagccgggctacggggcgagcgcggggtgcggtggtcggcggggaggcccccgcgctttaaaataatgcccgcggcgcccgcgcgaccatgcaatggcgagcgctcgtcctggggctggtgctcctccggcttggcctccatggagtattgtggctcgtcttcgggctggggcccagcatgggcttctaccagcgctttccgctcagcttcggcttccagcgtctgaggagccccgacggccccgcgtcgcccacctcggggcccgtgggccggcctgggggggtatccgggccgtcgtggctgcagccgccggggaccggggcagcgcagagcccgcgcaaggctccgcggcgtcctgggccggggatgtgcggcccagccaactggggctacgtgctgggcggccggggccgcggcccggacgagtacgagaagcgctacagcggcgccttccctccgcagctgcgtgcccagatgcgcgacctggcacggggcatgttcgtctttggctacgacaactacatggctcacgccttcccccaggacgagctcaaccccatccactgccgcggccgtgggcccgaccgcggggacccgtgagtagcccccgccgcccggggccgcgcgcccacgcgcttccttccgccctccgcgccggggtgcagccctctgtcctccggggcccccgagggcgccagggccgttagggtcccgggcagcgctcccgcgccctgtcccgtgtgagtccctgtgaagacccccgagcttgagggtgcggggtgggccggtggccttcctctcctgattctcccggaatctccaaacttcagaactgctgtccagctcagtgtcttacgcgtgaggatactgaggtccaggaccagaagggacagtggcagtgccaagggctggcttggagggctttccacttccatccgaccccttcctccggatgagcataaactctaaatgaaatctccatcatgccccccgtgtaaacgcagcctcagaacaagcctttacctcgcacccccacctctatcacattgccacacccacgtcttttctatgtaaaaagcctatagttgacttctccaaagccgtccattgagtttgaggcagaacggggttacagcctctccttcacaggggctgcttcttaggctgaggatagttaggtggtggggagggaagctatgtggcccacttttggggtccagatacttgaggtgaaattcactggatgccagattgactgtcaacgtcatcgccctgtacgatctgtctataaatcccccgcctctggtggcgtggttgtccgggaaggtcaggcagtcttccctgttcaccagccttgtttgcaaaggctgagctccaagggtcaccactgttgacatcaaagtccaagagggcagtacacccagctaaggacctcttacctgtagggaaggaatgtgcattgccatagaccctgttagtccaaatagttgactcccctcccctggatgggagtggaggagttggtttgctcagtgtcttggcaccgtctggggcaagcattttccttcacctggaggaaagcagtggagtccagtccttaggttctgataaggaagcctatagactaaacggagttgggtttttaaaatggtgtggttatttacacatttatgttttaaattgcagtttgagagcatgatttctaccgaagcaaggggacatcccaagctaaattcaaaggactgagccttttcaaaattctaggaaaccgatgagtttttcttgcttaaccatagcgtttatacgtataagtgtattttctatctcaatttttttgagaaaaaatattaaattttgaaaaaaaagtatttggcctttccagattttttgtttgttttttgagacggagtctcgctttgtcgcccaggctggagtgcagtggcgcgatctccgctcactgcaacctccgcctctgtggttaaagtgattctcctgcctcagcctcccgagtagctgggactacagactcgtgccaccacgcccggctaattttttgta

SEQ ID NO: 39457 - DNA, 980 bp, Homo sapiens
ccatttgagcttgggagaagaggcaggggtgtctggggatgagaaatatcggccagttggctgcagttaatttttcataagtctcatttatcgaaatctgtaatttgaacacggctgttctttgaaatgttccagtctttctgagttcaatcaatttctttcttttttttctttaacccactccgccattcaatcaatttcttaatcatgtaacaacagcgtgagcctttgaaaaccagacacaggctacagaaaactacacatgttctctttcacagggtgcagaatatggaatttgatgcctcctccacaaaaactcatcaaatagcactgcacatctgagtggcttggggagggaaaaaaatgtatttttaaatgaaagaaaagaaaatcagaaatgatcattgttagatgaacaaaaaaaatcaggatctcaacagcacctgatgaaaggcaaattatactattcacattgatcgctttttctttcttttttcaaatgatttattatcctttgatatcacaatcagttagcttgcttgctgcggcataaatatttgatcttggagtaacgtttttgacgactgctttttgctacagccggactttgcctccaactttccttgattaaatagaggaggcaaatatgaggtgcgcaaagagaatagaaataagtgacctggaatttatccaagtaaagagaaagccccaggaaatgtatgaatattggcagggagaagctccacaactgtttcctggtgctggaggaggtgtgtcctctttcggtttgttttgtgcctgcctgcctgcctgcctgcctggggacaagcagaataccatggaattcattttttcttcaaactgtattctttggttctttggttattattgaagcgagctgtatatggaggggctggtattttcagacagtcattgtatgtgccaagattcaggctgaataaagtggctgggagacggcg

SEQ ID NO: 39458 - DNA, 1234 bp, Homo sapiens
gttcccaagtttttcgttttacaaacaatgttccagttagtgccattgtacatagatttctgttacttcttctggtttcacacttagaacacatttctaaatatgtaatcactaggtcgcaaatccacttgtaactcacataggcaatttttcagaaatctaaatctagaccttcacatttgaaattatttcagttatatcccttttatctgttttgctccttttttttttttctacactgctgaggtaggtattttaacacatccctcattgatcctgttgcctcttccaagcacgttgcttggtttgcattaactgggcattttcccaaaatgtcccttggaattcccccaaagatagttgctcaataccactctctttcccaggtactaaaaaatgcagttgtaatgacttgttaacttgtagatatgattaagccccacagttttcccatgaaagtttactatttggcactggtcctgcaggaaggtggcaatgttactcacacagtgaatttgcattgatattcgatataggcatcatggcatatgaggaagcaaaatctgagaaaggatttaaatgtgaaagtcattatgcaaatgataaatattatttattattaagtataattaatagttgccaagcagatgtttttcctaaccaagtgccatataccttttaaaataaatgtttgtaattaataacatttagatagggggaaaataagtttttctcaactttttcattatagcccagattttgccaggcaaacaacttgatagaatcaatagaagcttagttaagcaggtgataatcttctcttggcctccaatttatcactaaatggcttttccatggattgcaatcattgaaaggttgtaattgtagccttctgctatatttactgttagaaaatgttcttttaaattgagcacgctgtgggtttgtgaacacttgtttgtcattcatgatgattaggttcccccatatttgaactggtacataaaatgccagtcatagtgttttaaagtgatttttccctcggcagttttgattagatgccttgggtcagtgcttagttaatatcttgcaccacttggcttctgtaagcaaatgagagagctgaacattccacccacgacctgcttggaaagctgataaataattggaaaaggacagtaatatctgtaagactttcaatctgttccattcagtgtgatattggtattataac

SEQ ID NO: 39459 - DNA, 1286 bp, Homo sapiens
ccagggcacattaataggtcagatggctgaaccacttttcttgaaattgccaagctttttcctgcttctttgtacttcttcttccctctaggtagcatattcatgcctcagttctccaatcagctgcctccttctctttagatagatctgagctctaagattatactcccccatcttagagtaattcctctatcaacatatatcttagtttactttctcttactataaaagaataccacagaccgagtagtttataaagaaaagaagtttatttagctcacagttctggagactgggaagttcaatagcatggtgtctgcatctggtaagggccttcttgcttgccataacatggcagagagcatcacatgataagaaaaggcaagagcaaaagaaccagaaagaggttgctttttataataaaggcactcccacgataatgaattcaatcccatgatagcaacattaatccattcatgagggcagagcctcattaattcattaatttattcattcatgggaatagagggattcaattttcaacaaataaactttggaatacacattttagccatagcattctgtctctagcccccaaaattaatgtccttcttacatgcaaaataattaattccatcctaatagccccacagtcttaaccattccagtatcaactcaaagtccaaagtccagagtctcatttaaatcagatatgagtgactcaaggtatgattcatcccatggcaaatttcctccagctgtgaacttgtgaaatcaaaacaagttatctactttcaaaatacaatggtgggacagacacaagataaacattcacattccaggagagggaaaggaagcaagaaaaaaggcataactggttccaagtaagtcaaaaatctaacaggagaaacaatattattcattgaagcttcagaatgatttttcactctgtgttgcctccaggacacagtggggatttggaccccctcctccacaaaatttctggcagccccacccctatgactttggagggctccgcctatgtagcagttctcacagactgagtcccttgcctgcagttgtcacaggttggtgttacacactggtggctctacaattcttgagtcttgagggtgaccctgaccctatggctttactgggcattgccctagagggagctcttagcagcagctttgacttcaatcccaaattttagctcagctttggctgactgtggtctctctgcagtaactctacttgtgtgacaaaccaccgtgtggtctatg

SEQ ID NO: 39460 - DNA, 571 bp, Homo sapiens
ttgtgtttaatggtagtttattttctgttgccatttgtgactttaaggaacccaatcatcacaaattgagtgagagtggactctattaaactgagtctggatgaatgtccttttgcaaagtctcttttcactgtaacctaaaattccccttatgacgagccaacacaaaggcacatctctttcccagaagctgtcaagcaattgctcaatctgctcactcctttaggagaacacaccttgaagggtgacaattacagtgggctggaggtgctgacaactgcttcctgatgataatacagaaggtccagtgctgttgaccttaggcattgacctgcatgtagaaactgccaactgctagactgttagaagaatgtaaatatttaatgagtgatgctttgtaaaagtgcctatcaccagaggttcggagatcaaaaaaagaatttattttcagaaaatagttctatctttctgtggagggtgtataggtggcttttcctttgaccatcatgctagagaggacaaggatagacacagatgggacaggaaaggaagggagcctgagatgttcagg

SEQ ID NO: 39461 - DNA, 631 bp, Homo sapiens
tgatgtgaagctttctggagtgatatcatctgcatttttgggtaaaggacaaattgctttgtctcctaactgaagtcaagatgatataatgcaatgtcaagacctctgactttcaactaagccatgacaatgactaaccactagatatgtctgcctctgacagctattttttccattcacaaaccactcagtagaggtgtcataattatagagcaactgttaaagagtaaagttttagagccccagaagtttccattttatctctctggtgattactgttaagatggttgttgactcaatctaaactgaataaattaatcattaaccaatttagttagtgaaaggaaaaatttcctagtgattgtttgcaaatgaagcagtaaactcaatttcttcctacttcttccaaaaactctgactccagaaacctctagaactttttacttctggaatgttactttctgaccctctgccattgtagtaataagtcatctgaaatttaattttgagaccaattatctgctggaactaaaaggaaaagataaaataggaattacagacagaaagaagaactgacaatatattattcaaatgtgtcctgggtttaatccaaatccatattatatgacaa

SEQ ID NO: 39462 - DNA, 839 bp, Homo sapiens
gccacaaaccttcctgtgcttcatggtgattttgggggggaaggttatatgtatatgtgtgcatgtatgagaagttggaggatggagttagcatctttgatgataatgaatggctctggattgcaattcctcttcaggccaaaaaaccctttcctagtctaaaggaagtaattccacagctgggctgtttcattaatcagaatagcatttcctcaggtagccatgtaaagtctgtattctggaggtcattctcaggggctgaggcacgaacagggtctgtgtcacaaggctgcattaccaggtacacttgtagaggtgaactgggtcaagggccaaagttcaatccatttgtatccattctgtcctaataatgttcccttggcattttatcctgctgggccgtagtccatgcttgatgaaatttgctaaatagataatggatgattacgtagatggaaggaaagaacccgtgtgggtatgaggatgtgggtgtggaccctcagccagtaaaaattagcctggaaaacctctttttcctcatgcttccgagccaaagaattagagcttaactctggcttcctctttggttagcttcacagtggcccctgccttgctcttacaaagaatgggtacagacacttcccttttcttcccaatcctgagaaagcagctttcttttttgctgtagcccaccttgcccacaaatgaaacacatttaccttgaccaactaactcaactgggaaaggaactgaattgttgaagaaactacaaggaggctggtatactaggacagagcaggtacaagggcacccaaagaggctaaggtcagattgtgcag

SEQ ID NO: 39463 - DNA, 554 bp, Homo sapiens
atgctgtgcaggaattaagtgagatgctgtgtataagccactgtgtacagaacccactactagttactatactaaaaagatggtactttgtgtcaggccaaatggaagtttctaaataattcttgctgctggttcaaaaggtaaaaaaagtgttgtttttgttttttaatttaccttgcagaaggaattctgttagctgttgaggctctggttctaattctgtttcagatgaggttaattattgattacaatagcactatgaagtgtggaattcctttctgtctacagagggcaagcaaaggtcattttctaggaatagattgagaaaattcaaagtccataacaatattttgcttttatttatttatttagagatggagtctccctctgttgcccaggctggagtgcagtggcacaatctcggctgactgcaaccttagcctcctggctccaagagattctcctgcctcagcctcctgagtagctgggattacaggcatgagccactgcatccggcttgcctcattctaaaaaagaaagagtcagagggttct

SEQ ID NO: 39464 - DNA, 846 bp, Homo sapiens
tttgcaaacagggttattactgcaactgacactttctaatttttctttcaggccctgctgcaaaaaagaagtatgtcagttataataacctggttatctaacctgttccattccatggaaccatggaggaggaagaccctcagttattttgtcacccaacctggcataggactctttggtcctacccgcttcccatcaccggaggagcttccccggccgggagaccagtgttagaggatccaagcgacctaaacagctgctttatgaaatatccttactttatctgggcttaataagtcactgacatcagcactgccaactcggctgcaattgtggaccttccctaccaaagggagtgttgaaactcaagtcccgccctggctctttagaatggaccactgagagccacaggaccgttttggggctgacctgtcttattacgtatgtacttctaggttgcaaggttttgaaattttctgtacagtttgtgaggacctttgcactttgccatctgatgtcgtacctcggttcactgtttgttttcgaatgccttgttttcatagagccctattctctcagacggtggaatatttggaaaaattttaaaacaattaaaattttaaagcaatcttggcagactaaaacaagtacatctgtacatgactgtataattacgattatagtaccactgcacatcatgtttttttttttaagacaaaaaagatgtttaaagaccaaaaactgtgctgagaaagtatgccccacctatctttggtatatgataggttacataaaaggaaggtattggctgaactgaatagaggtcttgatctttggaatgcatgc

SEQ ID NO: 39465 - DNA, 1804 bp, Homo sapiens
ctaagggaatttgaccagaggcagctggaggagagtctggccactgggcagcctgacaccagggaaagaccaccttcccactccatcccccttctggctccacatccatctcactgaaagctacttccaccactcaataaaaccttgcactcagtctccaagcccacaggtgatctgatttttctgaaacactaaggcaagaaccctaggatacagaaagccttctgtctttgtaataaggcagaaggtctaaatgaactgatgaacacgagctgcctgcagacggcaaagctgaaagagcgcactataacacacacccactggggcttcgggagctgtaaacactcagccctagacaccgccgtggggttggagcccagaaatgctccccatgacctgcccatctgcctgctccccatggggatttgagcagtggggcactgaagaaaggagccacacccctgtcacatgccctgtgagggggataagggaacctctcctgtttcagttgtaatatcatggagggcaagagccatgtctatttttttaatataatttactttcgtatccccaacaaaaccgtctatagtggcttgcaatgaacaaagtatcactaaatggttgttgaagtgacaaatgaacttgaattcaaagcatgatagagaaaattaatcattgagtatctagactacagacttatttggcactatgcatgcttaaataatgttaagaatttttctgatcttagtttaccttctgagaagaactgaaggctctaaaacctcgcttgcaaatgtaaagtgctctgactaaatatctgacctcactgataaaatatttggggaaaacccatggtgaaacagagtgtccctcaaagaaagtggttctagttcaaacttttcagtaaaccatgtttgcctgaaaactaacttgaacaagccaaataaagctgggtcttcccgtgcaaaataattgaaggtatgttgctgtactttgctcctcaaaatgtgattcacaggcagcatcaaaggcatcacctgggagcttgttagacatgcagaatcttaggcacagctccagacctgctgacatgtgtattcccaggtgagtgcatgcttgttaaaggtttggaggcactgtagcagcagggccgtcggtgaggggcttataggtccaggattctttttccatatttgtgtgctctcaccttcaacagctagcatctgtctctttgtcataggccttcccccccactgctggaacttgctttatcattgcacacagaaacaggaagtgtttgagaatatgtgttcccatgggacagtcctatgactgacaggggagagtacaaaccagatccctagtccctgattggataactgtgttttcagagtttctccgtggcattgagccaaagtaaaactccatggaactttgcttgatattgaaatggagagttcccttatttcccttgcagggtgtgtgacaagggtatggctccctccttccttgccccactgctcaaacccctagggggagcgggtgcagaggccaaggggagtgcttttgtgctccagccccagggcagcgtctaggactccggaagcccaagtgggtgtgtgtcacagtgcgctctttcagctaagctgtctgcagatggcttgcgttaatcagctcaatagaccctctgtcttatcacaaggacagggagccagtgtgacagcctcagttcttgcccagtgtactggaagaaccaaattacacgtgggctggaaggatgaatataaggttttattgagtggtg

SEQ ID NO: 39466 - DNA, 3765 bp, Homo sapiens
ccccggggttggggaaggtggagaagaagggagggaaaacttgaggccttgcactcagctttgacaacaacctcattcaaccactagatgtcaccaaacacaaaacccgttagaaacggagaaatgaagccaaggaatcttgatcccaaagaattcctggactcagccctggaaaagtcttaaagctaaggaatgtggcatgcagatcactctaggtaaagcaggactgacttttataactgtcaccaaaggagacgccacatctctggtgtcctggcgcctgcatctcaaacacacagcatcttagttaattctcagaacatgcccggcagggcaggaccaccactatccccatttcacaggtgggagcactgagggcccaagaggttgttacctcctcaagtccacacagctaggaaggggctgaactaggattgcagccaggactctctgactttccacctgggctctttcatctataccatgacatctatcccagggacatgacccgctaccaccattacagaaacaccacagccacaggttccaaggcagaccagggcatttctttagttcattaaactccattattctaatataattactccttgattttacagcagcaaattataatagccagtagtggagaacagtaacctggattgccagaaacagcagaaggttttggtttgggtttgttttttcacttttgacgtttattgtataggttgcacttcatttgggggagtccgagggggagtgttttgtgtggttttaaatcaacctatttagcttctcaatgtcattgggcattggataaagatctgagtgtatatgttgtctgatacagaaagtgagtgagaatgtaggtagaaaaaagaaaaacagcacatgaagagatgtagaaagctcagctaagctcaaactctcccagtgaaacaccaaaagtacagggacaacagtagtttggaatgaagcattgctcctcatacagcagaagagaaactggaacatcctaacatcagcaccaaagcagttttccatgtcctcattccctcattcatgcattcattcaaatatttaccaggagccacaaacgtgaccaaaacatgcccttgcctttacaactgctccctgtggtagaggagacctctaagcgaataatcagaatacaacacacttagtgttatatctgagatacacacaaggtgctactggacagataaaacagggaaggaaaaagaagacgttaaacatgggtttaaaagatgaatagaagttcaagtacagaagggcagccaggcaacaggaatgagaagtgcaagagcacagcatggagcaaaagggcaggagaaggtcacaggatggcaaaagttttcatgcatgtgagggactgggaaacttgtagggtttgggaaggtggagcaggaagaggcaggaagggtaggcaggggctagatacagagccacaggcccctgagcacttgcgatgtgctggtctgaactgagatgtgctgtgggtgtaaaatacacaccgattttgaagactcagtgggagcaaataaagtaaaatacctcattaatatttttacattgtttggctgttgaaatgataatatttgggttatactgagctaaataaaatatattattaaaattaacttcactcatttgttttgactttgttagtgtggctgctagaaaatttaagatgacatatatggcttacaatcacctccactgggcagtgctgggctcattcaagcatgagaacatcggattccatcataggggtcttggggctcatctggtagcaacagggagtcaccagaaattccagagcaaaggagcaattcagtccgctgaaggtttaggaacaccttcagtggcttcaggttggtggggtaaagcagtggtcggggaaggcactctgggggacattaagcttcctaagtcaggaatgtttaggtctgaataaagcagagaaggaaaatgtgggagagctatttaagagaagagaaaataattgacaaatcaaaatcagattattacactacaaaaccatcacaggattcaattacagtcctttgtggggaaatgcctcctcctccatcccccccacgtccccaactcccaccagatcacatagtgtaaccttcctggctgatgtaacacacaaagctgaaaagatagttttcaggacacaggaaaagcaagtggcaatgcttaagagaagaacttactcctctttccttgttaaggatccaggaggcaaacctaaccccgctgggccccagacagcaattcctaacagtgtgctcttttataccttccttcaaggctgctgacaggaaaggccgttgccaaggaaacaggctgagccaggaagctgactggagcaaacacagacagtctcacggccgctctgtggacagagcggaccagttggtaaatatttcaccaggcacataccagagacgcaaagcaaacagtatgtcatcccagcgctgggctggaatcgttccacgaggaaatgttgaactcagaagctgtgcagcttcgttcccatgttacaaaggatgacctcccaatatgacagggcttacagtggggcattgggacactttgctagagtgggattatagcactctatatgtgcgagttccacatctgcggattcaaccaaatgaaaaatattctccaaaaaatgtacaaataatacgaattgtaaagtacattaaataaataaaatataaactaactacgtagcatttacattgtattaggtattataagtaatctaaagtacataggttacaggcaaatatgctattttacataaaggacttgagcaggagcagtttttggtatccgcaatggccctggaaccaatcccctttgactgtactgagcatctcccagcacagaggctatcagtgctggtggcaaaagagatgtcaaggtactctggagaaaagtagaaaatcagtgggcaagctacttctccttcatggcagcctcaattttgcttacctttaaaatgggtataatcttttaaagattatgtaataggatgagcattcaatggaataaaatagtttaataaataagataaatgtgtagtcgcctcaataaatgttagtttcactttccgctccagtgtgtaacatctagaattaaagatattctgtgtacagtttgaatgccaactatttagatacaacacttctattaagtaagcctaagtctgtcttagcttcctcagtatataacactgaatacaaccacagagggattctttttgctttgtatcttttacgtgaatggcaggtaagtcacatctcctggattttttactgatgtaattgatgatctgggctcaagtcctgaacatgcaaaccattccagtgaattccattttattagattgaagccatagctctagcctagcaagatcacttgaaagctgtcctctgtcctcagggagcttcatgtctggggcagtggtttttaaaacgtggtctcttgacctcagaattaactgaggtgattggttaaaaaggtgagttttcagtcttcatcttagacctattgaatcagaacatctggaggcaggtcccagaaacttgcaattttagcaaactttccagtttacactcatgcacaataaagtttgaaaaatcaattttcttcattatttctgcattttagaaattggtccttggaccacctgcatttgatgcctgttgaaatgcaggtttctga

SEQ ID NO: 39467 - DNA, 1760 bp, Homo sapiens
ttcttctctttatgttatcatgccttgcattttctgtggagcatagtaggtactcaataaaaatgtgtcaaattaaattggatatcattacaacatttcccaggaattcaagtggcttctctaccccttttccttgacttgcagctatccagaaaaagcaaacccacgtggcttgtgtcacaagcaaaaatttaagaagaaatatcatccatgagaaaataatcacaccccacgttcccacaccaaaccgaattgttttcagtcgagttctagtctgtgcactttgcccttctaaccaatgtttattaatatgaggaatcaagaggttactaggagcaatcgctcaaaactggcaggaaactaacatttggttggtatctgtgtctctctctggaatgggtgcgtcttcacgttcccttctcatgctgaggtttgttttccccacatgttgttcagaaaacacaagacttaatgccctagctttttgctgcctaaaacggacaacccttcccttcttcagcctcagggactgtgtcaactttaaggtcatgaccacagggccacaggggagccaatcatgataacaaaatattatttgcctccctggtttctggtgcattcaacaggagccctcagctccgagtcccaagactctacaaattcctgttccaacccaaaacttcaccactctctagggcactaatcattttatcagaaacctacggtggctccagcatctcattccaagttctgactatgctttatttttttcccaatattatgaatgtttaaaaacatgtttttattggaaagatctgtatgtcctcattaatcttttggatctcactggagccccttaacatgccccttaaaatatccattaaaaagtcaaccacaactgtttaaataattttaatgcatacatttaaaaagagggcaatgagatatgcacatcatttaaagatggtggtggacgttggaaagggaagtcggtgatgggcatgaggtcacagactcgccattagggatcattcttcattcagcaaattgtcatttacttggaatatctccctcattccatggattttaggcatactttcttttcagtgggaaaatggaaggaatagatcattgggacctttcatttttctcattcctatcatctaaacacaaagaaagtgccctgtttagaaaatgctgctaagttgtggcagcccagggatatttcaagcttgcattctggccatttctctctgttttatatggcttcctgctctcacatccaatgaaaatagctctttccatggcaacaccacatagagatatcatggcaagactgtgttgtggttgctatttttttaagcaatactatttatcttgaaactgcaccaatttctccccctttttctctcattccacaatcacaccagtgttggcagttcctcttgagggcatgtgaggacacttagtcacctttaccaaaggactgtagttctacttctttagtccaccatacaacattagttctgtatgcttgtcaagtttttaactttgggtgctcaagttgaagttcttggtttgatgttcaaagccattcacaatagtcttgactgcttccatattttcatatactaacactgcctgtattataacaatactgagctgtttagcctgtgactcaaagatacctggaccttgttggccaggttaccattgcattacagtcaaatttaatgtatcaccttattccaaacacacac

SEQ ID NO: 39468 - DNA, 3346 bp, Homo sapiens
atatggctggcagtggaggtggctggaccttagcaaacactcatctttggactttatctgcaccaagtcaaggagtatcccacataatgctactgacaacgacatctgcaatcgattgtcagtgcctgattatttcatctaatggagcaactctgaaatgtcaccctaccccctacagcaaaacaacccttcccagtctagaaaggaaggtgttaactgtggccctggacaccggatttataaaaggcatccgctgttcctgacttccaaccctcccatgttgttgatattgaaacctaattgtgttgatgttggtctccaaggtaaacaaagctttacaggggaaatgtttggacttagagattcctgtttgctccaagtatggattaatggccagaataatgaacattttcattcatttccttttaaagtgctcctgctaatgtagctaagtggacagctcaaaacagttcctattggccaattatcaaaaacagtttctggaatatgaccaatgcttcccacacttgtggaattttcacttagagaaaatcccaagacttgtacctttatgaaggccccaagatcctgagggtagagcaagaaaaaaggggaagtacaagaagggaaaagagagaggaaagagagggatggacatcaattgctgacgtgagtgcttattacatgcctggtacaaagttaagtttttcaaatatacgacctcattaaatcctttcgactgccctaaatgaaatgttttcttttccctattttgcagataagaaaactaaggcccagagacagttcaaggtcacacagttgaagtatgaccatgctgggatttgatgcgaaagcctgtgctcttatccactaggttgcactgcctctcaaatcttgttcctctctctccttaccatatgtagttttccccatagtgtgaggatggtttctgaattcaattgtgagtcctctggcctggagagaagacataatgcatatatgaaacaagtaactaatggtggtagcagatggtaaaggctggagatggaagtagaggttggtgggtagaccaatgaacttggaccttctctggagggcaatgggggcccaggcagggttggaagtaggggaggagcatggccaggactgtgtgttagaaacagcatgctgatggtggtgtgcagcccacatggggtcctgaacaagacagacaccactgggctgaggaagtcgtctagcccatgagtggcacttgtggaaggactgagcctggcaaacctcagcctcgtaacccagtctgggaagccagcctctgttgggtttggcaaggagacatgtatgagctcagcaggagggaatgcagagtgtcactggtttagagaggaaaacgatctgctgaaccaagaccacagctgggccatcctacaaaagggcttggcaatgtgtccagagctgcctttgttttcaaacacatgtagtatcacatccacactggaggaagcctcaaccttggcactcaggggcttacagctctgaaaacaattcctaggaatcttgctcctccaggtgtggtccagagaccaacagcatgagcatcacctgggagctcatcagaaatgcagaatctcaggctccacccagaacctgcattttaaaaagtttcccaggtaattattttaaaattgagaatcactgtcccaacatagtgaatcagaatctctggagctacatttctcaaatctgcataatttctaagttcaccagatgaattagacacatactaaagtttggtcaccaggccaggaaaccttcgaaatgtcctaagaatgtcaacattgcagcatctaaactacgttcttcataggcctcccatacccaggagtgtcacaaaaattccctgtgagcaggcatgggcaatattatgatttgacctgcaatgtatcaacttctaaaaaaggcattgtaacagcttatacacagaacaggtggtcagctaaggagcataatagaatgtgttctaatgaaactccacaacctgccacccactgagcatgtctctccatatctggaggagttcagagcctaaaaccccaccactggcttaaactgtgcttctttttaaaaattacaagctttttttttcttgaataaacacacacacacacacacacacacacacacacacacacacttacactcagattaagtttttgatgacttttcagagcccgcttttcctagtggcaatttattagcaagtattttcagtctacctccaaagaatatcttggatgttccagctctccacacatccactgccacatcttgtctcatctgcatgcctgcaagaacctcccagctgatctctccacctctactcctgccttttctggtctctactccacaaagagctccaagtgcccattggaagacataaatcagaccatgtcataccccagcctgaggctaagatctgcctgtatcaatgtccttcagctgctttaacaaataattaccacaaacagttgatggcttaaaacaacagaaacaacttatctcctgtttctgaaggctggaagtccaaaatccacatcactgggctaaaatgaacacgtcagcacaactgtgctcctggctctaggggagaatccattctttgctacttccaacttctagaagttgccagcattccttggcttgtggttgtatcactccaatctctgtcccatgttcacattgctttgtcctcttctgtctgtgttgactctccctcacctcccttttataggaacacctgtgattacattcagagcccacctggataatcttcccatctcaagatccttaacataatcgcatctgcaaagtctggttttgtaatatcagataacatttacacgtcccagggattaggatctggatacctttcggaaaccattatttagcctgccacgttgcctttccattacacacaataaaatcctaagtctactgtggcccataatgtcctactgatatggccctgacccaccactcaggccccattttcttccacttttctcctctcccagcccaccccgccggtctactttcaggtcttcaagtatgttcctacccccacagcctttgtttttgcagttccttttgcttggaatgtaatcttggcctaatgtgctgagtgaatgaatagcttattcccacaagctcagaaaagacaatggcaaaactagaaggagcagcacggcttgagactaactttgcctgcttttcaatttgacctagagagttttctggttaaagatgtttttaccccctctttttttcaattaccaaatatcccaaaata

SEQ ID NO: 39469 - DNA, 3358 bp, Homo sapiens
tctggatgagaaggagtccactttagtgataattgagatattgggtaaaagagtcctttgggggaaggagaagatatatggatgaagcctgaaaaaaactgtaaaatgaccaaatggaactggcagggaaacatgaatcattcacaccttcattagaatatgcagcactgtgtcagccatgccttgagcatagagccatcctaaaccatgtgggggacaccaagagaagcttctgaggatgctccccagcatactcacagttatgaagactccacctgagtcactgcagcaagtcagtgacatcttagatgatagaagatgggtcacttactggcaagcctgtatcaacacccccccttagcaactgtccctatcactggccaaacttaggtactacacgatctgtagatgaatcacttctaaattaagcatgaagatttccaaattagttcaaaatgatctaacatctagacagaaggtacataacggaggacgggaacataaggagtgggaaaaaatagaaggttatgttctttgagaaaacaatttattttcttttgaaaggcaggacctatttttgcaaaaaatgactgactcactttattttttggatcattgtaaaggaaagagagtgtgtgtaatgcgttgctttacaaccaaataaagatgtcatgtggacattaagctttctaatttggtttatattattccagctacaatcaaaatgcacacgtgaatctaagattgattcatttctgggttggattgcctaacgttctttctactgttataagtaacttcccgaaaaacctttctcatgctttctgggactcaggagcatagttcaccctaagatgccctctgacctggtcaccccaattcttcctcttgtacccaagggctgtgagcctcactgcaggattactggctctttgggagtaaactaggaagttcctgagttctcgaagccttttgtcacagcttttccagttcctaggcatgtgatgggggacaagcattcatggttattaccaggagctcagagagaccagagttcaactcccatctctgccacctggctcggcatgaccacagacaagttgcttaatcactttgagcttcagcttcctcatctgtgaaatgggagtactcagaggccctaactctaggattattgggaggattaagtgtgactatctttgtaaagggcttggctcagtgtctacccacatggcaagagctccacaaatgttagctcttactctttctaatggaggagtgtttggagttatttatttagatgtcctagaagttaagccactggaatctgatacttttggtaatagagaactataagcgccagccagactcaatttttcttgcctcaaggcccattcttttcctgtcacaatgctcccattcattaccttttgttgtaattgtttgtttaacatctgtcttccccaagagagtgaatcctgtgtgtctttttacattgctgcatgcccagcagaactcttgatacagaaagagatgtgcaattgttatttgttaaatgcctgaaagactgctccacagattgaataactgagtgattcaatgaaaaaaagaacaaactaaatgatagaaattggccatttatattcaactggagtatataaaagtagtttgctagcatgacaagaggtaggactacagaattgtaaattttacctaggaaatagtaaggtctttagaggaacacataataactatttctgaatatatcgaagagtttaattctgtgtttgctacccatcaatgatgggatagggaggaacaccctactgcaaagcattactcacttcacactcacatggccctcaaattgtacatcccttccaccctccgtcataatccaggatctgtttgacagcttctgacttcagtgtgactatccatgtcagatgacgtcattgctaaaccatgtgtcttgggttgtgagaaaagctaggagaatcaacaggaaggcccaaaacttttaaagcttaatttctgataagtaagaatctttcctgaaatctcccacccactcttttcttctgggtgagctcatccagtctttccagaaagactgatcagcagcaaggcattgctggactttgtcagggggatttggtgtcttcataccttgttcatcagccacgaacacactcatctttcagaagctttggaattctgcccgtggctgtctggacattctgctgcattcccaaggggcctcttgggatgtgcatggttagccacagaaaatccaaattatgtttttaaattattacctgccttgtgtgaacaaactaaaatggccattgagcaacatgctgactatcctattttcctcctaaaaatctgtggttgtgataagtggaacaattatttaatgccattttttgtcacaagcgaagaatggactcccaaatgcagcctgggcaaaatctctttttttttttttttttgagacggagtctcgctctgtcgcccaggctggagtgcagcggcgcgatctcggctcactgcaagctccgccccccgggttcacgccattctcctgcctcagcctcccgagtagctgggactacaggcgcccgccaccacgcctggctaattttttgtatttttagtagagacggggtttcaccgtgttagccaggatggtctccatctcctgaccgcctgagcaaaatcttaaatgtcactgggaagagtttctcagagaaccaaacatgatagctaactacctggcaattggcaaataattatacagctaccaagtatcaaacaccttctccatgccaggcactaggctgcacgctggttatttaatctgtgtgccaggactatgaggttggtagtattgcctccattttataataggtggattgaggatcatggtaagtagccaaccagggatttgaaccaaatttgtctgactccaaagcaggagcttctacccccttacaggtcataccagcttactgagataggaggggagggccactgcccacaaagtggaatataatggtggaatcaaacttaagcagagtaccatagtgcctaaaatacggagaggagaggaggagaaggcctctcatgcgcatgatcctagctttctaatagattagctgtcatcatgtgggaaagggagagcccttcaaatagattccagaggctggaaaagcacagaagggtgacagccccaggaaagcagatgtcagcccaaggtaaagaagaacgttctaacaatcagagctgtccaaaagtccttggaactggctggttaaaaaaaaaaagggggtgggggtgggggaaatgagctgct

SEQ ID NO: 39470 - DNA, 2880 bp, Homo sapiens
aggatttggttataatttaatttaactagtgtactatttaatgatacaaacaacatattattcatgttttcacattgaaataacttgggccctgcttgctacattgtaacagtgaaaacatcattgtgagccatgattattggggatttatgaaggtgttggcatgaaaccaaaagaactgggttcaaggtctttctagttctgcccctttctagctttgtgactctgagaaaatcacttgtgcctcccaatgcagtatttagaacacatagtagaccacactgcaccaatcaattaccagcttctaattgctcagcttctccacctgagagtgagacgttgcgagttactgatagctttccattagtacttttggtgtccttgctgtgagtaacacagtaaatcagacattgtcattcccctgcttaagactctctataactgctctgctcaatatggtagccaccagccagatgtggttgatggtagctagatggtagccaccagccagatgtgcttattgagtatttgtgacatggctaatctgaagagagatgtgctgtaagggtaaaacacacaccagatttcaaaatgaagcacacacataaaaaagagtgtaaaccatcgcaataatttttatattaatcacaggtgggaatgacattttagttatattgagtttaataaaatatataatagctatttcacctttttctttttgattttttttaaatatgactattagaaattgttaaattacatacatggcctgcattgtgttccagtgggaaagcactgatgtctaacctcctgccatttccaggagagaacataaactccttagcatggtttatggggcccacatgagccagctcctgcatgcctcacctgaggctcctcataccattctccctgacccactacactgacctcatgatccctcagacatgccacactcgcactcatctcagggtctctgctctcatgaccccatcctcctggaatgttctctccatggggactgtactcacagctgactcattctccttcactggggcttagttcacacaccacctgctcagccagaccttcctggaccccctaatctaaaatgactgtgtccaatgaatttctccatttatttcctcctaggcactcactgccatccttaattaccttatctaaatatctatccacttgtttaatgcctgtctcccctacacacattagaatagaagctatatgaggggagggacatttcctgtcttattcactgttgcatcctcagctcagggcctaatccatagtatttcccaattcaatatttgtttctttaattaatttgttcatgaatggtaaaaagaatacgagactcagagtcaaaaatcccagttaggacaagcccagtgataatgatgacaacaacagcagcatcttaatccaagtgcttcctgttttgcttataatcaaccatctgcaatcattatggaagcagtgcagtataggtgaaagggtgcaatctgaagttaaaaactctgaatttaaatttcagctctgccacttgccagctgtatgacctttgatacagccctgggactgtttgggatttctgttttctctgagactagttgtcttggagttcaagtaagattagggctctgtcaaccagggagccccagaagtagttattagaccaatatgttctccaaggagaagaactcttttatttaccttgatgtttccagcacctatcagagggcttggcttatggcaagtatcccaaaactccttgatagatgaatgaatgcttctaataatcccgtgtcaaaaagcgatgatccttggagaaatcagatctctactctttcaactaggaaaagatatccaattttcttccaaagagaagtgaagaggacctcagagctggagtgaggctcaggtgcaataactacatttccctcattctcctgaaaagtcccaagttgtaatggtctgtccaggtgtccggttaagtctctgaatataggtcccctggaacaagagggtcaagtgtaaggtttaaagtgtcaaagtcagaatcctcagctgaggagacagcaacttctagcagatagcagggatcccctctctgcctacagcaggtctttttccagaaagaagggaatgagccaccccaagcaacagctcctgacactcgtgttctgagaaattctgagaaacagctgcaatatctgcctccttaattgtacctggagccaagggtaaaaataaggagggggagagactcttgtggttggagctattaataaatagtgttaacttaataaaattagtattatttcatggaacaatgatttttcaagatggggcaaggagggtggctgggaagggagtgggaaatgacttcactgggcaggcttttgcctcgtttgaaagggataaagcttgcctttgttatattcctggcttctgttcccacagctctaaaatataaaggcttctggcatgacatcctgatttagcactattgttcctaggatttgctactgaaaggactattcatgtggaaacctcctctcccaggccaggcttctgttggccactgtttatttacatactggtttaacatgcagcctaccttggaagtttggacaaaccaggccaggtgtgccattgcaccatctctccctattcttactttgcctgcttactgcatggaggtagagagtagaagaaggttaccagaggttgggaaatggtgggctggggtgtgaggggatgaacagaggttggttaatgcgaacaaacactgtctgatagcaagaaaaagtctagcattcaacagcacagtagggtgactatagtcaacaacagtgaatt

SEQ ID NO: 39471 - DNA, 2342 bp, Homo sapiens
cagcctgggcaacagcgcgagactctgtctcaaaaaaaaaaaaaaaaaaaaaagaaaagctaaaagtgatttgacatgttcccagtacaaagaaattataaatgttcaaggtgatggaaatcctaaacaccctgatttgatcattacacattgtaagcatatatcaaaataccacatgtacaatcatgatgtatcaataaaaaaaataaaagccagaacccaacctctattcatttgccaaatgtgtactgtgcctataccacatgctaggtgtttgaggacatagctgggagcaaacaaggcaaaaatcaattatagcagaaatctgtgaaaaaagaaataggtcatccctcatcttggaaaagataagccacaaaaagccctttccaggaatatgtaataaaaagtcacaattcaggatccctggctgagatttgggatgactggagatgatgataagaactaaattggaggaggctttcaagaggaaaaagcctccagcaagagacagccccacagtgggaactgcagcctccccttctcaccaaatccctcccgaatggtgtacttcgggaccactcttcagtctctgtgcaaccgagttttattttagcccacgggaccctggtttttctggcagggggcactgcaaagacgggttacaggccgaacacctcacaacagagacagcagtattctctctaggataaaaagggcttgtgtttaatcctctgtcagggcaggggggaaatgcctctggaatccaagtctgtggaaccggctcagcagagagatgtggctttataggcaaacaacgtggcatagagagaggaacctggccaattctgtcttataagagtagttatgttatgcgttgcaaggactccacattccatggatttgtgaactcagatggaatcttgtttgtccaggcctgcatgaccccatttatctaaaaattactaacttcctagtttatagtttacaatcctgtgcccgccgcctccctccccccccccgccacgcccccatgagctttctctctattactctcagtctctcaggttaaagccttgctcagtaattcagctgtggaccagttattctgattatttcctcatctatcgtcttacagtcataataataataatatctgagataatatgagcatacaacaagacagtatgtccacaggagcatctctaagatcaggacagtgatttcttgctcatggaataagaaggatttatgttaaagcaagttataagaaagcagtttaatactttacgaacgttaagtttaaaaaaatcataactcgctggaatcttttctcctctctggatattggagaactcgcccaggtttgggaaacgttagccagctcctgcaaaacacctcctccctcagccctccccgcgccccctacgaccaggcagaaagggtgggaaggggagcacagctcagcatttatttctggatccagctcactaaaaatacctcggctctcctgtttgatcactctcccttttgacctgaatggatcgcgggagccgcgccgcccgccccaccttcggcccgttgccctttaaaggaaaagggcgtggggacggattcctgccgctcgagggatagaagggagctgggtagtcaggggccgcggccatgctgacgtcagggcagccggcgctcagctccgctcgctgccacagtgcagagacctccctgagggagggggacagcctcgcgctgggattggctggcctcgcgcgagcgccggcgcggagtggctggcgaggttttagagggagtcccgctctccaattaaagcggcccagctgcgcctggctgcgcacagagctccctcccaggcccgcgaacttggccattcagccgccgctgtccccgctgcgcgccctcgcgcctctgcctgagaagccaggcgctgttcccccaccccagaagaggatggcaaaggtggctaaggacctcaacccaggagttaaaaaggtgagtggaaagctgtttgtatttacccagattcttactttttcttgttccccttcccatctgttcgcggaaacttcccaaaaggtaatgagaagggaactctttaaattccaaaactgcatggaaaacaaatagttgggaatacatgtttgagctaacaggcacacacaccccaaacccaatgttgtgtaaaatatttgcaaagggtcttatgtctttggtgatgctagttaaagtttaattaaggttttacatatatatacaatatatataaaatgtatataaaatatatatataaaatatatataatatatattatatataatatataaaat

SEQ ID NO: 39472 - DNA, 1813 bp, Homo sapiens
atatatgaaatcttatggtctgtaaaggaaaaacccctagcttcctcactccctgtcctcaggtggctgaagtaagggttgagagcatgtaatatttactcacagtctcccttttgctattatcccagtgttttgtgtgtttcccccaatacacacacacacacacacacacacacacacacacacacgcacgcagtttctttagttggtgatgttggcagtggcagcagttccagcataagggaactgatttctgtccccagggtctgcacgtttcccttacaagaagggctggcccggagcccagaaggtcatgggtaaactcctgcacaggagcctgcggctgtgcctatagctccaataccacttgttgcctacctgaatgcagctgggagaaggcacaggctggagacttagagaacatgtgaacgggaagggaacagagagacaacctaggctttacagatcgggaaactgaggcccggggtcacagagagttggttctaacaggcagctgactgtaaggcaagccctaggcatccagactcagtccctgccactttttaactgcacatgattcaccaggtcacttttctgagcctcagtttccttgtctctgatgtggggaggataggcctaacctccctcatggcagtggtagcagggatactgacactgtgagttaatttcccaaagcagtcattgttaaactctgatttcacagggtttagtcttgaagggcaaagtcttccttaaatatctgccattaacctgcagggtagaatgagagggggaaaaacaaaagacgtgagaatcaaactaaagacacaaacagccactcagaggcacagcatgcactgtctaatttgtagctgtgctcttctgtagaccacctgcccagaccctgtcacagagtccagtggatccttctaaatgtgggtaccaagtcacattgaatctgggcatttgtctggaatgtatcatgcctcactgcatttgccaagctatttgcagaatcaagtcatttcccctcctacagaaattaccataacattttagactcttagaagatacctattaattgctacctagtagtgagttatgcatgcaatgctcttatttctctatacatttttctggactccttgagggcaaacctgtcttgttcatccctgtttgaacatagcacaccatgccacacagcaggactcaaaaacctgtgggtgactcatgagaatatctgtccagctaagaccacactgtttgcataggcttcattttatgcattattttttaacttgtagcattgatatttgtgtgtctgaactgcctccccaagttcagacacagaatagttcacggctaaaggtggcagagttccattgtcctctggaaagtgaaatgattctgagtatttttaatataagctggttgatagttactgtatgaggtgagatgaggtatatggagactcctcctcctcaccacagtcctgtgttgccacttggaggaagccttgtttttattttcctttgcataggggagtgtgattatcctgattagaggtggaacatgttctccttcttgtcaccccctagtgccaacttccttggcctgcaaagggtttgttttccatttagatccaattacaggcttagagaaagaatgtggtgggtagagatgaaagggcagattttttttatctcttgggactgcgacaatcaggaggaagatcaccattttgtaggttaaccaatgccttcaactcaaaatgtggaggggagggaggagagccgagaagctccccttgctg

SEQ ID NO: 39473 - DNA, 2035 bp, Homo sapiens
ctgtttataaaccagagtatctcacttgggactgtggctgactgatgttttcccctcctcagtaaacaagatcgttctctctgtgttgaagatagcggggtctgtctggcttctggatgaatggcatgcagtggacaaatgactatttattgcattaaacagtcagccaggaaactagctgcaagtgtggcctgatgacctgaatcaatttcttccttgcaaggccatttatttttctctcccacatacttctgttgccatggaaactgtcccactagcagatggagaccagggccaactctcgcttcctgaacctccatttagtttagcgttcttgcccaactaggccagtcgcctgtgtcttcacttgcctgactgcatgggctttctttgtgcttgttgagattttaacgtcgattctcttcaggtgattggtagcagagcaccgcgagggcaaagggctagggatggcctcacttaatgagttaatcattaagtatgggacatgtgtgagcttattttgtttttacattttgtaggaaaacctagtcagagaggcaactctttttacaagtcaaaaaagtagagaataagaaagtatagggggtgtgtatttagaaaaaatagttcctctgaagtcccctagcattttgaagctagaaaaaaatgtgttgagaatatctaattcagggtctctcaaacttttcttcacaagatgtaattaatgacaacaacaaagaacgctcagtgcataataagtgtgtgccaagcccttttcaggcagcatcccgtttaacctcctggtaaccctgcaaggcaagttgcattcttgttatccccatgacgcaggtcatggaactcaacaagcctacttgcccaagtacagtggaggaaaggggaaaaactgagactaaaacccgggactaaagcctgggtctccaaacccgaaacagttgcttgctctctacctcacttcttgcttctaacgtaggctggcctgttaaaggctcgggagcctctacacatccagtgcctgccatttgtatttgatcaggtaattctctgtcccactcccaaccaggaaccacttcgtaacatctcaccaagtgaggatcctgcagaacagaatgtgggcaaccccagtgcaagccagttccttatttttcagaagagatgctttaggctgggcaaggaaatgactcatctccagttacacagctaataaatgccagagttggcacccaaaggccagacccccgcatcaccggcgagtgctctgctctgctctgctgtgctacctacatcactattctaaatcaaaccccgagtttgcagacagattgcagctccactctccaagccaagcatcagaactaatccccttgtagaatgagggttaaatcagcctctcattagaagaacaataaagctgaagtgtgcagggtgctttgccacttggaaatgcttccacctacctctccggtttccagccttctgagtatatctgaaatggtccaacaatgaagccttattcacaagttgtatatctcccaaaataaactttgagtgactccaatattaagtgtgtaaggatcactgcatttcaactaggagaactgaaggtgtcaaggggaggtggaaatgagcaaggttatatgccagtggctttagggagcaaagtcctacctgtgaaagaaagctcccagcttaggagaatgagttagcagtgggtgttgtcttaattttcacttttcacatgaatctagcattgaataggcctaaatataaacctgcttccctccacactccacatatgtgcaacatgactctcactccctgaagctgtaaatatgtattgaacaaaatgacaaagtgtgtggggacatggtgtacacagcagtcaccaaatagaaggcatggagtgaggcattattgtgagaagatttggtgctgaagagaagtattgtgaaggacagctgtctctttccatacgtctgaattctaccactggcaatgaggatggcttcacaagttt

SEQ ID NO: 39474 - DNA, 1511 bp, Homo sapiens
acacaacatgcagcttcctttacctcagacttgccccttacaggagcaggagatgaatgtgtttttctctccatatccccctagctaacagtgagttccactagggcacacctgagtcttatgttgtattcctgtgtctggtacatagtagatgctaaataaatggtatgtttgttggataagaagcttatccctttacattactagttgattgagccctgcttcaggtgaaatcataataaagtacatccctgtaccaagtcgtccccaccccaaccccaatggagagttgggtaagtttctcagccagcagatccatattactaacccacttcttctccaatgttaatgtaatgcagatctcctgggaattttgttaaagtacagattctgattcaaacaggctggagtcgggtctaagggtctgtatttctggcaagccccaggtgacgcttctggtttgaagatgccatttgggtttaaacacctcagcagcagcagcaaatgcacttttggtacctttggctggtagcaagtaataaaacctgtctcatgcattgttctccttccaaaggagattttaagtgctcatgtgatttttcagtgttttagcaaaatatttaagttatgcttcaagctataaacatttggcaaaatgcacatttgtttgtgcctgtagctttggtttaatcacactctatcaataaatcacaaataaatgagggagaggagacactcactgaagattccattccagtgacaagtgagagtgggtgagggtgggggatggaatagatagatggtcactcacagcagggcgtttccaaccagtcttgctgttttgaaacagcactggaggctgggaaagaacccccattgcattcttattgggaagagccccacccttccacaattgcctaccctctggccccattccatgttcctgtttggtcttctcagttcccggtaaacagtttgtgatggcttattgatctcaagccctttgaaccccacacagtccctttgccagcacgccaagtcttttagaggtcaagcatctccggtccaagatgtttggaaggaaaacaccctcttttctgttccttttccagatgtccctgggccagctgcagtcagcaagaggtgtggcatgtttgggatgcaaggggacgtgttcgggcttcgagccacattcatggaggtaacagattttgtcaggagggtccctgtctgcctttgttacttggctgtcctctcggggaaccctggttgctttcttcgctgagactgctttggttgtatgcgttgtcagggaaggatggctgcagagggaaggcactcctgcttggtccaattcagaaacgaaaaaagtccttgggggagtgtggcgggggcagtaaagatgtgaagaaggagtttagcacttcctaaaccatttcaaggtagagtccaccaaacccagcccagcaagaattgctctgggaagacccaagcagaggttagctggtccc

SEQ ID NO: 39475 - DNA, 965 bp, Homo sapiens
gtgtcattagagaccacacaaccccactttttcattttatagacgggaaaatggaggcccagaaagggaggatgacttggctgagatgacacagttactgcagggagcctcaggccaccagcccagcccgctgtccccaggatcccccggccaccacaccctcactgactcaccagtggttcacagatgactcaccgtgcccgccccgtggcagccgctgcacttgtaccgcccacgcccatggcatttgtggcattcctgaaagtgcaacgctttcttgggatctagtttcccaagggccacttctcccacacccataacatcaccatctaaaccgaaggtggagtggatcaggaccaggataggaagatggcacaggaaagaaatggcccttcccatttgactaagattccagaaggcttgactgcatcaggagatcatgtcaccatttcctctgagccctagcccaatctggatgccatcaaggggagacgtgttctgggagccccatatcctagctcacactctacggtttcctaccaggctgaactacaaaggctgatggcatttgcccataaggtagctaatgtggtctttgggaacagaagccattaaaaaatggacaggatttttatgaaaggcaatgagctagctactagtatttaatcactaatttaaaatagccttggcccccttgagaaaggaatagaacactttctcgacctctcaaagtactctttatcttagaactctgtaaaaactcatagagcaaaattgcacccttaaatccagtccaaaagtgtaaagcaggcagtaaccggaaaagaacacaatatgagctatctcagtcgtgtttttgtaatccactaggctcctctcccttcacgccacgaatatatgtccataaagcaggatggaagtcagattctgtttccttactgactctcatgcaaaatcccagcagg

SEQ ID NO: 39476 - DNA, 461 bp, Homo sapiens
cagacccctgtctctcgtcctttgttccctgatagtttcatcagggctttgtgagaaacaaacacaaagcgacagaaaaacacagagaaaattaagaaggcgtggttggcagtcggggtcaggtgggggccacagcagtggggcggggtggggggtgtctggctgggtgtgatatctccagcccaggcaagtccaggaattccaaggtcagttagaccagcaatgtccaccagggggtgctaggaatgtgttaattgattaactaactcagcctcccccatccaaagctattgggacacactggtccatagacgctcttaccttaacaaggatttcccaacaactggtttccataggtaccacaggggacacacaggtaactgtagaaggcacacagataaatttacggaaaaattcttagtaatgatgcgtgtcccaagacaatgttgttttcttctagc

SEQ ID NO: 39477 - DNA, 2217 bp, Homo sapiens
gaagactttttgctgtatattcttttgtgccttatgaataataaaccatgataatatactgcttaaaaataaaatattttataatgtaaataaacaaagtaaaggtattatgatgatattattgcagttgctgtaaaacagccaaaatgcaattgaacacctaataaaaataatctggtgataactataatacgcatctggacttttctccagataggcccattttacagatttaaaaacataaatggaaaggtgagaggactcactcaagatcccacggtgagccattaacagttttaactgtactttggtaatcagcccttcacaaatccagatggaattcagtttgactctgacttttgtgtttcaattgtgtggccttgggagaaccccttttcctccctgaactaagtgtcctcatctatataataataacattggactaggtaagctttaaggttgattttatgacatcttgaactttaggtcaagaaaggtaaaacaatatttcaggcttcttttttttttcgtgataacaatttgccccaatccttcacacaacccctcatctgttccctgatgagaatgaatcaacatgctcacaaaagcagagctttgtatccgtaacaaaaacctctgctcttcttgttgtaaaaactcccgagaaaagggatgtgagtgctgagcatttcaataagacacagagatgcaggataatctgttcaacagaaaggaaagctattaataaaacccttgaaggtacacaggaagatggagtgatagcttttaattactgagtctcttagtcatcttcaaatgaagatttaaagatgttgtgcatctgacacagaggttcaaagcaaaggtccaaagcaaaattaagtttaggccctaagaaataagacaaaagataagtattaaatgaaaacagaaaattattcccatagtttaggtccttattgatggtccctgtaacaatttgttagttgggagagcatgtccacactagaaaagtaacaaatttcatccagacaaagcatttagtgttgtgtccaataagcctaaaataaagattattgtacacttcagtgaagacacatgcatacattgagtcataggaattggagaaaaaagtgagtagttcacataaataaaacagttggtgttagtttcatccggttgagccaagcatttcagggacagctgagaagagcagaaactgaagaaaggaagagattgcttcaatgggtccctgactcacttgatcagatctctttgctcagagatgattcattccacactgatttgctgctcacctaatacgctcagatgttgttcagagcactggaatgcagaggtgaacaccacccaagcaaggtccctgatctcacagacatcacattccagggagagaagacattcagtcaaccattagtcttttggttttttcttttcacaaatagtttttgaatgcctactgtgtaccagacactattctaggcctggcagacagtagcaaacatggcagagtccctcctgccacagggcttacattccagtagggaaagaaaagcaacaaacaagcaggcaaataaataactctggacagtgcatattatgaagaaaagaaaacagagtctggaacagatactgatgtggaggagcgaggaggtcttttagaaagagaggtccaggaaggctttaatgagaaggtgacatttgtgcagctctcaaatgatgagaagcagccagccgtgggaggatcccagagaagacgattccacaccgaggaagcatgagagtgaagccctgaaacaggagcaagcctagcatgtttagcaaccgtaagaagggctgtgtggctgtagcccagaaaacagcaaaagagtggaagggcacaggccagcgaggtggatgaagcccgggccatccaggacatttacatcatagtaagaaatttggttgagttgaaatacattgggtggtcattggaggacttgaaggaggagaataatatttgatctacatttcttttcttttcttttcttttcttttttgagacggagtctcgctctgtcgcccaggctggagtgcagtggcgcgatcttggctcactgcaagctccgcctcccgggttcacgccattctcccgcctcagcctcccgagtagctgggactaagggggcccgccaccacgcctggctaattttttgtatt

SEQ ID NO: 39478 - DNA, 953 bp, Homo sapiens
tgttggaagtcttaactgccggtatctcagaatgtgacagtatttagagatagggccctctatctaaaaaagaggtaactgaagtaaaatgaggccatacgcatgggccctgatccaatgactgctgtccctacaagaaatcgggacaccagtcctgcacagtcatgtgcacacagagaaaagaccatgcaaggacaccatgagtggaagccaaggagagaggccgaagaagaaaccctactgatcttggacttccagcctccagaattctgagaatacacatttctgttgtgtaagcttccccgtctgcagtatcttgtgacggcagccctggcaaactaatccatgagggttgggtgtttagcctcatccctggcctccacccattgatactggtagtacccctcaccaccctccacctccaaaagtgtctccacacattgccagctgtctcctggggggcaaaatctttctgcccaccccactgggaaccattgttctagatgatctttggccacctttgtattcccagtgtcagcacagtgacagacatagataaccaaatatttgctgaatgaactcatgtgcctactttcccaatcttgggtctcaccgctccctcacaaactccttttgctgcaattaaagtaataattacttccagtttaatttatagactatataatttgtcatgaaacaaacagttttcattttgacataatttctgacaactcagtgacataaatatatccatgtgagctcctattttgtttgacatgctcacttacctcacatcagttctgccgatagatttggtaagtggtgcttttagtttccttaatgcacccctcaggatttcatgcaaatgaaattattatgacaaatttttctatagccatttctaacacagggaactcataaagaaatcaaatgtctgcacttcactgtgaaaa

SEQ ID NO: 39479 - DNA, 3300 bp, Homo sapiens
tcaaaaatgtatttatttacaatatttttctatggtttataatttctgagctacacaaaattgctttatccagaaagtaagcataactcactgttttattactttacctgatttaggatgcaaagcatcgcattgggcattgtacatgtgtacaaattcttggtgccttttaatgagctgttgtttatttccttgaatagataatccatgctcttttagctttttctttaaatcacgatcagagagcaaattatatacagttttgggcagcggcttccttttgtgaacagaactgaaaaggggggaagatacctgatgattattgtgaattatcaaatgcttttcatgtaaaatggcaaataaattctgattcaacacctgggtgaccgggaaaatagtagaaccattagattaaaaaggggagagaaaaatcaagtttgtggataaagttgagtgtctgacatgatgtatctgaggtgctggtaagacattcagacacaggggcctaggtggcaccagaagtgagagacttgggtctcaaaaagaggtcagacctaaagaggcacacttagaagacatatatgtaacgcttgtggaatatgctgtgaggacttcacttagaatcacacttacatagacctattcaattttccacctctttaaagcatgctagaaattctagtgggctaaaattcaagctacataaaagtaccaatgacttaagcaattccataaacaggaacttcttagtgagttttaattcatttcacctgattatagcaggttctctacctggctcagctttatggcaattagatgcttaacaaaaatgtgctcaaggaggtcattacacttgctatcatttcaaaataagaatagcaaagattcaggtgaaaattaacagaaacttgaaataataggtttatccaaaaaacaagtttttacaaaggatttgcatataactagctcacacaaggctgtcccaaacgttagtgtacctaagaagcacctaaagagtttatttaaaacgcagattctccatccccttctccacaccatccaccaattagggttcaggtctgaagtggagctctaaaatctctattttcaacaaggttctccagagtaaatctgatataaacggtccaataatcaaacagagaaatattacagtcaggtatagactgaaaacaatcaaaaatttctctattaaccaacagagccattccccaaataaattatgtcttttatgctgtattaacaaagtctaaaagccagaaataactaattaactgtgaaaagacctgcaaactctcaatagattatatttttctgaaaattgctcttcttacaatgacaacccatctgactctacaaggttgataaaattatggcaaaatgaaatctcagtaggtagcaacagctgaatcattttgtgtttacagaagcacacagggagagatgattcattacgtctgtatctaaaatatttgttttatcaaggacagatgattaaactgtgactgtgaaattccagtgaagaactgtactgttcactggcatttacaataaaaagcaccaccagagatcaacaatttctatcaggaattttaaaacatgaaacctgataaatgtttccccaaacacgaaaatgacattgatttttcttccatgatttagtggaactgagtaatacatttaaggggcctcagaatctgaggcagttctgacatggttttatatagaagggttaagggctgccactcacattcagcagatggcctgtcagaatattgtggaggagacaggaaaactcacagggccttttctctatgacctgactccgtggccaagatacaactaaagaagaacatggcccagtgttgtcttcagaatctccacaaacaccagttttgtaagatggaagtgatgagaacagaaaggcttggcggtcaaataaatttaggattactaaattaaacaaaacctaacagtaacccttaatgtaggacttctcaaagcctttaacacactaagagggggatccaggaggtagtgcttataagttcactacagagcactggcaggactatagtgttctttgaagcaggaatttaaaccactattagaacttaattacacatggacgagtatgtcttcaaacaaactgacagcatcagaaatgatgtatcagaaatgtattcgaactgatggatggatctagaaaaaggggagtccatgcaagataatcagtgcagattccttactcttccaaaagaatatactcagcttctatattcccaactcatgcatttctaaagagaaaagcagttcatcaaactctcgtggcttatgggaaataatccttaggactattcatttactccaaatcaccactaagcaacctaaaaatctaaattttattctcattaacaaacttacccactaggtgggagtactgtgcatgtaaaactgccccaggtttggactcaagtatgtctaccttaataaagcaccattgtgtcttatatgttagcttttgtaagttgtaacagtatgaatctgaccctcagaatctgcattcactccaaatttactcataaaaattaagtgatgtattttctttaatcacaaaaaataatactatggctctgtcttattaacatggtttttggaaaatactcttcaaagtccttcaaaacagactgaacatagaagcaaatcattctttcatccccacttctcagataccattaatttcttcagcttccctcctcttcttttccaaatctctctgaattatcacctattatcttgcccttgcctcctgtttcagaagggtcctttctgcatgtcaaggataacctcattactgggctcttgtgctcctcactttcttccatttatcctctgctctctccctggaaatagtggaaggaaagagactgaaggcttaaactcctatttttaaaaagaacaacccttgatctttatgccactcactgcttctccaaactaccatctcatctttctcccttcatcaccagactcatctaaattgtgtcttctgcttattatccactgattccgtaatgccttgcaatttaagtttgactagtatttcattcctgaacaacttatatgtgtaacaatagtggactagcatgagaaattacagttattttcatgtacaagggaggtagaacagcacagttgtttagatgtaaatactgagctgacaatttattagctacaatacctggaggatgggggggtggtgtggggtatgacattacattt

SEQ ID NO: 39480 - DNA, 2905 bp, Homo sapiens
gagtaaactgagacccagagccacgcggtcggctagtggcagggcagagccggatacccgggcccagtgcgacgctcgcgcctcatcctttctccttaaggcgaggacatcctcctcaaagggagggacctccccccgcagacacccgggagctcccaaactccccgaagcactcaccttcatgactgccaggcccggaggccaccgagactcggccagggagtccatggtcgctcccgaggatgctgggggtcagccacccactagcctccggcgctccaacaccactcgaaattccccgcgctaccgcattacgtcagcagcccgcgacgcgccagaggcgggcgcggagcctgccggaagttgtagtagtatgtgggcggggcgccgcttaagggcttgtactgcgcatgcgccaggcttctgccgcacttaccttgaagaaagtgaatggttaaaaagcgtagagccagttgaatattaagaaaagatagccaggaatcaaaccaaatccagacctcaccagatctgtcaaggtccaggctcatgacccccctccgggtcgcccaccctaatcgcagtgactatccgtccttgctctgaacagaagtttttatatccattactttatgtctcccgtatcacaacactgggaggtagatgttatcattgtcagtttacacaagagaagcctacgcccgaaaaagtggatagagtttcgagtcagattccaaacaggacctctgggctttaaatgggagctgttgcttttattcatattaaaattttaatgcacggtttttctttttcttcggagagaagcaccattaactttggcatatagccttctagatatttcctatgcagattgacgaagattctttgcttgagcaaactttagtcaggctcctgaaccttctcctaggccaatctgtgtacttcctgtaaaaatccagttttagcaaaaaaccctgctaaatcaagttaccaagaatccccacctttgatatgtgatcactcttgatatctgatgtgttcctcatcctccaccatcccccagttgatgtctgatcaccctggcctcttcagcaagaatctactgttacctctgatgtttcctcttagtaatttttcatgcactgctccccaccctgcttcctggctataaatttccatttgcccatgttgtattcagagttgagcccagttttcaccaattgcaagacacagttccagtggtctctatacctacttgaattgtcctgattaagtcttccttattgtgctttaacaagtatcattgaacaatttttttcttaaacgagatataaatatagatactttttttcatacatgttatattaaatgcatgaggaatggaggtttacggtgtccacccccgccccccactttgtatcagccaatcatagaacggcatgcaaatgaacgcaaatgaatgccaggctgagctggaaaatgtcggatagttctggatgtggaggaagtggggtcttggagagacaaaggaaaagcatttaagaccaggtccgtggcctgagtgaaccagtaattgtttttttcacactactagttggacaaggtaattaggtttaaggtgacaaatggctgggaaggtgagagaggaagagagaggagatgagaaaaaagagaaagaatgggtaaggagaaagggagagagagaaaagacagggacaggaatgtactttttgcattcaaccatggagacagatttggaaggaggcagtacttgttagtcctggggccaaaatacatttccctatctatggagagcctccaggacaggatgcggtgccattcatctctgagtgtctgccaatagctggtgggtgaggctgaatgaatggatgaatcaccgactaagcccacattcccataaatcttttcctcccaggctgagcatttctcttcctgccatcttcagcagcaccagggtgatagatcccatcaagcccacctctaggcccaggaaggaaagttcaagaacaagcgcactttgagctcaggaaaaggcgtttgtcttgggtgtttatctaaccctgggagccattctcctcttaacaagctgctgtttgtatggactttctccttctgttagatcaataaagagattgtacttccttattcaggactaaaaacaaaatgttccatgtaaaataaaagcaggctagtgtttagtggaatcttctgtggcacatagcacacagcgagaagccagaataggatggccagataaaatacaagttgcccagtaaatctgaatttcagatgaaccgcacacaacattttagtgtaaacctgccccaaatattgcacacaacctattaaccaattatttgttgtttaaccagaaattcaaatatttaactgggcatcctgtatttttatttgccaaatctgacaaccctaattagagaagcattctcccaactgagtgtggggcctgccctggattaacctggggatgtcctgtggcccctgagctcctttccaggttctcttcatcctgttcctctctgcccagcactctctcttcctctaggccccatcttcctcattctagttatgggagaggggatattaaaggagctccctccctccctttccttccttcctttcttcctcccttccttcgttccttctttccttccttccttccttattttttttcttccttcctccctgcctccatctctcccttcctccattcattttaacaaatgtttattgagccactctccacttgtaccaggtgctagaatacagaggtgagtaagacagatatggcctctgttctccaggagctggcagcctgggggtgagcatggagccaggataaaaaaaaagagagtttgtaaaaaaatga

SEQ ID NO: 39481 - DNA, 866 bp, Homo sapiens
gatcctgtccctttctttgctcatttgttgcacttcctgcttcctgcagctgcccctttgtgcaggagacctgatggctatccatgtttacctacaacattctcccttgtcagtgctcttttcgttcctctgatatcacacagggaggagagaatggaagtttcccagattcaggacattcgctgtatttgactcctatactaactcaatttgtgttttctgtgctttgcaaaagcagtgtttcagcaggaggaaccactaggtggcaggggtgctgcattccccagctcatgaccttcttccagtaatctcagttataaggatacagttcctttccaaacgaatgagctgcttttaaatcaacttacttatcaacatgaaattcaaggagaagaataaatttcatatacattctcttgaaaatttactgtgatggcactaagtccaccaacaagctctcacaggggttatgttactaaagcggttttatagcccttggcttgaaagggcacgggaaaagtaaataagcctctgcttgcttagagcacagccaaagctgattgtatttccctctagttgttaacacctgacaggacaaaggtccttcgggttaaaggttcatggactcctaggctattatttcattaataagattatattaatagatacatctcttatctctcaatgaggtcccaaaaggttttcttgggggagatggaatttcagtagtgtactgaatgaaaagcaggtgtaggggcatccttctttcaattacatccccacaggaatccaactggccaagtgggatcttcttttaacaaaatagattggggagtacaaggaagggaggagaggtaaaggccagg

SEQ ID NO: 39482 - DNA, 1941 bp, Homo sapiens
tttgagatgatgtcttgctcccagactggagtgcagtggcacaatcttggctctctgcaacctctgcctcctgggtaagcaactcttctgcttcatcttcccaagtagctaggactacaggtgcaggccaccacatccagctaacttttgtatttttagtagagatggagtttcaccatgttggccagcctggcctcaaactcctgacctcaagtgatccacccgcctcagcctcccaaagtgctgggattacaggcatgagccactgtgcccggccaggttcaaccctttatgagaaataaagttcatctgattgggcacagtggctcatgcctgtaatcccagcactttaggagggctagacagaagaatcacttgaacccagatgttcgagaccagcttaggcaacatagtgagccccactatttctattttttttaaactaaagaaaaatatgaagtaaacagtgctaaaatagtgatggcaatacagaaatcaggaactagtggcatgacattttgagaaagatatttaaataagctggagagactcggtgtctccagctttaaaacagaaatcagtctctgccacttcataggtgctagaacaaaagagacttgttccaaatgagatgacgcatgtgaagcgcttacccagtgctcggcaaggggaagcactctctaaacgttagcaaataccatggtaggacacaaggcccctgactctccgctttcagcttactgaagatcctcaaaaccaacagcacacagcttccagcgcatgctcctttccccaagaccttgtgggggaacccgccgccagcgcggagccaccgtgactcgtagcctgacttccgtttccgggggcggcttccggcggcgtgacctgaccgcaagaggccaatggagtgtgggagctgaaagggtcttcgctggcggccggtaactggcggcggttgggaacggccgagtgtggctcttctggtgtttcagcttggggagagaggggtggccttcctcttgcagttgaggccggcgccgagccggacttcaggcggatctcgtggcggagcccatcttgctccctctcccaggcctttacccgctccctaggattcccgggccctgtaggtgggagttgggagacgtgagttctctttcattctgcgcctctcattggctctctgaccttgtgcggaacgcgtcctttagctgacctcagctgcattttttagaagatggagattgtattcacagtgactgtcagctttttaacggcgggaactgacgtagtgttaaacactgtcgtgtatcgctggcacagcacaaggacattataggtattctgtactcaattaagttattttgagtcacagaccttttgaaaatctcgtgtaagctatggcccctccacctctctaatacttcccccggcccccaccccaagcacacacaaaagcttatgcataggaaatttgttttactatttcggattacttccaagatctctctcctgatgcccatctatggatcccagagtctggcaagtagtaggcgtttgaacatttgtaatcattagatagtaagtattcagttaaccatttttatttttaattttttctttttttttttttttttttttgagacagggcctcactgtgtcacccaggctggagtgcagtcctcccacctcagcctcccaagtagctggactccaggcgcccaccaccacgcccagctattttttgtgtttttggtagagatgagattttgccatcttacgcagattggtctcgaactcttggcctcaagcaatctactcacctcagctccctaaagtgctgggattacaggcatgagccagtgtgcccagcccagttaatcatttttaaatgcatgaaatgctatttcacaggagggaagaagatagatagcctattaa

SEQ ID NO: 39483 - DNA, 4970 bp, Homo sapiens
ggagtttcacctgtcattttcatgctctatcttcctttaggacaatcatcctaacaagatgtaagatggatcaaaagataacactaaagacagagacagcaatttggaagctatcacacaggcatctgagatcagttactaactggtaagaacagaaatgagaggtatttagaggaagaaaaagggagatgttgcctaacctcagatccaattctctgtaaagcagtagtcaagatcacctggactgtgaagacggtcagggacagaatcccagctaaggaaaaaggataaaatgaaaatcaagataaacatttaagaacgtgaactagggaggaataaaagcactgctgggtaagagtcaagccccagctcaagccttaatttgtggtggaaccaatctgtctggtttcgcgagacaccaggctacccaagatcaagagagggagaaagctagtgctatgtctgaatactagaggagcaagtacaacaaatggaaaatgggatcaagtatgagtgagagttgctaagatgcctggtagggatgcaaaggggtagagagcctggggagagagggtgagggagggaagcactggtttctcaagcaaaagctaaaatttttctattaagatttaacctgatgctacactttggtggtgcagcaagggtctcaaatggtataaaactcaggtgatcatgctttatgtctgtctctagaaaaatgctccaaaaatgataagtagtgataatccgcagtctcgttgcataaaatcagccccaggtgaatgactaagctccatttccctaccccacccttattacaataacctcgacaccaactctagtccgtgggaagataaactaatcggagtcgcccctcaaatcttacagctgctcactcccctgcagggcaacgcccagggaccaagttagccccttaagcctaggcaaaagaatcccgcccataatcgagaagcgactcgacatggaggcgatgacgagatcacgcgaggaggaaaggagggagggcttcttccaggcccagggcggtccttacaagacgggaggcagcagagaactcccataaaggtattgcggcactcccctccccctgcccagaagggtgcggccttctctccacctcctccaccgcagctccctcaggattgcagctcgcgccggtttttggagaacaagcgcctcccacccacaaaccagccggaccgacccccgctcctcccccacccccacgagtgcctgtagcaggtcgggcttgtctcgcccttcaggcggtgggaacccggggcggagccgcggccgccgccatccagaagtctcggccggcagcccgcccccgcctccagcgcgcgcttcctgccacgttgcgcaggggcgcggggccagacactgcggcgctcggcctcggggaggaccgtaccaacgcccgcctccccgccacccccgcgccccgcgcagtggtttcgctcatgtgagactcgagccagtagcaagggcccggtcccacagcttcgacagccaatcaggtgtcgaagacaagcaggcggcgggtaaaccgactcccccgaaggaaggggagggtgggaggacgcccgcgccagagccgatttcactgaccctcccctcccgccgcaggaggccggccgcgcccgcacacccagcatctctacaccccacctacctacccgccccacccagggggcaacgcgagagtcgctaagcggctgcgtactcccgacggcgtaactgacaggagctttactccaaccagaatacgccatttgtgttttcacacacggcgggaggagaaacggccaatcggcgacaagaggctagccggaagcgctcctccctctgcgagagcaatggctccgtccggtttcgagcattttccgctcccttctccctccccctccggttgccgcagggcgggcctccctcccgcctgcatccagccacccctttccctcccaacgtaacaaacattatgttcccgacttcccacgggaaaggcaacccccgcaagccaccagacggcccccctagccacccatccccccagtgtaccgcacctcccctcccaccagagttccgctcccctacctagccgaggctctctgaggagccggagcgccgaagcacagcctcttctctaggcggccccggcggcttccgctgattggcggcgagtgggccaatgggtgcggggcggtgggcggagaggccaatggcgcggcgggagggggcgtgtcccgggtgcccctggcgccggcgctgggaatccccgtgcggtcagtggcgtttccgctcgggcagcgggctgagtgagctgccgccgccgccgccgccgccgccgccgccgccgctgccgggggaggggcggccgccgcccgcctgcgctcagagactcacgcagccccagtcccgccagtccgccaacacagtagtgccggcccccctctttccctggccctgccccccctccccgcctttggctcgctccgcctttctgccccccacccccacctcacgggtacgggccattcccggccaggaaacgccgtggcgccgcgttgggcctaactcgagtcctgccgcctcccgggagtgccgtgcgccgcagcccgggcccaggccccggcagcgcctgggacaaggtaagggtccgacagaaaagagaccgaacctcacgatcgggccccaggggagggaagggtcacctcctccgtctccccgcgctcgctctccttgggtcgtgggcctggccctccccaagctcttaggaggatgctgccacttctcacccccctcgccgccttgcacacaccgttgcaacaccccattttcccagggagagagatccccctctaatctaggcgacccaactccccctttcatgtttttcctgggtcaggacgcttcccctcccccaacgcctcttcaccccctttcctgggaactgcctactccacgtttacctttcccttgaggagaggcctcttgctgccctccgctcgaaatacacaggcatactttttttctctccccgatcccccactccctacccccgttctcgcggccttgtgacagacaactctgatcgctctgggggccgcgatctcccctccgtaatcttcctggacgccttccctctcgttttctggcttcccacctcagatggctgcttcccaaaggcattaccttcgccacccccaccacacgttctctggctccccgtggcgtgtgccacagcgtgtctgagatagcctcgttgaatgtgtagggttcgagcctggagttgagccagattgtgtcgttttacttgccttgggcgtggagaacgatcttgtgagaatatcttcaaaggcagaaaaatattccctttatgaattctctttccctctgcgtgtaagtcgggaatgtgaagaggagtgtaggaaagagccctggttcaagtaggtaaatcgcatgagagggaaagttaaactgttgggaaagccccttctatgctaattgattctatagagtccttgcttgtctcacttcttgggcgtcagtggtctttctcttggatatggatgctgcagtcagctctgctggtctgggtcaggggtgcgtgtatgacctgcattttctgctttctcatgttacttgtgcaatgtattcaccggtaactcatttctttcccagacctctgggttccactgggctttgtctatatttaagttcatttctccagtttccttcctgcacataggtactgaacgaatccccaagttctgtgctaattaccttcatcagttgactaaacaagtttttagatgacatatttgtgaccaaggtcatatttacatttctttgttggacagatgttacatagctatacttgtgattggggaggatccagctgagtggagtgtgctgagctttttaggagagtgtgtactccctatttgaaattattttttggttgttaattttatattattaatgtttttaggtcacagaaagttctaagtggtaattttagatgtgtgggatctgagctaggactaaagcagagaatacccacgtaatcagaggtttctgggctccatagaggacgtagggcttttttttttctattggatttcttccagttttctcaggatcattagttctcttctgtagccaaaaattctggcctgttatgggattagagtctttaaggtttactcagactgtcattatgtgtagaaaaatgaattatgccctttggtaggacatgacacaaggctctgtttctagctgcaaatttaaattagattgtagagtgcttgggaaattggctttcaaaagaccaaagcttaatcttcactcctaaactgctggcttaattaaaatggatatttagaatttggtaaatgttgatttttctaataaaaggccttggtttaaaagggtgaccttaggattgtttctttcttaaaagcataattccagcccttctggcatggagcactggtccaaaaaaaaaaaaaaaaagtgtgtgtaaggagtgggggtggggtaaagagaaggttgttcctttgggttggatcacaggggtgagtatacaaggcagcagcagctgctggctctggagctctggttgctacgtgagaagcttgagtagtgctggctgctgtctccagggaaggacagcagtgcagcgtccattaatgctgctggctgcagggagcagcacttaggcgatggctgcttcaggactaagaagaaaccttgcttttctgggaattttcactgctgagctggtttgctttttattggtggggagatgggaattagtaattcataatctcctacccatttatggatattggcatctggaaactggatcatggttaaagcctttctttttttgtttgtttgatttgatttttgttttttggcagatttttgttttttatctagac

SEQ ID NO: 39484 - DNA, 434 bp, Homo sapiens
atagatttctgtctggggaatcaagtttttgatttgtgctacctaatggaggggaaaatgctgaatttcttgctgctctgtttgagaaatagatggaagcatgggaggagccagagacctctgcagcaggatttggtctaagtagaaaaggaagatttttgtttcaaattgccagctgcttatgtcagactgactcccttattatgcctccagtaggcctgtcaatatggccaaacagctagataagtgcggggcaggacaaagggctctttgcacagcagggaggcaatgttggtgggggaggggcaggaggtaggaaaggcaagaggaggaggttcttttccctgggagattattcagtttggcatacaattaaagaaatcatttttagttcccactcaagcattgaatttttgccaaccacatactattaa

SEQ ID NO: 39485 - DNA, 1594 bp, Homo sapiens
aatctgatcctttagtaagatctgaagtaatattgttgccctgcaaaaaagtggttgttatcagcataccttatatgtcagcctaagcaagattagattttctcttttctctgatagatgccaatatttaacattgacttttatctactttcaaaaatatctatgaaatatactttctgtctctgaattagagtgtatgtatatttgtgtttacttgaaatgttatagctggatgatagatttcagagcagtttttatgcttagggaagccactgcctcccaaaaaggttttcttatgagaatgaggaaaataagtataaattttcatatttatgttattactattgatgtgcttggataattgtatttataaaagtaaaaaatgttcagtattttatctgaaatttaataatggatattgtacagcctaaggaattaaaagaaaaaggaccctttgagaaaatggcttgttcttatgtatcttaatatatactgtgttcactttatgttttgtcagacactgaaattgaggaagagagattttggcgttctgttggtttatggagagagttgatcagagattgctccttggctgagttgctgtctgcataggctgttaacaattgtttctctggcagcagatcttgttcatcaggattgcatcatttctgggagaatggccaaggtccacagcctcaatacaaagactgtctgaagcatatgaggcctgttctctttctgaagcggcactcctcttcctgccagtcctcttcacaggattactgaagcagacttgttctgaatttctttcgttggattggttgtttattggacttttgtctgccagctgcttccgcctcacctgtctgatgcaatttcttcttctgaaatctgttggaattgttcataaaacactttttgtttgtcttctctgtgagtgaccagggagatcatacaggtcttgtgctttcagcaagtcatatagagaagagactgtcagaatgatgatacagagactgttggccatttctgaaaccaattaaaaagatggggtaattaagaaacatttctggcatgttctatttaacatccttttccctagaaactgtatgtaaatggcacctcctaaagagagtactcggtactactggaagatacaggctgtgtctgtttctgaatccaagaacttactagtgttcctgtggattctgatggattgttctggaaatagttaaattaataataaattgaaactgtgatgcattcatttaccccctactgtacactcacatctatttcgctgttttcctcctttcctttttttctttcttatttgctattgcttcttccttgatttactttatttcttccttccttttactgttactttgatacttttatttctctaattctgggtgtactattttaaatcgtttctaaaaaatagtttattttccagttttttaaaattagaaatcataaaacatcaacataaatgaaatgcatgcgttctaatgcttggtaactggaatcctatgaatagctcttttcatgtttatgatatgttaatctttaaggtgttaataactctggc

SEQ ID NO: 39486 - DNA, 1285 bp, Homo sapiens
cggctcattgcaacctcagcctcatgggttcaagcgattctcctgcctcagcctcccaagtagttgggattacaggtgggtgtcaccatgcccggctaatttttttatttttagtagagatgcggtttcaccattttggcagcctggtctcgaactcttggcctcaagtgatccgcccgcctcggccccccaaagtgctgggatgacaggtgtgagccaccacgctcggcttccctgtaattgttgattccacttttcctctggttcttttcaatggttccttcctgctacccccctcccccggcagcccaatggttgagcccggcttccccgggggaaaccccttggggcggatcacgcggtatcagccagtggcctccctggtggatagaaggatcgctctgcgccgggggcgggccagtaatcgtaggcggggcgcgggtccagagctccgattggccagagtcggagtaaacatccggcgggacggggcggggccggaagtggaagtggaagtagaaggcggtggctgaggcggttccggaggttctagtgtcggagttgggtgcaggcaggtgccatgggcccgcttgaggcacactgaggggacgcggggctgggccatggccggcgctcgggccgccgccgccgctgcctcggcggggtcctcggcctcttcaggcaaccagccgcctcaggagctggggcttggggagctgctggaggagttctcccggactcagtaccgggccaaggatggcagcgggaccggcggctctaaggtgagattggaggtgcgatgagctggggaaggctcctaacttgggaagttacagaggaaaggctgaggccaggggtcagaaaaaggtaggagtggtacctcgccgctgaggaagaggagagagagagaggagttctccagggtctgtatccggagtataagagtcggtcttgacaaccataaaaggaggaactggggtcagaatgagcccagcaaagaggtccttcttgtttgagaaggggtctggaggtgagagatcaagctgaggggccaggttcaaagatcagagaggaggacctaaggaaggtctattccctgcttcaggtgccgtaggatgagttgtgtcagggaaaaagccccaagaaaaagctaagaaaaatagggagacgattcctcggggtcagaggtcagaatggagccaggaggtgaacccagtgtgctgcccccttataaggtctcagcatgacttaggcccatccctttccttcccctatagagcaggaa

SEQ ID NO: 39487 - DNA, 633 bp, Homo sapiens
agaagagcttggtacagaacaggagtttgagtccctataaaaggaggaaatgggctggttcacactcttgctatccgctttccaaatgtttttagaaaacaatactacaggatattttagaaaagctcctttgcatggtctgtaccacatggaaagtctttaactggtgtcaagcatctctggaatgcacacaagcaccctagttaagatcagcttcccaaatcatagttcagttcatgaaagggcatcttgctatgcccaggttctgcctgttagctctgaaagcagcggctctggcttgtgctcaagaatgtttggctcttctccctagatcaggtgacctctgcccagccaggtcaccatcttcagcatacactgttcttagcaaggaaactgctggggacaacaaagcagtgtggattaaaaaataaaaaagtaatggcgactgtttatgctttctacttctgcctgtatctgcagggctgatcaaaaggcagcagtgagatagaaaaattttatctttctctttgcttcatcggcctgctaggtagagggaatttacttgctagtatttcataatcagttgataaaatagctctaaaaactttatctgtacaagtatttcagactgct

SEQ ID NO: 39488 - DNA, 808 bp, Homo sapiens
aaacagcctctgccctcatggggattagactaggaaaagaggcaacaacgtaaccatcacctacattacagtttttaccagtggtcacagaaaccccaaagagaagataattggtctgggcctttgaaggatgagtaggagtttaccaaccagcagaaagagtactctaggcatagaaacataagcagaggcatggcatttagctcagctcccagagactttttcatgaagcacgtaggatgagagagtcaggcacgagccttgtttgtttgtttgtttgtttgttttttagcatatctcctcggtcatcactttgagcagttccctcagacttctgcttcttactctggtgttataggaagagtacctacagtgattaagaatgtggactttggagtctggcagggctggatttatccctcagctcagccgtgtgaccttggccctctaccagcccagccctccccagcctgtagttcctgccccagccttgggaacttgctgcccctccctgatggtcagcatctcctccagacagccgtcatggtggctggcattccgcagctctcttgtcctcggcagggcctgccctccccggctgctgcagtcttcccctagcccacctgacgctcactgggcttggtacagtgcagctcttacctccctctcctgcttttccttgccctgtgagaatcactgctccattggcaatggtgtgtctgacacgttgagccagatgagttgagagaccccttgtgcagctactgataatgactttattagcacagcactacagcgcctgtctctg

SEQ ID NO: 39489 - DNA, 1710 bp, Homo sapiens
cctttctctcgcgagtactcttcttctgtttagccccactttttaccccgctattctaacaggcccccgctgtgcggtagccccgccccctcccacaagccccgccccacagaccggtctagtctccagccccgccccggtcctacccataactaccggtcccttaggctccagcccgcatccctcttgctcccggccctgcccccagccccgccccgtgactctggccccgcctcaccgccttcctccgagaccaaggccaggtccctcccgcagccgcggcgccagcaggaggcagggagcggatagggaggaggcagagggggaggggagaagggcgggctcctcacgcccagccccgcgctcaccgtccgtggttgcagattcgccacaaaccgcccgacgaccccagatcccgagtacggtgacttcagtctccagaaactccactctaagatgggagagctagagaagccctgtggggtgtccagggtcctttctgaatcccggagcacggtctttcgagcctcagcgggcgggcggggatccgtggcgaaagtgcagctcagtagcgccgcggcgccacgtttaccctgcgcagacgccgtcgccgccgctgctgccgccgccgctgccacagcctttgccgccacggtctccgccgccgctgtcctcgcgctgcctctgggagcctccattgttccagcagcgcccggtcccgagaccgggcatcttgggggctcgcgaaacgggcggcggccgacggagttgagaccccagggcgccggcgggaccaggagcggcaggggtcagctcaggaatcccggggagccgggaccaaagcgtggggcggcagggggccggggtggcgaggtctacggtctccggagttggggctcccccttcccggcccgactttccccgccgacctccccaagtggggtcggagccccggcgggcgcccccggcgatgagcccggactcgaggtggccggtgagtgcgggcctgggaccagggcgggagtggccggcagggaaggggtaggctacgttcgtgggacgcgcactgagccgcgtggcccgggaacctctctggcaactccagttgggagaactgacagtgcattgcttcccagcaggcatcctggggcaacagtgtatctttcggggctgcccgggctagtggcaggcggggagccttgtttcacttgttacacttccacaaaggggaaacgccgccgcatccggagagtgggctgcgggcactgccggggcccagccctatccctccggcccccgccccttacttcctccagccccctgagcttcaggggcagatgcagccgccattctccttgggccctccccacgggctttctggtctaagttctcgtctccctcgcctgtgcctctgctgccgggttccaaggggagattgctgattcgctgtgctactttgggaaccattcacccgggacccagcttggaaagaggagagcttgtttgtgcttcggttggtttatgtttaaagacacagccgcaggtaggaaatagaagagttgcagttggacgtgtagcgttactgatgtgaaaatcaggagccgttgacagtggagctggagcagcccacttgcctggttaaggcacaggtggagaggccaagaggggttattttgtcagggagctcatgatagccctgcctggctggga

SEQ ID NO: 39490 - DNA, 2015 bp, Homo sapiens
ggcaggcagcagctgtggcggccggcgggacgacaatccgaggagaggcctctgatgtcctgaggtctcagaggacgcctaaaggccttgaatgggacaagcttagcgggcgggcgcagaagagaataatactctggagacacttcccgagggctctggggccggagctgtgttcgctccggttcttggtgaagacagggttcgtgggaggcggcccaaggagggcgaacgcctaagactgcaaaggctcgggggagaacggctctcggagaacgggctggggaaggacgtggctctgaagacggacagccctgaggaaccgcggggcgcccagatggaactcgttagcgccccgagtgcagacaatcccggagggggaaaggcgagcagctggcagagagcccagtgccggccaaccgcgcgagcgcctcagaacggcccgcccaccctgatttctcattggcgcctcctacctcctcctcggattggctacctctaggtgaaatgagcggtggttgagccctacttccggtggtgctgtggtctgcccctggagaacccagaagaacacagctgtgcgcgcccacaggctctgggggcgggagaagataagtcgcaaggagggggcgggacctacacctcaggaaagccggagaattggggcacgaagcggggctttgatgacccgcaaagggcgaggcatgcaggaggtggaggaattaagtgaaacagggaaggttgttaaacagcaccgtgtgggcgaggccttaagggtcgtggtccttgtctgggcggggtctttgggcgtcgacgaggcctggttctgggtaggcggggctactacggggcggtgcctgctgtggaaatgcctgcccgcgcgcttctgcccaggcgcatggggcatcgtactctagcctccactcctgccctgtgggcctccatcccgtgccctcgctctgagctgcgcctggacctggttctgccttctggacaatctttccggtgagtgactgagcctgagaagcctgtcccctcggactggctcctgccgcctcaacactgcctggcatggggtacaaaggaatttgggggatgatggaagaaacccggggtacaaaagaggaaacaagcacgggtagccaacctgttacctttaatatgtctgtacagtgataattgtaaggatccagcggtataaccgatgcagaagataatagcacttgtttttctttttttgagacagggtctcgctctgttgcccaggtaggaatgcagagaggcccattccagcctcgaccccccgggcgcagcctcccgagtagctgggactacaggtgtgcgccatgcccggttaaatttttgtattttttgtagaggtgaggtttcgccatgttgctcagactggaagatagcactgttacttgtattagtttcgtacatggagctattgtaggataggagggaccccaaagggtgcaagaaaggaaattgagtgccagggttgtcatgtgccttgggctcaggtggagggagcaaagtcctgcacactggagtggtgtactagcggatcaagtatggacactgactcagactgaggagcagctccactgcactgtgtaccgaggagacaagagccaggctagcaggcccacaccagacgagctggaggccgtgcgcaagtacttccagctagatgttaccctggctcaactgtatcaccactggggttccgtggactcccacttccaagaggtggctcagaaattccaaggtgagtacaggacctgggctggggttagggttcttggacataagtcacttctctatgactcagttttgccacctgtaaaatggggattatatctacttcataggcttttatgaggatttaaggaactaatacatgtaaagtgcttagaataatgccaggcacatagtaagtattattaccattattattatcctgctaatcaccatagtgaagtgacaaggattttgagcccattcctggttgt

SEQ ID NO: 39491 - DNA, 1997 bp, Homo sapiens
acacccagacacacacacacacaccctcatataccagacgtaccctacaccctccagctcctctaccccatcccctggaagctcctgtattccaaaccaaaccccaagtccttacacacctaactccaaacatcctcagtacacaattgtacaccccctcctaactctgacttaagaccctgagagccaaataccagcacacaaaacacgtggacacccctctggaacaaaaaacacacagattcccagatcctccacccatgtctgacccacacgcctgtcctaagacagtacactccgcaagcccccccaccccatggatacctccaaatgcccacgcccttccagtcaggcccagctgaaggcgctcacacaggcccccttctctattacccactcagtgtcccataggcccgcctggcacctgctgggcctgggacagaggtggagaaaggcccagccctgcccctcagggtccagcccgcccgggagagtgcccagtggccactccttgggaaaggatacccagaggctaggggctcccaccgcccccacgcagcgcccaggggtgcagggatggggggcccggctgtacctgcggctgccccgccgcggggctggctgggaggcccgcggtggttggcgccgagctgtggccgcggtcctcaccgctgcgtgcctgggccacccgcccgcgctcttgctggagctggggctcggctcggctcggcggctctctccgcccgcctgcggctctgatgtcagtggaggtggagcctgcggcggagggacccgggattgggaggcgaggcaccgctccaaggctggggaaggggcacgggtggaggccatctccctgcttctggtcagagatctcctgctggacgcttcccgcccttggtcttaagcggggtccatttcacagaggggacaactgaggcccggagagatgattttcaaatcagcgggtggtcggaagcaaagcaggattcgaaccccgtctgtctgaagctagaggccggccaaactcaccctgtggcctggtggattttctttcagaccagttctgcgacctcccttagggctctgtctcccttctccgtgccctgaagggaaacaggccctggaactgcacgggagtctggtgggggatgggggagtgagggagtggggaaggaccgggcaagactaggcaatgaagagagtggaggtggtcgcagggtgtgggccccacttgacaggtgggaagactgaggccccggttcctctgcaagatggagctgaggcttcagccccagacacttgctcctcagagcgggtggtggtgcctagaggtattgggggcagagggaattggggaggaggaagttaaatcgggatcctgaaggaaacaggccaaaaaggaccgaggtgtcacgtgactggcggggctccagagtttgatggctggggtccaggttaggggagagagcctgcaactaggacggcaggcaagaggccaaaggtcggtttgctcaaggccttccttgggaagaaatttggtgccgagtggaaagagggggcggggggagcaactcgcaggaattggggatggggctgaactgggggcagccggaggaggcacgttgcttgggaccccactccacctccaagggcctccaagtgccactccctactcctgaattcttgcatgttccagctggtgatggggagagaacagtgcttatgcccagctcatttcctttttctctttctttctttcttttttctttctttctcttcttctttttttctttttcttttttttttaagacagggtcttgctctgtcacccaggctggagtgcaatggcatgatcacggcccactgcagcctcaaactcctgggctcaagtcatcttcctacctcagcctcccatgtagatgggactacaggtgcgtgccaccacacctggcttttttattttttgtagagatggggatctcactatattgccc

SEQ ID NO: 39492 - DNA, 2403 bp, Homo sapiens
ggtgcagagcactttatcagtttatctcactgaatttctcactcagcaccatgaacaaggaccattgtgatctcgtttttacagagaaagaaactgagactctgtaagggtgggtatgtgcctatgcttccaagatgcaatttgaaccccgctagtcttgagtctgcaccctgatcaccatgctatactgctatgccttgcctcgcctttctgatgctctttccttcccttctatttctcttgggttctgctaagactttgagttccaagcaccccattcttaccatgttctctgggactcttggcctcttttcttaccctattccacctttctcccttctctagtcactaacagtggtttagaacgtgggctggtaagccagacagacctgggttcaagcccaggctttaccattctctacttatatgcccctgaacatgttatttgacctttttcagtctcagtttttccatctgtaaaatggggacaaaagaagtctcggtctgtttccccattaaaagtctgaatctgaaaaatggggataacaatagtacctacctccctgggatgttctgaggattaagagatgatgcccgtcaagagcccagttcagtgtctggcacagaagtgggactgtttaatggctggccccgcccgggggtcgcccaaatgtcccgccttcagagtcctcgttctctagggacaccctagtgcgacccccgccccctctacctcctcgctgcggcctcctacggccccaggggccgcgggagggggcggggagttccggtcgatgtgagcaaccgccccggaactggctatgggcgggccccttgcagttgacgcgggggcggggagtcagcgagggcgagcctactggagtttgccgggggtgggaagaaggtgggcctcgagcaaagccgctagaggtggggtgcgggtggtcggcctcaggcgagccccggggcacagcccggggcgggaggcggagcttggcggccgagatctccgcgctgcagttagccccgccgagcgccaggagctgcgggtaggaggggcgagagaaaggatgggggtacagaaccggaagaaacgaagggctcgtccgcttcggcttgtcctaatttggtgcccaatctgaagctgggctgtaccattgcatacctgggggaggctgtggcaaaggtgacaagaaggccgaaggcacaaagggaagctgcacccattcctggaggagcttaaatagtgactcgagtgcaagaatttaaaaataccgagacagccctaggtggaaaacttccggaaggcccaagcgttcgtaagggctctctaccccgctcggagcatagatggtaccgtccggaagtccgggcggagaccgtagctgcgcttctcgcgaaagggcaggcatcgcggggctggccacttccgtacttccgctttccggcccagccagcgcccgcgatggtgagagagccgggcccccggccagggacccccggctgttcggcctcagggcagtgggtcggtgggagatgtggctttgccgcaggggcgcggggccgagggatgtccgggggttgtggggacacgatgagggtgggaaaaagagacggggcgggggcccgaggtgaggaaggggcgagtgggggtactccctggtatgaagtgggccttgtggcttcacggtcagccttcgaagcaggtaggggcttttcctgagccctgtaggaacccggaagtggggtctcctaggctctttggagcatttcgagggtacgtagtcggcctcttagcctctgaggcatgaagcaagtccacctgcctatccacagtggaacttcacgacatacgccctttgtcctcttctgccttcctgaccctacagttgcttaaggcaggcggccacacttccttatcccattcttggtacctccagccctgcttccaccccattggaggatctctcgtgttgcttccattcaggcccttcctggtcagaactgaactgtgtcagccttagtgtatgttagctgtgatactgctcatccctcccttcctggaagtcctccctttttcatacatgtgggcctttttcatacatgtgggcctttttcatacgtgtgggcattcctgggagttgtgactttggatgaccatctccctcttcgtcacaccttccctggtgataccgatctagtctcctggcttcgataactttcttcattctgatgactcctaatctggcttctcagctctctttcaaggtttgcctggatatcttgaagagaccttgaaattagacctctagttcaaaactcatattctattctaaatttgttcttcctcctgggttccctatcctggcaaacttttgtgacctcatgtctctgctaaaaatc

SEQ ID NO: 39493 - DNA, 1469 bp, Homo sapiens
ccaccctggctgtcttgtagttcgcacagaggttcttacccttctcagggctgttgctgggactgtcccttccctgaagtgcagttcctcccctttccctggtgactcctgactcctggcatttacaccttcagcttaaatgcgccactttatctaaaatgcgcccccttcctggtttcacctctgcttgttcattgcccttattatacctgtaaactattctcttcctttgttacttgctttttattcccctcacactgggcttttagtaagctccatgaggtcaggggccatttgttagcgcctataaatactgtggaatcactcaaaccctagggccggtggcaccaggaagtactggataaggaaccgcaacactaactaactggggctcagtgctctcttccgccttcagtgccctgctcatcaagggtctgggtgaggccccaggtcataaggaagccctcgctcgactgccccggggcccatcgcagcccccaaccagccccgagcggtctgatggtgcccagggaatggtttccaaggcaatagcaaacggggcggggcttggaacggaggacaaggctcgagcctaggcaggaacttcccgggagaggaggcggcgacgcggaggggcgcgggatcaggggccctgggagggcgagcgcggcgaggggcgcatgcagggccccgacgcgccactgctcctgagcgcgagggagctggggcccgggcgccggggctcggcctcctggtaccgccaggagggcggcgcggtgtgcaactggctgcggaagccgcagccgctcgagccacgcaccagtttcccctcggcgcgccgctccgagttccgtccacccaggaggctgccatgggccggccctgcctccgcccagtccgaggagggtcacgcaggcggcagatgccaggcgggcagccccgcccctgcgcgccgcctcagcggcgccttcaagacgctggtcccaggcacccacgcccagggcgcctcggatacccaccccctcggccccccgcacaccccggtcctcgacccctctccgcaggatggtgaggcccgtgcggcccgctcgctctggcctacagcggctgcgaggacgacaagacgctggggtggagggactgggggtcgggagaagagcggctgagggtgggcatctggatgaaggcaggaggaagaaaagaggcgtggctatgggcggccagaaaagatcctaggccgagaccctaggcccagcctcagtgtaccccgcccctattccgcatctttctgcaggtttcccggtcctctggcgaggatcctccaaggcgtctcacatgaaccggctcagaaacgccaaaatctacgtggagagagctgtcaaggtcagaggaggggcaggggcgcttagaaagggccctgggagcggctcagcctgtctccctgcgctgttttcttatatccttaaaaa

SEQ ID NO: 39494 - DNA, 1674 bp, Homo sapiens
caggcgtgagccaccgcggccaataaacaataatctagtatagcaactcccgtaactgagcgccggctatgtgcaaggctcggtagttatttgcatcttctccccactcttaaccctactgcatcatggcagtagggttaaaagcggggagagggtgcaaattaggtggcttgtcccagctcatgctgctagtgggaggcagaagcagggctgatcccgtggcttcaatggagagcccaactgcacgccgaggcagtcccctcccggtccttgtgcggccgtgcctctcacccctcacctttccggtccaccacggctgcccgcagcgcatcaaccagctcctcccgactgaggttttttggcagcagccccgcgaagggctggtccccgaggggccccgaccgttggcaggagccgcggggttgcctctgatgcctggacaaggagggagaagcaatgggagtcattccatcccgaggtgccacccattcctatctccggacgcctcttcccaaatcctgcggcctctgacaaatgcctcacaatgtctgggctgacctcgaaaattcaggtacgaccggtcccattctacagcggagggcaccgaggctcagagaggccaacggggctgttttcgggtaacatctacctgatccagatcccgcacgtgccttccccctgccctagcctccgtcccgcatgagagagggggtacttaatcaccgggcttcggtgccaaagcctgcgtcctcgggcactgggcggacacccaggccccgccgccagccactccagaaccggcccaaaacacggcggccgtccatctcccgagccaggacagcgcgcatgtgcgtccagaggggcagacccgcgctccagccagcgcgctgattggtcagctggagtgtcaatcggaatggtgaccgggcgggactcagagcctgaggaggcggggcttttcctccgcccaggaaggaaatgcagaaatgccttcctatgcttttagggagagcgctgtagcagaagaatttgatctgatcaaaaaacctgtcttagcaaaaaacctgaagccgcctttgcaaaaattatattacaaaattatgacagcgaaagagatctgatctaaccaacccgcagcttgcctttaacctctaaacggtccttggtcattcctgggcttgggccaagctaactttgggagaaattagttcgtagtctaaatgataattgcccttcccccgaactaaactggcttcatagagttaatgaaaggccaccaggttaggagtagtagagggacctgaattctgctaagggttagaggtaactgattaccagcggttattccggaggtcacagtgtttgcagcttccccagctcacgattgtccaacctgagattggcctttggagatgtctttccaggcttttgcatttctgacggccggatcaccccacccggaccctcaactcttggctctactagtcctgtggcccctcgaagtcaggagatcgagaccatcctggctaacacggtgaaaccacgtctccaccaaaaatacaaaaaaattagccgggcgtggtggcgggcgcctgtagtcccagctactcgggaggctgaggcaggagaatggcgtgaacccgggaggcggagtttgcagtgagccgagatcgt

SEQ ID NO: 39495 - DNA, 1140 bp, Homo sapiens
cacactgaatgattatttgttggtataaatgaaacaggaaggcccctgaggtgctgggactggcagcccttcaccccaggtgaggaaggagccttgaggaaggggagaggaccagagttagtggcctttccccaccctgagggtcagccccgggcagggcgggtcactgagtcttgggggacctgatgcctgtgcccttgatggtggcccgcaggggacgcagccgcactgggtcagctgtggtcctggggcagtcgcgtccaggcaggcggcacttaggaaggacaaactccaaaacccagggatccaaaggatccatgggaagatcgggtggctcaggggagtgactccccggcttggtcggcgctttgaggccccggggacccagcggagagggctcgggtgaggcatctggaggcgctgaatggggccgggagccgcgggacccgcagagggcgcctgtccgtgtgggcgcagcagcgcctagagggaggcggccccggcagcccgcaggggtcaggctctgctggagcaggggcgtccctgtctccgcttcccagcgcaggctgggtggggccgatggccattaaagccccgccccccgcggctcaccgccgcctggccccgtccccgaggccagaaaagaggagacccgaggccgtcagaccgcctgtcaagggctgtcctggagcctggcaccttcccctcgctccccgtctgacccccagaggccgtgctgtccaggctgaccccgactctgagccatcgggatgcctgtccacgcctccactcctgggccacttccccgtggggcgagcagaagggcgggccgggtgggaatctgttgtacccagggaagggaattgccaacaggcccagagagtttgaagcctggggtactgtcaccaacaggccagtagcctcgcagctgggccctgccctagagtcttcctgcagcagggcgcttctccggaggagctgtgaatgttttcccgggtggggctgaagccagagcccagaggtttgcccctggggcacggatcctccaggtcactcgcccccctacgggctgcagtgaagaaggctctgaggggaggatggccagcgcctcccctgcaaggataggggcccctgggaacc

SEQ ID NO: 39496 - DNA, 1889 bp, Homo sapiens
tcaggagtaaaagcaccaagcatagtgtctactcctttttatgcatggtgtggtggtggtgtaagcagcagcattaatatcacccagggacttcttggcagtgcaaaatctcgggtcccactccagacctcctgaatcagaatctgcacttgaacaaggtcccctgtgacctgtatacccattaaagtttgagaagttctggcttacagctcataggtggctctctttccattctgcccatgactttcctcacctggagagggacttggggtagagaaggctaagggacttcatggcgtattccatccttgtcagctggactgcgttggacctgggaaggaggcagaaacaattcatcagggtgagatgagagggttcccatctctctcattgttaggcaaggtgcaacccaacccctgttcagcaaccttcctccctattcttctatcccaactcacacatacctcccccagcccttctcctgtccggccccatgcatgccaaccaagaccaagctggagaccccacccctctccccaccgggtgctcaggctcagcctcactcagcagctgctgctcctgccccagtcccactcactccatgtttctcatcccctggctctggtcacactgagcagataacccaactcagggctgaagaagccttgcccgatttgttcctgtccatggggacagagtccactttacgctggcaggaggtgagtcacaccacctcacacttctggggaccgttccctcacctctagtccagagacctcacaggcaggcagcccagtcaaagcctcctctctcccatgggtccttgagcaatccgagccccttcctgaggcttcacagtggccaaaagaacattctgtgatgatagaggcatgccttgtacatactctccaataccattgctactagccccatgtggctattgagtatttgaaacataactagtgtgattcaggagctgaattttttttttttttgagtttcgctcttgtcacccaggctggagtgcaatggggcgatcttgctcactacaacctccgcctcctgggttcaagcaattatcctgcctcagcctcccccgtagctgggattacaggcacctgccaccacgcccagctaatttttagtttagtttcgttttgtttggatttttagtagagactgggtttcaccatgttggctaggctggtcttgaactcctgacctcaggtgatctccctgtcttggcctcccaaagtgcggggattacaggcgtgagccactgcacctggcacaggagctgtattttttactttattgaattttaactaatttaaatttaaatagccacattgccatgtggctgttggcacccatattagatcacaggtctaagcagatagccctgggctcatctgtcaccactttttctcctaaacctctgtgctccaactcttgaagggcccaaccctttgcacagatagttccctccacctgtagtgcccttctctgatccaggacgaaatttttgcagccttgaagcctcagtttcattgctttccactctttaaaaggaaagtcttcttagaccactcccaaaattattacaccttcatcctgctcttcctagccaagggtgcctctgggtctgtttctgctgtagcccctcagtccctggatgcctggccctgaggtcctcttcctattcgaagctcccggcacaggtagggcttcgcagagcaaggggcacaaggggtggacataaaacaaaagtccccttgccagctggggacaatcactctttgcttttaacaatttgggggactttccagaccaggccccacagaggcagaaagcccctttcccacttagcactgcagaagctctagtcc

SEQ ID NO: 39497 - DNA, 1615 bp, Homo sapiens
aaccagtggtctagcgctagctgtgtgagctaaattttctaagcttcagtttgatccaacaactggggataaaaatagctctactgcatctggtttccatgcagattaaaagagataatcgtgaaatgtacttgctacagagtctagtgcatccttagagctcaataaatggaaattattattatttagatctaaatccttccctggaggggctctcaggcaaccattcattcattcattcaggaaatatttattaagcacttactatatgccagtccttctggggctaagaatacaacaggaaacaagacagccttgtcccacacttcaaggagctgacattcctgaggaaggtgggaactcagaccatgaataaatatgcaaataaacaaaataatttcagataatgatgttctgggaagaaaacaaaacgaggtgatataataacagctggagagttagattggcctatgcgttcaagaaacgcctccaaggaggtgagctttgaggtaaatcctgactaaatcctgggggatgatcaagacaaaggaaacatcattgcaaaggatttgagaagggagcatgaagagagagtgaggagacaggaacacatataacttaaacttaaggacagaccaagagccaggagaaaggtacaagcaaaaccctttagggaagaggttctggagaaagagtcggggcccctcccttcaacagtcatggctcaaatatttattgctctactgtgtacttgatgtcctgagatagataggccaatagatgactcaggagaggtctggccctgacagaaaaccagacacagaaagacgaagataaccacgagctacagccagagagcactgtccagggatgaaggataaacccggggattcttcacagcaattaggagagggagacggttttggctccattggaatttatctattcaaccagcatttctttctttttaaattttttttcttttttttcttttaatagagatggagttttgccatgttgcccaggctggtctcgaactcctgggcttaagcgatcctcccgcctcgagctcccaaagtgctgggattacaggcgttgaaatttttacactatgccagacactatgagctgctggggacatggatgacttagttcttgtccctgcctttggggaattcacattccagtgagaaaggcaatgtctgagcatggttctcaaactctgtagtacatgaaaatcatctgggacacctcggattggaaaaggactgtggctacaactcaaaattgagaagccactaaatttaaaaatatattctgcatgttaaatttataacaccatgaacaaaaagtaaaaagacatcaaataaacagggaaaatactgtatattcgaactaatatcacagacaagaagctagtctttctctttctctctcattctttcctccctactctatctacatataaattaaggcccgggcgccgtggctcatgcctgtgatcccagaactttgggaggccgaggcaggcggatcacaaggtcaggagatcaagaccatcctggttaacacggtgaaaccccatctctactaaaaaaatacaaaaaaattagcc

SEQ ID NO: 39498 - DNA, 2279 bp, Homo sapiens
ccagctctcttctagactgtccctccgtctggatttatgtcatttcttcatgattagattcagttaggtatttttggcagaaacatcatagaagtgatgctgtgtcctcagtctattaaaagaggcacaagatatcagtttatctcattattgatcaaattaactgactatatgtttaagggagacaagccagatttcctcactgagagattccctgtttctctttgcaataattaaatgtgagaaacttattttgagacaaagtctcactctgcactctgtcccccaggctggagtgcattggcacaatctcgacttactgcaacctctgcctccctggttcaagcgattctcctgcctcagccacccaagtagctggggtcacaggaacccaccacacctggctaatttttgtatttttagtagagacgggatttcaccatgttgcccaggctggtcttgaactcctgacatcaagtgatccacccacctcggcctcccaaagtgctgggattaaaggtgtgaggctgtgtgaatgatgtgtgctccagggaaagtcatagaatatatcagtttccccctctgtaaagtgtggacagaagtatcctaactgatattacagcttaagaaagtaaaagtgttcaagcggcctctgggcgccagcaaaagaggctggggattaatttcctgcgcgctccacaagaggcggggctgggcggggcgggggcgagagggaacgagggcgcctgcgcggagaggagtgaccatagagtcggtcctccagagacagaggggccggaagttctcttcacggagccgcgcggctgcgggggcgcaaatagggtcagtgggccgcttggcggtgtcgttgcggtaccaggtccgcgtgaggggttcgggggttctgggcaggcacaatggcgtctcgagcaggcccgcgagcggccggcaccgacggcagcgactttcagcaccgggagcgcgtcgccatgcactaccagatgaggtatgaagtgaggcgaggagcacggaggctttctcccccgctggagcctgcggggcttggggagcgacgccggcccggcctcagggtcttgctccccagccagcccccgctcacctgccaagtcccctcctcccgtgacggcttcgggcctgtcccccatcctggaaagccccgtggcccccgcgagctccaccccttgttccgcccggtgccttgaggggatccagccccgcgtgggctcccgccctgcgtgggctcccgagtcacgtcgatgctggccccgctgtatcaccttcgaaaccgaatttctaatttgagcctcagcttcctcatctgtagagggagagaataatctgccttttaggttttggtgaaagattaatcagtaattcgtgtaaagaaagtagcataaggcctaccacgtaatatatggtaggtgttatattttgggccgtttggggggatatagacagtaaaaggcagcctttcctaaggacgccttgcctaaaatgaattttataaacactcccacgtaaggggtatttctacattcaattactagttcgacaaatactgagcttccaaacatcatacactgctagacactaggttataatagtgagcaaaagcagacgtggtctttgtatacatgttataccttcaataaacaattttattaaagaaaaaaaaaactgttccctgccttcatggagcttgaagtctagagatgactgttttttttttccaacctttccacattttctacaataaatatttttaaataaaaattttaaaatttttacttccttaaatccattgatctctcccagaatgttcttcacatctctctctccagagttttaaagaatgacaagctctttgaactctcatttgtttcacatctctaggccccggctgaaagggccctcacaacttaagcaggtgttttcatgccagcccagagtagaaacattgcctttagggatatgaggaggatacgtttgggacgtgagagaattagaagaataagataagtatgtacttcttttggatgaaaaaatctagctggagaagtatgggcggcctgagtacgtttcctctctgccaataccttctcccgccagactttaatcctatggtgcagtcagcgtcctcttgctaaacacagctctgagctacccttctgcctttattattattattaatttatttatttatttttgagacggagtcacggtctgtcgcccaggctggagtgcagtggcgcgatctc

SEQ ID NO: 39499 - DNA, 1255 bp, Homo sapiens
accagcacacaggagaagaagcataaatgaagcctctttggggtgaagcctggacatcccatcgaatgaaaggacactagtacagcggttccaaaatcccttctggtgattttagcagctgtgatgttggtacctggtgcagaccaggccaaagttctggaaagctccttttgccatctgctgaggtggcaaaactataatttattcctggttggctagaactgggtgaccaacagctatgaaacaaatttcagctgtttgaagttgaactttgaggtttttctttaagaatgagcttcgtccttgcctctactcggtcattctccccatttccatccattaccccttagccattgagactaaaggaaatagggaataaatcaaattacttcatctctaggtcacgggtcaggaaacatttgggcagctgctcccttggcaggctgtggtctcctctgcaaagcattttaattaaaaacctcaataaagatggccctgcccacactgtgccttgtgtttggggcttgatagagtgtgaaaggtgtgttgcttgaaaggtgtggccttagacactaggagatgatgggtagaagctccttgagaaacctagcagtggccatagagaagtagactgggtatggggaacctaagtcatagttgtaacctacagctgattggtaagaactatgggccagacatttaatctctccatctatgaaatagtccattctcatttatctaccttaggttatgggctcttcttttagttggatattcacatttatctttcagtgttaactgggtatcagttatgagtctactactgtataatggcatccaaaagaattttaaagtacctcggtttatagggatttacaattcagtagaaacttgttattcatgtgaaacagtgaacataatatctaatgatgtggagcaagtacattaaaaacaggaaggaagagatctgtgattaaactaaaggccctttcacacctaaaattctggcagtatttattgcatgaaagataatgtgtctctttgcacttgattttattgtctctggatgatgcccagatctgtaactgcagagctctgccctctccagagatgtagtcattattttgttctagaaacattgtgtatgtagttagtcattactgagtcactttttttttttttttttttttaattgagacggagtcttgctctgtcgcccaggctggagtgcagtggcacgatctcggctcactgc

SEQ ID NO: 39500 - DNA, 2429 bp, Homo sapiens
ggtactaaacttgggaggctggggcaggagaatcgcttgaacccaggaggctaaggttgtggtgagccgagatcgcgccactgcactccagcctgagtgacacaatgagactctgtctcaaaaaaaaaaaaagttgaaatattgtgaaactgctttatgaactatgtatcattatataaatatgaaagatggttatttcctgatctttacaggaggagagaatgtaggagttgaagggactattagagataatccaggccatgagaaaggcaatgtggtataatggaatgaacagtgttttttgttttgttttgttttgttttgtttttgagactcactctgtcgcctaggctgcagtgcagtggtgcaatctcagctcactgcaacctttgctcacacccggttaatttttgtatttttgtagagacagggtttcaccatgttggccaggtctcgaactcctgacctcaagtgatctacccacctcggcctcccaaagtgctaggattacaggcatgagccaccatgcccagccaacagtttcttacattagacagacataggtgggaattccagccaggcattttactaacttttgccttgtgcaagatacctgagcctctgttcttgatctgacacatgggcatcattttagctacccccaggattgttgggaggcttagataatatgtatggacaggctacatagtaggggtttaataagtaacagaatgccttcccttgttgagcagtgttggcttcctcgctgagattgggagtctctacctctcagcaataatttcttgcctcagaattctggaggttgatccttctggaagagcagatgtaaagaagggatactcgcccactgttggtgtacattgatctaattggtgggccttcctgcccagggttccctatcagtgagcagagttgccccagtagacgttaggaattggccattacaggaagaacctggagctactgttccatggtctgaccagagttcatgcacagataaggcggtgacaagaaaaatggctgcccaaggtccctacagtgcactctaagcatgtgcaggggcctgccaggacttcctgagctcctggctttgttcccaagtaaaggctattaatcattaatcatgaagtcttggtcagctcattttgacacaaaccacagatgagacaggccttagccacctgccaagaagacagggcctctgtgctgaagccctacaacacacctttgttgctttactccaattggccacctcctattccagccacagttactcctcccttgttgacacttgccaaacaatcccaactctcctacaagtctaaccactggtaacattattataagatctactttcctttctttccaacactttcatttctttctttacattgttaaccctgccaattgtatcacactgctaagtttagtaacttctgtgaactacagggtccagaaaccctctgatctccccaagtagtgtgttctggcagaaaaggccaggaagacatagcggtgagtctccagaggagaaaagcgaggctcagagaggaaaaattggcagggaggggaacccaggtcttctggcccatcctcttaggacaccatctcctaggcctcatatttctgaagttctcacagtgctgcggtgtttagcgctctgatctattggcaagcggactggtagacttggcagcccttttccccctctgactccagggagagtacctgcatgccttctgggggcttcccccagctcaggtgtgaagtgtgattgtgtgtgtgtgcatgtgtgtgtatgagacagagaaaggggatgtgtgtgcacaaggtgcatgtcagcagcactcacaggcttcctgccagctctggaagggacattttttgcccctcacagtgtcctcttgcaggtaggatgcctggagagacgggagcaggtggggagggtcagaggaatggcttttccaatctcactcagacctaaaactcattctggctttactttactgtgacgcaagctgcctgagctggccaggcaccaaataggagggggcaatgtggggtgagggcaagggtggggaggaactcagagcgtaagcgtaggagagagatcagcaagtgaggggctgacttcagctcttaggtgtgtgtgcttggactttacctaatcttcctgagtgttttgcagtctgtaaaatggggtaataagactgtgaactcaagggttgtagtacaaataaaataaactgggcaaaatgcatgactcagagcctgatagtaggatttcagcaaatgttgatcccatccctccccttccttaggttgtgccagaattcacccctgtgcttcttaccttaaatactttttggaacagtctctacaataaataagtaaaccagcaagacaat

SEQ ID NO: 39501 - DNA, 532 bp, Homo sapiens
caggagtccaggaccagcctggccaacatggtgaaacccgtctctactaaaaatacaaaaattagtctggtgtggtggcgtgcacctgtaatcccagctactcgggaggctgaggcgggagaatcgtttgaacctgggaggtggagattgcagtgacctgagattgcaccatttgcactccagcttgggtgacacagtgagactctgtctcaaaaaaaaaaaaaaaaaagagagagttgagttgcgagggcctagcaaaaggggagctccctgaactatagactttgaccttgtccaaatcattatccctctgcttccttatctctctatgaaatgaaaacaataattaacacttacctgtctcacaggtagggttaggaggattaaatataaaagtgttttgtgaagtgtgaaacagataaactacatagatgaaatgtatcatgacatttattcaattacacagcacatacttcataatatctactgctaggcttggagaaacataaagaataagagtttttatcttttc

SEQ ID NO: 39502 - DNA, 995 bp, Homo sapiens
ctgctcggtcagtgcctggccagctcaggcagcttgcgtcacagtaaggtaaagccagaatgagttttaggtctgagtgagattggaaaagccattcctctgaccctccccacctgctcccgtctctccaggcatcctacctgcaagaggacactgtgaggcgcaaaaaatgtcccttccagagctggccagaagcctgtgagtgctgttgacacgcacccttgtgcacacacatcccctttctctttctgtctcctacacacacatgtacacacacacacacacacaccccgcacttcacacatgtgctgggggaagtccccagaaggcatgcaggtactttccctggagtcagtggggggaaaagggctgccaagtctaccagtccgcttgccaatagatcagagatcgctgagcaccgcagtactgtgagaagtttagaaatatgaggcctaggagatggtgtcctaagaggatgggccagaagacccagttcccatcacagctctgtcaattgttcttctctgagcctcactttcctcatctgtaaaatctcaatacctgctctgccttcaaagtgtttgtgaagcctgagttaaatattacatatgaaagtggctggtgatgtctgaagtgctgtatgcatgttgttgttctcaaggagaggcaggacactcagacaaaagtgactcacataaagcagcctacagaacttacagggcagggttatggttaaggactaggctgtagggcaagaaattgggaaagggagaagcccaagaagggccattataagcagagaaggcctcttagaggaagtggcacctgagctggggtcagaaaaagggcaagacttagaaaggagagataggagggaaagacattcctggttctgagaggaccctaagcagatttcgagtttggggagaagcaaggacctggccagaatggaggcctgggaaggagaggagagagacccctggatagaaagataa

SEQ ID NO: 39503 - DNA, 622 bp, Homo sapiens
agcctaacagaacaacatttaatactgatgccttcccttgaacccagctgtccgctaccactactctcctgcctccacgaggcacctgtgcagaagttatctatcctaggaggcagagcccatgcagctgacaggctctgcacaatcctgtaaactattgacaaatttcacctgttacgtaactaggagcactttatcagactatcttccatgtatctgatataaaaaccacagtcaagtacaccctcaataccacagcaccacgctgactaagcatgactagctctttcaaacagttatttcttaaatgctcacttgcagcttatatgtttgttttgcattgtatgagggctcccaagcagacaggtgatagcaacacagtatgaaagaccaagtcacgcttaagatggccacatgcagtgtctcacacttgtagtcccagctgaggtgggagaaccgtgtgagctcaggagtccaaggctgcaatgagctatgatcatgccacagcactccagcctgggtgacagcataagactctgactctaaaaaaaatgtttttaattaaaattctgtccaatttagtatgctttgtgcccaccctgtagcaggctctgggagatac

SEQ ID NO: 39504 - DNA, 4831 bp, Homo sapiens
accctcactctacatacagagccttggcatctgctcccctagtggcacccacccctggaaaatccattctgcaaaaatgtttggtttggccagcacagtgttttaaattgaaattgcttaccaccatttacatatataaacaaagctggatttctggcctctgttgaaaaatcagaaaaacctagtgccgtgtgtccacattctggcatggtgacaatggcctggagctcagtgccatctgattgtttcagtcagggcctgtgctctccaggtcctcacagcagccctggtcaactttgagtttactttttgagtttggcccctgtcacacttgagtttgccaccattgacctgttctgtgccaggctagcagctggagcagacacaaacccacctgggaagaattccctagccagtggggactcccctctcccccagctccatgcttcactcagctccccgggaggagaagatgcctggctcataggggtggggggctctgtgccctcaggtgtggcggtcagatgtccagtttgcctggaagcacctcttgtgtccggatggtgagttcttggggagggggaggtaagagggaggctgggcactgaggaactgggcttggcctcatcctgcttgactcagtctcttacagacacctggggctcttgatcctggcactgctggccctcctcaccctactgggtgttgttctggccctcacctgccggcgcccacagtcaggtaagctcacctggggtaacctgggaagtcagacctgcccagctcggagactagctgccccctcaccctcccctgtctgagctctcagcactgcacccaatctctgttacccaggcagggagcctcaggcccccaagtgagcaggaatggttaaggcaaggcaaagggccctctgagcatattgtcactgtactgagtctctgtacaaaaggctagtggggcagaaatccagcctgcgctgtactcgcccagcctggagccctgaccctctcttcagaaggggtgcctttatctaattagcccataagcaccctataggctagggctgttttcggtaccaacccccagagcaaataaggggcgggggcgggggcggagaggcgagcaccctacggtatcccgagagggtggggagaagagggctgagcagtccctcagccgcccagccttcatctgttgcttcccgccaccaggcccgggcccagcgcggccagtgctcctcctgcacgcggcggactcggaggcgcagcggcgcctggtgggagcgctggctgaactgctacgggcagcgctgggcggcgggcgcgacgtgatcgtggacctgtgggaggggaggcacgtggcgcgcgtgggcccgctgccgtggctctgggcggcgcggacgcgcgtagcgcgggagcagggcactgtgctgctgctgtggagcggcgccgaccttcgcccggtcagcggccccgacccccgcgccgcgcccctgctcgccctgctccacgctgccccgcgcccgctgctgctgctcgcttacttcagtcgcctctgcgccaagggcgacatccccccgccgctgcgcgccctgccgcgctaccgcctgctgcgcgacctgccgcgtctgctgcgggcgctggacgcgcggcctttcgcagaggccaccagctggggccgccttggggcgcggcagcgcaggcagagccgcctagagctgtgcagccggctcgaacgagaggccgcccgacttgcagacctaggttgagcagagctccaccgcagtcccgggtgtctgcggccgcaacgcaacggacactggctggaaccccggaatgagccttcgaccctgaaatccttggggtgcctcgaggacgactggccgaaaagccgcattccctgcctcacaggccggaagtcccagcccagtccccgcgcgcgtccctcttcctcctcatactttcccttgactgagagctcctctaacccctgttctgatgggggagggcggtcttcccacttcctctccagaactccagaaagagcagtgtgcttatgcttcagtccaggctggagaggttggggccggggtagggaggcaggagccatgtcagttctgaaggagggtgaggcggtgggggattgcagggggcggctgagagaaaacctccttgggggccagggattccctttcccactctgaggctctggccagagggagagaggactctggacctaggaaaagaggcttttggctccaggtggtcaggacagtgggggttgggggtggggtgggtgggtgctggcggtggggaccaagatccggaaagatgaataaagacaaacatgacaaactaagaaaacacagtgtgcttctctagtgtggctggggagcctgcctggtggggtatgtgtcagtgtgctggcccaaatcctctgtgtccataccgcatggcatccgtcacattcttacaagcaatgcctccaaaagcaaaggaggatggggcaatctccttgatcccccccagtgattcttacaagaggagaggaaaacagaggcttcgccagatggtgtgtccatcatcacacagccggcccacagcaacagcacagatgggacccctgtctgccaggctctggggtcctgggttccttctactccccataccgcatttgagccaggcagtggtgaaaagcccactttctggtgccttttgtccgtgcttttagagctcctgtcccacaaagggttaccgaggcccaaagagtgtctgaagggaccgagtgtgcctagtaaggggagacttagtgggcccaggactccagggctgtgtcctccttagggctccgggggtgagtaagagctcccttactcagccgtgatgcattcgctgtcttcttcaggggcccctcccagccaggtgtcagcagagggagaggagagccaaagaaggaggaggtgcggccaccaccctagtccaaggctgctggctcccaagcctggtgttggtgggagggacagagaggggcgggaacagccagcagcctgccgggagccaaaacgaaagcactccgtgctggaagtaggaggagagtcaggactcccaggacagagagtgcacaaactacccagcacagccccctccgccccctctggaggctgaagagggattccagcccctgccacccacagacacgggctgactggggtgtctgccccccttgggggggggcagcacagggcctcaggcctgggtgccacctggcacctagaagatgcctgtgccctggttcttgctgtccttggcactgggccgaagcccagtggtcctttctctggagaggcttgtggggcctcaggacgctacccactgctctccggtgagtctggaaccctggggagacgaggaaaggctcagggttcagtttttggctcagcaaagccttagcctggctcctgtcactgctgccactgccagaactgccctgtctggtctgtctggtgctgatggtagaagagaagaacggggaaggggcaagagctgggtctgtctttctctgggagggtctgggaatacggagccccagaaaaaggtaggtggaggtcttaggcagagaacagtgcctagatggtgggggcacaaattctgactctcctttctttccttcccagggcctctcctgccgcctctggggtaagtatccctacttttaaaaagaatttcccaggttggccgaagggagcagagctgtcccaggcccatgccctccatgcccacctcagcctaggacagccaagttctttggctctctgggtatgtcaggtgccaccaaattctgggcttggaacagcttcagctcccacccgctcctccacacacagacagtgacatactctgcctgcctggggacatcgtgcctgctccgggccccgtgctggcgcctacgcacctgcagacagagctggtgctgaggtgccagaaggagaccgactgtgacctctgtctgcgtgtggctgtccacttggccgtgcatggtgagcaagtcatcctgtgacagtgcatgtgtacacgtgagtgtgtctggggtgggcatgagggccaggggatctctcaagcagtgctaggcatcctcagtgttctcctggaggacaccagcagaaggacccccaggccagtgtggtctccccagcccctgcttcccagcactgggctttccagaaggaagccaacgccaaagccagccagcccagagcagggggcctcacccagggccttgctcttgggtccttctagggcactgggaagagcctgaagatgaggaaaagtttggaggagcagctgactcaggggtggaggagcctaggaatggtgaggagaacctggctggcccaactgccccatgccaaggcctggcctgccgctcctgggcctgactgacccctgccctgttgcccacagcctctctccaggcccaagtcgtgctctccttccaggcctaccctactgcccgctgcgtcctgctggaggtgcaagtgcctgctgcccttgtgcagtttggtcagtctgtggtatgcaaaataataataatcaccttctaaacctaaaatctataaaactttttcacatgcattatctctttgaggattacaaaagaattaaatttattgaaacccttcagtaccaggcattacagccagtgttttacaggtatcaacttatttaattctcacaacagccatgtgaggtgggactattcttttgattctgatcagcgctgtgggcaagtcccttcagcctgttatgcctcagcttttatgtctgtaaaa

SEQ ID NO: 39505 - DNA, 2400 bp, Homo sapiens
tagagacggggtttcaccgtgttagccaggatggtcttgatgtcctgacctcgtgatctgcccgcctcggcctcccgaagtgctgggattatataaaggcatgagccaccgcacccggcccaattcatttctgttaagtctcagtttttcttctctgtggagggtaagtttctaactcttcttctctgggtctcccagacatccacaagcgctgggccctcgtgtggctggcctgcctactctttgccgctgcgctttccctcatcctccttctcaaaaaggatcacgcgaaaggtgagcgcttcccggctccccattcccctgggggaggaccagagtggctgtgggagttctccgagggaaagcggcggccgagctcactggctgcctccgcccctctcccctaacagggtggctgaggctcttgaaacaggacgtccgctcggggggtgagtgggagcaagcgctgggcggagggccgcccccggggagccaggcctgtgccagctcacctcttccctccccatctgttttctccggcagcggccgccaggggccgcgcggctctgctcctctactcagccgatgactcgggtttcgagcgcctggtgggcgccctggcgtcggccctgtgccagctgccgctgcgcgtggccgtagacctgtggagccgtcgtgaactgagcgcgcaggggcccgtggcttggtttcacgcgcagcggcgccagaccctgcaggagggcggcgtggtggtcttgctcttctctcccggtgcggtggcgctgtgcagcgagtggctacaggatggggtgtccgggcccggggcgcacggcccgcacgacgccttccgcgcctcgctcagctgcgtgctgcccgacttcttgcagggccgggcgcccggcagctacgtgggggcctgcttcgacaggctgctccacccggacgccgtacccgcccttttccgcaccgtgcccgtcttcacactgccctcccaactgccagacttcctgggggccctgcagcagcctcgcgccccgcgttccgggcggctccaagagagagcggagcaagtgtcccgggcccttcagccagccctggatagctacttccatcccccggggactcccgcgccgggacgcggggtgggaccaggcgcgggacctggggcgggggacgggacttaaataaaggcagacgctgtttttctacccatgtggcccacacgcgtctccgtttcagtggcggggctggcaaacgtcattccctagccccgcggccctttaaagcccggacaggtgcagctcggtgccgcctctggttggctggcgtggggtgacgtaatggcacatggcccgtcgccattggctgggcggcaagctccgccccctggactgcggcgcgggtgggggttgtgcgttttacgcaggctgtggcagcgacgcggtgaggagacggcccacggcgcccgcgggctggggcggtcgcttcttccttctccgtggcctacgagggtctggatccttctctgccggctcgtgggccgtgcctttgcccttctgcgaggccctgaatctgatcccttcccttcatatccggatccgggctcctccctccaagcccggggttccggacacctcccccaagacaacccctctggcctcctctccttcagtacttggaatctgatctcttctccctaattctgcggatccggcccctaatattctttatcagaccctcagacaagaggctgacttctgcccccttgtcaaggagcgaggccactttcctctccaccccatgctagcgaggataacttatttctcttctggaattgcatcttatgcgcctttccccacccatccccacagcccctgcaatacccagtttggcctcttttgcttgtaataacgcagatcccagcgccacggcaccttagaacagacctttttctttctcgcgtggggcctgactccttcagtgaagcctctccacgccctctatctgcaggtccccagcctgggtaaagatggccccatggcccccgaagggcctagtcccagctatgctctggggcctcagcctcttcctcaacctcccaggacctatctggctccagccctctccacctccccagtcttctcccccgcctcagccccatccgtgtcatacctgccggggactggttgacagctttaacaaggtgggtgcaccggcagcctcgttagaggggaacacagcgatttagagtggggaactctgggatgcaaatctgcgtggatttaagtttcatcttggtctcttactagttgtatggccctaggcaggttgcctttctgtgcctcagtttcctagtcagtagaacagtgaagtgctagcatgtgccaggcactgtactta

SEQ ID NO: 39506 - DNA, 1982 bp, Homo sapiens
gccatgtgggcatcgggcagggtcctggccctgcgtcaggaccgctcttcaaagctcgatggtatcactggaggcgctgcgggattccccaggcttgccgcgcggctggacctctccctggccgtccccctgccgagcggcggtagaatcaggggctggggtcggggcaggcagtagctgtaccgtgctgggcaactcatctaggggcagactgtccactgatgacagcccgtggcgccaggggttccaactgatcttgagtgaacccctggagaagctgtcgagggagctgccagaagccgcagcggctgccccgtcgggtgcttccactacgtgctgtgggaccggcccgcgcacgcgcacgtcgctgagcgacctgcagcggccgcggaggagcgaggagccagcgtcgtcgagctcggctttgggatggctgccccggcgcggccgcagagcgcctccaggcggcggggaggccaggccgcggaggccgcagcgctggaacacactgtctcgcactaggtgctcgcggaagagcgcggcgtcgatgctgcggctcaggttgatgggcgatggcggccgcagatccagctcgctcagcgatggcgccggtcccacaccgttgcgggacagtcccgggccaccctggggtccgcgacccaacgacgcagccgagccccaggcgcctgaactgggcgtggccagctgcccactctccgccgggttgcggatgaggctcttgctgatgtccaagctgcctgcaccaacgttgctgggccctgcatagcagttattgggtcgctccggcacctcgctctttcctgacggcgccgggcacgccagacgcatcagcttagcccagcaagcgtgctccgtgggcggcctgggtctcgcggcagccaccgcggccaacgccagggcgagcgcccatgtcagctccaggaggcgcagccagaagtggacaccccaccaggcccacgagaagcggcccacgcggcctgggcccgggtacagccagagcgcagccgccagctgcaagccgctagccagcagccccagcgcgcccgccacagccaacagccgagggcccgggctggcatcccagccccgtgggccgtccagcaggcggcgacggcacaggcagagcgtgcccagagccacggccgcgccccaggcgcacgacaagccctgcgtcaggaggttgagcacagaccatgtggacagcaggtctgtcgcgagcaaccctacaccatgcaccagcgccactgctcccagcaggagtgggttttgcagcggtggcggcagccccgcgcccaggccgagcagagtcagggctgccagcgccgtaagcagcaaggggaagggcaggttgtagagcaccaggcccccgcgaacgcccagccgcgcctgcgagccgtaagggtcggtaagcatgtaggcggatcgcagcgccgaagccacgagcaccagcaccgcggccaccaatgccagccggggccctgctggggcggctgccagcgcagccagcgccaacaacgcgggcagcagaaagagtacccccaccccgtagacgtgcagctcccaggagaagctcaggacccgccgaagggggccccagcgtagcgggggtgcagtggcgttggctggggggctggaggctggggctgaagccatggagctggcggtgggctccggagggggaggctggcccagggctcgctgcgtggtgactcgaatgaggccccggcgtgacgtcgagggggcctggactgggggtgctgggggatggctttgggggcgccccggccactcctcggcttcatctgcaattataacaatattaaaatagccatttgaaaagtgcttttgattttgtatcaccctctagtgtggttggcaagtcatttaacttttccaaacaaatctgcaaaatggagataacagcacctgcctcattgcgttgtgaagaagatgaaatgttt

SEQ ID NO: 39507 - DNA, 2637 bp, Homo sapiens
tcttgtaaattttcttaaaaatttgttaaaaaattaactccatacaaccttagtcactctcaaaaaaaattaattataataccttccgtatgggtttaaaatagctggttatctcacctaaagaagtgaatagtactaaaatgagaggagtcaacacagaacaacaaattactttgttttacttttagttatttttatttttatttttcggagatggagtcttgctctgtcgcccaggctggagtgcagtgacgtgacctcagctcactgcaacctccacctcccaggttcaagcaatttcctgcctcagcctccggggtagctgggactacaggcacccaccaccacgctaggctaatttttgtatttttagtagagacggggtttcatcatgtaaaccaggctggtttgaactcctgacctcaggcaatcaatccacctgactcagcctcccaaaatgcaaggattataggcgtgagccaccacacctggcctgttttacttttaacatgctatatttttcacatgactggtatcagtggaagtagaaaatgttagagccaaaactgtagggtagaccaaacaatcacgtctaacaacaaagtcaacaaaatggcacatcttggaagtactgcactcttcctcatttaggcagaagctgggcagccatctattggaaggggatccaggcactgggtgacagccaggctggaatgctttaccaactgtgctccctagaatcctgggtcctgagaacagcaataaggagagacccagggacaatagctctggcctccccactccatcagctgagaactattttttttaatccactttatacattggggttctcagaaaatctaactgaaaaagagaattccacttccatagatccctgtatcagatgatttctaaggtctaagattactatcttttgcaatttaacatttaaataaaatgacaccctccctgcctaccccaccccactcaaatacccatgttaaaaatcttccttaaagatgagtgaagggaacaaacataccagtcataggagaaggtggcactaccttccgtttagtttttttgaaaaatccatcctctgggttgttgaaataatattttcgtgtcaagaaagactagtaaaaaaaaaaaaaagtgttttaagtctaagaactatgacacagcaaactgttaaattactccccagtggcttagtcagaaggcctttaggatatgctgttccgctcagagctgtcagcctacttggcaggcgacctgacactttagctgagtcacatttaaaaacaatttcctaagaagggtgaggtcaccatgagagcaaacaccaccaggccacagcttaattactaagttgccaacctttagctttccccagagcccccttataaaacattcagatatctactgcccaacagtgaatcgtggagctttttaataaaagataaatgagtacctgtttgggaatgtattttccattttccctgaggactctgcttcgaattaggacttgactgaaaaatacaaccaacacaatgagattttaaaaagtgaaacactagaagaaaatgggagagtcaagtagaagacctatttaaacacaagagagggcctatttggcaacagctctgtgtggaaacttcccaaaatacaagtatctttaaaaccaacgtaaacttatttaacctaactactaggttttcagaaaagtatttttcaaaagtgactgtgtttctgaacacataaatatttcagagttaggtacatttgggacattacactcagctttttcttatttgataataagctaggaagacactttctctgagtgaaaagaatagttgaacactgctcaggagatctggggtcaggagaaagggagaagagtgaggataaaagaaggaatttcttattacctacagagaaatgagaacaggccttgagagggttgctatctgatggacaaatagaaaatctacccagaagtcagactgttagaaagctctcagtaaacatttattgaataaataaatgaaattactaggtgatcttaaatcaactattagagccatagttgatcaataaatatcatgctaggccaggtgcagtggctcacgcctctaatcccagcaatttggaaggcaaaggcaggtggatcacttaagcccaggagtctgagactagcctgggcaacatagcaagaccctgtctctaaaaaaaaaaaaaaaaaaaaaaaaaaaaaaaaaaaaaaaaattagccaggctggtggcacgtgcctgtagtcccagctactcaggaggctgcagtagaaggatcacctgagcccaagaggcagaggttgcaatgagctgagatggcgccactgctctccagcctgggcaacagttaagaccctgtctctaacaacaaaaaaagaatacagtgttatgcaacaaatgggtgttgctaagatgcaaatgacaaaacagagatcaaaatattaatttttttctaggtactcaaaagttcattaaaggaggaaaagaggaaaaggcccttaaagtaatggaaatagtcttgaaacgtgaaaaaaaattatgaacagaaatgaacatagtaaaacctgtgcttggtagggg

SEQ ID NO: 39508 - DNA, 1193 bp, Homo sapiens
aactccgtctcaaaaataagcaaataaatagataaataaataaatactgcaatgaaatatgtgaggaagttgcctccactctagtggggggaaataattacaattccttacatctctaatggcagttttacagactgcaaagcgctttggtacttggcatctcagctgacagtcccaccaggcccgacgcctggaacagtaatttggtagaatgcagattatcacactcacttgactggatgttacaaagactaaacgctgtaacgcacctggcactcttctcaacggaagggtgggatggaatagttcataggtaaacccaccgagggtcggcgactaacctaaaggattaacagtactgtttttttcaacactcaatacgtcctagatcctgtgctaagggacttacagacatcacctaatttgattcctacctgtctatgaagcaggtactgttatcatccccatttcacagaggacaaaagtgaaacacagaggtaacgggtaaggtcaccctgtcagagggggcgcgacgtgaacctaggcaaattgacacaactcctgcacttttttgcccaaggtcacggcggtgtgaggtaggctggagaagggagggcgctgacctgtcagatacttgttcctgggtgagcttcttgtcgctctgcagcaggatggacacgtagtggcggatcatgcctacgaagaaagtgatgataacgatgggtaggaccacccagaggcggatgttggagtcgagcaacagttctggccctgccatcttcactgaaagctggttcccagtctggaatgggcgagcttctcttctccggggcacagttgcttctcttcggcttcgcctccgggccttctcaagcccctttgcccgtgtaccccagaactctcctgcgactgtgagccgagcttactgccttcagctgggctgcctggtcttccacttccggcgcgaacgttgacgtcacgtcgtggcgcacctcagtggcgtcagagcggcgtcgggcctggcgggaaagtggaaaactatcggcggtggcccaggctcggtggctcactcctggaatcccagcactttgggaggccaaggtggggggatcacgaggtcaggggatcgagaccatcctggctaacaggtgaaaccctgtctctactaaaaatacaaaaaaattagccaggcg

SEQ ID NO: 39509 - DNA, 842 bp, Homo sapiens
cctcctcagagaagccctccctgagcaccccatctgcagtaggtcacccccatcttccaccatcacttttcctggtgtttccgtcatagcccccacctctatggggagttttctgcactgatagactagactccctcccccactcagtggccagcgtgtctgtcttctctgtccctgcacacagcaaatgctcaatgttcacttgttggcatgaatgaaacaggaaggcccctgaggtgctaggactgggagcccttcaccccaggtgaggaaggagccttagggggagaggacccgagttagtgccccctccccaccctgagggtcagcccggggcagggctggtcactgcgccttgaggagcctctcccctatgcccttgatgggtggcccgcaggggacgcggccgcactcggtcacctgtggtcctggagcagccgcgcccggcgggcggcacttaacgaaggacaaactccaaaacccaggcctccaaaggacccatgggaagatccgggggctcaggggagtgaccccaagctgcggggggtgaccctcacctgaggcctctggaggcgctgagtgggccggaagccgcgggagccgcgggacccgcagagagtgcccgcctgtgttggggcagcagcgcctggaaggaggcggccccggccgcccgcagagctccgcctcccaggccgcgctctgtgtctttgtccaggctgggaggggccgatggccgttaaaagccccgcccgccgccgctcgccgccgcctggccccacccccgtatccatggagacccgacgccgccggactgcctgtcagctgcagctcggtagcctggg

SEQ ID NO: 39510 - DNA, 1380 bp, Homo sapiens
cttgtctcaaaaaacaacacaaaaacacaaatttccttctgaaagggactgttccagtttgcagtgtgcccagctatttatgaccatattattttttagactccgtctaaaaaaaaaaaagacttgtatttaatgtgatttaatcgactgtgcccatctcactgcggacactgagtgcgcaacctgagcctggagcagttgagggagacggcaagaccccacgcgccgtgtaacgaccataacgcgcgtgcactacaacctcgccgccggcgtccaggcttctgtgttctatagcgtgggagtagagagcaaacgccggcgaggacgtgacgttgcacaggcctatcatagtgcccgagaattcgtgggtgctcaagaggatgggtgtggcctggcagcgcaggcgcactagaggcctgtagggtcggggcgcctgcgcagtcgctcttcctcaggcggcggccatggcgggacaggaggatccggtgcagcgggagattcaccaggactgggctaaccgggagtacattgagataatcaccagcagcatcaagaaaatcgcagactttctcaactcgttcggtcagcgggccagcaaggggaggcggggaggagggaggccgctgaggtggttgggctggggcgccggggagatgctttgagaggactcccgcagccttcggctgttgcgggttttcacttcctccttcaggtcccaccttctccctcccgccctgaccctcaggctcccgtagacagtctctgtagggttatcctgccctacgctgagctcatggcttcctgccatccctctggatccattctacaagtccttctcctagacgcgtcaggcagccccatcctcgctccgtggttcttctcctaagtggtctccctgcctcctttgtactctgcatccattccggtccccactttgcactcaaagtgagcatccgggaccgtgtcactcctctgtttcaagactgttgaccgttccccatcttcaggatctggtcgataccctctagcgtcgtgccttttagttggacccgttgtcaaccactcccgtcttgtccattccttcctgtttcctgtgtctgctgcggtgagagtggtgggagatgaggtcagagggatgccaggatcttgtaggaccttggaagtcctctctgtattgctagtatatatagcttatggtaggtgttctgtctgcttctagcccattcctcagagctaacacaggtcgggtgccttcagcagaaagatatctttaccagaatctttcctaggcatggcctgcttgtgacagccttaaattcttccttatgaacagcaagcaaagcaatcgagattcctaccccttcttctccaagtgtttaa

SEQ ID NO: 39511 - DNA, 1131 bp, Homo sapiens
gtgagaccctgtctcaaaaaaaaaaaaaacaccaaaccttagaggggcgaaaaaaaattttatagtggaaatacagtaacgagttggcctagcctcgcctccgttacaacggcctacggtgctggaggatccttctgcgcacgcgcacagcctccggccggctatttccgcgagcgcgttccatcctctaccgagcgcgcgcgaagactacggaggtcgactcgggagcgcgcacgcagctccgccccgcgtccgacccgcggatcccgcggcgtccggcccgggtggtctggatcgcggagggaatgccccggagggcggagaactgggacgaggccgaggtaggcgcggaggaggcaggcgtcgaagagtacggccctgaagaagacggcggggaggagtcgggcgccgaggagtccggcccggaagagtccggcccggaggaactgggcgccgaggaggagatggaggccgggcggccgcggcccgtgctgcgctcggtgaactcgcgcgagccctcccaggtcatcttctgcaatcgcagtccgcgcgtcgtgctgcccgtatggctcaacttcgacggcgagccgcagccctacccaacgctgccgcctggcacgggccgccgcatccacagctaccgaggtacgggcccggcgcttaggcccgacccagcagggacgatagcacggtctgaagcccctctaccgccccggggtccattttgcagacggggaactgaggccccttgaggcaggacacatccagggtgacgctgctcgtaagcgtcagagcattcttttttttttttttttttttctgagacggagtctcgctctgtcgcccaggctggagtgcagtggcgcgatctcgactcactgcagcctccgcctcccgggttcaagcgattctcctgcctcagcctcctgagtagctgggattacaggcgtgcgccaccgcgcccggctgatttttatatttttagtagagacggggtttcaccatgttggtcaggctggtctcgaactgctgacctcgtgatccgcccgcctcggcctcccaaagtgctgggcttatgggcatgagcctccgcgcccggcccagagcattctttataaggccgaatagttt

SEQ ID NO: 39512 - DNA, 1162 bp, Homo sapiens
cctagggagttgcctggcatacagtaggtaattaatggagtatttgatgagcgcatgatgcatggtgtagtgccgatggaagtggggtcagaaggcctcctgccgctgcggcagaattcccgtgtggccttctcccaccagggcctcagtttcccctcgcagttccgattctctggccggcgctggggtggagccggcggggccgtcgtgccgcccgtggccgctggggacgctggtgccctcccgccccgcccacttccccgccggtccgcccctggctagagaagccgcagcccgcagtgtccgacccagtcgtcccgcgccggagccggccccgtagcgtgccatggcctgctacatctaccagctgccctcctgggtgctggacgacctgtgccgcaacatggacgcgctcagcgagtgggactggatggagttcggtgagtgcggcccggggaggggaggggaccagggcgaccggagcccccagcgatcccgcctggagcggccgccaagctccctcgggcacccgggttcagcgggtcccgatccgagggcgtgcgagctgagcctcctggaccgggtccgccgcggacctcggcctgtcacctgaaggtgccgcgtggtctctgaggacgtctgtcgacgagcaggggccgccgccactgcgctctgagtccagagaacggtgggtacgggggccctcctgtcagcgctgctggctcggtgacgtccccaggtggcctctcatccagcccacaacagcctgcaaagtgcgagcctcgaccctgtagggacccacggtgctgtcacttcttgggggggtgtgtgtgtgtgtgtgtgtggtgtgtttagttttagtgtatattagaaggatctatgatttaacatatatatatatattgaaacggagtttcgctgttgttgcccaggctggagtgcaatggcacggtctcggctcactgcaacctccacctctgggattcaagcgattttcctgcctcggcctcccgagtagctgggattacaggcgcccgctaccaccctggctaattttttgtattttcagtagagaccgggtttcaccatgttggccagactggtcttgaactatttttttttttttttttttttttttttaagacggagtctcactctgtcg

SEQ ID NO: 39513 - DNA, 1989 bp, Homo sapiens
attacaggcgtgagccaccgcacctggccaaactctatgaaaaacaggttttcatagaatgtagatagtttaacacttacagctaatacttatatcatgtttattgtgtgttaagcactgttctgagtgcttctgtacatagaactcatctaatccttgcaacaatctcggaggcaggtgctgctgttatccttgtttgacagatgaggaaactgaggctcagggggagatgaacaccttccccaaaaacacagcaagtaagcagcagagacaggatttgaacccaggccccgaatcccaatatctggcctctgaaccaccactactgtcctgctgactttcgcacatgttttcatatctgtagaaaaagtctggaagattagacaccaaaatgtaactggtggtgtccttggagtcctccaagtgggataatcatggggactttcattttcttgtttcccaaatattctacgatgaccagctattacctgtccatgctgagaaaaaagctgcagcttagcagaaggccttggtagtgactcatcccctcaagatctctatcatgtcccgactctaaagggtctggttgagactgggtacggtggctgatgcctgtgatcccagctctttgggaggccaaggagggtggatcacttgagctcaggagtttgataccagcctggccaagatagtgaaactccatctctactaaaaataccaaaaaattagccgagagtggtggcacatgccctgtagccccagctacttgggaggctgaggcaggagaattgcttgaacctgggaggcataggctgcagtgaactgagatcacgccactgcactccagcctgggcagcagagcaagactccgtctgaaaaaaactaaataaaataaataaagggtctggttaaatgctgattggtcaacaccttaagatatggcaccgtcatggaacaaaaatgtctaagctggaaggcaccttagagtttaattcctgtttctcttgtattaccatcacgagtaaggaaagttcagcccacagagagtcaggctgtggctgagttcctgctgccacccacgaggggtggccctgggcttctgttttcccattacgtcatgctgcctcccaagatgggagtgtgtgtggatgaccaatgcttcgtggggggagatggtccttccttttccatccgttctcttctctgtattgctagaagcagccgctgacccagctgacatcacttcccactgaccagcaatctggcctggggtttccagtgactaacatagcaatttaggaactttccatcttaattgggcacttctcctggaggctttctgtgtgcaggagactgtcaccagcccattttgtccaaagggtaggggattgtgcaatctggtcacagcactcactggctctgaaattttctgtggtcccttgtaactcttaggatcaagtccaaactccaaagctgggcattcacttgagggtctttgttatgtggtcctgggcttcatctcttgccttcccttcttctactcggcccacctatgtttatatatttttttgttttgttttgttttatttttttgagatggagtctcactctgttgcccacgctggagtgcagtggcgtgatctcggctcactgcaacctctgcctcccgggttcaagtgattctcctgcctcagccttccacgtagctgggactacaagtgggcaccaccacgcttggctaatttttgtatttttagtggagatgggagttcaccatgttggccaggctggtctcgaactcctgaacttaggtgatccgcccacctcagcctcccaaagtgctgggattacaggcatgaaccactgcacccggctgattactcctagttttaataaaaatgcctttctcacttcagtaaaccagtggaatactggtcataaaaatccatttatgggccaggcacagtggttcatgcctgtaccaaaaaa

SEQ ID NO: 39514 - DNA, 1221 bp, Homo sapiens
cccgccttggcctcccaaaatattgggattataggcatgagccactgcgcctggcctaaaaatacatttgctgagtgcctactgtgcgctagatgctggggatgcaaccatgaaaacacagccaaggtctcaggcctcatggagcttacagtccagtgggagatgaattataagaagctaacacacagatgcatgtcacccactgcagtatgagtgctcaaaggataaatgtaggtcaggtggggagggcaggtaggagagtgcaagatgagaggatttgatctcatcaggggaagtttctctgaggcagtgaaacttgagcctcctccgtaaggaatagtggaccaagaagtgaaggacgacacacacatatctagccggggggagcagcatgtacaaaggcctgggggtgggctgaggctggggacagggcagggtcaggccacccagtgccatgcaggctaccgccaagagtttgctttcaccggagagtgaagggaagacgttggagggcttccacctgggagtatcccctgttttggccactatatggactggggggctgggcctgtgaggttccagatgtcaactgagtaggacaggaagacacttcaggaatccgaagggatttgggaagtgaccaaggttttctcttcccatctgttgctactatctacctgaagtcttgagtttcacaattttcatgcagtttcttcttggttgtgcaactcttgacagtttctaactttgggtttggcatctcggccagagtcatttccttcctggagctgggctctcattgagtggaaaatttggggctgctatgtaaaatgaaacagaagagaatgaacccttcctctccggaaggggccgggctgtgccaggtccagacagggcttgtgtgtctgctctcttggaaggctgccctgcctccgcccctttccagctgctagggcacaacagaacatgcctacatccagaccctgcccactgcagacttgccactggaggcgacactgttttgggccaaaaccacaggccaggggtcagagcacctgggttctagtaatagcttgtgtttagcacctgatatgtgccaggtaagcatcttttctcacaactcttattatccctattttatagaagaggaaactgaggctcagagattaagtaatttcccaaggccacatagcccatagtgatgaggccaacatgggaatt

SEQ ID NO: 39515 - DNA, 6111 bp, Homo sapiens
aggccgaggccggcggatcacaaggtcaggagatcgagaccatcctggctaacatggtgataccccgtctctactaaaaataaaaaaaaattagctgggcgtggtggcgggtgcctgtagtcccagctactcaagaggctgaggcaggagaattgcttgaacccgggaggcggagcttgcagtgagccgagatcgcgccactgcactccagcctgggcaacagagcgagaatctgtctcaaaaaaaaaaaaatccactggctagaaccagtcgtgacgcccagcctaattgctaaggaggcaggagtatgagacagagcagatggttatttggtaagtactctctcagctacaggttacctcagttccagggcgcttacagtaaggttctgcctaactgtggcctacaaggccctgcatggtctacctttgcccggctcttcaacctcacctctaccactttccccctcagtcattcccctcagccactacggtcatccttcacttgcggggatatgccaagtgtttgctgcctaaggacctttgcacacgtgttccctctccttggaatgctgtctctccccagcttccctacattcttccatgctagtccttttcatcctctgggtgtctgcatatgtggccccttctcatggcagcttttcctggccagcctatggaagtaggtccatcaggcacccctccctcgagtttgttttcagcatagagcacctcccagtttataattagatgtcttttatttaactagcttaatgtcagtattacggcagttttgataaaggattccccattccctaacacaaaatgaatgaatgaatgaatgagaaagaatgagtcatttcagcagcaggtggagtacaagttcagtggagaaccagggatcgcacaattaggaaggcaggctgtgctctcaggtttgcctcatttcaggtctagcttgagttgggagtgtgtgtgtgtgtgtgtgtgtgtgtgtgtgtgtgtgttgtgtgttgtgtgtgactgtgtatggcctggagggccaaacccagggattaggagggaaaggaaaagagagggcgcggaaagctgtgtttgtccctgatagagccagctggcacgagggtgctttagttatagctgaatcacttttgtttgttctggaagggatctattctggccacatgagtcagcctaagaacaaattactgtgtagtttgacgggcgtgaagggttggggggaatttccagagtgtgctcacccaggaaagaccttgttgccagctctgagtcccctctgctccaacagctcctggatttgccaccgtgtgaaatgttctcaggcagctagtgtgacggcccaggccccgtcagccaaaggcccagcacccataaacatcctttagtcctttctcctgaaggaactgggccataaacaagcacataataaataaatctgcattctaggcttcgctttcttcagatataagacaactaccttatacttggtagcaattatcccccagagctgttacctgaattaaataggccacagatatgggcaagaacttaggaaaaaaagcctgacctagagttagagtggtcattataataacagtagtaggaggccaaggcggacggatcacctgaggtcaggagttcgagaccagcctggccaatatggcaaaaccccgtctctactaaaaatacaaaaattagccgggcgtgatggtgtctgcctgtaatcccagctactcgggagggtgaggtaggacaatcgcttgaacccaggaggcagaagttgtaatgagcagagatcgtgccactgtactccagcctgggcaacagagcgagactatagcaaatgatggtagcttagatctgctgggtgttaatttttttatcctcatggctggtctcgggtcgggggtccacttccacatctcatttgtcggatgaggaagccaaggcttaggaggatccccctgctggtgagcctgactgcaggacacactccagactgcgggagttcatttgccttccgtggcatcagtgattcatgctcattaggaagagcacaggcattccgaaaacaaatcagagagaaaaagaaatcatgcctggcaaccagctctggtgaaccatgacaggggcacagagaagcgcttctgcccctcccccatttcctccttgtatctgggactcagccctcatcactgtgggttctcagcctcagcaaggcagctttcacggatatccagattccaggctgggtgcagtggctcacacctgtaatcccagaactttgggaggccaaggcaggtagattgcttgagcccaggagtttgagatcagcttgcgcaatatggcaaaaccctgtctctaccaaaaaaaaacaaaaacaaaaacaaaaacaaaattagcctggcgtggtggcgtgctcctgtggtctcagctacttgggaggctgaggtgggaggattgcttgaacttgggaggtagaggctgcagtgagctatggttgcaccagtgcactctagcctgggtcacagagcaagactctgcctcaaaaacaaaaacaaaaaatccagactctgtctgagaactgccgtgtcaaccttctggtgcctgtggccacctaagctatagattagctgttccttccgtcacctgcgtccccttcctatccctgggggtcccagcagggagaaccctgggctgcccacctccagtgtgtgactgaggctggctgccaatggcgtgggcacaggcccccacctcccctgctgctgggctcctatgttactttgctctcatggccactgtacctctcgggactgtgcaccaagttgctgcccacctagaatcggtttccattagagtgtttaaaatgttaaaaatagccttccaccctaaatgcttccttcggaggcccgagttgggaatcagaggttcttttctatctgcacctttctggcagaactgaaggagggtggctgtttgcacagtgttgtgggcccctgccctgggccagccacttcacatttgtcatcatggagccctgggacggccctgggaggtgtggggttattattctgattccacaggagaggcgcatgaagctcagagggttaggaggtctgtgcctgggcgtgaagctggaatcgcagagcttgggtctggctcaagccagagccgacgcttccccacgcttactcttgtgatcctagttctactctttgatcacagtctgtgtttttggatctcatgatcctgcagaatcaactttatgtgtggaattctcttgagaatttaatcctgggaggaaagagtgctgtcttggaagcctgaggctgcccctgtctatctgtgataagaagtccgtgagcagctcactcctgagccttggccttggcagataggaagctcagtgcgagagttaaagcttgtcacagccctttcttgtaggcatttggcctcctttgcctcatcctgcctttggtgttctatttttatttcactagctctctggtgtgccagcctgaatgagtgggcgttgcgtctttctagctagcagggagcaggtttggagggatgaggacagaggccattttctccatcttcatgtttggacagtgggacaggcatgcatgggcctgcctgtccacccagctcagaccatgccggcagctccagggtggagatgagggcggttcatgtttatacgcaccatttattgcttgcattttaaagacatctaaaaactcaaagcttgagaagatgggggtttcacaggaaaccagaacttcttgttggggctgacatggggctctgttggcttacatccgtggctggtgtgacctggtgcctcttgtgtgggagggtggatgttagccccaagtgtgctgacaggtctggtcacaggtagccctgccgacaccgcccctccccatctgttcctcactcctgctcacttccaaatgccctgtggtgccaggtggggccaccgcatgtcactgcagaaggaacaagaaaaagaaagagaaaagctggactctctttaggatgaaaacataatgacattttttatcttccccacgggtggagcccacagaggtcggccacaaatgggttggtggccttgatgttcctgccaaatgtgttttgacagagaggcaaagatttgtgctgaacaaaacattaccctgaataggacactggactgggagcagtggctcaggcctgtaatcccagcactttgggaggacaaggtgggaggatcactggggcctaggagtttgagcccaggctgggcaacatagtgagatgctgtctctacacaaaattaaaaattagctgggcgtggtgttgcctgtaatcccagcggcatgggaggctaagagaggaggatagcttgagctcaggagtttgaggctgcagtgagctgtgatcacaccactgcatagcctgggtgacagagcaacaccctgtctcaaaaaaaaaaaaaaggaacaggacactgaagttaagtaaggctgtaagtatcaccctcatccccgttttactgtgatgagaacaatgaggctcagccaggcaggcctccgacaaggagaaggtgcctcatttgctgggatcatgggcggttctgggtgtaggtgagacctttagggagcattttatactgttgcgggcctggcctctgcaggaggtcactgttgggaagtgacttcagcgagcccagccggccctgagccaggggagccactgctgcccttttgacacagatgtcacaaggatgacaagcctttccaggagcataagccccacttgaggcagtttgaggagggagggtggagggagagaggcagtctctccctgccagagaggggaggctgggaaagatgaggactgggagtggcggggggtagccttccaagggagcacaggcagagctttcacttctgtgcaccctgggagcgacagctctgttccagacccgtgcttgaatcagcactcaccccgacattgttcattgtcattctgtacaagggactggttttctgttgttgttgttttttgagacagagtcttgctctattgcccaggctggagtgcagtggcacaatcttagcacactgcagcctccgcctcccaggttcaagcgattctcctgcttcagcctcctgagtagctgggactacaggtgtgcaccaccacgcctggctaatttttgtatttttagtagagacggggtttcgccatgttggccaggctggtccagaactcctgaccacaggtgatctgccctccttggcctcccaaagtgctgggattataggtgtgaaccactgtgcccggcctagggactgtttattctcctcctgggcctgtggaaggcagtgggatgccatgaggcagacagtgatcctgtgattcctgcaggcaaggcccttgttggagagaaactggcttctagactccgagtttcagccacaaaggccttggcctgatggcaatcaggatgggggggtgtggcctatagaaccactgaagtgcccgtggagcccaggttgggagagaagtgcatgttctctgggtgcccttacgtcagtggttctgggaggagaccccgccttcctgcctcagtgctgcctgcctccctgtttcccttgggcaggtcttgttccccgctgagcctcagcttcctgacttgagatctccagggttgtggggagggtgcttgaattgaacgtatcaatacacaacgtggacattcgttggtgaaaaacagaagtgaggtggatctgaatctcatgaagggctgattcatcgtctgctcactggagccagaggggtccccagggcaaacgctactcacactagcttggaagactcagttctcgtcattactttagctagcttgctaactgattttttttaaaagaagtatactttactgtgtaaataatgcataatgattttgttgaaaaattctatgatatgaataaatcacaaagaaaaaaaccccacaatataaaacaggccaggcgcggtggctcatgtctgtaatcccagcactttgggaggccgaggcaggttgatcacttgaggt

SEQ ID NO: 39516 - DNA, 2163 bp, Homo sapiens
tgaggagggcggatcatgacgtcaggagatcgagaccatcctggctaacacagtgaaaccctgtctctactaaaaatagaaaaaattagccgggcgtgctggtgggcgcctgtagtcccagctacacgggaggctgaggcaggagaatggcgtgagcccgagaatcggagcttgcagtgagccaagatcacaccactgcactccagcctgggcgacagagcgagactccgtctcaaaaaacaaaacaaaacaaaacaaaacgaaaatttatttaaaatgtcagtgacagtaaagaaaacacaaggacgaagccactcatcaccccccgacattcagccttgttgttatttttgtgcattcccgatgtctccccaactcctcccaccctggggaagtcagtgatcacccctttgttcctgtttgtctggggattggggcgtctgcccctgggggaattggggctggtggtggcagtgatggcagtggtgtttcaatagttctgccctagctgggtgggagacagtgaaaccagtcccaggtttgactgttgttggctgttttacttgacacaagtcatttcacttatctgagcctcaatatactcaaaaataaaatgcagataaacctatgaactaccagagattgttgtgaaaattaaataaatatgcacggtgccataccagtgtggtgctatgcaaatttaggtcctattattttagttcaaaagcttgggtttgaaaagtgaggtcccagggtaacaattggttttgtttagagaggcacagttgaccagttcaaagaaatgttgctggagatgttttgtcccagccctacctgggacatctgttgtgacatcccctgtgtcatgctttatgtcatgctctgtgtgacatcaagcgagtcagcagcccttcctgggacttcagtgccccagtttttgtcattctcaaacatgagtctatcccaaaccaccagagaatgagggacttgaatgcagggctatagcatcaggttttatctgggaggcaatggggagacagaaagattcaggctaaggagtgtggacattatctaggcaatggggagccccataaaggcttcaagcagggaagtgacgaggccagatgtatactttggtaagaagtagcctggcaagggtgtggaggctgcctgagctggcggcagggcccagccagaagggataagatcagggcccagtggaggaggggagaggaagctgtttcacagagcagctctgagaagctggctggaagctgaggttgacacaccctcgaagcacctttggggtttcccaagttgatgtaaaaaggaaatgattaccctcgagaaggcaggggagttcttcggccagtcctgcgtgcctttggcatgtgatcttagcaagtcatttaacctgctcaggcctcagtttcctcatctctgaacagggatgagaagcagagatgttgtgaggattcatgtctgtgcagctgggcctgggcctggtacagcccgtcctcagtggccatggctgctgttttaggattctcatccatcaagtgggaaggatgcgtttgtctccactgcgtgaaagggaggttgtaggacagccagaactttgatccctaggggctggagtgggagcttagagggatggtgtctttgacccgctcacgtgttcagggaaatgtgcagtctacagcgcccattcccatctctactctcctttcccacatgacaccccagcgggaggcaaacggacgccattatcacctccgttttataggtgagggaagggagaccgagaggaggaaggtgacttgttggaggtcacacagctggttgggtggaagcaggtgtatgtgacttagcacgtcagagctccaccttcaccaggactgccatgttcagccactgctctttttttttttttttttttttgagacagagtcttgctctgtcgctcaggctggagtgtagtggtgcgatcttggctcactgcaagctccgcctccccggttcaagtgattctcctgcctcagcctcccaagtagctgagactacagccgtgtgccaccatgcccaactaatttttgtatttttagtagagatggggtttcaccatgttggccaggctggtctcgaactcctgacctcaggcag

SEQ ID NO: 39517 - DNA, 6342 bp, Homo sapiens
gaccatttctctgtccattctccataggccccggccctcgcagccatgcagtggggaattgaggggtgcttcctgcccaccactttcctcccctccatcagtcacagtctgctgaagcccagagagggagagcagcttgcttaaggtcacacaaataggaagtaatgtctgagctgtgtgatttgaacactcacatccctaagcatcatactcactgctatcccaaatccttttggaccacttcagatttgtctccgtcgcctgtgcccaggcaagggctcagggacagtttccaaatgacagaatggctcagccagcagatgacctccctaggggagctgctgctcagcccaatctccattctcaccgcctcacccctggagccctgcctcacctcctgtctcctgcggcctcctgagtggtgagccagagaccccaaatccatgtaatctcagttcactgttgccgtttctgaagccaggggcggcatcagctgaaaggaacatgttttgtgggcttttgtattagacagactcatatttgaatcctagtgctgctgttttgtagaatgacttagcgtttgtacctcagtttactcatttgtaaaatgaggagaataatagaccctatttcatcacgttgtggtaagaaatcctgcacctgagtgttgcaccatggaggtgctcattaaatgttatctgatattatgaacattccagacactccagataggttgaatctagaaagttaattctaggccaaggagtctggattatttcctgtagctaaatatatgtatttttaagtgtagacttttgatcagcaatgaaagataaggggaaatggtcctgaccaaagggaaaattataacaaaatagggaaattgtaggggcgtgctggtcaggatggaagaggtaataggcatagcagttccttctggtattctttatctaggttactgtaaagataaacatcacagccagccgggcgtggtagctcatgcctgtaatcctagcactttgggaggctgaggcgggtggatcacgaggtcaggagatcaataccatcctggctaacacggtgaaaccctgtctctattaaaaatacaaaaaattggccgggcgtggtggcgggtacatgtagtcccagctacgcgagaggctgaggcaggagaatcactcaaacccaggaggcggaggttgcagtgagctgagatcgtgccactgcattccagcctgggtgacagagtgagactctgtctcaacataaaaataaaagtaaaataaacatcacatgtctctgtcagcctttgctgtttactttctttcctttttttttttttttttttttgagataggccttgctctgttgcccaggctaggtgacggtggcacggtcatagctcactgcagcctcaacttccctggctgaagcaatcctcccacttcagcctctcaagtagctgggactacaggtgtacatcactacggccggctaattttttatttttgtaaagatgggatctcattatgttgcccaggctggtctcgaactcctgggatcaagcgattctcccaccttggcctcccaaagtgttgggattacaggcatgagccactgcacagagccctatttacttactttctttttttggcagtgggatggaatctctgtcacccaggctagagtgcagtggcacaatctcggctcattgcaacctttgcctcccgggttcaagcgatcctgctgcctcagcctcctgagtagctgggactataggcacgcaccaccacgtctgactgatttttgtattttttgtaaagatggggtttcgctgtgttgcacaggctggtcttgaactcctgggctcaagcaatccacctgccttggcctcccaaagtgctgggattacaggcgtgagccactgcacccagcccctatttgctttcttgatggcacttggagcaaatgtgcccaggcaggtcaagatgataactacaatttgcaggcagagacaggaagttgattgtctatctttgcctaaattgaaaataagaaatcattcatttcatcaaaccacccaaagcttgtcttctttcgggaaaaccccaaggttccactgagccccagagttcaaactcatcaattatcttaaaggattttggtaggagtgaagtatactgagcccacatcttgatccctgtgataccctggctcccccttgcagtaggtgggaaggaagtgggaagagacatggaggaggaaaatatgtttgtttgttttgttttttgagacagagtctcgctctatcactaggctggagtgcagtggcgcgatctcggctcactgcagcctctgcctcctgggttcaagtgatcctcctgcctcagcctcccgagtagctggcactacaggtgcgcgccaccacgcccagctaattttttgtatttttagtagagacggggtttcaccatgttgaccaggatggtcttgatctcttgaccacctgcctcggcctctcaaagtgctgggattacaggcatgagccaccgcgcctggctgaggaggaaaatatgtgagcagaggagccatggataggctatgagcacctcggcaaagcagtctcgaagctagaattcagatgaaagggttttgagcagctgaaataactgttacaaagccttagctgtaggagaggccactgggctatcagtcagaatctgtttacttactctacacatagtttcaccagccttggtaaaataccaagtactgcatgtgtcacagcctgacctttgtgctctataaacatcagctctttttacctggacaagaaacagaccattattgctctttttacatttgagaaagctcagataagtgaggcacagctcatctgaggtcagatcttgagtagtgctggagccagcgcttgagccaaattctgtttgatactaataaaggagatggggcagctgggggtagacccgctgccagcatcagggcaggacatagaagaccccatgtcagatacagtgccgctgcttctgcaattcttgtacctgcaatgacacagctcggcaggaccagaggtggtgcattttgcttgagaaagcaggcatattagcctcagtagaatagcaacaaaaaggccaaggcagtcggatcacctcaggtcaggagttcgagaccagcctggtcaacatggtgaaacctcatctctactaaaaatataaaaattagctaggcatggtctcaggcgcctgtaatcccagctacttgggaggctgaggcaggagaattgcttgaacctgggaggcggaggttgcagtgagccgagatcacgccactgcactccagcttgggtgacagagaaagactctgtttcaaaaacaaaaacaaacaaaacagagcaaaaaagaaaagcaagaaaaagaaagcttctggaagcatttccataggaaatggtttgttttttagctaagtcctggcacttgatctgacctctgattagctgtgcctcactcttggaaacaagattatgtagaagccccaagccccatctatcactatcacccaacaagtatcccatcttgttcatctactctcctgccccatctccctcccctcccttagccattattttaaaacatttttatatgaaaaaattacaaacatacaaaagccaagagcataatgaccctccatgtccccatcagctggcttcagtaatgatccacccatggccaacttctgattagtttgtatggaatccagggagattttcatatccttgatagctggagaattccttctcattctcctctctctgcccttggacatacagtgggggcctttaaagattatggttgtgagtttctcctaccacagataactaccctaggcacgaggagccaatccgattagaccccagaggaggggagggctgggtagggagagatggagagtaatggctggtgggtcctgtctgattttccagaccagagtccatttcttttccccaagaccacagggataaataaacccaactaatagccctcatgtgtcgcaggagcaggcctcagggattcccccaaactgagaggcctgggggagcctcctgagcaaaccccaggcattaagtcagataggaaactcatgacttgtgtgaggcaagctctgacctcagatttactgggcacagaaggaccctgtgtgcagagacagccctgccctgtggccaggcctggcagcaggatggaactcaagttagtctggagcagcggttcccagtgtggggcccacacctgcagtggtacacagaacctgggtgttagcacaaatatagatcatgtgtagaagaactagggacttcatggatattactgtttaacacaaggctgaatacataacactggaattaaagttggttgaaagaaaaccgtcaggtgactcatagtgaggtggcacagacatggccaaaaacttggagaccggatgaacataactgcagtctgagggatgcgggccaagggtactgagctgaggccaagagaaggcagggcaagggtggaagtggccatcacagagcagcctttctgcaggacgggggccctgtgctggccagcagaggcctccattagtccaggtccttggtgagaggcagataccaagacaggataggatttcatcaacaagataggatttcattaggacaaatacttgcaagaaaatgcagagggagctgggcaaggctgggagagccttgggaccatggtgcgccatttccgaggaaggctgggtgggcacttgctggcctgccttcggtctaaggcagactctccagggtgtccgttggccatcacagtcctatctgcctagtgtaccctctgcacacagtgcctggggaacagcccctgggaagcatggtccggatgcagatgcagggattgattggagccagccacagccaggcccgcagatagccaggctcccagcagctgggggtctccagctcgcattctcctggctgctagattcacacagcagcagggcaaagatcccaggaatgaggctgagggcagccccttgacaggctccagaccttgtctcaggtgatttcatgttatcagctatctgtgtgggttaattgtttagccaggctgattttactttcagtctcgtgaaataaaattttttgttttttgttttttgagactgagtctcgctctgttgcccaggttggagtgcagtggtatgatcttggctcactgcaacctctgcctcccaggtttaagcgattcttgtgcctcagcctcctgagtagctgggcctacaggcatgtgccaccatgcccggctaatttttgtatttttagtagagacagggtttcaccatgttgaccagactggtctcgaactcctgacctcaggtgatccacctgcctcagcctcccaaagcgctgggattacaggtgtgagccactgtgctggccaaaacaaattttttttttttgatacagtctcgctctgtcccccaggctggagtgcagtggcacagctcagctcacggcaacctttgcctccctggttcaagcaattctcctgccttagcctcccaagtagctgggattacaggcactcgccatcatgccaggctaatttttgtatttttgtagagatggggttttaccatgttggccaggctggtcttaaactctttttgtttgtttttttgtttgtttgttttgaagtggagtctcactctgtcacccaggctggagtgcagtggcacaatcttggctcatggtcttaaactcttaacctcaggtgatccacctgcctcggcctcccaaagtgctgggattacaagcctgagccactgtgcccaggccaaaataaattttttaatagccaaagttccagatgagtcattcctttcctgatgttgtaagccacaaatacctgaagcaggtagatttatccagtaatcttggggtcaagtccagtttcctttggaagggtcaggtccccagttactcagaagctgtccttgccatggggcttcctaggtatttccagatgatgatgtttgaagcctctggcctttggccaaggcctgcttctgtgcggaccagccaccatggctcacctcacccacggtctgtgcctgcgcccaccgaggagcccccctaccagatggcctcattagtcttcagattaatcttcacatggggcctagtgaagaaatttcaccctctttaacctcacgtttaagtgaccctaaactacttgtcaaacattccgtcttgtgaatcttgttcactcactaagggattggggc

SEQ ID NO: 39518 - DNA, 2225 bp, Homo sapiens
ctcagtgtttgctcctgggggttagatgactagatcaaatgattttttttgagacagtgtaccactctgttgcccaggctggagtgcacctctgcttccgggttcaagcaattctcctgcctcagcctcctgagtagctgggactacaggcgcacaccaccacggctggttaatttttgtatttttagtagagatggagtttcggcatgctggccaggctggtcttgaactcctgacctcaggtgatctgcccatctcggcctcccaaagtgctgggattacaggcgtgagccactgtgcccggccaagagggaatttttttttctttctttttttacatgatctgggcaggtttagtcacaaaggatgctggccacttagacctgagtcagccaggccagagctgggggttggaacagttgtggaagagactgagtctgcacagcctgtaggcgtggcaagctgaggctgatcagggttggcatctgtggggatcagggaggctgcactttggccacattcctggggcagcaagactaagtctgaactccatctccatttgctggagggagtgtgctcctgatgccctctcttccccagtcagggctggctcagaagctccatgctgagggtctttagagacctcaacttgcaggaggtgaggttgctatattgtctccccaaagggtctccatggcaacttgttgttatccagctcaaaatgagaaggttccctctcctttcatttccacagctctaatgtcttgctggaccaaaatctcacccccaaacttgctcacccaatggctcatctgtgtcctgtcaacaaaaggtcaaaatacaccatgatgaagactcacctgctccggacgtcagccgcgtatctgccagaggatttcatccgggtggggcagctgacaaagcgagtggacatcttcagctgtggaatagtaagagtgtcctgctctgcgtagagtggggcccaccttgatttgtccttcccacggctcctttgtaatcacaggatacggtagaggcacacagacaggttccatcaaagtacaacaggggctgacaaactgtggcccacaggccactttggcctgtggcgtattttgtatggtctgtgagctaagggtagttttacatttataaaggattatatttttaaacacaaagaatatgtgatagagactgaacatgctccccaaaagctcacatatttactgtgtggcgtgttacagaagaaatttgccagcccttgaaggaaaaccactcatgagtgtccaggttctagtaggctccagatatcctctcctgacttccgtaattcccatccagccatccacttgtccatccagttgtctatttgtccttatttgttcatcgctgtccgatcatccatctaccctttagctgcccatccattcagcgaccactgacccacccagcatcccaccctaccaccaccaccatccttgtctgccattatgtcgtgccaggcactaggaatatgaatgtaacaaaaacacagtccctcccctcaggagctcatggtctgcatgtagcagtctccaaagtatatttctgtagaactccagttccttcggacctctaggattgatgtgttaaaagggtttgtgccctgacaggcttggaaatattgcattaggcaaagtcaagcaggtttctttaccacaagattaattcaagctggttgaatggtagtgagcctttaatctggtacttgtgaattcaccagagaggggtatgcagtgtttcccaagctcatttgactatggaaccttgtgttctcagaatatctgtccttgtcagtgttccatggaacccagtctgggaaatgctggctgagaagagtaacagtcaggttggcttcagccaagtgcatacagctgccccttgggcctcaccctcttttcttctctagccttgaactctgtacttcctctctctgaccacagtctcctgtctgtctacctctgctaccagaaccgtggccctgagtcacctctgccctcagccagaaccccagattctgcacctccgtgtctcccagctggttcctctgcctccctcagccccactgcaagttgttcagtgaagctcagcagggctagtccaggctccttctcctttaagaaccagggggatgggcagggagtggtggcacatgcctaaaatctcagtactttgggaggccgatg

SEQ ID NO: 39519 - DNA, 913 bp, Homo sapiens
gacttcctcatccatccattcaccctcccacctatccatctattcatccacccatgcacccaccctcccacccacatacccatccatccatccatccatccatccatccatccatccatccatccatccatctaccacccatccatccattcattcattgaatgcctcctggctcctgccacccttttgctcagccctgcctctggttgactgataacgcttttgaactttgattcctcctgtggggatcacagtgcattgctcagtgttttttggtgagtgctcagtgacctctataaaggacttggctcagagcctgctctgtgaaaggggcacaggaagtctttgtttattcatttccccttgttctgtcccttcctggcagggacctgtcaggagtcccttttcaattggctcctgtcccacttgcagcagtgatgccctctgctgcccttttctggtcactgccagtctgttattaatcctgggtggtttaaaacctttatcctttccttcctccaggcttggagggattcttggctataaatgtgaccctattctgacttgctttgagagatgctgtgggagagaggttccacactaagtgtggggtcttcacacctttaatattcacaactgctagtccccatttaacagatgaggacactgaggctcaggttttagttacttgcctaaagatcacctgagcatataaggaacagagtcagaatttgaactcaggcctgactgtagagcccttagccatcatagcattgtctctactgagaaaccctgttcaaagcagtttcctgtttatgaagacatatatcatggtttgccaattttgtggtgacttacacgtatacagggttgtgctccttctgcgagtggatgcgctaatgaataaataatg

SEQ ID NO: 39520 - DNA, 1481 bp, Homo sapiens
gtgataatgctcagtacacggtttgctttggctcgatgagaaatccaggtctgaaagcttcaggtacagcggccggcgctgaggaaaacagcgttaagtgaggcgcgtcagcggacaccacctgcctgcacatctggctggcctcaacttcccgctgttcgagcccacgtgagtggctccgccccatctggcttctgaccaatggacgagcttcctaaggcgtaccgtcccgactccaaggcgcctggctttgaggcgggctgcgtcttgctcggagtcccgccccttgccgggtcgagcaatgggcgccttccgtttggcgcaggccccgcccctgtcgctctccggcctgcgggccgcagggctcgttccggagggcgggcgccacggaggccggagtggtcgcagttcgggcggaggccgggccaggcggggctgtagggctggggcaggcggcgggctgcccggcgggacagctgcggcagccggcggggggcgtcctgagttggcggtcgagggcgctgccagctcccgaggggccgctcgggccccttccggcccgggtctggttgggccgcaggagcagggcgggctgcggcgcccgggtctggccctggcctacgggctaagcgcccggccccggggccgcggatccggcagccatgtgtggatcttgaagcgccatgtggtcttctgaagcgcttgacagttctaaagggctttatattgcaaactgatcaaagcgcttcgtagccccggaagcgcttaggcatctccgaagtagcgctgggcaaagtgaaggcttcctgatctcagaagcacgttgtgggcttggaaaccgacggcagcctttagtcaattttggatcgctttgacttctccaacacggtttggcatctctgaaaccttgagaactgtgatgggcagtggaaagaagagggaaaggtcagtgaggctagcccctggctctgcccttatgtcttgccgtcctcctgggcccggggtggcgggaatctgaggtggggtcgccaggaagggtggtgttggaatccaggccccctgtaccttgcaggtgcccatggcgtccgagcggggcaaggtcaagcacaactggagcagcacgtcggaagggtgtccccgcaagcgcagctgcctccgggagccctgtgatgtggccccctccagccggccagctcagaggtctgcgtcgcgttctggagggcccagcagccccaagcgcctgaaagcccagaaggaggacgatgtggcttgctcgcggaggttatcctggggctcatcccgccgcagaaataactcctcctcctccttctccccacatttcttgggccctggtgtgggcggggccgcctccaaaggctgcctgattcggaacactcgggggttcctgtcttcagggggatcccctctgcgtcctgccaacgcctctttggaagaaatggcttctctagaggaggaagcct

SEQ ID NO: 39521 - DNA, 993 bp, Homo sapiens
ttgacatttcttgtaatggcagctctgctggtgattaattctttcagcttttatttgaaagagtctgtattaaaatatatatatattttcactaggtatagaatttgaggctgacaggtttttttttttttaattttttcagtactttaaagatgttaattttcttatggtttgcctactttctgatgagaagttggctgctgctcctttttttttttttttttttttgagacagagtcttgctctgtcgcccaggctggggtgcagtggcgtgatttcggctcactgcaacctccacctcccgggttcaagcaattctcctgcctcagcctcccgagtagctgggattacaggcacctaccaccatgtctggctaattttagtagggatggggtttcaccatcttggtcaggctgatctcggacttctgacctcgtgatccacccgcctcagccttccaaagtgttgggattataggcgtgagccacggcgcctggcctgctgccactcttatatttgttcttctggatggaatgtctcttttttttctggttgctgggaacatgggctattcccacccctatgtgagctccagctgcttggtctattggtttcacccttcatatatgaaggttagtacttgtccaaagactccaggagactcttcagctctcaggagcttgctctgtgcagcttcctcctctcgtcctcttctgccttcagttctgccttggtcttttttgtttgtttgtttgttttttgagacagagccttgctctttcgcccagggcagagtgcagtggtgtaatctttgctcactgcaacctccgcctccctggttcaagcaattctcctgcctcagcctcccgagtagttgggattacaggggtgcaacaccacgcccggctaatttttgtatttttagtagagacagggtttcaccatgttggccaggctggtctcgaactcttgatctcaggtgatctgcccgcc

SEQ ID NO: 39522 - DNA, 1238 bp, Homo sapiens
ttaacacctgcactcaaaataattcacctctttgagatcagataatgagttaaaaattcatttaggatgagctgaatgtcagagcataaaagcctcaactctaacctgcagtggaagagccagaggtgagtgatttacacctaaccctctgcagaacaagaacacagtgttctgatttctaggttcctgcaggttccctcaaacctgctgctgagacacacccatgtttctaaaagaatgcatgtactagatattccaggctcagcccagatacttccattctttagttctccttcagtcattcattcactcaaggagtaagtgtggagtgaatgtacactgcagatgccacagagacttaaaaaaccctgagcccctgccttcggagggtcgttcaggccatctttacgtttcccgaggtgcccatcctacctgggggccctaccccgagcaacagttcaatcatctctgctgggagctgcagtaggcggcagaaaggaatggttaggagggttcaaatctcggctctactaccacttaagcagctgtgcaagaggctccacgtctccgaacctcaagtgtcctcatctgtaaagtgttgagaagaatagcaccttcttcacaaggctgttagcaggcggagattacgaacaatgctgagggctcggtatacagtagctcctctgctgttcctcgttttgttttcaattgttgaccgaaaagaaggaagggagactggcaggagacgcaggagcggcgcgccccgcaaagtcagggaggttcctcggcctcacctctggactcccctcggaatggtccgcaaggacggggccagagccccccaaatctctaagcggtggaggggagctgaacggctccagcttgggatttgggactcaggacggccgaggaacccgtgaaggccgcgaccgtggccttcaccctgctaggcctcctcagtaccaacactcaccatgattgcggcggtggctgctccaggtctcggacgtggcagctcccggcggcgcctcggaacagctcacttccggcgccgggcccgacgggccgtggcgtaggagcctccgggcagcaacgcgctcggctcgcacagcagttccgcgccttccagagggcgcgccccgccctcccgtggcccagcccctatcctccagtgacgtgcgagaccagagggctggggctctggttgccgcagttaccctgacccggagggctttgga

SEQ ID NO: 39523 - DNA, 571 bp, Homo sapiens
gcctcccagctggttgactttgatctcctcagtaacactggggcagggggtgaggggtatgctgggctcaagagggttaaatggtggtcccaggatgagctaagcaataggtgaggatgaaggatttcctgtgtctctctgacttcaaggtctgggcctgacccactgtgccaagttcactggcagagtcctggggttgtgcccctctgccaggcctcggggcatctctgcctcagcttcctccagcgtggtgagatttccaggggacaggaccccacttcccagcccccaagagagtcagcaagccccagcacagagcagtgacctttgattccaggccactggacctgtccctcagttcccccacccccatgtctcgtaacctgagacagggacatgcaggttgctatggcgacagcacatcggatactgacctgggacccactgacagcacgggggacaacaggccttgcctcagagcgatggctggaggggtggagaacggggggcctggggggccctgcggcagccctggttgttctctgggccaggccaggcacaagctgctatt

SEQ ID NO: 39524 - DNA, 628 bp, Homo sapiens
tcaggcctggctggtctcgagctcctggcctcaagtgatctgcccacctcagcatcccaaagtgctgggattacaggtgtgagccaccgcgcccagcaatccacagcattcttatccagaaaatcctacagactgggagctcaggagctgcacccagtaggtgcatgtagctgacctgggcctcctgcaactggcaggggtggagccagggggactggaagatcactttggcctctctgtgactttctccttagtaagaagcctctatctgctcctgttgatatttaaaaatatctgttatttgatttgggggtgaaggaagcagcttttcagctttgtgttgtttgctatgctgttttctcttctaacctttgagcctgttttctgactttgccttctgctcttgtttttgtgtggctgtttttagctgaccttttgcatctgaccttttaatctgagctcagagtccctgcccttgctctgggtctcaggggtgcttggttggggagggggcaacaatgcatcctactgtggcacaccttccacagggaagctctgactccgggcattcacctggagcccgcctgtgttgggcactgcacatgtgctggctccttcattccatttt

SEQ ID NO: 39525 - DNA, 2275 bp, Homo sapiens
gagattaagggagagatggtgaaaggtgctccctccctactctgatcccacgactgctgctaccactgatagctgattttttcatagagattcccttgcatcaggcatggttctaggctccttacatgtaactcatttaatctgcactagaatcccatgaggttggtactagtatttttgcccattttacagacgaggagactgaggcacaggaagttaagtcatttgctcaaggtcacatagctcggaagtgttggggaatcatgcccaggccctcaagctccaggggctgctcttaaccactgccctgtgccttctcctccagttaagatgccacaattctgcatcctgggatttaatctccttggcagaagaaaactctctttgggaagtgcccttggctgccctctgaggcctcaagaacaccacaacacactgctcaaaggacactaactgaccagcacccaatcatgttctattgctaacctgctgtgtgactggagacaagtccctggacctctctgagaatctgtgcagtgtaataagaatgtctcctttacagagtggccttcagccccacatgctgctacctggggtgataatcaccaccctcggcattgggtgggggctacgtacatatctcgaatcatctccacaatggctatggtcatttccccccaagacagaggtcaaaaccctgaggctcagaaaggaacagtaactcactgagggggatacagcttgtcagtggcaaagttggaatttgaaccacagtttcctcaatagcagctggcaggtgcttaagacatgtaaaccacctcttccccaaatgtggagccagtgtggctccaaaccttcaagagtcacctgctgtcttgtagggaggcaggataaagaccaaggacatggtcaattcctgggggccaggcctgttgctgctgaagagtcagtctcaaggacaccctgaacttgtccccgtgggcagttgcattgggacatgggccaggtatgaatcaccctattcccagtttgacgtctggcccaagccacgcctttttcctggagggttgggggaggggctaataccatggacagggtgctgggctttggactctactctgcaaccttggtcaattcctctccggcctcagtctcctcttaggtccaatgcaaaggggcaggagcagaggggctattcaagaggccttggacaagccatcccacatctctgagaccatgttgctcatctgtaaatggatccagtcgcagtggtgagagtaaaggaaacttttgcacacggagcccctagcatcgaaattgctcgctaaacgagagctgtcttggttatgacaggttacccgggggctgtagtgaagcccactgtagacgttcccagggccagggaagctgatgtctccactcagctcagaatttccttcccctgaggtcatggggcagactcaggcctctgagagggcagagaagtgcctagaaacagccctgggtcccagtgccaggtctcgcttaattttattgctactccctgagtgcaggagtggcccaggccacatactcttcaccacactgaccccattttgtagataaggaaactgaggctctggaagctctaaatactgtggtggtgaggctgagtcttggtcctggaagttattcatggcctagcccccaggcagggcacccgcagtcgtataccaccttctacctggggctgcctccgcctcccagcaggagttgtttctggagctgattcatctctgagctcagcaaggagcccgacaaacagcctggtccacaccaaatacttagctaatactggttttattgatttgcattctatgccctcttcaggatgctctgagctcagaaatctgaaattggctgggggtgggatggggagaagggcttcattttaatctgaagtgagtcatgtaagttgataaatttagaagtggcctaaagagctcttaatctgctgccttcagatagttgctaggaagagactggcacccagcaacctttgcatcccaaatccacataacagagtggacactgttggtgcccaccctagtcctccttaccggtctgcagcttccacaccccagctgctgggagctagagctcccggctgccccttctttgcaggcttgccctgggaagaacaggagctcctgcccgggcaattgcacacagcatcccactcagaaggcagccgtggccaataactatctgatatggggtatgaaaggccagcttt

SEQ ID NO: 39526 - DNA, 2511 bp, Homo sapiens
tttgtgggcatgcatatgccctgatgtgaatgggactagggtgtgaaggtggctaaataatggtggccatcagcatctttcctggacccccaaccccccacaggactccccagagctgcagccccttctttgccactgctccttcaacgaagttaacaggcggaggcccccaaggcctgcgctccaagccccctcctactgcacacgtcaaaggagaatttctccggatggcgcccgctgatcctggaaataccccaaacgtcagctctgcctcctcccagcgattcggagagcaatgcaggagaggagggagccccttccacgctgggctcagggcatgcagcgtcgcactaagaccctctgccggctggtcgggcttgcctgctcacttacccttctgaaggtcgagccaggctgggcctctgcatggagggcccgagacccccagggcccttgcctgattggggcaggccagtccagagcacccccccaacccccaacccccaacctgggtgagcagaggacagccgtggtgtggaatagctacttggctagaaaggggttgctgctgtccgcaacccaccctcagggagtcctgaggccccctgctgcattttcccatcctgaccctgcagggggcagggaggagcctcaggtgccctatccctcagctggagaccactgaggctggcctaggaagtgggcttctgggcagagggtgccgactccaccacccagcatgactgctgcaaaatggcctggccacccgttcctgccaccctcctggccatggaggggacccaggaacacgtccctgccaccacatgacccggctggcctgacccaatgagtcccagcacacagctgcccaccccaccaaagggacgcttcacaggggcctcctcctgcctctttcctgggactctgaccagggtgggcaacgggcaccctccagtcctcttggtctccctgggaccggctcagagagaagagaaccttgtcccctgccaccagcttgctggcccttgcataacatccttagggggcatttgcagtccagaggctgccggaatctacctgagaccctgggcatccgcttgtccgaggcccccctgtcctagtccccagcatccagccgtcccccacaacacgcggaccctcacactagtgtctccctcagcggcggctcccagtgcagcctcggctgctgccagataaacaagccctgctcccaccccccctccacgctgccaccgccaccaccatcagcactgagaaaaatcaaatgaaatgaaacaaaataaaatgggtgagggaggaaggggagagtggagtggggcgctttttattttttattttctcatgctgggggatgccggtacttacttggctatgaaaatcaccaccaatcctgcacggtttcccggcgggcagccccgtaatcgcggtgcggcagctggtgccgcggctgagcccagccagcgtgcccgggcccctctgcagactgtaccatcctgcccgagcgggtggggggcggggggcggaggcgccggcgccggttctaggagagcatctcgccggcaaaatgcaatctcgggggaggcagaggccgcccctgccgctgccggaggctgggggatgggggcgggaggagggagggagggagggacacagggagggccggttctggagggggcacgggggaggagagtggggggcggggggggtgtgtggaccgaaccaccacgctgttgtttgcggttttaattcctcccgtgggatcatgaggaaccgaagctggcagagtcccaggaatatgcccgctccccagaagcaggagggaatgtcaagggcacggagagggtagggctgggctgtgctggagggaagggggtcctgagagtggtggtggggagaacgggagcagagaggggaggattttgctcaaatggccccaagtcgtcccttgctttctgggggacttatttggtcaggggctctggcccccctctttgcagtcaaggcacccccagacctggggggcaaaggggcaaaggtcgcaaatggggagaagtcgactcaacacattttaaacacatctgtgtttccagggccagtggagctgagcccgcagcagctctctgctgccctgaagcgctacccctgcgacccgccctgcctgtgtgcgaccccacctgccctcgggggggtgtggtggtgggggctggcttggcagaagggcctgcctcaagaaggtgcccaccagcaggggtgtctgcatgtctgtacacccacctaatcttcaggacatctatgatgagttgcaggccgactgtgggctgactgacacttccacgggaacccagggaccccgggtgaggagtcggtagggttggaagcccctagccagctgctcacctcttcctgcctaatctctgccagacttgctgctctttcaactccagatgggtgggaggagagccctaagagcaaggttaggaggtcaccggg

SEQ ID NO: 39527 - DNA, 841 bp, Homo sapiens
ttcatgcctctgttctacctctgaccacactgtattgtgatggtctacacgtctgtctccctcactgggctgtgaccacatcagacatgtctccagcattccaggtctcaggtcccagcatgtgttagatggtgcagtaaaggcttgaatgagtctgctggacccttgagaactcctatccaattctcccattttacagttcagcaaaccgaagcctcaagaaaaagatcagggcttgcctaaggtcattcttgagggtggaatctggctgcagacatctgtcccttgccccgtcccctttgccttctcttcctgcagcagatacacctgggtcatctggcctggccttccaggatgtgttggggggcagggggtattggacaggcagaggtgttgtgaaattagacaaacaatggcactagtgttgcaactccaggaaggttggaaatgacaggtcagggtcagccacagggaagagggggaaagaggcaagaggccagctgggaggattactgatagcttctgcctccagcatgatttggcttatggtggacaccgattgagagtcagggttagggaaaggtatgagacataggggagggggacggaaggaggagccagccaatctgatttttactctgtgtttagttggccagaccatgtttttctcccttggggaggggtcctggagctgagacacagggtgagtgaatagggtcagtctgtctaggaatggggacacagaacttggcccaggctgctggaggctctctgcacaagggcaatagaggaggctctctgcacgaaggcaatagaggaggtaggtccaggcaggtctgag

SEQ ID NO: 39528 - DNA, 1178 bp, Homo sapiens
tattttatccccttcagggaaaagcatatctgataacaggtaagtgatcccacctgccctgtgttactgccccggccctctgcccaggcctgcagtaacaattggcttcagagagggacccagtgcccaggatcatattccattttcccagggggagcggaagcaagccctgaatccctggggccttagtccacactctgtgaggctagcagaggagactcaaacatgtagctcaggcagctccctgcccctgctgaataaccttcagtagctacccacggccttcagaacaaaatctggaggctgggtgtgggtttgacaggtctccgcctaccccacacccctgggcttcacctgtttccactgcttctcgccattggttcccagaattggcctcgccctcctgagcactccacctttggctcttctgtcccaggtagactcctgctcatgctcccggaccctcctcttcactaggaagctttcccctccctgcaggggctccctccagcccccacatcaccttgttctcccagtgcactctaatttaatgtctttcacctggattgagagcccctggagggcaggcatggcgccagcttcatttctgtaccctcagcactgtccagcatgggcccgccaccgaatctgacaggggctcagggaacctctcccaactggacaagctccagcaacgtggagttcacagtggactttgacaccatgaaattaggtcacatttttaggtggagtctttgcccccacgtattacctaagtgtattcattcaaccgtgactgagtacgtgatctgtgccagaactgcatgagaaaaataaagccctgtgctcatggaatggagctcgtgttctataagggggtggggggtggggcggcaggcaagaattcaaatggataaacaagatcatttttgatggaggaggaacgtagtacgtggggtggaaggcgattacctggattctggagggcttctttgagaagaagacatttgagataacacagaaccaaggggaaggtgggagaggtagcttgtgctaggctttcccacaggcctttcaattcagagtttcatctgtaccgccttgctgaacagtgcaccatttctgtgcaagaaaccaccaggtggtaggagcacagtattggagagcagaggggctgg

SEQ ID NO: 39529 - DNA, 1141 bp, Homo sapiens
aggggaggggaatccttctcagaactgggggctgggaccctctgggaagccacagtccttgagaaaccagggtttggggatatttgccaaatgcttttctcttcctgtcccaaagaggacttgttgggaccccaggcaggacatgaatggcgtcttgaacccagggccacatctttggggttacagcaaggaaaggctgcaagatttccctgagcagggcatgactgggaggtacagcctcggccagacctccgcccaacacagtctcctgggagcctcttcctggccccagatctccccagcccataccccattcctattctgcaggtccagagggccccgctccaccctcctttctcctcacctcccagctcctccctgaacgctgtgtttggggctcacctctcaacctcatctctttcacccctttaaactgtggcttgtgtcagaatcacctggggagttacaaatacaggagctgggcccctcccgtagactctgggtcagtgagctgagtgggcccaggcacccataaatatttttgacaagttcccaggcaatttcaatgcgggctatccacagcctccctagacgagggctccctcagggactgtgcccagagaccctggccatggtttgcatcgcctctgagccctggaggtgagtcctcattttataaccaaattgtcacccccaccccccagagacaggaacacatgccacacttatgtactctgaccctgaacacctgcatagctgctctgtaaatttgtgtgggttacccgaggtcagtccagttgggagagatgattcattcacaaggtaaaagccaaagttaatcccaacaggcggaagcactgggctggccatagagaaaatggtattcaaggatagataaaagtcaggcatctggactcaaaagaaaattaagtacagatcagctgggaatttgcctggtggtagtttatgcaagaaagatttgagaatttgagaggcacgtttgacagggttaatatgagttaagagtgtgatgcagttgcttaaaataaaaaaagccaaattaaaattaggttgcgttaagagaggtcgagtatgtattccagcacggtaatgatgccctctttgctgggctgaactagcc

SEQ ID NO: 39530 - DNA, 598 bp, Homo sapiens
agcagagttggaatgcaacgggaggtggtggtaaaaggggtggagtggcaggcagaaaaccaggagtccggagaactggttccagttcagctatcgactgctctgtggtttggggccctctctgtgcctcggtttccaaatataccttcaggcagtatgggctaggccattacttctcaaaattccacatgcacacagatcatgtgcggcccttgtcgaagtatagattccagctcagtaggtctagtcctcggcccagtttcagccccgaaatcccacatcccaggaagtctcttagtcctggacaaaccaggatggttggtcaccctagggaggagtctgagagtctttatttatggaatttatggaaagtccccaggtgatgccaatactgcaggtcagaggcctgcactttgagcagaaatgatctagcagtctcaaggtctcttcttgtttggagtctgtgatcctagaatcccagtttgattctagtgcttggggtggatgccctggtgacttactaaatgccccttcttcaaactaggaaactggtggtgaagctcaaaagccacctagtgtggggtgaggtgatgaacat

SEQ ID NO: 39531 - DNA, 725 bp, Homo sapiens
gaaaatttgctctcagacagggacaacgttaaggtgagcagccctccacagtggtgtgatgtctcctgcgccaggcctcctatggccagcggatgcagccaaaccagcaaagtcctttacaaaaccctcaaagtgctgactcaccaaaatgcaagccattaactacccctggacactggaccagtgggatggaattcctcgcttgactgaggatggaaatgcagtgaagacatcttgggatgcagcccacaaaggtattagggtggccttcggttgaaaaaggcaaagtgaagcaatcaccaggctctttccctccatggtgcagatgtggaaaccacctggccaatgtccaccctgtcattacctggtgtgggggtggggaggagggcaggtccatgactagtagagatcctctttggattgcatgtgagggtttgaccaacacaaaggatatcagatttgaagagccaaagctgtaggcccacgtgttagcaccattcagctaatggggacacctgagccttcctgtgatctagataaggagcaaatccttgcgttacctggtgcagatctccatatattctatgagctctaccaccgttagccattctgagcctcttttagagtagtctggagcttgtgggtggcggggcacatgagggttttggtaggagtcagaaccaggtatgaagcttgcctttgctgctctggggaagtgcctctcc

SEQ ID NO: 39532 - DNA, 589 bp, Homo sapiens
acaacgactggctcaggaatgagtctgtgggccaagttagccccatgagaaccagccctaggaatttgccggaaaggctgggaatgaaagagtctttcctcttgagaggataagggtgtttgtctagaactgctgacagccatgctgtcaacacgtggggagaatgaagccaactctcagggaagcagagctgagaaatggaggctgggggcggggatggatccagccatgctgacaagatatactcctggcattttagctgtgcaagtcgataaatttcatttgatgtttcaggtggtttcagctcagattccatctcctgcaagcaaaagaatttaggatggagtcacactctagatctgaattgaatgagtcagatggccctttgacatcctaaggccagtgacttctaggttttatctttagccaaataaaaattgtatcaaaataatcagtagccctttgacattctaaggccaatgacttctaggttttatctttagccacgcaaaaattgtatcaaaataatcagtagccctttaacatcctaaggccagtgacttccaggttttatctttagccacacaaa

SEQ ID NO: 39533 - DNA, 990 bp, Homo sapiens
aaggaaatatcactcacatgtaactgcctcccagaggcacctccacaggaagatccagggatcagtggggtcccaggactgggaccattgtcctgtaccacccctgtaacaatccagctgaacaaacagaaagtccaagagggaaagtgacttgcccagaatcacatgtttgagtgacagctggaatccaggtgagccactctctgcacctccccgaccgtattttttaagtttctgtgactcacacgccacatcaaaaaggttttttttgaaacattcatgccactgtttaggaattttgccaggactgcacgtactcagattgtcattgacttaatatctttctttaaataaatccctacttttaaactacaataaacttatttaaaaggaaacattccaccactgccactacaaatagaaagctaatatcccttgccaaaatagaaattgttaaaataaatacaacaaaaataacaaacaaagagcaatgttattaaattccagccagactccgtttcaggaaggaagctgaggccagctctgtattgaaaaaggagattagcaaggattggagaggtgttaaattcatggcagcaccactgtgagactttctttttcatgtgaacagaaggattaggtgtgaattgaagaggaggtcactttccacgtttgcgagtctgtgtcatctagtgccaggtccaggtctcacccggaatcctctcctggccctctagtggtagaatctgacactagggaaaattctgccataggccagtgcttctgcaactttaatgtgcaggtgagtttcctggggttttgttaaatgcagattctaattaaacagattggagatgaagggccgagattctgcataatagtaagttcccaggtgagaccaatgcagctgatggtccatggattacactttgaggacagtctagaccaggggtcagcaaactatgaattatcagccaagtctgcagcccc

SEQ ID NO: 39534 - DNA, 761 bp, Homo sapiens
agaacaatgaacatatactgagcatttaccacataccagggcgttagctggctttctccaagcaaccttctgaggtagagactactatcattcgcactttatagagagaaaactgaggcctagaaaggggaggtcacatgtccaaggtctgtctagctcaaagacagcataatacctatagtacaatgtgccgtggagaaatgtttatgaagccatctcctgggggcaggctcatctccatggctgctcttggcctgtcttttcatgcgctgcccatttggaggcatgtgcctgttgagtgtttaagtattgatctcagcatggtatgacaggcacaaatatttaaacattcagcagtgaggcctcgttgcccaagatctgtcccagcgtgactcggggacagaataacaaaatgaacttaggtcttattatctcctgcgaggcttattgtggtttctcaagtgattacgcacattaatgcagggactccttttgctaatgggggaatttctggcatggaggggggtgtggttaaggtaataacatttcttctgaaaacaaaaaaaatgaaggcctgcttccctacaggggatattttcttaggttgaagggggacttctcagtgttactacaattttggaaagcctggaatatgggattctttgttgtcatggagacagagtctgctatgagcagcagatggggtcctggacagagggcctggacaacgggcaggagagcaaagcaggttggtgacaagt

SEQ ID NO: 39535 - DNA, 1102 bp, Homo sapiens
tcaccccaggccaggcctgtgtttccaggtgtaacgggcagcagacgctgccctaggactagagcagggagggggcacgggcccaccccaacccacagcgacccacagagggcgaaaagaggacgaccgcagagagaaacggaaaggacaggccaacggaagcagtactgcaaggctggaaggagaaaagccaggaggggagtgcttgctgtgaaagacagggagacagagaccaagacggacaggcagacaggctggtgacccaggatgaggccggaaagagccatcaaaggaaggagaaggaaggagagagattggagcgggacggcggggcaggcgagggaaggagggggtggggagagggagggaggaagagaggggagaaagagggaggaagagaggggagaaggagggagaagagagcgggagaatgcgagaggaaagaagggagaggggaggcgtagaaggggagaggaggtgaagggaaaaggagagagcctgctggcggcgaagctgcaagaggcagctgcggagggagcgcgcggcgggcctgggggagcgctgggcgggggcgggcggtgcgggcagggctatacccgagctgggcgggctccgggcgccgcgggccctgccctccccctccatccctccggactcgctcccccctcctctcccttccccgcgaccctccgcccgccctcggaagaccgagacagcggagaggttgcgggtgagctgcgctgagcccaggagccgaggagtcgggagcgcagtagcgctgagcccgagcccgagcggccccgcgtcccgagcgcatcggagcggccgagccgcccggatgcagcgcctgtcccgggcagcgcagccccggccgcaggtaggaaagggcggccggcgtcggggcgcggggcgcagagcctgggataacggcgcaggaacggccagagccccgagccgctgccgcgagccgggccgggtggggggcggacacctcgagattcaagcccccgcgccgcaccttccctgagccacatgaaggagcagaggcgccgctcggaccccgacgtgcgcccaggccatccgtcccctgggacactcggga

SEQ ID NO: 39536 - DNA, 759 bp, Homo sapiens
ggggggtcccagcagtaaccaggcctggagggagaggaagggatggttgctctcacacacctatgtgcacacaagaatgcttttctcggtgaattgggggagaaatgaacaccagggaccccatgagatttcatagaaggatctaaaggtcttggtagccaggaaggttgtggggagtgtttgtatgtgagcctcagctcagacccactggaggagcaggctgtgtgcttctgagccatgcccaggcaagagggcagggatcactcacctctgcctttggactgttgccatgctggagattgtgaaatatcatgagttctaggagcttccctctggggtgcagggggaggcaagagacctgagggtttgacagttccctggctggatggtggggagagaacttgtccagctgggccctgacagtgagttcagagggcctgctgggcactggtccctgagccaaggctgatactggatgataggtgctactctctccttctgccagagaggaccctgagcccaagggtggtggagtcacttgccacagggtgcacagaccaagtttggtcccaggtcttggtgatgccaacctcatgctgcttctgaaaagcacctgagacaagataactgttggggagccaggggctttttctctgtattcgccatttctggctgtgccatgcaagggctgagaaaaagtgaaagcaatacaaaataaaagtggccaaaagcaaaagctaccagcttcctgggcaccgt

SEQ ID NO: 39537 - DNA, 2094 bp, Homo sapiens
ttgtaggctagagaacatcacaaaacccacccatttcagacacacctgtgttatagatgggtaaactgaggcctagagaggaagagtcctaggtcttgcagaggctaggacccagagcttctaacccctaacccagtgctctttcccttccaccaagccagcccagctcctccgttaagaaattattaaatagagttggtggaaggactctggttgccgtgacaacggagcctgtgtcctcgggagataatggcgttgcacaaggcagagcgatgtgtgttgaatgctgattcaggacctgctagagtgagagtgagtacaagaggagagtggaggggaccgtgtctagaactcgagcttccccaagaaggaggtgcgggactggtaggggtggggcaaattgccttctctacttccatccttcctacagccttgtcagaatgggatacttccctgcacttcgtggaggtgcagagtcaggtgaggagaggtgaagtgactcatcccaggtcacacaaccaggaaagagccagagctgggattatacctccaaccaacacgggggcctaggctatagggagggcctggaaggaggctcacctgcaggggcaggggatggttgatggagacctctctaaagtcttaagtgcttgtggaggtcctgatggtccaggaatgacaattccagcccaagaggaagagaaaacagaatgtcagcatagctaaaagcatcagctttggagccaaagtcacatctctccctgccacttactaaactgtgtaatcctggatgagtcactttctctctgagcctcagtgtcctcatctgcaaaatggggataatgccggcacctacctcataggattgtggtgagactgcatatcatgaggaagataaagcatcgagccccaatcctggccatagctcaatcaccagcagctgttgttatgaaccaaaggggagaggctgggaaaaggatccactcccaaccatgtatcagcttgtaatttgtggtgttggaagagcgaaactggctaacacagtacaagcatgatacataacagggctcttcattccaggctagtaaatatcactagaacaaatgaacagctccatcaccaaaaatatacataaatattttgcatttgaagagtgtgaatgttgtacctcactgcaaatgtactgtccttaaaaacctccatgcacacctcactgagggaatgtgtgttttctctgtgccagctatctaaatgaccccatgctgcaaacgcttttggaaaataaacactctcacccacccacctagtttctcttctagaagcacagctggttcagtgtacttacctccctaatcagggattggagaacatggggttaataccctgtgaaaccccaaagtgcatcatttgcatgctggcaaagatgcaggctggcagacaaccccattccattttggaagcggaaagagggtgctggactcaggcatttggctgtttgaaaagcgctggtaagagctgggatcctgatgattgagatgcaagcaaccattttgtttgtttccgcaaacctgtttgagcaaatccacccccagagatagcaacctgtttctgggtcccctgagagagagggtcatttgtttgctgctgtttctggggctggatgccaagctatgaggcaatgagctgacgaccttggatcctgacacccctattctatgcaggcaggagaagggtcagggagactgattcagtgaacaaataaagacggttgacatttaaccaggattttaatgggtgtgccaaattgcaagatacatacacatgtccactttgggaatcatgtttaataaacaatttgccctaagaatttgattcaatcagcatctcccagtgactcccaccattcctttatattgattgcctataggttaagataacactgggcctggcgcagtggctcacgcttgtaatcctagcattttgggaggctgaggcaggcggatcatgaggtcaggagatcgagaccatcctggctaacacggtgaaaccccgtctctactaaaaatacaaaaaaattagccaggtatggtggca

SEQ ID NO: 39538 - DNA, 983 bp, Homo sapiens
aaaatcaaattctgctctggtgggttctgctttctggcatctcccgcatgctgctctcaggcacgttcggacttttcattcaaccatttattcagtaaacacttcttgatctcctactatgtgccaactgatgacaggcacggacatgcagacaggcaatggcaccaccaggcggccaatgcggagaggagggaagcccaggcagctgggctgcggggacctcagggagtcccctggaccaccccaggtcgggagtggcatctagaagagaaaactgcagggcaggcaggtgctggagagaaacagtgtgaaggctgggaggcagatgaggtcaggccaggcaccggcaaacagctgcagtgagtgctgagaggagagagagatgcaagggccttgaaaggctggccagggagtttgggcttcattctgagaacaagcgggtgctattcatcgcagtaagcagaggagtgacatgatcagacttgcaatttagaaggctctctggggctggagaggggatagagcaaaactgaaggcagggtcccactaggaggccactgggccatccagatgagcagtagtggtggctgactaaggccctggcaggtcctgttctctttgatctcttgaccaaacagcactttctactgattagtataatgggcctcacagtccccagctacctcttgaatcacggtgatgacggtgtcagcacagttctagggcggggatatcatctgtggccatgccctgggcacccctgggtcactccggctcccaccagctctgtgtaactttctcctccctccactgtttgaccaggcgcaacatgcatcagatgacggacgggctggataagccaggtcagatccgctggccactggccatcacgctggccatcgcctggatccttgtgtatttctgtatctggaagggtgttggctggactggaaaggtaagggatatatgtgcacagtggggac

SEQ ID NO: 39539 - DNA, 1214 bp, Homo sapiens
ctgtcatcctctgaaatcaaaagagagaacgtgggcactttcttaaaagcctgaagggaatgtagacattccgacatctggtaagggagacgctctccatcgcttcccccgggggcgtcaccgccccctgatgccccgccctcctcacgactcaagttcctcccacttagctcggtgctaggggcgcatttccccggcatgcctctgctcctttgcgcacgcgcgccgcttcccagtggcaagcgcgggcaggaccgcgttgcgtcatcggggcgcgcgcctcagagagagctgtggttgccggaagttgagcggcggtaagtgagccgcggcgggcgagggtgtagtggggtcttgctgggccggttttggaggcctggagtcaaggggcgagctcgccagggagggcgagggtcacagcaagtctcaggatcctcctctgccagtttctgggtggtccttcctcctccagggactcactgattccggctggcgcccttcgtctgtagccgcgtcccctcagactggttcagtccggggtcttctgacttggaagctcgtgctgatttcctaagtcagcccctcctgtcctcttggtaggcagtgctcagaatcttcagtgttggaacacgggagatgggacatttggattcccagcctggctgtgtctggatttgctgtctctggcacgttccttccccatctaagctgcttttccatctgcaaaatgggaatgataatccgccatttgtttaagtgaggaggttaaataagtttactttctgagaaagaagattctcgattccttggttacagggttagaaactaatgcacaataagaatcaatccggtaaggtaaatataggtgttagaacatttgtcagaaatagagtcaaacttctaattttataagtacagtactaacgtacatgatgttggagaagtacaagccaaaccgtgtgtgtgtgcacgtgcgtgcagtttcctgatttttaaacactggcgactgatgccattttttaaaaattggcaagtaattctggcgtttaaaaacattggcaactcagtttttacaaaaccctgttcaactgtaaccagtcatatctgtggctgtcagtttgggacctctggatcccagactccctttttcattgactacttagatttttttctctgacacctctgcccactggccagatttcttcagtgacaga

SEQ ID NO: 39540 - DNA, 2555 bp, Homo sapiens
gtattacgtggcaaataatcatccaatatatgcttgaacacttctgctaatggagaactcattatctctctgatctatttcctgtttggacaattcaagctattagtaatttttaaactgctgaaatttatcttactatatagcatccatccattggccctttgtgcgaaaagagagctattatttcatttcaacctttactgagctcttaatatgatccaggcactgtgctcagtcctgaagaaagatgagtaagacatggtgcttgtttcaaggatctcccagctatgatttcttggaaccaaagcagttgagctgctagtcttttatctctctctttgtcttcttgccattgggttaggacttttttctttaattattttagttatttctgtattgttttatatacataatacaaactttaagaggcaaaaaaggtcatgcagtgaaaataagtctccccacactcctctctcctcacctcctagcagctttcttgggaggcaaccgccactgcacatttcctgtggggatttgatcttaaaaaacaaaagatttagatccatgtggacagaaacttttggtaagtactcattcagtgacattttctgagctcctacttgtgctgagtgtgactgagttttattttcattaaagtctgaaatttgcaccaagtttgggtggtagacacagccccgggggattgtattggttaaccacacacgctgctatttcagtttaatcttgactgaacttcttggctactgcaggctttcttacaccactagagttcttgctcattacagtgttgaatccctatcaaaacctttcctgtttaattggcagtgacacaatcccatcttgtgtaactcaggatgtttcacatcctgaaatagtttgaaataaaattgaaacacacttacattgatgcctatgttaatttctttccttgactgtgtctgaatataatgttgaagtgtgatagaaacaatcctttatctttctaagctaagcagaggccgaagtttcacttgcactgtccagggttatacaggcaagccttactttttcaggaagtaggtaatgtttggatttagattagtgacacatgaataactctgtctatgactcacttccccccaaattcccctccgaccattacttcttaaatcttcccttccagcttaagcgctgtagtgatgttacatagacgtgtatgttcctaagtgatacctttaccatagattgtcctgtttaggtatttccagaagattcctcatcatgctgatgttgcttaagacttttctgttttcagcctgtcatggaacggtttcagcagctcaacatcaactatatcctcttatgaaataggcccttggattctgttcagaatttccctaaggccaaataagtcagaaaatatttgaaggatgtgcctcttatgcaaattacttttgtgcaatcatggatcactgcagcctcaacctcctggtgggctcgagctatcttcctacctcagcttcccgagttgttgggactaccgatgcgccctgcaatgcccggcaaattttaaaactttttttgtagaaatggggtctcaccatgttgcccaggctcgtctcaaactcctgggctcaagcgatcctcctgcctcagcctcccaaagagttaggattatgggcatggaccactgcactgggccttttttttctctctctgtaaaagtagtttatttgttctgtttacaaagtacagggaaggaataagggcaatacctggaacccctttggtcgcacatcttcccagtctatgcttctataaataacgtttgtacaacagcaaactcatattgtccccatgtgttttctcacatcctggtagctgcagtctatagtatagaccgggtaggaaatagatgcctgattcacagggtagggctcccctccaattagtgttccagctcacttttgctaatattgaaacagaagtaactagttgttcttaaaaactctctcatgaacaagtaggtcataagcaaattatgtctgcacaactcctagaattgtttcaaataactttatagaaaggcagtgactaaggccctttcctctttcccatctttctaagtcctaggctgccttcattcagcacctggactgccgcctgggtcccccacatcccagcgcggtgatggaggaggggcaggccaggccaagcatgaggaataagctgtctttactgggctcagaccaggagcccatggtcttgaggaactctgtatttatcagttttcttctccacgttctcttccacctgtttctgcagcctcatggcctgtttttacttttggtagtggatcttggccttctccttcctcttctcctccaggtagctgtcactgcctggtacttccagccaacctcatgaaccagccacccccaggtaggcagactttattttaggcttcagacgcacaaccttgaaggcaccaggaaccactatctgcaattaatatacaaaatgtctgttatcttctttttttttgagatagagtt

SEQ ID NO: 39541 - DNA, 535 bp, Homo sapiens
tactgtcacattttaaaatttttgccaatctgtataacagtatcatattaggcttttactttgcattttcctgatcactgatgatgttaaacgtcttatgtatattacttatttggattcttcttttctgatagtttctctacttcaactccaaaaattttcatatgttatgcttgtgtagcccctgtgaaaagaaagcacagtaggatgacctagttattcacttgaaaagtatgatggagcccagcgacctttgttctaatcccagatgtttgacttggtcagagtcccacacctctggccctcagcatcctcatttgctaaataaaagtattggctgggttagagcagcagttctgaaccttggctgcccatcagaattatctaggatgctttaaaaaaatgtttagaccacatctgcaccagaaagcctgattaaattggattaaaggttactatatccatttcaacattctgtgataacgatagaataagtctttaacacctagatttcatggtttcaatcatcttcctt

SEQ ID NO: 39542 - DNA, 1066 bp, Homo sapiens
cttttgctgtgttggtgaatggcttttttcaggtgctataatttccttcacttgctatatgggccacctgcctctaccttctcattcctccaatccatccaccacctccactaggattaatcttccaaaaacattggttttcaccgtgtcactcctgtgaccaaacccctccccactgctaccagattaaagcttctaacgcctcagctggtgctccaagacctgctggccagactggtgaggccaggtgtcctcactgactccagaagaggctgtgttaattcccaatcctctttttcctctttccccttctaattgctctttctcctttctgtaggtcagcccttcataccacacaggggccaggcccaacccacttgtttgactctgtcctaggctgggctccaggccaactgtgctccttctctctgaactcctgaaatggctgccgatcctaggagagtgtatgagccaaactgttcacatcctcattgatcactgccatgacttctggtctctgagttcagctatgagctcttgcagaacaagttctcaaacctgcttggtccctggtgctcctagagtctcaggaattactccacagagccctaaaaagaaaaaacagtccatagcagttccatttattaagtagttaggaccaaacaatttcataggtaattatgtcctaacaatttagtagccacttgaaaaactgcacataaattgaaagaaaatataatcattttattctgaaataaccacagttatttactaatgggctgtgtgctcctgttggggactacacagcttcccaaaccttgaagtcagatgagacattgccacattcctctatcctttcctgttctacatgggttttcacacatacttgctcttatgaaacgactgccaaaaacccagttttccaaagatatgagatcatcagaaggaatgcagattgaactaatgttgaagctgtgacccaccttgatctagtggtttgtgcagtgcctgacagatgttagtatcatgttgctttccttgaaaatctaaaatacggccaggcgca

SEQ ID NO: 39543 - DNA, 2802 bp, Homo sapiens
atgtttaaaccaaacagacttcagcccattatcccatatagctactcaatcttcaaaatcaaagtttcttcctcccaaataccgagagagaagagcagagcagagcactctagtttcctgggtgttgcatgctacacaacaactcgacctgggctcgctgtccgtaagttggtcctcaccaatcggagacaggaaaaactaatctggtatcaatttcctaacaatcttatatttctctcttaggccattatgttttgtttttaaaatatcgtattacttgttggcaaagacaatacaacagaaattgcctcagaagtttttctttcttgttgggggaagcggggatggttaaaaaaaaaaaaaacaagaaaaacaaaaccctgactacaatgtgtgaatgtcacgggaaacaagcccagcaatggctgcttacggctttctaaagtcggctgccttttttaagtgagttcagaagcaagatgttacttaacacatcagatgcaaagaaagaaattcacgaaaattctcatagcaggaactagtaggagtaaagaaaaacaaatactctttttaaaaaacgttaaatatgagatcctcatccatagagttttaaaaaacaacgtgaatgagggttgttgttgttttttttccttgaaggggaaaaatactcttgaaagggtgagttttcaactgattaggaaacaggcctgaagtttttagattaaaaaaatacaagtgaatcaccctcccaagtttttgtaactgttttctttttcaagagaaatgtcccgtgtattattggagaaaaaatggaaactgctcctgctgaatgagaaagagaagagtcccggatgtgtgtgtggttacaacagaaaacactcttcctgccaggccgaactcccccggagatgccctcggcggcagacccagggccattgccactttttcaaatcgcacgtagaggatgtccgagggcttaagaaatagatttttctctgactgctaccagagacagttggaaatacaagacagtgggggaagcacctcgcgggcagtaggaggtaataaataacagttcggcgcggctctctctttttcagggcaggctgggggtcggggtgttgtgtaatcgctcccacagggagcggagcgcgaggaacaccccccagtgtcagcgctccccgggctgcacaggaagcgccagcgagacaaagagcccgcctgtgctcgctgacacggtgcccttccggccccacgcgggagagggacattctccgctgtttgggacgctcactcgcgagcacaaaaactcgctgtaactttggctccccctccgtgagctgcagggcgccgtggcccacagcagggtacagtagacggtgcaatccttaccagcccctcccccaaagaggctcaacttttaccggcgtcctacaagtccttcccctaaagacaatattaacggaaatcaaaaatacatacattttaaagagttaaaaatgtgaggcgcgagtacgttgcaagcaacgagcaaactttgaagggtttctacttcactgcctccccgtccagccccctccaccgccccccgcagcctgagatccgaacacactcggtgccgaaccgaacctaagaaacgccggcctttcaagtgccctacaccccggaggaggacagcgggcgcttagaaggcaggcacccagcacactgaggaggagtggccgggacgagcaacgggcagtaattctacaacgggacatctaccttcgtagcacagaatgccgatattgttgttcatcttgtccaagtactgatagttcaacaggtccatcttcataaatagcatttattgggctagcaaagaaaaccagctctttgcttttgccccaaaagagttaagtttcaaaaatcaattgttgctgagtagctcctggctcttcaacttcacaaaggcagaggcccagcctcagactatcaaaacaaagtatgcaaaagttaaaaaaaaaaaaatcaggcacaaaaaaatcgagctcacacgaaacccttcaagggcttactggtagacggtgtatgtactgtatccccgatcgagtatgaaaacagcgtttcagaagtccttacaagtccttcctggaaatggaaaagagtgaaaaagagaaacgcgcagcccgtttcctaggacaaagcggcgccggcccctctcacagcccgctgcaagccggcagcgctgacatgagggctatgcttggcatgactcctatgccgccgcttcctcttcccgcaggaggccgagcatgctcactgcgccgcgctgccgaggcagggagggcttctgcacaggatcagcctctcaatgtagcaagtgttggaaagaaagagaaaggggagggggagagactctagagacggggccttggcagagtggctcttgacaggaagcagccaagccgctgcaaaaccgtaggaggaaaaaagaaaacccaggaagtttctttttcaggagctaagtacaaagtaaaaaatccatcatggaagcaaactcccatggaatgcaactttcgtgaaacttcatgttggggtttcggaaacccaaagtgctagtgatgcataagccatatatatatatatagtgtctttgtttcttttaaagattgttttataatatccatttacactttaactggatatttaaatttctgatgttaatgttacatatagcttcttccataatccccataacaactgagatggacagggcaaggagggtatcaccctttcacagcagaggaaacaggttcagat

SEQ ID NO: 39544 - DNA, 1279 bp, Homo sapiens
atttcccatcctgccagccagcagttagctagaagcaggttctgatcttggttcggccacagactggctgcgtgagtttaggcgtgttacagaatctctctgatctacttctgcatctttgaaaaatttggataatgatacagcctgaccattctcctttgatcataccacttttctcatggcatttaatatggcctactataattacacatggctttatctcccctgtagaccaaaccaagagctcctgagggcaaaggcctttgcttatttactctgaaacgcagcccagtgctagctgtgctagcagacacattgtcaatgccagcttctaccctttctgttggattcccacttgctatgaaaatcctttcctttgttctacaaagtacactgttcttcaaatcatgaagtaacccagtttcaaaattttagttttactttgtaagtttcagcatatctctatcccagtatggtggggtttcttgttgttgttgtttttgttttgttttgtttttaatattgtaaatgttataggtttcaaagattatctatttgggaacttgggcataaactcaacatatatacttctcatgcttccaagtactggaagcatgtggaatctgagtggaaaaatcatttaaatttagctttaaaaattaaaaaattaaataacgttgggatccaaaggaaagactcttaaactttatgttaactgaactttcatttcggccttgtttccaatagattgagaaaaagattgaataccaaacagcaacaaaagcagcccatgatgcatttcagtgtcatcagggtggctgtggggctgaattgtaggattatgatagccaaaattctttacaaaactgaacactaccctgctagttgatcgattcaaacacaaagtgtgagcagcagtcaaaattccttctgtcctagagagaagaaatgccctcaggatggagggctggaaagaaagctctctgaggcggctgactgcaatgaaggttgccagtgccccccgactccaccccagctcctcccagtcacaaccactcagcaggctggtaacgcagaaagaacgatccacattgaaaactgagtcatcatgagaaaggctccatcacagacaatgcaaataaggtacaggacaaaggaaggaaaggaatattgccaagaaaaggtcaatgaagacacaccagacagccagagagattatgctggaaagaattggaaagttatgaaccaacatttttccttttatttatttatttattta

SEQ ID NO: 39545 - DNA, 720 bp, Homo sapiens
aagaaaagatgtggcctttgtcttttaaaaacagaaaatctgaataggaaaaaactatacacgtatctaaatctccacacagagataatgatagacgtagaagatggtgtcatgttacatcccactttttcagctcttacagaattgctacagtaattcacaagtatggtgagggagggagagtagctgaaacaggttgttgttgttgttgttgttttttatctgttattttaggttttactaatggaagtattgagactagaacaaaaagcacatactagatagatacttacctgaccaatcctggcaagaggactattgtctcactcacatggaattttaaaaatctgaaagtcttacataaaaatccaggtttccagtttgtcttgagtagtcagaaaagctgacaaatccagccccacattcctatgggaaatcatcagctggtgtgctggtaaacgttaacaactggctctctatagaagaaaaacaaaagcaaaagcccctgatctgtatagcatttgccatggtgtaaatacacccatcatggctgatttcaagctcccaacgtgatgcctggaaatgacaggcacaatcagctcatggacaacagtggccagagctgagtggtggctgccccttggacaggagttacgggccttccgtcctcactgctccctatagtcttacagtggctgctacctgcactggcaccagccc

SEQ ID NO: 39546 - DNA, 2798 bp, Homo sapiens
tttggtatgctaacatggtatgcaaaactgaccttcaaatcctaataggcaaattaattttttttttgtctttgactatttagaggaaacaactgccagactccttctgagtagaggtaggcttgggtatagaacaagatattaaaactccacaaactgggagacagtgcctttcaaagagagggcaaccagctgttgataaaacccagcagaaccgcctccacttccccacacccctaccctcccgcgccaggctgctggttcttattaatcacagagaagggactacaactagcaaacatacagcaccgacgatcaaagtgaaaccgattttttaatcatctaacttaaacagacgaacacatgccagcaacgtacataaatacgaatagccccagcaagcactgtcttcataacctaagacagttaaatgtctcagggtgatgaatcaaaggagacttcaagcaaaacaaaaagcgaacagccctgtgctcttccgcgaggcctgcactgggtgcagggagagtgtgcagtcctgttttggggaccgggcaggaagcacaggaagagtacggtgccccttcccgcagtccacatcacagccctccctgaggccggcggggaccgcggggtgccaggcgcgggcctcctcgcccgccccgagcctccgactcccaggacgtcctccgggagcctaggcgcttccgctcccaccggcgcctcccgagcggcccggcaaggacccgccacctcctccctcccgcagggcatcccggttctgctccgacagcccaccccaaggcccctctcaggccagccctcgcccagcccgggtcccgccccgccgaccgggtcaaccgcactcaccgcccggcggctctgggcgcgcccgcctggggccggcctggccctgcgggggacccaggggcggggacgggacctgggcacgcggggcgcaccccgagggcgcgcagacgcacaggcgggctcgcgcccgagcccccgcacgggcccccgccaaacacgcacacgcacacgcacgcgcggaccgggccggcggacgggagcgcgggagcgcgaggaatccctggaatgaggcaccggccaacctgagccgggctccgccaggccagccaggccacgccctcggtcacgcccctcacggagcaggtgggggctgagccaggtgagccgggagggagataggggcgaggcctcccgcggcagggagaggccgctttccctcccccgccagctgcgcgcccggtgccagctcgcacctcccgggccgatgccggcgcgctggggcagtgaggtttgtcggggcgggcgctcccgagaggcgccagcgggcagggcgagtggacatggcgcacactgctgtggacacggcatctcgcacgcccccgcccccgaggccccgccaggggacacagcgccgtgcaaatgtacaaacacaaacgcacatttcgtgcgcgcccaggtgcccgccgcgctccccacgcgcgcacagtaggtccctgctcccgggggacagcgcacgggacgccgacgttcacagtccaaccagacccgtcccgcggacctgctgcccttcccgccacacacaccccgccaagcgcccggagttcagccgaacctgcggcacccacgccgccctccgcttcccccggctcgcgagcagccggataagggcgcaccacccgcccgcgccggttcgccgtccacacccgctcacccccggaacgcggcgcaccttccgtcccccgcctcccgggccccgtcgccccctctcggcacccgcatgcccgagccgcgctccccgacggccgacggccacgcacctgaagggacaggtcacaccggctgcgggaggggctgctcggcgccactgcgctcagaacggccgcggcggtcccgggcgctccgacgccgctgggtttcctcccattacagcatgttgcactccagcgctgcacttcacactcgcacacgcgcacacgcacacgcgcacaactccaggcgctcggcggcgtccttcccccgcctcgcccggaggaggaagtcctagtaaatcaaaacaggctgggagggagggagatcggagtggaaagagtccccttcagccgctcacacaccagtgtttgctgtgtttggcaaactcctggcgtccacaacccggactgctctgaaatgtgcccggggaggggcagggaggaggaggtaaaacgtttctaattggcgcaggttcttatattacagcagcagggcagacatgtgaccacgaaaagaaaaggcctgtctttaattttttcctgtctttctctggggatttggtggtggggggccgggggatagaggcctgatacccgccccccgccatccccagcaacccttgccctgttgttttcttgtactgccacaattaagaaaacatttgcttaacatatccagcggctaacttcataaaataaatagagactggacttcctctggtttgctttaaaaggcttcatgttgcttgccttctggctgttctcaaacctcagtcattattaggagcccctaccgtaagggctttccctgggagagggctctgctgaaagggaatgataacaatgaaaacaaataccagcttacattcgtgctggaaaaaaaaaatgctttgcagttttcaaactgttttcccatctgttgcctcatctgatcatatcaaggaacagcacggtgtctcactggatcttagcccctgttggatatgcaaagacaggtatgcgtagttccatgtttcagtgaga

SEQ ID NO: 39547 - DNA, 995 bp, Homo sapiens
catttttggctttcaaaaagccatttaaaatgctctgcttgctgatgaaagctgtggtttctttgctctcggctacgattctgtcaactcagggtagtaacactgctgagcgcgtgctgatctgaagctctgattggctgctggtgacataataggaaggtcaggaacgattggctggcagctgagaccggctgagccacataccaggaaggtgtgttgggcgtgaacagagcacgcttagagcaggaacagaagtacgagcgacagcctaccaacatccttcaagcatgggggcaggggaggcatgtgttaaataacagagtcttcaagatagtgaaaactatgcatcatttctagggtcctcttttgtgtagctcctgtctccccctagtcccaggtgtctctccccagagggctggagggccaggccaggctcgcagacaagtgggtacatgtacccccttcactcccagttccctcctctctgcccagacctgctctccgcagccctgaggcgggcagctggtccacccttctcccctgcagttctctctaggcttaggacccaggtccctccctgctctaggtggtctggatgtcagcatctcaagctgcggcctcaggcagcaacaggcacgccctttatgaattatctgagcagagcacagccacagtgggaggaataaaaataacaagaaacacaaaaggtgcctccttgaacaggaagagacactagggatgggggactggctcacctggtgagtcaccctgcgttccctcttcttggctggctatcaaaagagaagagaacacaggcaataacctgtggcctccagggacgggctgggcgttttagaaaggccctgggtttgcagaagagaacagcacgcatggtggggaggctgctggaggttgggattctacgtctggctcatggcaaacctgatggatgactttgggctcttttcagagtctctgttgcctcatttgtttgt

SEQ ID NO: 39548 - DNA, 1680 bp, Homo sapiens
cagcatagatggcctcaccaggaagtgaacaggcaggatgttaatcagaagacagactacagtcaggtatccagacgcagggggccccattaaaacctgcacactgaattctgcaaattacaaggaaaactgtacccttactgaggctgtgctgagccaactctgaaaagtaacaatgcctagtctcaaacagaccgttgttaaaagtgctgagcgagggtaaatacactggtcacgcactaacttttgatgttagttactttcactgcacctgccctggccctacaaccagtccgccaacttcctgaagtcagaagatcattttgcattttctcctacatttatagaggtgactctcaacaaacttggctgcgcattagaatcacctgggacgtttcttaaattcctgaagcccaggcctcatcccaaaccaattaaatcagaatctccatcggcggaagccgagcattaggattttcttaaaagctccccagaaaattccgatgtccagccgactaaaacactgaaagaacctgataacgatttcttttcctttcttccatttgcccctgcagcagtttttccttctgcctaactgcttctcctgctctagacccacgtggattcctaagtatccttcaacaccgtcgcttcaactcgcgctgtcgttatactaggaaggcaggcctatggttcactctgctagtggacacgtggagtgtgcagagcggacaggcagctctccgactctgaaggaatcgagggcaaaacgggactcgtgagaacagacagttccccgtcgtggggctgcccgggctcaccttctggtctgaactcggccctgcctggcggtacaccccggagccgtagacgaaagccagactcagctcctcggggaagtgagacaggatcttgcggaaggtcacccacgagctctgcagcgtctgcagcgccatggggtcgaggctaacaggggacactcagcgcagcagggcgaggacaaccgggcggggaacagacaccgggtaggcggtttagggtgggaaatggaagtcggagactggatcgagggacacaaggctgagtgtggggtgggactgcaagcacacgcaaggattggggcgttgggccacgaagagcagcggcgagaagacgcagcccagataggctcgggtgggcggcggtcgcacaggcagagcttccgtcccttgctacgccccacgcacgcacaggcgcttccaagacgcaagaggcggtgctcgccttagtgtggggaacgcgaggctttgcattgtcccctcgtggtcggaggagtgccctacaggctggcggctaggttgcgacttggacaaatcggcggaggcgagcgtcacccgactccgcgggccctgagccttgatagcctctgtacttctctcttcaaactacggtttaaagaatgactataaaatcgggagcgtattgaaggtttttaagtgaggcgacactcacataatatggaactagccgttctgaaatggacagtgtagtagcatgtagtgccttcacaatattgtgcccccatcatcgctctagttccaaaattgcagatttcgaagatttggaaaaacacaaaattaaaatgatgcccaatcccgccatgtagagaataccaccgtcaagatttgacggagacttctt

SEQ ID NO: 39549 - DNA, 702 bp, Homo sapiens
gaggaatgggaaaaaagaacattttactttttgttttatccttttatataattttaaagatagattgattgattggtttaaccacatgatatactatttttaaaaaatttaagcctccctaaggtcatacaaccaggaaagggtacagctagaattcacaccccagattgtgattccagagcccatcctctggattctagcacactgccctgtactagtgttctcttagtatcaggaaagacttctatcatttgctagcaagttacacaatttttcatgaaaatacctagaatcaaaatgtccaagagcctggagctgcaagaatgtgctcattctccagaagagggctctgtgccccatctgccggccatcttggctccttttctataaggttgtggctcagccaagacaggtcagtgaccctgggccaggaaacacacactaagatttccaacaggacaaattaccttaaggaaaaggcattaggatagctagagaggtgggggtggagggaaggcatgaaaacagttcattagccaacttggtcaatgggcaggtgcaggaagtggcagataaacccagccagagtctataaatatatttcaatatcagtgttcaaaacccacaaaataaatgagtgaattaagaaacttggcagcatgtaagcacctagatgtaaactcttagttctagccttaactc

SEQ ID NO: 39550 - DNA, 487 bp, Homo sapiens
tgcttaggaaggaggtgcgataatagagtttgaaagggcctggtctgctagacctgggaactgcagggctcagtggtgtgtcctgcctctgcctcttccatccaggagctcctcagttctgtacaattccacatcctcagagctaggaagcccttatcattgtagcctccagtgcctatgactcatcaagagccatgtctggacagtgaactcttttaaggactgtgccttgttactgaatctccactctcctggccaaggcatggcagtgactaagtggtcattcattgctgaatgtgtggatagatcgtggaatcccttcacctgttccctcccccactgctgtgctttttctttcccttgctttctttctaaatattgttttatgttttcaggccagtttagatcccacctacacaatgaagcttccctgatagttcacaactaccaaatagttccgttctctgaactccaaaataatttaatg

SEQ ID NO: 39551 - DNA, 2579 bp, Homo sapiens
tttagtaaggttttgtctgtggagattcatctcagtgtcaactccctgtctctggtgataagaatgtttgttcccttcttccttctgggggagaggcacccttcccacaagaagttttagtcctgcttcagacaggaagggggaagtcggaaaacctttcctgcatctgttgttgttctgttgccttcagctcaacataaacaatatgccaaagtggcatattttgaggtagcatactctgacccccttcacaaaccaagagtctgccactagccattgcttctatccccgattccaaatatgttttaagagaagtcattcatttagtcaaaacatttattgagcacttacgataaacataaacattgtgatggattcataggaatatttgctgacacttccatagtcaggcactattctaaatacttaatgctcatcaacttatgtgttccttataataagcctatatggtaggtgctgttattattttataaatgagaaatggaggcacatcaaggtcaataactcactcagggtcactcagctgggcaagtggcagagctgggatttgaaccaacctaagcagtgcagcagcagaactcatggcctgagctactttgccatattacttttatttaatctagcaaagtcaacaagacaattgtattaaattttacacagtgtgataagaggtgcacacaaaaatttacagcatatccacctctttacattctctctccatcccctgaccccagggaaagaaggactgggagaaagttaggacatctgtgaccagtgttgaccccttgtcctaaaaccatgagtaacatacacaatgtttcttattctgatagaatataattctggttcttaaaaaattactcattcttccacatgtgatgtcagaccaaaaaccacaagtggcttatttagaaaatgagtcagcctggaaatgctgcagtgacaaaaaggagaggcatttaccataggtcaggcagcaccctggtctgaaggacatatggattctctccagcccttagtaatggggtggggctgggggtggggaagttccattcagaaacagccttcttgctacttaaaaaagacagccccagagactgggaagttggctattcaacaaccatcaataaatattcagtgaatactgtgataaaaattatctacagctaagatctctgaaagattggttgcagtcttctacagatcttgaagccttgtctgtaggccagctttgaccactgtgcaaccacctctgcagtttatggggattccctacctatgtcttcaccccagattagtaaaggtagaaagcctcatccctgcccacatggaactcatcatcatcttgggtcaagataaattaattctgtattttattgatttgttcacaaccccttattttatttagcgccataaattttatgagaggaatataaaaatgaattaagcaaggattcggcccttacaaagtttatagcccagtagggaagatgtgtaaatataaagaagaaaatgtaatgcattaagtcaaatgcagtcaaaatgttagtttggaaaaaaaaaataagcttgataggtattggtgaggatatgagaagcagaaggaagtcttacacgttgctaatgggggtgcatgttggtactgccatttcagggaacaatttggcaatcatgcgtaaaccctatgactcagcaattccatttctgaacatttactctagagaatctcttgcacatgtacataagaaaccaagtaaaagaatattggtcacagcactctttgtgcaaagactggaaataaccacctctcgtggggaattaaaatatatggtttattcataaattggaatactgtgtaggagttaaataaaatatatgaggaatgcagatgagttcaggtaagatatgaaaggagaatgaataagatgagccaggcaagtgtaaaatggaccacaagcagcatatgctgttgcagtggggcaagcttctagctcaggagctcagagaagaccgcaccctggaggtgagctgtgcacagcccacaggacaggaggcacgccacctgccgggactgggctgggtgcacagaattcagtcactgagttttacagctggaagttgcatctagttgcatcaaggcccaggcaacttaaggagtttgccaaggttacaaagggagttagtaatagaagcaaatgagtctcaacactaagtgtctggtgggccactgggaacattgcctttcctgaaataaatgaaatgggtttcatatttgggggccctccagggtgagagagacttatggaatcatttcacagaggccaggaggcaaagggaagagatagtgttggctagtggaaagagcctgggttttggaatcaaattgagtttaaatccaggctctgctagttattagctaattgattatgtagtttaacttttctgtgtctcaaattttctcatctataaaatgagaacaatgctacctttccaaggaggttgtcttaagaattaaacaagctgatagagtctgttcctaacagtggttagcatgcgag

SEQ ID NO: 39552 - DNA, 666 bp, Homo sapiens
cagggaacccaccctaagcacggcagcacagtgagtaaggagttcccaggctgacgttagccagccagtccttcacactcccatgatgtgaacattttgctttatggtggtacagcaggtccctgaatcacatagtcagttcattctaagtttgatgagaaaaaaacctatccctggccggggccactgcctgtgtggagttcgctcgttcttcccatatctgcaggggttctctcagggcactccgctttcctcccacattccagagattatgcacattaggttctttggcgtatcccagtgtgagtaagcgtgggtgtgtgtgagtgcgccctgccatgggatgtgagtgtggttggtgtgggtgtgtgtgagtgcgtcctggctggggctggctcctgccttctgagctgcctggctggactttggccacctgaaaccctgaattgttataattgggtaactcttcttatttgtttttatttatctttttaaatgtatgtgtagctcacatttatttcaatgtttactgttagaagtgttttggtctttatttagaagtttggtgggttttgagaccagaaatatgccataggaacttaactcttgtttacattggtctatggtaaaattggtttcttcaatgaaatccctatcaaaatacca

SEQ ID NO: 39553 - DNA, 1176 bp, Homo sapiens
catatgatgcatttaggatcctgaagctattatatttcaatgcttacttagtcatttccaaagataagcattcactttgtctcaaaatgaaacaaacatgaagtcttaattaagatttaaattgggtgaggtattacagtttgttattttttttctaacacacaggactcattttggatgagtttttaactaacatatttatgacttccattgggatacaaaatagtatgtttttgtttttctttggttttgtttttaacaatcaattccctgcactaatggtctgggtgaattcaacctggaaatgtccttcatatttttcagttaaattgatcaaaatgacatgttgctctttgctgtttgtttgttttttggccactgcacattagctaattctttaggaattttttttcgcaaggatctagtaaaagagagaagggaacatttgttgttaaatataacagaataaattataattgtatgtttgtaggtaacttgtagatatgtactgcaatttcctaataaatattacttcatttctcaggcaattcactatagaaattatgcactctcccacaatacaaaaaaactaatgtcacaaaggtgaattctaagatacatattgacaataaagagccgtaagcacacggtgggcaaaagtcctagcaaacttgaaaaatatttaactgaacaataatggagcaatgccagatgctaaaagtcaccaaagataattttaattgttgtagatataatggtgttcaatgacagctgttttggaacaaaaaggttatttcctgaaaatttcagtaagttttctcctaaaataaactctcattgattgttaaaattaccaattgtccttaatggcaaatagacactaaagttggctaataactttaaatatggagtcattcctacatgttgatttgtaaacactatctggaggaaaaattaaaaagacataatgtagctgagggttatttctccctatggagatatcacaggactcttatgtaagagaagtcgttgaaaaaaatatctaaagcaaaaactacttacggaccgaatgttgcaactttcccactatgcacagcttcctctctcctttcccctctctttttttggaaatgacaagaataagcttttttaaaaactaaattttgtgaaattata

SEQ ID NO: 39554 - DNA, 2071 bp, Homo sapiens
cggctttctgaacgcgcacctgccaacccactttggacaggtcacgatggacagcgtggcaggaaaagaaaaggtcactgtctacccaacacatgagaaactgtttctcgtgcctcacgtccccactccgtccccacccatgttgtctgagtccctcggtgtcagaaacactgctaagaaatttaagaaattctgttaatgagtttaagaaatgtttttaatgattaaaagtcagtgacttgtgaataaccatgtaacttacaaacgcaaggaactctgaaagtgtgcagcaccaccgatcagaagagaaaaccaagggacccgaaatatgctttaattaaattttcttttaaaatgtcactggaaagaacatcttgggaagacggcctggccgatcgccgtgtgaagggcaagccactctggccgagagggagccccacacctcggtctccccagaccggccctggccgggggcatccccctaaacttcggatccctcctcggaaatgggaccctctctgggccgcctcccagcggtggtggcgaggagcaaacgacaccaggtagcctgccgcggggcagagagtggacgcgggaaagccggtggctcccgccgtgggccctactgtgcgcgggcggcggccgagcccgggccgctccctcccagtcgcgcgccgccgcccccgcccccgcccccgcccccgcccccacccccacccccacccccacccccagccggcgcccgcgcccgcccccgcgccgggcccggctcggcccgacccggctccgccgcgggcaggcggggcccagcgcactcggagcccgagcccgagccgcagccgccgcctggggcgcttgggtcggcctcgaggacaccggagaggggcgccacgccgccgtggccgcaggtcagagtacgggtgcccgcggcgctcgggaaccggctgctggctgggcggggagtgctcagggagggggcgcggagggctggggccgagggtctgggggctagggccgaggaaacgggaactgacggggtcccagacggatgagagctggggagaagggggtctcggctgaggggtccggggctgaggcagggtcatggtccggcaggacccggactgacgggtcgcgggcgggcggctcacgggtgaccgggtgaaggggtcttgggctgagggcacccgggctgagggtcgcgtctaccggagcgcgcactaggggcggagggcgcgggcacagagagccgcggccggtgccgactcgagtggacgcgagccggtgcgtcccggcttccaggacagcccccctcgggagagcgccgggtgggcgcggagccggggacacggggacctccgcgtccccggcggaggtgcgcaagcgtcgggagccgctccgggggaactttggagcagggtgtctggacccggggaagcgaagatccgcgtgcgtccgtcctgaggccgcgcggcacccctgctgaggaggaggtcccgttcgctgtccagagcccaggggcgaccgccgcttggggaccgggggaccgttcagcgaggggcgcgcttgtagctggccaggccctgtgccctgacgcgttgtgctggccctacgcccggcggaggggctggggacggggactgggtgcctccgtgcctccgcggatggagcgcgcagccaggacccccagccgcaccccggggggctggaaaggcgaagtcgctgctttgtgggctcctgcaagtgccaggcgctgaccactcctcctgggagcctaactgaggggggtagaggcagcagaggttaacagaaatctcaggtcccttggtggaaggtgggtgtgtagtcgtggtactttacgcctcggtgtttagggaggagcctaaggtaaggagtcagaaacggggagtaaccgagctgcggcttttatataaggtcagtggtaggtaaggaaggggccttaacctctgctggtgaccagaagcctgcatttctgcattctgcttaattccctttccttaggtgagttggctcactctcattgcattttgttggaatgtgttggtgatag

SEQ ID NO: 39555 - DNA, 608 bp, Homo sapiens
tgtgagtttcaaacgaaataaaaacactatacagatccaaggtgtttttttttagagtattgttacctcaaagtagaaattttcaaatagtaatgttatcattttcttaagagcaaggaactttgtcaatagaaacaaaaacatcataccagaagaaccccagaatgctgggatgactcatgaagaatctgtgaatgaggcaagagaacattcgtcagcaaaatgactccgtgaactgatgttcaaatattatcaaattttaattaccgagtcataattgagtacttactttgtagagagcaccatatctaaaccctgtggtgaatgatgacattttcataggtaattcctccacattaagtgattcatcatagaaaaatgctttcatgctgatgacttccaccatgactgttggcattaaggatcattgacctgaagaactgatttgaacgtcttactgcatcattttaatgagatagagcatcgtttggagctttggactgggaatcaagaaacctggtttctagctcaaactctgctgctaatttatctaggtcatgctttgggcaaatcatttcattcctctggaacccattttccttatatca

SEQ ID NO: 39556 - DNA, 1892 bp, Homo sapiens
tattgtgccatcgtgtctggattactttgtagtataagtaaatttccaagcatggggaggaaaggagaagctcctttattgagaattcaactgaatatagagaaaactaattttacacaactgtaatcactgtagtcatttggacaaattagcaaacccaagttttgctttaacttggattgccttaataaagatgttttggggcttaatggcacagttgctcaactcccccactttattccgtgatgttcagacccagccagcatttccccatcaggctcttgcaccatgattgacagggacacttttactagtccccttgaagaatgaatagttactcaatggagattaaccagatatatatttattttactcagaatatcacgataagtataattcagagaattattgccttctaatatactgccctgtgtgggggcgtctttgaaagtccgcaaagtcactgcaattctaataggccactcatgtgacaagacctgctcccacatcggtaatttggcacagctagtatttctccttgccaaaaagggcaaaggccttgagcaagaagccagctttttcctgattacaaaactgaccacaattcctcgccaacctaacagcgtaagtctatttttttctggtggtgtgttattcttctcatagagaactccattttttcattatgacatagcacttatcgtttaaacatcaattgatgttcaaacatcagctggtgtaacattgctgcagttgctattgatggataagctgaagtttttaagaaagcaaacccgatgtataaaattgaaaccatatcaaacccttcttcattctctcagctatttaattttacagaatttagatagcagtcagtatcattttgggcttcacaaatcagtagagtaagtaccttaggaatataacatttcagtagcatgctgataccaacgtttaaactatggatacatatttgaattccaaatttttcttcaaataatgtgattagagattcaaccaggaatagacaccgaaagaaaactttgcccaaataagctttctggtatttcataagcaagagatttaagttttccatttaagaagcaattgtgaattttacaacaataaaaaatgcaagtggatattgaacagtctctgctctgataattctaaatacagtacagttcacgcccctcacaagacactgaacatgtgggtcaccggcgagacagtgtggcaatattttccctgtaatgtaccaagtcttgccaaagcagtgaacattatgacacaactttttgtcacagctggctcctaataggacagtgccagccaattcaagcccagtcctttctgtgtttattcccatctctcccaaatatttggaaactgatgtcttgactcatgggtgtattcacaaattctgttacttcaagtctttttcttttaacggattgatcttttgctagatagagacaaaatatcagtgtgaattacagcaaacccctattccatgctgttatgggtgaaactctgggagattctcctattgacccagaaagcgattccttcactgatacactgtctgcaaacatatcacaaggtaaagttccttccagatacggctattggggacgtgggggcatttatgtaagggtaaaattgctcttgtagtttgtcttccaggttgtgtttgttttaatactatcatgtgtacactccagtattttaatgcttagctcgttgctatcgcgttcatttaaaaacatgttcagaaccttaaaaaaggaaacctaacctaatctattttatctctgtgcatggctcccatttcctgaattttaagcattaaaggtatagttatatccaaaaacaatcctgttcatttttat

SEQ ID NO: 39557 - DNA, 516 bp, Homo sapiens
gcccaaagaggacttccatactttttccaaggctccatcattgctgtgacccctttatattattcccctttctctttttatcaagagctcctcaagcaaccccaagtaacctcatgctggctctgaaaccatttccactagtaaaaattggcaagattgaagggaagcttccacaagctcaagctgaatatgcctcctgcttttagtgccagacttagtcctgtgtgaattctacaattttaagtcgttgcaccagagccttgaaagatgatgacacacttgtcctttggagctgattgagcaatggaaatatgccttagagacatgataaatgctgcaatagacaatccttcaaaacgagtctctcctgagataggagtgagtgattgattgcatgccatttttattgagggatacttaatctgtggttacatatctccaggcaactgtatattcagaaacatttagataactgaccaaagttttcacctttccagaagtttaaagggacccatg

SEQ ID NO: 39558 - DNA, 744 bp, Homo sapiens
ccaagataatgcttactttattagactattcaagactattccctacgccttttgattaattcagagttcatgacttttgttagaaacaaattctgttacagatttagttcttcgcattttattctgtgataatttgccatccaggaaatggttccttacatgagactttttccctcataaatttgatgacattcatatacattcactaaagacccccaaaaaataaatctggatctgtgaaaagtggcaaaggttaaaagtcccattttcagcatatttacatgtagtaacaacttgataacacagcgctgagaatgccaggctcagaggagccaagctgggctcccgtccagtcagcctctagctcaccaggaaaccctgagcaggtcactttgcctcattttctttatctgtcaaatgagaactcagatgatctcaaaacagccttttctgctgtagtgtttcaggatgattcttgtctctggatgtcgctgtcatgatgggagaggaattagtaaattcccaggtcagtttacactgcagagtgatcttgatctgcatgaatcagtaaggatgggctggataaacaagttggaaccacagttatgagtaccatgacattaactgaaacaaatgagaagggattgaaaaatcggcggttaagtgtcttttaaggtcatttccaacaaaactacaaaggacctatgaaaggcttttcaggcacgtactcttgttgcctagctg

SEQ ID NO: 39559 - DNA, 661 bp, Homo sapiens
tatctgtatgattactaatgggtcagttcctctaaaggcaagaatgtattttgaatagagctatcagcagtactgaacaggatggaaatttggtccaactttcctcaacaattgactacatctgctgtatacaactgtagtcatggattgcaaaataatttgctggttcagttccatcagtttcctttttatttcagacctcataaaacataagggcaagcttccaagtcaagggttgtattttaggtgatgcaatcaagttgcaataaacttatttcatcttcatgaagaaatcattgactttgaggtcattatcactgagacagcctaggaaagcatgccagttccgcttttaacactaatttttgcctattaaaaaattatcacttcacacattcatgtaaaatataattcctgttacttacaggcagtgcatacattgatgtaaaatatatttcctgttgcttacaggcattgcatacgtttacttaaaatcaatctgcaattgcttattgtttataggcaaatattatttaaaccccaacctatgtagtatggatggtataattttctcctcccataaatgtcaaagaaagctatcataaacttgataggtcatattttgacttcatatgacaatttattttatttctagagaggg

SEQ ID NO: 39560 - DNA, 1854 bp, Homo sapiens
gcatatagtctagtgaagccgatcaccataaaaacgcatggctgtgataccacatcgtgagtgtaagaacagagctatgtatgcatggggaacagtggacatgatggccaggtacccttattatgggaaacatagaacccaaagtgtgttcccaaaggaacatgattcaaaataatattttgctgaacatattggtaagaaggaaagaaaacatatctgagttgaaaagttacagtttattttttccccaaactagtccccactaacccctcttacattttccttgttgcttttctttctttcattatcttctttgacacttcctcaccctacaggcagccagtttgtctttctgacaaacatcattaagtggtaactctggagagtcgggagataactatggcttctctccgctacatgtaaaagtgctctctggactagtaaaatgtgataaagcaccatccatatttctttttaacagagacaaacaaatcttataaactccctgagaacaaagcctatgtctgtacaactttgaattctgcacagtttcgtattttaattcgtgaaacgtgttgatccttctagtgcctgaccttaggtcaagtgctggggatacaaagaaggtgacctttgaattgggtcttgagggatgagtaggagttggttctcaattatttcacgtttaagtcgacatacttccctccctttgctaaactcgaattctttcactttctcagcaggagtatgcattaacttttaaaaatgaaagttaacggtttaatttttactgatggtctgtgctacttttgtgaaataaaaacatgagcaaagtggtagacagaaaccaggactcaagagcagtggaggaggagggcttctactgtgtgggaacgagggctgggagagcacagtgtgtgttcagagcagtagtaatccaatgattcatcctgtcattcctcttcctctatagccatcaggtttgggcggatgccacaggccgagaaggagaagctgttggcggagatctccagtgatatcgaccagctgaatccagagtccgctgacctccgggccctggcaaaacatttgtatgactcatacataaagtccttcccgctgaccaaagcaaaggcgagggcgatcttgacaggaaagacaacagacaaatcagttagttctcttctgctgtcttcattgggggaggcgggaagttgttttgggtttttgtttctttgagtaaatggtttactgcgctacaaatgcacacacagaatattgttcaactgttggctgttaacatattgcaggctgagtctgaaacgcaggaagtgttttcagatagcacaagtcaacattattttgaaaagggagaaaagtccataaagtttttgagaatagtgtaacaatgtattggtcatcctaactttaatgaatgaacttaagccccctgagcctatcaccctcttttaggatccatctcctttctcggcatcaaaataactggccacagcaatattcattcaagcagccttgctttcctctgggaagaacccgacctaggtttagaaaaggtattgaatcccactatttcacctttcaggagaactaccagagttacctctttttttttttttttttttttttttgagatgtcgtctcactttgtcgcccaggctggagtgcagtggcacaatctcggctcaccgcaacctccgcctcccaggttaaagcgattatcatgcctcagcatcccgagtagctgggattacaggtgtgcacgaccatgcctggctaatctttgtatttttagtagagacggggtttcaccttgttgatcaggctggtctagag

SEQ ID NO: 39561 - DNA, 2654 bp, Homo sapiens
gtaccagaaagtcaggcaaaagactgataaaaaaaaagcctcggtggtcaagaacttaaaattacactactggtgtgcaacgtgctcttatctgtgttactggaggacaccctcaagatacctcactccagttgactccttggctctaaatctttgagttaaaaaataaggaggttctttatggaataaacaggtattaagctatttaaaggagagggctgcgaaatgcttgattatgggcttttcaagttcagaggccaagcgtttgtcattttcttccagtaactaggactgtgtcttgcccctaatagttactcagactatatttgcttaattgaattaaacacagttgcctatgccctttgaaattctggactttcaacagagggcctctagcccaatatttgcttaccaaactggacatcattgatgatctggattcaggcagggtctggaaaaagagagactgggccaaattaaaataatccattcactgatgacacaaaactaaactacaattgtttggcaccctctcttctccttatcttgcaaaatcaaattaagcactagtggaaagaaacagttcagagaggaatatgggaaaggaaaaaaaaaaaccaaaatgtgatttccaacgagactagagatttgttctttatctacatggtcatgttactcatttgatagcatctatctcaggggtattatgttatctcttggccaggactcatgaaagttaagatttgcattgataggaaaagttttgcagaaatatggactcttgagagggtgggaggtatataaaagtggctatggctgtgcagcagagcaatttgcatttcttatacaccctgcttgagactgatgtcattagtgttggttaggccaaggctgggggaggctactcagaatagtgggtgaccaattacccagaacctttggaaaaggaaatgacttgattgaagaggccattctttaaatgtatcttactgctcaatttcaccattgcctattgtagaatgcgccctgcccgctcagcatttgcctctaggcagaccaggactccttcccctccccaactaatcttccttctcctgtatcttattccctagggccacttgcacctttcaaaatggataaattaaattcccctgctccccttctaccaactttaacatcatatccttggtgtatgatgccctacttttcattgttttgcctaaataagagtatgcttgggaattttaggcttagggctgggaaaagatgggatatggaatcgtcagctatagattgccggacaagaaattttaggagcagtagacctttcaaccgccctcaataggatggaactgactgtccccacaacctatttccctttcagtggcttgctccagccaaggccccttatttaagagatctttgtgcgctctgaaaaccatgcatatgccagaactaggtgctctgtttcatgaaggcagtttgataactgaatggactttggaagtgcccagtgtttgactattaccctggtgcgatgatcacactgggcgtatcattgtcacatgatcccatgtttgttgatgaaaataaacagtggttttcaaaaaccattttcagtgccatggtttgtcataaaacaataaatagaaaagcgcttgatgtacctgccaacttttcacccctatctaagagatggcgaagctccggctgcactctgtctgcaaataaggaataaaactttttatttgtgctatattggactttgggttccaaagcatcacattgtttatggtaggtacatgtggagtcactgtatttataattataagagcaaactggtgccattggaaaaaatggtctttctaaatagtgtgtgaaatatgaaactagtgaagaataaaatcaatatggaaatgtaaacttctatgaaaacatttccttacccatttaagtttgtgcattctgaaatttacaatggccatcaaacccagtgactcaaagctattggaaagatatctgtccttttaaatcctacacttacagctaaacaacgtatgggttcttttccctttatctctggaaaagcccgactgagctggaatttgctccccaaaggaaagacatcaggcagaatcctcagagaaaggggcttagggaccccagtagaaataaaatcaggatagtagtgccaattcatttctggggctgctggagaagttaggcttctgggatcattcatccatgtatcaatattaataaaataaattcttctattgccaggactgtcaggaatagctaaagatgtaaaagatctaaaccagtgtgttctttcagagaataagttaaaaataatattttatagagttaaaaagaaaagcacttggattttttttttccaatggctggactcagttggccaatacccttgtttgcctgctgagtaactctttggctggcaattgatttttttaagagctgtggttatgtgctagttcattagcatgtgaataattcttcatattaagttttcatttgtttgtcgtaaatctctaaaccctgcaggaaagcagaatatctttgacagctttcaaacttcacttctatcacacacagcactccaccagcacctctaggaaacagtggttcaaaag

SEQ ID NO: 39562 - DNA, 728 bp, Homo sapiens
caccacgcccggctaattttttgtattttttaatagagacagggtttcaccgtgttagccaggatggtctcaaactcctgaccccgtgatccgcctgcctcggcctcccaaagtgctgggataacaggcatgagccaccgtgccctgccagatccaccatttcttaatcctgagagcttgggcaagcctgggcacctctctgtacctcaatttcctcctctgaaaaagcaaggggtctaaccagctctaggctgcccacctcccgaagcattttgtggctataaggggaactgggttgtcaaccggacttaggacactgagttgtgagagatttgtgaatcaaggaggtggtgcctggattactgtggccactgcaatctcagctgagcactggccattttcccatcctggaatcagagtgatatgtggtatcctggaatctgccctgaaaggggagtaaggtcaatgtctactttctgcttgctggggattgagctgagtggcactgggaagaggtcatcagtggtgcaacaggtggattctagcttcctttggaagtgctgccagccaacttccaatcccaggtccctggcacagtgctggcacatcacaggtccatgggccatgcctggcactgactaagggcctcacataattgtacccagcttttctgtctctatccattctgcttgtggtggccaagatattttctcaagaacatactctga

SEQ ID NO: 39563 - DNA, 1531 bp, Homo sapiens
tgatcctctttctacattgagaaagatgagatcagtttcctcagggccatttaataaagtcctgtcggtcgcctcaaacatcccatccaccgagggccgaagattctaggtctctcccacctcccacgtgactatgtgacatttgacgggtaactgcatctcatctgtaaaatgcgtcttgcaggatcgttctggcttccgtacaatcctgcagagagcagcaaagcgcgcacgcagcctccgcctcatactccgcagtggcagagctggcgcacagaacacccgccagccggccgtgcgcaggcgcactccgccaagtcccgacgggagctctgcggctgcgcactcggctggctttgcggccgcactgcttgacggcagcggtgtccgccccacggccggcgttgccggggtaacggcgagcgcgtggggccaagaaaggtaagggccctgggcgaggaaagcgcggccctttccgagtttggtgttttgcagcgaaaggaaatctcgctcttccgaaagtcctccagggcgagagaggaaagggcctaggtactgtgctggggtcgcacagccggccgagacagtgccgggacggggagccaggcttccgagtgcgcccggtcactgactcctccgcgctttcctcgtgcgcctgcagcccttggttcttggaaacgccggcgccttgttcagggctggtggggctggggcgcaaggtgcagctgacaatgcccgagaggagccgcagcctctggtggagttcggtcgggtgtgggggtagtcaaggaaagaagcaaaggggtaagacagggagttaggaattggcggggcccctaacgctgttggggtgcgcagtttattttatttgcagctgtcgtctggtgagcgctttccacgtggtaggccccgaacgaaacgccttctgcaaaattatgcatttaatcctgacaacaactttcaaaggctggtcatctgtttatatggcttattctcaggttctaacttgaaagctccccagaggcaggattgtttaccttgtgcctttcatccttgcctccctaagcccaggaggtgcgcagatggagcttgaagcgtgttttggttgggagaaggtgagatttgctgggtaggaggttttttaaccaggtttgtttggcacctagtccaggaaggttggaaaattaaatggagccacctctcccttttttgtttttctaatagacatttaccatcacctaagaggtgttagcctgtgtgctcgagggaagaataagaaacagactctgcttttaatagaaagtaagaatatgcagctctggagtcaggttgcgcaggttggggaaataagaagtaaagatttctcaggggtgcgcccggcccctccgagtcactttccacatctgtacaatggaaataaaaatagtctttacctccgggggctactgggattaagtgaatttgaatagaccttgctgttaccagtggttagctatatgttaaaatcagctgggtccacccaggaaattct

SEQ ID NO: 39564 - DNA, 793 bp, Homo sapiens
aaagaaactttcttaatttggcaatggatagcctaaaaaaatctagggctaacattttaattaaaatattaaataattttaaagtaaaatattaaatatttttattgaatccaggaacaaaataagatgtacactattactacttctctttaacattgttctgaaggctgtagacagtgcatgcaataaggcaaggaaaagaaataaaagatacaaagatgaaaaggaagcaaaactgtcattatttgctgatggcgtgattgtgtatagaaaatcgataactaactacaaataaaccattagaattaattcaaaatttagcatggagctgaatcccaagtcagtatacaaagatccagtgtatttctatatataagcaacaagcaattcggaaattttaggaatatcatttaaaatagcatcgaaaaccgcttctaggggcaggtcggcacacaaagaaaacgaaagctttgcaagaccctcggcgcacgtctgcgcaaagggtctctgtgtctctacgcccagatggccattttgagtcccgagctggcagccacccttctcttctgttttctcagcttcttcacccgcttctatctgatagcctttttctcccgagtgtttggtagcaaagttgcttttcctaaggggcgagaacgggagctggtggttagcaagcagacgcagttttacgcgcccctgctacgggcaggagcgagtggccctgccttctctgccagcgcgggttccctgggggtgaggaaagtgagttccacgtcccgggtggggcagg

SEQ ID NO: 39565 - DNA, 2000 bp, Homo sapiens
gcttgaacccgggaggcggaggttgcagtgagccgagatcgccccactgcactccagcctgggcaacaagagagaaactccgtctcaaaaaaataaaaaataaaataataataattaaaaaaaaaggtatcgcatggtgctaggtagaagggacggtggaaagggggcagaagaggacgcattggacagaggtgtgggagcagaatctgcagggtatagagagctagagggaagtgtcaaaaataacttttggggtttccaccataggaaatggaagacgagcagcacaagactggcaggaaagaaaatgaagactaaaacttgtggaagtagagatttggggaaagagcagttgggagagagctaaggaatttccttaagtgggaggcgaggtccggcgggaacagttgaggcagggcctgagaagggtgcccagtgagtgcgagtatgaatggataggggcatccgggattaagaggagaggctggagtttccccaggagtggtgaagtgcctcgaaggaggcgggagatccctaaggaatactcttggcgatcggggcagaatcgcaggcactaacagtaggcatcgggataagactggcaggactaagatgccagccaggctccgccccggaggcttggaagtgcgggacaccgagagcagggatgccgggacagccggcccgatccccggtgcggaaccaattgtgacgacggctaggttacccgccggcgctacaaaggtgccacaccggaggggcggcgtgcgccggcgtgcgccggcgtgacgcggctacgcgggatgggccgggccagggccaaggccgaggcggcagcggctgcgagaggcggcggcacgacgacggtccctcagcccagccaccatgagcaccaagcagatcacttgcaggtcagtgcgctggagccaggagcttcgggccgctcccccaggccgcaggggggccggtgcgcgccagtgctgtggtccgggaacctgaggctagagcgggactcggaaagttactcggctgttcgcggcggggctttgcgaggcagagcgagcgctgccgccacagccggggatccgggggatgcgtggccgagacgctgggcgaggccagcgcggggggctacgccccgagtttgaagcgtggcccctgtgggctgggaggaaggacgtcctagccagggccgtgcaggatgccggggcgctgtcgggaaggctctggggcttacgctttaactggaaaagatttgaagttgagtaaagggacgccgagaggacggttacaaatggggataccacataggagtaatttgttaatcgattatgagggcctcaaagtttggagaatccagatgcaatctaaacttgcagagagttaacaagtaaaagttgttgtgtggaaaataacgacaggtagcatattgtgaatatcggcgaagcgccctgcatatttccaagtcctttatattcattatcatcagacttcacagtaagacaacttagtagttattattaccattttacagtgcaggaaactgagaccgaaagacgttgacactcatttatcttactgagagagccatttacgaggagaaatgcgacggtaatggatggtttattgtagaaaatagccagatagctacactacgactgctcctatgaaatagaatagtgtggttgtgtaacaccctcattgcttggtcagcttgtggcttactggtaatggagtctagtcctattgaattgtatgtttggaaaacgcaaattgaattgtatgcttggaaaatgcaaatttcatttaataatttttatgggaaacattgcttaaaaacagttatagagtttgtgtaataaacagtttattttctatgttgttacttctcttcattggtatgaatagttgagacgtgactgtgtagtaagttttctgttagcattagtgtacatttactgttcaatttatccaaggcccaggtggcttatgttaagctg

SEQ ID NO: 39566 - DNA, 946 bp, Homo sapiens
ttactgcaacatctcctgcaaaattagttggcagtcagtgcaatcagttgaatgatctcagtctttcaaataacctagttttgaggaagatacagtgaatcatttatccaaagaatcacatacctacacagatacggcaaatttccaattttttttttttttttgagacagggtctcactctgttgtctaggctagagtgcagtggcacattgcagccttgacctccagggcttaagcaatcctcccaccttggcctcccaaagtgctgggattataggtccaatctctacataattcaaatgactcaaaaaagttacataggttaactgctatcgctacagttaggccttcgatagccttggttaaactattcacaccaaccctggcaagccacagaggtgaggtcatgtgtgacaggtcaaaaccttgtcctgtggggatgaaatcagtgcatacatatgaatggcctggcaaatacagaatgactggggctggttgctggtgtaaggaagcaggccatttagcaactattgaggctgaactctgaatccacatttcagtgagacctaagatggtccctagtaaaaattcagagatatatattgaaattaagcttctctgccttcaataccattaaaaagtaattctaataatactgaatcctggcactgtgtatacttttatctctgttaatcctcacagctgccctctgacgtaaataatttatcttcacagacaacaagctgagaagtttagtcacttgcccaaggtcatacagccaaaaaacaaagaacgctgcagccaggatcaaaaccccagtctgactccaattgctattctacctataacactgacaactgattgtcaagcactgtaaaaccagcctcttgatataactttagacacatccagggatccattccactttagagtgctataaattta

SEQ ID NO: 39567 - DNA, 1616 bp, Homo sapiens
aaaaaaaaaaaaagaaattcaggccaggcatggtggctcacccctgtaatctcagcactttgagaggttgaggcaagcagactgcttgagcctagaagcttgagaccagcctggacaacatggagaaaccccatctctacaaaaaatcagccatgcacggtgtagcacatgtgtagtcccagctattcaagaggctgaagtgggaggatcacctgagcccagggaggtccaggttgcagtgagccatgattgtgccactgcattccagcctgggcaacagagtgagaccctgtctcaaacaaacaaacaaacaaacaaaacaaataaataaattttaagtggtcacaacactggaaaaaaaataactttcacacataaaaagtttctgctgagcaaatatgctcaaatgttagtttcctaaccagtccaaaagggcactctcatgcactgcaaggtgatgtgtacgtgtcaatatttttcgtttcctcactcctctttctcaatttctgaccacaaactggtaacttcatcagatgacagcccagaataaacacacatgaagaaataagccactctactcttctaaaagttagcaggggctgtacaagtttacaaaacagactcctacattttaaaagtgtaactttaaaaatacaagttaaaaacgagctagttcaaaaacaattatgctaaaacaaatcagttccacaaatgatacctggagccaactttatttttaactctcaccacaaataagcttaaattattttcattttaaatcacattgtctggactcttttttaacccgagtttttcttttcaccttcaaatcagtcattgttttcttcatctagtcagcaactgctgatttttaaaataaacagatgtgtattcaaagtacaccattaacacaagtaccaaaacacacaatgtacaaataaaatatggtttaggaatgattattcagatagccaagtaacagcgaagttaaaaaaaaaaaaaaaaaagctacataatgaagtaggaaggaagggggaaaaaaatcacctggaaacactaacaatttccacactaatttctctttcatactaaaggcattaattttcacagtaaatcttgcatattcaacaagtggttaaaaaaaattagccctcctcaaagataaggacacagaatataagtgaatcattcattctacacactggcatcactcatttggcagaggagatgtgtcctcaagagaagaggtattcccccaagtttacatcttaccaaagcagtttcaagaagtaaccatctatattagccggatgtggtggtgcacacctgtattccctactcagatggctgaggcacgagaatcatgtgaacccaggaagcagaggtggctgtgagccgagatcgcaccactgtcctccagcctgagtgacagagtgagattctgcttcaaaaaaaaaaaagtaaccatctgattcagccagctcccctacacttccttctggagtcaatggctttcaaatagaaaaattcccatcggccggatgcggtggctcacgcctgtaatcccagcactttaggaggccgacgtgggcggatcacctgaggtcgggagttca

SEQ ID NO: 39568 - DNA, 2718 bp, Homo sapiens
aacttttattttactctcatctctcaccatttccttcctgcaccccaggcaatttgctgctccccaaactcatcccaactcccacatggctctaagcctttgtaccagctgttccctgagctcctcctcacccgatgagcacttactcacaggtgtttcaaaactcgactcagaagtctcctcgagtgtagaagcttcctcaactcctccccaagcaaaactaactgttctaaatccccataacacttgataagccaattcttatcacactgcattgttttcacgccttaggagcgcagggagggcagagtctctccactcagcccacagaggaccaggcaagcagaaacgctcaatgaacgtgccttgaattcattttccacttagattaagtgaccccctagaacccgttcacatctcaaggatacactaagttccattccttcttcccaccacagaatgaataccaggggcacacccagagccctagaacgagaacaatgaatgaacacggccgcctcgcctctcacgacgtccaaacccctctctcttgggcatcgactcgctcgcagagcctcagcagctgcagagctgaagcgtcccggcggctctcgcgtcacacaaaagacagccctggctcttcattccaaagcgtcctgaggccaatcctctataagtatcccaaacctttcattaataacccagagtcctgatacccaaggctagtcctgatacccaagaagaggcccctgtgcctttgtggtagggcactggccagtttcctcctctcttacccgattcctcacgtcgtctctaaaagggtgtcacttgactgaagtaccctgagaaagggtgcaagcccgggtcccacattcggcggcccaagagaaaaggaattggcccatccaagtgacaacagatatggggcagctctgggcggattttcccactgccaaatatgaggaatgcgcatggcataagggtggcgttggcacgtttccgccaaacacaaggaaatttgagtgggatgtgggaactcggctcgccggccatgacaccggactccggggcccccgcccaacgctaccccagggtgacaacggcctggcccaagccctctgcccggcagccgcggggccgctccatcagcgccacccaggcccggtcgccctggaagccgatccctcagccccgccgcccggctcccccggcatccacgacccggtcctgccacctacctgagggagccaggccgccccaacgtcctgtcgttcggcggcagcttctcgcccgctcctcctccccgcggcgggtgagggagcgggaggcggtcacattcggcgcgtccccagcccaggggacggagccccgagcagcccccgcatcgtagcaaacgcgctccgcgcctcagggcacgcgccccaaagcccggccagctgacccttttcggggcccaaaaaaggcagcagaaagccgttcccgcctcacaatcgttttcctcttactcccgccatctaagatggcggcccaagcgcccgcgattaagactctcgggcggcccagacgagcgagccctcgactcggtgctcgtcctcccgacctgcgacgccaccggctctccgattctgcgcgagccctactggcagtcgacttctaacttggctcgggcatccatcgctctggcctgaactcaggccccgcccccggggcgtggcctagcgatctggtggccgccatttcgaagctgaagaggttaggcgacgctgacttgctttcaggagaggcactcggtaatcgagaagaaccggctttcggccagccaggagtggccagaggcctagaaggggagaggaaggcctgcctgcccagcattgcaaggcccagcgatcaccagacgtgcctcaggacacagggcacagtgtccaactttgacgcgtcctctccgggcactttaataccaaatcacggctccgccacttgacagctatgtggacagtccctgaaccttaaacggtcttttccttgtgtgtaaattccgagttcatttttcccccatcacattagcaacaagttaaaaaaactgataatatccggtttggtccaaggtatattgaaacctgttgtgtgccctcgcagcgctatcacagtggaacttggacatgttaaaagtatatatccttcctcccggcagtttcacttctagacactaattctagagaaataagtatacacatacacaaaaagctatgtgtgaagatatttaatgccatattatttgcattctggagaaacactggggatgaaatgaagattaataggaaactggttaagagaacgctgctacacatccaatctgggttgtcatccatccaagaatgaactagatagttactgaatttaaaaaacaacaaaaaaagggcccggcgctttttttgggattactcctgtaatcccagcactttggaaggccgaggcaggcggatcacctgaggtcgggagttcgagaccagcctgaccaacatggagaaaccccgtctctactaaaaatacaaaaattagccgggcgtggtggcgggcgcctgtaatcccagctactcaggaggctgagacaggagaatcgcttgaacccgggaggcagaggttgcagtgagcccagatcgcaccattacactccagcctgggcgacagagcgagactccgtctcgaaaaaataaataa

SEQ ID NO: 39569 - DNA, 917 bp, Homo sapiens
acttaatatatgccaggccctgtgttagagctgggcctatagcagtaaacaaggcaaagtccctgtatgtactcaaggactttaagctctagcaggggagacaagcagcaaacaagtaaatgaataatatgataattagggttgtggcaaatcaatgaagggaattgctggagaatgacagaatgggaagagggtgtgcctttagattcagtagtcaaggaaggcctgtctcaggaggtgatagttaagctgggcacgaaaggatgaaaaagagccagaggaagagcattctaagcagttggaacagcatgtataagggccatgaagtgagacaggagtgcaggccagtgtggttagagcacagaaaactgggggagcagatgaggctgaggacagagggtggagtcatattcagtctgactcccaaacctgtgacctttccatgccatcctgccctgcagggactttgaagtgtggggctggcctgggctgggtgctgggagagacagagccatgtaaacaaacagttgccccagcaggtgacgcaaatgtgctctcatggataactgtgcgaggggcaccaagaggagggaggcagtgaccagagacaacatataagctatcttaaaggatgagtggaattgtaaccataataggtcctttatccggtgcacgtggcaagtcaattcaccacattgcagcagtgaaagaggtttatttctagggatgctgaaccaggagatgggaggaaacctcaaatccgtctccacagagtttggggctagggttttcaggggtttgggaatcagccaaagtgtggagatccttgattgctcaaagggcacagggcaaagtcatggaacagggagatgaagaaactgtattctcatgctgattccattcctctgtaggggtca

SEQ ID NO: 39570 - DNA, 617 bp, Homo sapiens
aaaactgttcattaccttctgtttgcctcctactcccaagttcaggtacttccctccctgagccttagtttccctctttgcacctcctacagcatctggttgtgtgtgtacctggtacaggatggatgaacctcagggcgtttcctacctctttgctgtgggcagatctcaggggacatgatagagctgccagaagtgtaaggcaggccccagctcaactccatcctgaggtgacctcattgccctgtgtgtagggggtgattcataggacaacctcctactgtcctgtgagcacagctgacagcccgggggagccagctcagcagctgagcatggcatccagcttccctgaattccagaactgcaagcgggggcctgcctgactcagcaggcatgggtgttctggagacaagttagacagctcagcctcagtctccccatccataaaaatggcgggacacagcccctatccatggtgagaatatttatataaagtggtcaaggcagcgcctggcacacgtcagcccctgctataccttggtgttcttgtgatgaggctgtgggatccttcaggctgattggaactccccagtgacttcctaggtctgagaatgatg

SEQ ID NO: 39571 - DNA, 1851 bp, Homo sapiens
cgatcccaggaggtcaagggtcacctcacccactcagagcccaaagaatgccaacagctgagcaaatcaaaactgaccccaagacactctcaatttgcaaggggcagcaaatcccaccccaccagtgtccgaacccccagatggtccttccggtagtactggccttgaccatctacttgaacctgagtcttttcctcacctgtaaaatgaagatgacactgcgcgctgaatgcctgcagtgcctgtcacagggtaaatgttcaataaaaccttctaattccctagggagctgctgcgctaccacaccctcaacacacacaaaaccaccatatacctctgaagatgcctcaaacctggagatcttccagtatcaactcacaccttcctcagtgtggtcttccgagccattgatttcctacagcagcaccccttctgctctcttcgcagccatcaactggcccagagtgggtactcaatgaaccacgtattcaaaacgactctgccttctggcccatgatatcctcgaaggcaaggtgggggcagttgcatcttcatattcccagagatactaccagaatttctgcctgcagctggaccagccgacctacagctcgtctttccttggcggtcccgcagcagcagccctcgggccagagactgcagcggaagaagccggccatggcatgaacgaatacacgtgggccgacattggtgagcgctgggatccacagatcccagctgaaagctgtcaagctgggccacccctggtcgtcccacggcccccaggagaccccgaagtctggcctcaactagcaccctccaccgccaaggaacaaacaagcagcccgcagctctgaatacaggcggagggcaggaggctctgggacgcaaagccctatcaactcggcggcttcgttctgttcctgtacacgctccagtaagctgacaataacaatacccacagacactaccgcgctgaaggggaggcctccgcaccactgggcgacggggccagatgaatcccgcaggaatgcggattgccacggattaacacttaccgagaaggagatggctgccacctccgtaggcagcgccgaggaagagagaagggacggtggcgcgcaagggctgatgggtcgtaacccctgggtcctagcagggaaaaaggcaagcacttccggctccggctcttttaaataaaataaagacacgtcaaaaaataatgccgcaaaaattctgagtatacatgttttaatagacaataataactaggaataggactgagaaatgtattctacctatccttgggactacgtagaaatttggaattctttctgagctaataagacctggtggagggaggaatttacttccgccagaagtcgaagccaatccgcttttgggctatttccgcccgcgtttcttctactccgaagtgcgcctcttagtggtcagaagagaacaagacagagacttcctaataatttcatcaccgaatttagacagtaaatagtaacgaaaacagctaacatgcgatggagttcactatgcctaccacaattctataacgtacccctattattgtctccattttgcatatgtggaagatgaaatttggagacttgactccaaactccacgcttctaaccactgggcgaaactgcctagtttttctttgttcattttttagaaatggggtctcactctgttgcccaggctggtcttgaactcctgggctcaaacgattctctcgcctcagcctcctgagtagctgggattacgggcacgagctactgcctagatgttttttgttttgttttgttttttggtttttggttttttttagacagg

SEQ ID NO: 39572 - DNA, 798 bp, Homo sapiens
aacaggcttggaggggtgtggtaacttgcatacactcacgaaactgagctgggacttgaaacaaaatctgtttgcctccccaggcccttctttccttaagtctcaagctgccctggattccagattatcctggtaaaccaagattccacagtatgcagagtccagacagataaaaccgtatgcacacacagatgcacacacatgcacacacacatatactgagctcctgcagccctgggtaccctgtccaatactgtccagaaacatctatttgcccagttgtcacactgtttgactatgcagctgtcagtcctgtccatgtttttgaactgaagctgtgtaaatattagcgcaaccagttcatagtccgacttccttgagtgaaagcctgaaaatcctagcagggctagccagggcctccagaggcctccatcacaacattggggttctcctgtaggctccccatgtgatattctggcccagtctctgggttctcttagtgtgtgtacccttaaaaaaacgaggataagaagagtcctgtgtttcacaaggctcaaacagcaaagtgccacacacgctcttggaaagaagcctgttatttgtagagtggtgcatggtggcatggctggacttgggagtggttatcttgggcccgttacagactaaggggggtcccctgaggtttctggaccgtgctgcatcccatccgggtttagagagggggagacggccagcttaaagggctctggcccctgggagccagcccaaggagcatctagctctgcctccacaggccaa

SEQ ID NO: 39573 - DNA, 1281 bp, Homo sapiens
ggcccaatgtctggaatagacaggcctgcaagaggccttcctggcagctccggccctgcctgcagttggaaacaggcacagacccgctgggcaccctcccaccaactctccgctctccctcctgcccctcacctcacacccacaccgagtcccactgtttccctctcaagcccccaaactcaaactcacccccacaccaacttgcactccaacaggccctcgatcacacacacacactcccatcctgagaccctcccagggcacacacagcgctcctgtcccaagggcgcgtctctctctcccacgcacaaactcgggtcctgtttgctcttctctcacccaaacccacagtctggcggacgcaccccgccccgcaggcagctttctctcgcacgccgggcgcccggtcccgacggtcacccgcactcccgcacaggcatccccacagcctgcgccagcccaccgctcagcacccgggaaggccgctcgccccgcgccgcgccctcacccgctgtcaagctctagctccagaagggactgggtcctctccgagttgcagtgcaggcaccacatggcggccgcagtgggagcgggccgggccgggagccgggacccaggcccagcagaggccgccgactcccgccagcgagccgccggatcccggggccgacacccggccacccggagacccgaccacccgccacgcgatcacgtcggggctcctggtccagcgtccgccggctcccgcggctccggccccaagtccgagccccaggccagccaagcccgcccctccgccgccgcccgcttggcgcagcgcgaggccgggccggaggaatgtggccctgaagtgggcggggcagggcgggggcggggccggagggcgagctgggggcggggccggagggcgagctgggggcggggctgcgcgcgggggcgagactgcacggagcgtgtggggaagagagcacaggaggcgtggccacacggcgccgcggaagaagcacagggggcggggggtcaggggcggggcgtcaggggcggggctacgcgcaggggcggggccgagccgaggcgcggggtgcagagcgcaagggcggagtcccagacactgcatccaggtcccagcgcgcgaagcctctgttctggaaggaggactttgcgcagcccctccaacactggcgcctcccgggagccatgtcttcctctccagcgtgtaaccacaacaaatgcacagcgccaaacccccaaccagagcctactccgctgatgcctactcaa

SEQ ID NO: 39574 - DNA, 1145 bp, Homo sapiens
gtttcccccctcggaaggtgtgtgtgcgtgcgcggctgtgctagggggcggggaggacggtgccgccccggccgccgacgtcacccgagcctggacgagtggagggcgctcaggtcggtgcagccgctgcagcggatgggtcaggagagcggggtacgcggggtccaggcgcggaaccgggggcactgcgacccccggcatttccctcagactaccccagacccccaataaacagcgaacaaacgcacctcaggccaagtcccccggctcctccgagggaaagctgcagccccggccgaaacgccccacccccgccgccgtccccagttcgcagatgggaacactgaggcccacagcagggaagccactggcccagaggcgcacagctgcaccacgctcctccgcgtcccctccaggacacaccctcctgactgtttggggacggggtggggacctgggcctgccggtgccgcccccatccctcagccgacctcgatttagatgctgggacgggccctggtggcctggcgactgttacagagaatggggtgggcacaatcggaagggagcccaaagacggggaagaagtggcgcagatagcagaggctgggcctggaagggatatgggcgggagcgcgcccgcgggggtgcacctaaggagaaagcgaggacgcgcgagtgccctccctggtgggtcgcagagcagacctgccccggaagccctgaacgccgggccgggagcggcggcctctctcccgcagccggaaccccgccggtctggagcgagggcgtcaggtggcgggctgcgattgggacgaggcgccccctggtgcccggaggcggcgagaccggagaccggagggacggggccgccagggcccagccagagaagctgagcgagtgatgtcatgagtcaggagacccggctctgtgggtcctgccacgaggggctgtgtgaccttgggcaagacgtttccccctctggacttctgggaggaaaggacagaaggagggaccctgatttttacctctgacatctcatgaccctggacatctgggtcaggtgagaatgggcaaatggatccagaaaggcacagacggatcagaagtgagatgtagacactgttcagcactggaggaggatt

SEQ ID NO: 39575 - DNA, 1607 bp, Homo sapiens
ggccaggccagttctgcagggctattctgggattgttcctggaggccctccaagagtctgtacctgcaaacttcccactgcgggtaagcacctgacccctgggctaaactccttctaattgagagctgagtgttagggactgaatgtttgtgttcctttagaattcatatgctgaagccctaacccccaatgtgacagtatttgggggtggggcctttgggaggtgattacgctgagatgaggtcatgggagtagagtccccatgatgatatcagtgtcctcataagaagaaaaagaggcatcaaacttccctctctctgccatgtgaggacacagcgagaaggcagccgtctgtgaaccaggaaaaaggcactcgccaggaacccaatccaccagcaacctgaccttgatcttggactttcagcctccagaactgagaaatatattcccgtagtttaagcccccacaagtctccagtagattattataggactcccagcagactaatacactgggtgattttgttttctacagcatcccctgccattgccctggacagccctcccatctcctctccttgccccagcccctgcaccctcattgctgttccctgcacttgcccgctttgcacacgctgttcccctggtgggctgccctgccttccatctcccagctggactcctactcagcctccaaggcacctgaactgtcacctcccctggagccattcctgacatctgtaaccctaatgcaaacacacagagggagttagcggcttcctcctggcccctgctctaagttcaacattcaccacggcaggtgcctggaaggactcccatgctggagctctgcagtggacagggcagcaagcgcggaggtcactagccagcccagccaaaccagctgggtgaccttgggcaattccccgacctctccctctgaaaagggaggcaagactggtaacacctgccaacagtccggaagagtccccggcacatgtgcagtgctgcatgggaggtggcgctcactctcagtgagagggactgacaaccaatcaacaaagagacgtccggaaaaagctctgcccagccctgagagccaggaagaggacagtctgtctagggtggtcagggagggcttcccagggagggcactgcgtgctggcccccaggcacctctgagcacctgccatggtggatgcggcaggagcctcgcacagacagtgggccaggtggtcccgcagcagagtgtgggctgcagggccagggagctgcctgctggcctgcagctttgggtacgggggcgagcaggcccacctgcccctatgcccctcccctgacctggccacacaggcctgaccacagggcccaggtgacacacggaggaggaagcctgaatgactctggaggctcccacgagtggaagccaccactgaggttcacgtcgtcactgaggccaggccagggagagcctggtgagacatgagacaatgctgtcacatgaatcagttctgaatgtgccaaatttcattctgctgtgattaaaaagcggctggcgcatcataaactcactgtgagcatcagtcaccgggtcgcaagcagacacgc

SEQ ID NO: 39576 - DNA, 1205 bp, Homo sapiens
tggctgatgccatatagctggggagcagctgggctgagaggagagcccgtttctcaaacgtctcctgttgagaagggccagggaccttcaggcaggatctgctgtggagctcacagaacaagtatcctccgagccccagagcagaccaggcccggggcttccaaaccaaatctctgtctcagccctcacagccaaagtctgcttctcttagtgattcctaaacatccagacaccatgtgcaggggatgatgccctcaaagacgggtagagccacttcctggggctgggcaggccctccagagctctgtccaacacctattggaaatgcctttaagtgggcgtgtcctttggccattctaggaatctatccaaaggacacagtcattgcacaaagatgcaaagattggcagtgaccaattgctcaacggtaggaggttgcatatgtaataacagcacccatgcagtgtgggaaaataggcagccaacagcgcagctgtagaacagcatttcccaaccagcatcccctacaccagcagccccatgtgagctcccagaggaacacatggtcaaatatgtttaggactcattaccagcaggggacagggggccctcggaaggggccacttgagccagccacatgaagggacggcttacagagggcaggtgagggcagggagccccccagagacacacccagggctagcagagcgacgagctgtccactccctggacctaagggatgagagggagcagtcacctgaacccaaagggattgcagaggggagctgtggctggggacagggggaccgcaggaggggctagagaaatgaatatcccagcctctttccatcctgcccactgatctcccatcagtaaacccaccagaaagctggagggtgcggaagccagtgagagagggcatccctccagggcacagagtatggtgagcagtggacagtgggtccagacagacagatggacagaacacccggatgcactctcttccccgtggagaaacaaaatgctattctattcattagcacatggaatacacacatttaacttcacttacccctgcccactccagaacatatggacgctttctcccgatgagtttaggtcacactgacctagaagagttaatggcataggacacagcatatcacgacgcaggcaaggtgaacacactgcaaaacttagctgat

SEQ ID NO: 39577 - DNA, 3502 bp, Homo sapiens
taccaccataatgttagatttacaatgttttcttctcccaatgagatccctcatgcatttacatccaatgcattcccttatccatcttcagcccccagcaatcactaatctacttctatctctatggggttgccttttcaggacttccatatgccacagtctggtggcggggcttcctccacttggcattgtgtttttgaggtttatccatgacatagggtgcaccagcagatcgttccttttcagggctgagtagtagtccactgtgtggaagtaccaagttttctctccattcacaccatttttttcacaatgcttctgccttaaaccactgggagggacttgctctccagaaagagagcataatggaggcacctccacagctggtccagaagccttgggtctggctggctccaaatttccccaacttgattcattctaggccccatctccagttttgtgccatgtccctataaactacttagtattttcctttaaattgcctcactcctttacttaaatgtattttgaaaagaaaattcacttttatttatattcacattttaaatgtaaaatactatcattacttgaaatagaaaagaatgctcaaaataataccaggaacacaaaacaatgacatcacattcttgctccagactcttgctgtttcaccccaagctgatccctgaaagaggcccagacaccagactggcaccaaactgagccactgtcccatacagaaccagaagagctggaaagacctgggatgtaatgacctgacctctacacagcacccgaagcatctagaagcagcaccatcatcacatgctagccccccacctaaagtcaggtgcacccctggcttccgaggccccctggcagctccggcattctaggattccaggattcccacatgcagaggctgggaaccttgacaaagctgtgtcgggggtgggagcaggagtgacctagcacctcctgtgtgctgacttccttccacatgcacctatggtgctcccaggtgtgcgaggcctggggcaaggcatgggtggggagcggctggaccttgctgtgctgaatccttgaagttgggatcattttttaatcccattagtccccagggtctggctcagtgctggctatacagcaggtgctcatggaatgtagaatgaatgactcataggtgtgtgcatgaatgagctggctggtgagagaaaaagacagacagaataactcatctgaaaactactcgaaccattcaaaaggtgctgctctccaaggcaacagagtctttggcgggaggtgtgggaagcctgtggccgagacagcatagtggctgcactaacacacaagatgcttttcacaactcatgactggggaaaagggaaaaggtttttaaaattttttcatggaaactggaaaatgaagttcatgtgctctatttgctcctgttcatgcacaggtggaggtgaggggtggccccaggcccagaggtgtctgtcggggagacccctgactgccaccctcaagggtgtgcactgggtcctgcaggcaatgggggagccattgaacattcttgagtgagggtggcctgaacagatccagcttcagcatgacttctctggcagcaggtgtgcaatggaaggaacctggaggaaggagggcagccccggccgccacctctacccccagaggcttctacacgtcctcaaactctcccaaatcacccataatgcctccttttccctcacctactcaatgccacccaccaagtcagctgcacgtgcacccaaaatgctcttgtcgccacagccaccctggtccaggccagcagcagctttcccctgggccaccatgtcagtctcccagcggatctggcagctgcctcgggcccttctacaatttgtgccacagcaggaaaggcctttaaaataacgtcacaccatgtcacccccaagctcctgcaaaaaccctccaaaagctcagtccatccacctcaccagcaggccctggctgagccatgcttccccagagacaggctgcatggtgctcctgacacctgctcccaagttcactggtaagaggaagccgaaggtcagcggactccagaactggcccttcactggccgcggctgcccacactgtccaggtgctggaaatcccctccctggagtttctcctggcagtgtaaccaccccacagccccccagggagctccccacattggaaaaatatttctggggccctggtggccccaaattgggatggccaccatcaaggatgtgcccccacccccggcgggaaggcacatgaagcagacgcacctcgcagagcgctgcctcattaatactcatcgccacttcaccaacacccacccggcggtcttcggggatcagcggaggtgtgaaagtggatgcattaggatgttaaatagttcaacagcaagcagctcctgccaagtgcttagtggctttctgcttgctggggcagtggcgccagtgctggcccaaggcccggccacctcagcaggacagcatgaggacagtccgggcctgccacgtggccaccagaggtggggtggtgcctctaaccagctggggggtggcacatcttcatccatggaccatcacttcccagcaaggccctgagaggctggtggcttatttccttaatgccactgctgcccacaatatccagagagtttgactttgggacttgaatgcatttatttgtcttctctctcccagtcactccaggcgtggcaactcctcaccggaaacctgaaacgtggcaaaagtcacctgcagccccagtcctgggaaccggggtctgtgcagccacctgtgctcaggctgccaccacccccgtcacaggctcctgctgggacactatttctaaaccccagctttaggcacttcagtgcttttgaagattttaaattggcacgggttagcattgcaaactcaactgcctcctggggccggcagtggccgggccaggtgggcctggagcaaactggagagccagcctggcccctccaaggggactgcgccactcagttccagccccagaccttgatcgcctcaaatttcaaacttggaaatggtcacatagggcctgtgaccaacattgccaatttgagacttggggcccaggagaagaatgggggcaaagaaggggggtccttgccccctactccttttccaccccattatctgccagttgcccctcacaccccactggcccccacaaggggcttctcccgctctgtggccatcatctagactgagacatgggtctagactgagagtccctcaaaggcaaggcttctgagtcccagggaagaggactccctgctaaattttcattgaattaaatgactaattaatgatctagcctatttcctggtcgggacaaggtcagcctcacggccatcgctgacttgctcctctggtttatgcatggtctcaggagtcagtccctacagagcacggcctgagac

SEQ ID NO: 39578 - DNA, 1000 bp, Homo sapiens
ggctggctcttcccagatgtgtacacagctcacttgcccacttcctttaggccattgcttccattccatctaacatgccaacaccacctacccaccccagctcgatctttctcctaagcacatttccaatcaaacacactacatataacctctatttaccaccattattgtctggctttcctcactgaaatgagaaccctgaagacaggaatttccttgtattgtgcactgtggtaactgctcagcaactggaacagttctggctcatagagtagaagctcaataaatatttattgaataaataaatgaatagtgtttgctgaaagaaccttcacactcaggaatattttaagtgttgctgcaattcccgaccagcaagatgcagaggaaaaccttgagaagaggacccagaaggaaaccacagtatttacacagtggcatccaaaagactgaaatatgccagctcagagctggagcctggccaaggggtacaaaggttctgacaaggactgcaccatgcagaggtcactgcccgctacctggggtatgagactctgttccattcaacaatattctaatgagacagtcaatgtccaaaagaagactcctgacaggagggaccgagccaaggcagctgagccagctaggaggattgagtgacaagcacatacccatgccagaattagaggccaggcaggaggttccacaaaggtacctcctgggtgctgagtgctgagactacaaagccaaagaaatgagtttctgacctcatgtagctgaaagcttaataagtacaacagtagcagcagcagagcaaacccagagcccagtgctcactatgccccacatactgtttttccccgattttttattgtggtaaactacacacaacacaaaacgtatcatcttactcattttcaagtgtacagttcagtggactaagtacattcatagtgctgtgcagccatcactaccatccatctccaggactttttcatcc

SEQ ID NO: 39579 - DNA, 3286 bp, Homo sapiens
gttaggcaagaccctgggtggctgcgtccctagcaggtgagccagaagccaacgtaaaaatgccgtgctctgggattttatggatttgtaaaatatctgcccagtttttccttgggcaactttcataaatcagtacacttgacatcttgggaaaataggcagctcctgtaagagcgtgaagccatttttgcactcactgctgtaaactcaggcaacaggaacaagcaccttttcctgtgaccataaagccaggcctggagcaggccagctccctggtgtgctggatgctcaagagtcatgagccgctggacctgagccacacttccccaggtgaacggggtcagtcctgagaggacaatatgagccacgataacaactgaccacatactatgcaccggggtctgtgcgctcaacactttcctgtcttcttcctcagcaggatgaagaccttgcctcaaaaataaatacataaatacataatgaaaattgttttcaaaaaaaggaggtgagggagcaagcctgtccccgtccctcttagggtaggagccagcacactggaggggcctggggctatcctgaaaccattcctgtctttacccaccattccactgccacagtttcctggtctataaaatgcagatagtaacacctgccttgagggttacgctaggacggagttcgtagagctagaaggacctgccacatcaccccagcacccagcaaccccatttcctggtatgttcccccaaaagaactgaaagcagggtcttgaagaagtgttagcacacccaatgcacatggcttcattcacaatagccaaaaggtggaaacacccaactgtgcagcaacagatgaccggataaacaaatgtggtctgtccacacaatggaaagttactcagccttaaaaaggaaggaaattctgatccatgctggaacatgggtgaacttggaggacattgtgctgagtgaataagccactcacaaaagaacaaatattgcaggattctccttgtgtgcagtccctagagcaatccagttcacagacacaggaagtggctgggggaggggagggggagtgaatgtttaacaggggcagagtttcagtgtgggaggatgaagagttctggagctcggtggtgaacacggttgcacaacaatgtgaatgttcccagcactttgggaggccaaggtggacagatcacatgaggccaggagttcgagaccagcctggtaaacatggtgaaaccttgtctctactaaaaatatacagaaattaactgggtgcagtggtacatgcatgtattccctgctactcaggaggctgaggcttgagaatctcttgagcctcggaggcagaggttgcagtgagccatatcacaccaccgcacttcagcctaggtgatagatcgagaccctgtctcaaacaaaacaaaacaaaacaaaacaaaaaaccaatgtgaatatacctaatgccattaaactacacacttaaaaatggtgaaaaggtgaattttatattttgtgcatttatcactattttaaaagataaaatacacaaccctcctttggggggaaaaaagtacctgacacttttttttttggggggggggggaaagtacctgacactttttttttttgagagtcatgctctgtcacccaggctgaagtgcaatggcgtgatctccactcactgcaacctccacctcctgggttcaagcgattctcttgcctcatcctcccaagtagctgggattgcaggcacgcgccaccacgcccgactaattttttgtatttttagtagagatgggatttcacatgttggccaggctggtcttgaactcctgacctcgtgattggaccgccttggcctctcaaagtgctgggattacaggctctttgtgcccaatgtgcccagccccacttttttttttaaagtaggtactcacccagtgccccgtccctgccagcctcccccttgccctaaggctggagtggatcctggagcgccgggctgggcgcacgcttgctggtgacctcagccaagctctcagcccctctgagccacagttctctgagctgaagtcgtggacaagaaagtctgctggcccagccggtctctggatttgcgtccttgtccctgcgcctgtccgcctgggcttccaacgtgcacaagccagcaccacacaggcttggtacagaatcatcaagatcaaaagatttgctggagtggatataaatagccttaaagctcctggcctgggcttttgagccggacggcgccggccaggccactgaccccagccagcctggctggaaagtccccttccctggagtggctgctccaccaagcacaggctcctgtgttctcccagcctccagttcaggctttgtgtctcccgcctgccacactgtctgtcacaacttccctccaaacttaaactggttttccagtccaggccgactcactaggccctgacctgcccatggaaaccatctggctgccgtgatgcccaccggaggccgagggctctaaggacagcaggggcagaagggcggacacggtgaaaacacgccccgctgcctgctctcctgggtctcggtcttgtgttcgcctgggttcctgttctagttctcatctgtctccaagtcaaaccgcatgggacatcatctacaaaatgtagcattttctgacaggtgcccggcaccccctcctcccctccctccctccagctccctctcaccacatggcacccctgggggactggcttggcatctccgggctctagcatcactctgcaggaaggctggcactgagggtaggcctggcaggctcgcgaagcaagtgaatgggtgaacgaatcaatcactaattcaacaagcgggaggaggacggaggagagggcaggagggtcaaaaggggtcaaacacatacagtctctgcctctctcgggggactgtcacccagcccaccccttccctctcactctatccctctggttctctccccctcctctccctctctttctgtctatccctatctctgtccctctctctgtctctctctgtctctctatcactgtgtctctccctctctctttctgtttctgtctctctgtgtctctctgtctgtctgtctgcctctctttctctcagcagcatggctgagggcagaaggataagaaggtgggagctgcagccctgataccccttctccccctggaaagcagaggagcaccatttccagcccctgagaagtgaccctgatccagaaggtctggtcatgc

SEQ ID NO: 39580 - DNA, 700 bp, Homo sapiens
attttcatggggagagacagcaactcagagaggctggggctgttacttggaaagtccaagcagcagggaagtggctgaggcagggctgggatcctgccagcctgctacggggacagggctaactgtccaggagccacagatgggggcctgcagggtccccagagcaaggccaaggctgatgggctggagaaaggcattggcaacctcaaggcagcagccgtttcccgatgaaaacagaagcacccaacgtttgccataactggcccggtgcatcctgctggaatatccacccctcggagggcaggattcaaactcccaaggccttgctacctcagagcttcaagtcatttggttgcagcctggcccgggtctgccctgggtgggggcagcacactggaggccgctgaactcggactgcctcctggccccaccgcagcctctgctccatttcaattaggtcaattccctctcccctattccagttcttgccaaatgcctggctggcctgtgttgttttttctgctgctctgtggcaattatacggctgacaccctgacaagctcagaatggtgcacttcccaagttaggcaaagcattgctcctccttaaaaaaaaaaaaaaaaaaaaaaaaaaaaaaacagaaaacaagacacaaaagaccggatcagctgtcaaaacaatgtcatagacaaaacagctg

SEQ ID NO: 39581 - DNA, 1109 bp, Homo sapiens
cacagtgccactcgctgtcttcctcagctcgagctggataaagaaacatctcatggtttattttccaggttgtaaaataataatttgcccagtctgtcagacagctgggagagcttcggagacacactccctcgtctttctgtggactctaccatctgctggaaaatgagaatcactctccccactcccttggagttgaacacattttgtcccatcagacaagtctcccagagcatgctgcagctcgttcctgacttggggacttcctccccagcactggacacgggctttatcttggctgggagaacaagaacattattgaaccaaaacatgacacagtatctccctctgccctgccaccctttctgccaaatcagagatcagaaaagagccctctcggcctcactcagtctctctacagccccctcctctttgctaagaggggacaggaaatccaacctaagtgccctcagccccccgcccctggcccagcattggtgcttcccggccactttgaagaacaacacacttatcaggggctcccggcaggaccctcctgagggtggcttcctcctgcccattaggacaatccagcctccgctgctgccccctcatcagtggccacccctgagcttgcctctgaactgacgtgccgccgtacggttaatgtcaccatgaacccggcaagaatactggtttggtaaatcaacagagtctgaatgccactgaaaacctcccccggagtgagtcaccaactcagagcttcagaaaaacgtcctctcccagtgatatgacagcacttaagggctggaggggaccagaaagcgaggcaggccactccactgggcttcccccccccacccccagcctccttaggcgatgtttccttttgccaaggaactttggaagatcaaaggctggaaggaatcatctcattaaatccttgccccctctacactgccaccccacgtgacaccgtgagccctgccttggtgacaagattgcacacggcagggtggaaacctcccatctgggctttctccagcttgagaggccaggagtcactgggatcctgggagatggtctggccattcgacagcatgaagggc

SEQ ID NO: 39582 - DNA, 1519 bp, Homo sapiens
cagcccccctggggtgggaaactcgggtttccatgacagtactgggactcctgggaatcaggaaccaccccaccttctggggccacagctaactcctcccccatttccaccctggaagggccgcccagcaggaagactgtcctgaagccctgaccacggccactcccccaaccacacagtgatttctagtcttccccaggccaagccatagtgggccccgggtgatcccgaagacagagaggcagaggggcaggcagagggcacagagcagcagaaaccccgccccagagacaccgaagcctcccagcccccttgtcctgccccagatgggcgcccgaaggtccacacggtgaggctgctccgggtttcgacaccgacactcatgggaggcaaacgggaacccggctggcgggctgcgagccggtagggacgctggggtccagggctgctggacagccccgccctgtacctctccccatccctcacttaatcctgggtccgaaatagccccgggtaatcccagggcgaggcagtcgggaattaaccccagccttgaagtaagagacagaggcgtccacagaagagggctctgcgcgtcccggactggacacagcgcagagtccattccagggacaccgcaacccgcaagcgacccaggcccgctccagggcgggatccgcgcggcccgcgacccctccctaccggtctcgggatctctgggtcggaagttctcgccctgctgctccgagacctaggtccgctccccggacagacctccgcccggctcgtccgagccccgggggtcgccaaccctgagtccgcgccgcagcgcagagccaggccggcgggagcgctgagcagctccctggagcccttttccagggaacccagtccccacccgagatcgagctccggatctgggcggcgaccccgccagagaatcccagggagcccctgggggtctggcggcgggtgtgggcgctcccgggccggccacgcgccctcccgcacccgcccacctccccgccaagccccgagggaagccgcggaccccaagaagttcccacgtccccgacacgcccgccgccccgggccccgcttacttgtcgcggcggccgccgagctccgggatggcgccgagcggctgcgggccggggccggggcccgggtcggggcggcgggcgcacgcggccaggtgtcgccggtgtcgctccagcaggccggcgttctcccggctcagccgcgccacttggcgctccagctcctcgatgcgccgtcgccggcgcgccagcagctcctgctgcgcggcgacgatccgggtcagctcctgcaggtactcggccgcctggccggggggctcggcggcgctggccatggccccccgcccggaggccggccgcgcctcaggcgagcgggcggcggggcggcggcggcgcggccatggctgcgcggcggggacggcggctcggcgcggcgcggggctgccgcggccccgcctcggctcccgcctccgccggcg

SEQ ID NO: 39583 - DNA, 612 bp, Homo sapiens
tccactctgctctctgacactctcacctgctgcagtgctgtgcttgagttgggatgtgggggcaggtcttgatctcctcattttaaacttccacccccatcaccccttcatgctctacttttttcatggcaagcagaggtaaaatacattctttgctttgtttatggtcatctctacctctctttgccagaatgtcacttcatggggacaaaggttctgtgttctctgccctggtgcaactctagggcctgcagaagggattgcacaagtaggtaggtattcatgcctgtgtgctaaaggaacaaatgtgtggaggatgaggagcagggctaggcctctgatcactaatggacatctgagaagtgtctgttatgtttgctctggaggtcaggaggccttggcttctgccctggctgggtgaccttggatacatttcctcacacgttcattctaaacaaaaccacccttggttgatgtctgctctgtgccaggcactgaacccagggctaggggttcagagataaaagatcctaacatcgccaggcacggtggctcacgcctgtaatcccagcactttgggaggctgaggtgggaggatcatctgaggtcggg

SEQ ID NO: 39584 - DNA, 1172 bp, Homo sapiens
gccgggcgtggtggcaggcgcctgtagtcccaggtacatgggaggctgaggcaggagaatggcatgaacccgggaggcggagcttgcagtgagccaagatcgcaccactgcactccagcctgggcgacagagcaagactctgtctcaaaaaaaaaaacaaacaaacaaaaaaggaaaccttacacactagtgtaaataagaatatcacagcatttgtcatccatccagatgactcaaagcagtgtcagtaagtcctggggggaagctgctacctgcaaagactctaggcgtctgcctgttctcttgggagacaggcaaacatcaaagagtacaatgaaaagatggtgttggccaaggcccgagcaggagaaaatagggagttgctatttaatgggtacagagtgtccatttgggaagatgaaagagttctgaaggtggatggtggaggtggctgcacaacaattgtgaacgtacttcatgccacagaactctacacctaaaaatggttaaggaggtcgattatatgttatatatattttaccacaatttaaaataaaaaaatatgtaaaccacatacagacaccagaagaaaacttttattttgaggaaaattaaaggactgacagtgagttttgaaagagtgaatttttctcattcccactgtcgcatgaggccccactggcacacagaatgtgctggcgtctggcaggcactgcttttgagggggtgctccccactcttcacaacacaggaacaggaggcaggcaggccataggggaactcagggacctgggtcaggccagaaagcaacagtgaaaagaaaagagaagtgagagttgcacaaagaacaaggatgggtgagggtggtggatgacacacgccacctcccatccacccgcggggtccagcccctaacggtgcccaaaggcagtgtctacagagcggaagccacctcgtggggctgacagagctcaggcagagtgggggacccacaaaggaagcaggaagaaaatcacccaaggcccaagtcaacccaggtccacagacacttcctggcacttccctgctgcgggcctggtgaagggagttgagcaaggcccggtccagccctgcaggggccacagctacagacagccctcaggggccagggagaacgaggcccaaaaaccagg

SEQ ID NO: 39585 - DNA, 2069 bp, Homo sapiens
aaaaaaaaaaagaaagaaagaaatagggcaaatagtgcaagcaacagagaaagctggctggtctgagcttcgggcatcacacttacatacacgcacagactaatactcaaacaggcttgacacacacatgtccaggcttacacacatggctgtcacgtggtcacaccccgttctgcctcaaccttgacccagtcttgaaacagaaataaagggagcaactactgagcatcctgggggtgggaagggcggaagcccatcttttcacccctaggacggctgggctgggaagctaagggcgctcagtcgtgcccacgcagccttgccaggggcaggagctccatttcccctggtctgcaaaatggaagggctggactgcaccgccctgtcagtgtcggtctctggtttcatgggtccctgtggttccacagggtcacactccgcatccgaccccttggagaactcccaacccgagagggagggtgatggaaatgccctgagcatcaggacccgcgccgaggcagcctgaggggaagcgccggcctgcctcgtctcacttcgcctctgtaaagcggcccctgggcttccctccaaaactcctttcctccagggtctccgttcctccccgcgacgctaggcgctgcgcttcgtttcacagactcacttcccacgccagggcgagggcggtcacagacaaacccgagctggggtcccagactcaagggaagtgcggcccagctgccccggcgccccctcccgggtcaggccggctcgggcccggccggcttgggccctgcggtcccagacgccgctccccaggccacccctcctcccgcacaacccagaacacgcgggtcacggccgccaggctgcgcccgctctgctcgcgcctcagcggcgcggaggcccggacggcgccatgacatgagcagtggtggcgacccacgcgcacccgccgctccgagtgctgcagcctagcgcccagcgagagcgcgccgcgcacctgccggctctgccggcctcccggcgcccgcccagcctctcagcgcgaaggcccagcccggcccacggcgcccgcccggcccggccgcgcgcctcaccagcggtagcagccctccgaggcctccagcgtgaagttaacgcgcgtggcccgcgtgaagggcagcagcactttggggatgttgagcttggccgcagcggcggaggggcccgccgccaacagcaccgacagcgtcagcagcagcagcccccggccccgcgccgccatcctcgccgcgcgtcacctcccgcgaccctgcgcccggccgcccgcgccgccccgttgccctccgctcccgcccgcgcgcgcgccaggccagcaggtgatgagcgcgggggcggggcgagggccgtcggcggccgccgcttcctgggcctgagcgcgggaactctgggggccgagctcgcggcgaccccacccccagcccggccctcgcgcagggacgcggggctgggggatgggcgcgcgcccgggcccccggagctgagggagaaggcttggggcgcgcccgcggggacccctggaccctagaagtcccaagggggagcccccggggcgccccgcagcacgcatcccgccctggtatttgcccctggcggtggagccaagccgccggctttggaccttgcgctctggcccggacccacggtcagcaaggaagggacacatgccccaggacatttgggatgcagaaaaccggcgcctgccttgtcccagcccatgcttcccagaagagggaccccgggctcgcaaagggaagccacctgctgaagcgctgaaggcccggggcccgctccccctcgaccccctcacaccctttccagagaggccttaagattcccatttctccaggaaaaaaccggttgaatggcccccagatcactcagccagagagccccaagctcttgtcctccgcactgcaccccctgcggaagccattagaggttacctataggtcatttagggcgccaacgctgccagagcacaaccccctccacggcccccacacccacaaaagaaagtttagcaccgc

SEQ ID NO: 39586 - DNA, 626 bp, Homo sapiens
taggtctggacccataggcaggttggatctggatgctgggctctgaaaggtcacacttagtggtggagacagacataagaacaaataatgaagatgaagcccatgcaggctgtgttcatccaggcacaaatgtttagtggatgcagattggtgccaggcactgtgctgggtacatgcagtaaacagagatgtcacctctgccctcttcgagcttgcaacctagtggaggaagtgagttaacaggtgagtaaacaaatatgtctgtgtacgcatgggtaatggtacaaagtctggtgaatactctgaagggcaagaacaggatgcagcgatggagaacaccaggcgtggaggggtgctgcttacatttggtggccagggaagacctctcccgtcacgtagcacagttattggcatgcagtccccacccttcagcgttcactgttggtggcttccgactgcatgtccctgtgattcagcctgtgggcttcctctggcttcaggggcgtgcctggccagtgtgaggcaaatcagaattgtgggggtttaacatccctggcagtagccctcagcaaatgatggacaggagttagaggatgaatattccagccaccggagccctgcgcacc

SEQ ID NO: 39587 - DNA, 1112 bp, Homo sapiens
aggctgaagcaacctgcccaaagccactatgctggcgggtggccgagtttgggtttaatccaggcccgaacctcagttccctcaagataaagttggggtgattatggcacctttctcaggattaggttgtgaggctcagatgccatcatgcaatcatggcaggcacacgggggcccctcttcaaacgtctgtgcgcttcccttgtgccccgccctggcacacagccgcccccgcggagcccagggatcccagcccggcagtcctccgtcagctgcttctgtttggatggcggggacggctgggccgacagagaggcccattgtctccgtcctctggggctctattgttggggcctcctcctgggttgcagccccacggacaaccccagctgtcgcttgggcctggctcagcttaccccggcggtgagggtgcgggtcggggacggagacgcgtgcaccctgaagacagtaactaggcctgctctacagagggaaacgcaggctctgagagcctacatgtcttcgccgggagtgcttgtcccggagctgctcgcagactgggccgggggtgggctcgggtcggagaggtcacggggctccttaggtcacaggcggcagggccagagaaactcccccgcccctacgtttaactcgcggaaacaagggcccagagagcccagacgccagcccaaggtcacacagcgaagccccggcacagcccgccgggaacctgtcgtttctaacccccagcctctcgccgtttctacccagcttgggaagcgcaggaacaggacatacggtggtcgcgccccttccgcgaggccggggtgaaacccgcttggccctcccgccagggggcggagcttccgaaccaggcgggattccaccgggtatttgcctgcggaggcgggacttcgggcttgatgggcgttgggggtggccttcctgcgggcaggctctctgtgtcgcaacactggcggggcgggccaaatcggccagagctctgcccccagaggacgcggctaagcccgggggcgtgtcctgggctggccccacccgcgccccgccccgccccgcccggtcgcggagctgcggccagctttgggagggccg

SEQ ID NO: 39588 - DNA, 949 bp, Homo sapiens
aacagaggggaggttggggcgggggcttgcattggaatctggtactgccagcctgccttggtgggggtggggtcagggatgcctcaggttatctgccccaagagtgtgggagccctgacccccaggctccctggctgagctcaccttagactcagagccacagtggatgcctgaggccagcaggcccctctgctccacaggtggaaaagcctaggtccagaaagaggctgtgctcaaggtcacctgggaagttggccgggccttggggagacccctggcaggtcatccagtccagtcttctaggttcccagtcagggctgctgcctccctgctccccaaccgcagcctgaggtgtgagaattctagatagggccacgacagtgtgagcacatgaaagattaccaggaagaggttgaaacctggctcctgggagagagaggggtgtgaggccttggcaggaagcccagtgcttggctgccctggtttcctggggcccaggcatgcgtggtcacagtccacagcctagggctgggccaggaggacatgcctgccagagtcccgagggtgaggggaaggaagggacaggaggcgctcagctggggcagggagaaaccaaaacagaatggtgtgattgaaccaggctgggggtggggggcctaggttccagggccccacccatttgaggggccttcaggggaactgtgttgggcaggctgcatgcctggccttggtcccccaaaagcctgaaagcagcttactatgtgatatataataatacaaaatagctgggtgtagtggcatgcacttgtagtcctagctacttgggagcctgaggcaggagaccttgagcccaggagtttgaagctgtagtgagctatgattgcaccactgcactccagctggtatgacagagtgagactgtctcttaaaaaaaataataaaagtatta

SEQ ID NO: 39589 - DNA, 791 bp, Homo sapiens
catgcccacactgcacagggtctcttacactagaacagagtaacaacaaaaaaccctcagcacacggggccaggacccccaacccactggaggcttttgctcccagagctggcctctgcctcaataccttgcatgtcatccaacagaaggctgcttttcccctgtggctgactggggaaagcttttggaccaggcagccaggacttgttaaagtacctagtaaccttgattctactattctggccagtttccaaaatactcaaaagcaatctgtaaaaatgttgaacgctaagcagaatgagctgatgcaaatttcgcaactcagctctggcagttttgtttaccgagatggcagctcagcgcagcccaacggggaggcccagtcacaggcacagaaagcaaagggtccaaacgtggtaaagtatgaggccctcctggggtttgccatacatagagagaccaggcctcacccaagaaaagctgaatcgagctctctgccatgtccatgtagctcacgggcttcacaggtgactgtgatacacagccaggttaggaaacaccagcctagcacaatcccactgagaattccaggtccctcccactgggccaggtcctcacatgtgccttcctggacattttcccttgcagcacagttcacactggatcgaaagtagaacagtaacagctgtatcttttacacatttttgtcccatgcaatgtgttttattacatctgtgagttcactggtgggtattactttatctccattttacagagaccacaggatctga

SEQ ID NO: 39590 - DNA, 2782 bp, Homo sapiens
atttgctaaatgaagtaaattagagaaagactcgaaattaaaaacaagagtggtgagggcagaggacttttgcttatggcacacattaagtagtaatcagcggaaatataatagtactcattaaagagtgagtcttatggctttacgacccagaggaggagaggttctagaagcagacagcgccaccagggaaaaggctcagaattttaggctgagctagtctcctaactggatgtgtaactacaggtaggccacctccttctctgggcttcagattgcttgaattaactgacggagctggagtattcaccaaagaatttctgggggacttccaactctctctgtagttttataaccatccatcccccttctctggcgcagagaaggtgcttcatgagtatttgccgtatcaatgaagcccaacatctcattttacaacactggataccagggcctggaggggttaggtgggagctcagggccaaggagccagtttgtggcagtgtgtggggaggccctccgacctgtggctcgggtacttctgagctcttgggtagagtaacatcaaggaagcagtaggtggtcggagctcaactttggggtgggaggtaggcagggttctccctgcaatccactgggcactagattggataaggctcttctggggtcacaatgcccaggctcaaaccccagctccacgatttgctggctgagtggctttagccatgtctcctgtgtctaactttactcttcagtaaaatgtgaccaacaacagagcctgacttacaaaggtcgcagcgagatctgtgagacaagccaggcaagtttccttgaacagtgcctgacaggtagcagggggctcaaaaacattcccgttagtggaactcctagcactccagcacagcacacgctaccccgagtggcaacttttcgggacgcgccttttaaaggcgcgtgcaaaatgtaaacacgtggggtatggcaggagcggtagtgataattaaccaccatacattcccagtttcgagccacacgcaacgtgctcggcacttcccgtgccccaaccggacctagtttacgacttcctacgcacaggcccctctgaggtcagggttcgggcttcactgtgaccttggaccagccccgttccccccagagcttcggttttctcatccgcaaaacaggagtagcgaccccccagccggcccgcctccgagtgtcccagggtgggcacctgggccgcgcctcaggtggcccgcgcccggcgtggtcgcggggcgccggggcccgcgtgtctcccgcaggccctcgtaggccggtctccgtggcagcccgccctccctaccttcctgccggcaataggacatggctgcagcccgtccctgagaccttgcagaagcggcggtggcggcagctgcacctttacgccgtgacctccctctcctctggcagggcgggctcctccgaagcccgcgcggacccgccccctcccaggcctgcccgccgcgcgcctgcctcggcgccctcgcaaccgcggccaggccaacctcagccggaaactacatttcccagcaggtcgcgcgctcctcgacagctctccaggcagtagaaactacatttccccgaaagctttgcagtgcgcaggcgcatcaatgaggtactgcaatgtcccggaccgtatagtttccaggacgtctcgccgcgcgcatgcgcagaaacactgggcacagggggaggtaactgcagtaagtcccgcttggccctggagtccacgcggattttcgaagctggggctggcaagaggccgctggacaccacgctccagtcgtcagcccacttcctagctgaacagcgcgaggcggcggcagcgagccgggtcccaccatggccgcgaatgtgagtatccccgggccagccgggccacacccaggcttccccgtcgccctggggcttttccccggggtcctctaggtccatttcgccgcctggagctcctccgtgcggctaggcccgcatctccctctgctcgccgtgtctgtgccttcgccagctcatccctctgctcatctcgcggcctgtccaggcttcttttgtccgtgttccttggctcgcctcgtcctcggcgttcgtgcggaggcggactcggaggtgttgctcccgtactgggatctgcttgtacgcctctccgcggcccctccttgcattcccagttccctcctgtaccttggggccctgaaacttgcgcattatgagagctggacgcgacctcagagagggcgccagtcccttgggagggaggaaggcgatccagcccaagtggagctgtccagcaatggacagacagggctgtccaggcgggcagagagctctccgccctagggagtctctgtaaaccgagtctgtgatgctccaaaaagcttaggctgggctgggagcgaaggagttgggggagagggagcatttctctactgtcggggcccctcctccccctagcaaggatttggttggaggaggcctggctgagggctgttccctcaaggcctcttctccctgcaactagcctttctcgggaaactatttaagcccaacattcattcaacaagcagcgcctcctaccagggcgctgggtgtgggagaagctggtgactcacctctcccctcctctgtgaaagtgcttctagggcccgcttaggagcccagccagccccagacacaccctccctcctgctttggtagagtgtcctagcagctctccccttgcctgtcacaccctatttccaga

SEQ ID NO: 39591 - DNA, 1892 bp, Homo sapiens
tcagttctgtgccttaaaagttagcctgtcttctctaggcaggcaatccttctctgcagcagaagaattgagtctttagtttttctgttgttgatgaacacaggtatccctggtggggcactctatacctgccctaaccaggactgctggggttttcattccagagtggccagaaagggtcaaggcagcagacaggcatcaggggttagctgtgaccttttgttcctattattagatcctcagcagccatctgtcccattagcctccagcttgtggtggtgcttgggcctcaccaactcctggtacctggccagggctagggtgtggtcaggctgttgcccaggagcccagttaccaacctcagggtagggctgccacctcccagcctagaaggccatgagtcacccttccaccagcagctgagggtccccagcgagtttctaaaattaggaggcccagtccaggccttgctctctctcccagggctgaggcccagctcacgcagccgcccctccagagaggagtggatggggcccatggcttaggtaatgccccagaaaggaaggccctgcagtgcagatgctcaggcggcctccttaccccctgggtctcctgctgcttagcagccccaaagccctgtcttcccccagcccagcccccacccccacacaaggtctggggtctctgccaagtagaaaaaaggcccagagccaggcaggcagctcagggcaaaagtcaggatgccccgattccagtcccaggggcaggagagtacagctgcccaagcaggcacactgcagacggccctggcactgcctcccacctgctacaggaccttgagctggtgctgatctctcagcctgtttcctcatttgtgaaggggaagatgtttaagtactattagtaatagtcacatcatccctaactggtttggtcattgaggattattcattcattcagcaagttttcattgaacaccaggtacttcacagacatgctccctgctcttggaaatgtagcgtttagttaactgcttgaggtgagaccttgggcacatgacttattctctcagagcctcagtttcatcatctgtaaagtggaggtaagtattcctacctcactgagtgaatttgagaattaaataatacttgtaaaacacttaggacagtatcaaataaatggtgagtgataaatgtgacctgtttttgttgttacggactctgagagagggcccgattcagatcagagggtcagggaaagccctctgaagaaatggggttcaagcaaagctcaaaagaatatgtaggaagctggccaggcatgactgcaggcaatcgttgtaggcagagcaaacccacgcgcagatacacaggcgagaggacacttgacctggactggggacagcagccagcagggtcagggcactggcagcagggtcggtgtccggggggtgtggcagggctctggcaggtgactgtgtggagaacacagagtgggtgatagaagcagggccagtgaggctcctgcgggcagacagtggtaagagactcgggaatatgtggcctggactggatggggtggtaggggaggagcgagccatgtctttcccatagatgtgagtgggtgggtgggtgtgccatgtgctgagatggagaaggcgccagtgtcagcactagacaggctgagatgtcaagtggaaatgtcaaggaggtggtggaggtggtgggagctgcagggctgtgaggcccgggagagggccagagctgcagctttaaattggagggtcacggcatgtggaggccaaggaagcagatgggatgtccggggagagagtatggactgaagcagctaaagaattgcagcatctaatggacaggaagaggggcagcgac

SEQ ID NO: 39592 - DNA, 2188 bp, Homo sapiens
aaagctttggaaaaccaaatttgtaatatcattgtattttttattaaaagttttgtaataaatttctaaattatcttctggtgtgggactttaacaaacatcctatttttagtttcagattttttttttttggcattctttccaaaatgtctgtaaagaattcagccataggatttattgagaactgaattttgtggaaatctgagctttcagtgcttaaaataagttaatttttttttaagggcaactcagtatctagcactcagaagtccacactgaagcccactttgttttggcttgatttaaagtgaatgactcaggcttcatgcatcttcagaatgtgctagaaaaagtggaaggggcagcagtgtgctccactgccagaggcatcctgagttgacacgggagacctgagttctgagccaaagattgctacatactggctgtgatgttgggtaaatcaacgatttgagtctgttccctcatcagtacaatgggaataacacttgtccacctcacaaagttgttgtgagggccaaatgagacaaagcccatagaatgcctgacacatgaggcattaatttttcattcattttgcttcctgttctgaaaggcggctgctaactgcccactctgatgctagcagtttgctttattttttacaagcacgtgagtgagaactttcccaaacctactcttctgtttctcagaacctactgtttcatttaaataatgcctccttgtagctgacatatgcctgaagaagttatttctgcagagacatggcaatgccatcatctcaaaaccccagaaagacaagcgtggtggtgcatacccatggtcccagctactcaggaggctgagaggattgcttgaggctgcagtcagctgggatcacaccactagctgggatcacaccactgcaccccagcctgggcaagagtggaaccctccctgtctcaaaaaataatttaaaaaaaaaaataacagaaaacaagttgcctctataggagggccgagctctggtgaggaagtgtgagaccagtttccatagcaaccccagtctgtttctcaacaagaggttccagccagcctcttgccacatatgagtcataactcaagtgttttgtttgtttcccttggataaaagtgactccgatttttaatggctcctctcaaagattaacatctcttcactaaatacagaagaattccatatgtaatgaatttccagcctccatgaaaacaaaatggactctttcatgctgtctcaacatatgaatacattgctctgtcacctgggtgttattaccgacttaaatctgaaagaagctgggcacggcagtggtgtgtgggtgcctgcagtcctgaggagctgggactgtttcccgaacaatgcctttccaccacacacggtggttgtgagggccagctgaggcaaagccctcaggaagaccactcaagcccaggagtccagcctgcgcaagacagtaagaccccttaaaaaaaaaaaaatctgaaagaaaatatagagccaaatctttagataaatgctttattattttctcaaaatgttataaaagtcatttctccttagtacagagagctttatacattttatctagtaatgaatacaatctagtttaacactcatctattttactaacatttccttaattttcaattcgtatttttccttttctttcctgattttagctttttttaggcttctgtcaccacaaaatgttacttggaaaactagatcccagcagatgacctgtacttctctgctctctcccctactgcaaagaggcagtgagggcagcattagtaagcctgactcaggggaaggtaagtggcctgcagagaaatggtcctaggtccgcaaccgaggcgagtgaacttgtcggacagatgaagactctaactggaagaaacgatcagcgcattcacggatgcaccaccatccagaaatctcccggtggcttccatacaaaaactgatgtttctaaagatggaaagaacaggtctaggaggcagaagagtatctcctagcaaagtgttctgtagctcaaagggtgagtgggctttggtagcaaaaagctttgaaggcttcaccctgggtgaatctgacaagggctggagccagacgggacctgcagcacctcctcagcttggcctcgtctcc

SEQ ID NO: 39593 - DNA, 1834 bp, Homo sapiens
ttttttttttaagattatttgggttgctggatgcagagctgggaggccagtaaagaggaaactgcagtcactcaactgaaaggtgatgatgacttggacaggggctgtggtcatggaaatgaagagaagtggacaaatttgaaatacactcttgaggctgaactgactggacttgctgacggactggatgtgtggacataagaaaaaggtgggctttgctttataacaagtattgagactggaaaaacggaggaaagcatagatttaaagaggaaaaccatgagttctgcattgcccatgacaaatgtaagaagcctatcaaatatccatgaggggaagtcaggtgggatcccactgtggaactctgggtgagactcagctgaagttatcattcgggagtcagcacactgcatcactctacgtcctggtccgtccgtctgtcttcctgggacacaaataactgccttctccgagttcaaccctgaacatctgtatcctctggacaacggggagcgggaaaaaagctacgcaggagcttggatcgggcgaagctcgcgggaaaccgctctgggtgcgcaggacaaagacgcggggacagcggggagggccggccgcagcctgccgggctgcccccacggcgcggaacgcgcgcagcaacctccaccaggcctccgcgtctggactcccgccctgcctctgggcctcctccgcccaccggcggcgtctcccgcgaagcccgctgggcctcgctctcaccctcctcctcctcctcacgccgggccttgctcttggccttggatttctggctgcgcagttcgcgtccccgcggctccccgccggccgcgcgtttccgagccatgttgcttgtctgggcaaattccacttcgcgagtgacgcacccggccgcgatgcgctagaacgccggccccgccccgaggcggtgcgcttggccacgccccttcgttggaggcctagtcacgcccctaaaggaagctccaccccatacccgtggccactaaaaaactgcgggaagcaggaaagagcacaacaggtttctctctatttccggtgtattgtatcctcacgtttccggagattgacgttgctcttgtgttctcgcgagaggcgggaaagggcgcagggtttgaaacatggcggacgacgtagaccaggtaagtgtattttaaggaggtcgctcgaaggagcttcttgtactaggctgctttttccagactcaggaaaaatggccagtcgtgcctcctctctccaagtcaccatggcctaatccaccctgtcctttccgtaaccccccctccgaattttgccgtaggccctgagaccttttcctgttagaagcccacctgatgactattctcacactcttcgcttcatttttttaaatctgtagattattatccttagctacctcatggagctgtcaggattccaatagaaagccaggtaataaagttaggagttgttatcattagtgagcgcaacaattatttattcattcagcagatagagtgaacatcagctttgtatggttaggcactgttctaagggccagggacactgacatcgacatataagagatccttgccattacttggagcttatatttgcgaggagaacagataaaagtaaatataaatatgtaagacttccaggaactgtgatgtgctgtgaaggaaacaaggaactggtatgcagaataacagatggtcctagaagctttttcacctggtctttttcttcctcaaatatctttggagatcatgccacaacttaaactttctactgaaatctgacctcctcagagaggacttctgcc

SEQ ID NO: 39594 - DNA, 1550 bp, Homo sapiens
gacactatgactttaagctattgctctggaatccaggaggttctggagcaacctgtgtggggatcagtatgggtggagctcagatttgttggctgactgggcctgatggtagcccgagtcctcttgaggggtctaggtaggagatctgcaacacaagagggctgttaagctgggggtaggtatcagggggtcctcagagcttctggggagggcagggtagttgaacagagtggactgaagaacactaagccccatgagacaaattgctgcttacaggcagagaccatattcacaacccctggcagagggcctggccaagaatttgtcttcaataaatgttaaatgaatatttaaatgacaagaagactagtgcaacaggactttgtgatcagcactgtggatggaaggttcaaatgggagtttgaaagaaggtgaactttgcacattgttttccagacacttgtggtttccttcccacaattggacagtgttccccggttttttaccctcgtggccatcctccccattaccatttacctgaaagtgtcagtatttgccaactctagatacctaactagttattaatttacatagaaaactaataccaagaaatgaggaagataaggccaaatgctttaaattccttttagattcattgcccaattttaataaaccagagcatgtaggttcttattttcttggctgcttctagaaatgtcctggatgtggaggcagcatgccccattgcagtttctgatattgattactccagaggaatgttttcttggtgctcatcccatccacttgcaatgctgcagggatctgggctctgagtgttgacacgagccccagagtgacccttagtgaggtggaaaactgaacatacagggtctagcagtgcagcggggtcagagaaacctggctgcgagtccctgctgtgtcacgtaccggctagacaaacagcttctgtcctaaggtcagttgtaagggctgggaagtggccctagaagcaggctagggtggtgctgggatgttactgccaaatcactgacaccagggtcagaggcacagaggtggaaggggcactgggaggccactccttcagcttattccaactgtccctgctcttttcctccccagatagttttcaggagaatggtgaatttgaaataacttgatttgttccattgaaagttattttcagatgtccgctatgtgccaggatctgtccacagaggcctgagcaagaccaactatgtgcacgatgctaagagctgggaaggacctgaaatgggtgaggagatgggaggtgacatggtgttgtggggggtgagggggaacagtgctcagacgaggtctgtctcagcagagaacatttgagcggacatctgaatagcaggagggaacaggccccaaggggatttggcaaaacagcattcttccagaaactggaggccgcgcagaggctctgagatgaggcttttcctggtggagggtcggcagggaggccagtcggcatgggaagagtgagccaaaagtctgagacctcg

SEQ ID NO: 39595 - DNA, 933 bp, Homo sapiens
gctaatctagttctaaagcctaaataagggccactgtgtgccccagctccagtggtgccgctcatgctgtagcctctggacccgtgcaatgtgctgctcctgcagctacacggtctcctccttccgatcacaggccagcatttcaccgtcctttcccttttcgaaggaaagggtcttctgagttcgcgggtgctatggggaccctgctcaagctggtattcaggaaggggaagactgtgctttccttcccttggccaggcctcgtgggaggagcacagagttggaaatcacacccgtcagactcagctcgatcaccgtgtgctctgtgacttttggcgagctcctcgcccattctgggcttccattcctcacacgaagggaaatgcagggagttgtttttactcctgaacctgcatgtcttagttgccaacaccaggtggtgctgtgctcttttgcttttccacttcagtccttgctttgcaatcaacatgagctaatactggccagcgagctctgaaatccagtttgtggaactccaaccctacaatagctacataatatgtaggccccagggagaaagttgtaagggaaaataccattcccgtggtgcccatatcctgctgaaccgagatcaccaacaaagccgcactctaggtgagatgggttttgctgcgctggctctgtgcacgtggctgaataatgggtggacagagctttctttgcggcctgaggccagattctgccatcctgttgagcagatcccttttcctgctcttagccttggagtcctcatctatacagtgtcctttgagcttgaacaatgtgagtttcaggaaaaggactcaatcactctgctattgattaaaagagcctaggtttggagttcttggtagcagtatctgaaagccgacattggtgtgtgctaggaaaagc

SEQ ID NO: 39596 - DNA, 1091 bp, Homo sapiens
gaggatgaaaagatgtccatcaaggatggagctcaggtcctgccatggagtcggagctcaggacatctttgattcccttaattgggccagcagctctaaataagatgcttcttgtctcctcctgaatgcctttctgaaaagaccacctgtaaatatttatctgtctttataacaaggatccaagctgttcttcatgaatccatagtttctgccttgctgagtctactacaacattttttaaaaattttttcatcgatctctccttgcattgtttttcctgtatgacttttccaggctgagttctgctagaaactgggatggctaacagctggtcatgataagggtttgggaatcagatgagggaacaggggagcctcccctttgcagcgtcctctgccctccctctctgtggttctcagcaatgtttttctcagttcagcttcaaggtagaagagaaatggatgaaaccagctccatgaacaaggtcaccccgccaatatcacgagaaaatgacatcactgtcagcttccgctcaggaaaaacctgggacttgaataaccaagggaaagggcaggtcatcctcatggcaggttgacagagctggttacagacctccctgccagatatcagggcctgggagtgtggctaaaaatgacccagggaccacacctgcctctggtcagttgcccccggcagccttaccaccctcgtatgctcagaacaacggaatatcaccaatggggtgttttatttcctctttcctagaagaaaggttaccaactgccagaatcaaaatagaacatgaaccgtgtcactggaatcctgtccaatccaagcacactgatattgtgcaatgccctttgggagataaagcagataagcaaaatctccaagctattatcacaccattggacctggcattgcagaaggcctctagccggcctcttctaggcttgtcatgtttctgcaacactgtgtcgagtgctttttgtgctctagaagaacactatttcatagatgaaaccaggcgcaaagcctcacagaaagaattattttgttaaagtgaatagttgtccccaactttttccatt

SEQ ID NO: 39597 - DNA, 599 bp, Homo sapiens
tagggtgggagcaagatgtccaggttggaaaacagtggaggcatcttctgtgctgggcgaagtagggtgggccctaaatgggaagattggtcgcacagtagaactggaggcattagaaggtggggctcactcagccaagaggtgcagggtgagtcaagcaaggctgtgggaaggccttggggccggtatgctggaaagacctgggcaggcgtggtatgtctgttgcacaattttccagtggtcactggactttggctgagtagccagaacccaaatcctcctctgcctgccttccagacagccagaaggcccagggtcccagctgagtggattaactaccaatcaccacataagcggcccagtttgaaatttgagggatggcacgaggtccagcttctgctaggacttctctcatccactgccaagagagttttgtctgaaggcagccctaagcgcatgctaggcatgcctcagttttgtgtccgggatgactgggctttctggagtctacagtgtgcttaccgactgtgggctgttttctgcctgacggcccagccctgagatctgggactttccatctttttgttctcagatggcct

SEQ ID NO: 39598 - DNA, 739 bp, Homo sapiens
actgtggttaccatggtaacaccagacttgtccactgtccccaacactgggaactgcagagtagtggaaacacctgcaagccagaaggaggggtgttgagcaagaaagtgtggcctcggcatagaagcatttacatttttcttttttctttttaaatcttgtaacgatcagtcacactagagccccatccctagggcagaaatttttttccctttgagcctcagtgctgagtactgaattacacccccatccccgccatgtgccaggcacatgatcctcattggcccaggcaagcaccaccctccatgccaatttccttatttactcttctcttttcctgtttgccaatgcaggtgacgaacttggccagcacaggtgaccagtctacagggtggaatgcctgcccttttgcacgcattcttgcaaaatgcataagcttgtatttctcagtaaacttttcaaagtaaaacattcatgcagaaaaaagcacaaatgacgcatgtagagctttatgcattttcacaacctgagcacacccgtgtcacccagaatgagaagcagaatataacgggcattgtggaagcccccacatgctccttcccccaagggggtcactcccctgactctgactccagaaagcagaagtagctgtcctgtgctctatacaaatggcatcctgcaccatgtaccccttggtgcttggctgctgttgctcaactgcacatctgtgagattcacc

SEQ ID NO: 39599 - DNA, 553 bp, Homo sapiens
gtctcattctgggatgcttctcatgattgaggcttcaggggtgggtgtcccatccctgcccaccttccctctatgtttgagggaattgatgcccagaaaggttcagtcatttgtccacagtcacacagcaagttacctgccaagtctggatctgggccaaactcctatgtgctttccaggaaatcgcatgttagatatttcttggtcccattcagaagtcccaagtcatgcatggtggctatgagctgagcacatggacacagcagggcattaaaccctgaaggctgaacaaacagattcagtgtgtgtgtcgtaagcacgagcagtgacagccggtggactgcagaattatgactgtgctccaaggcagctggacttgggcaaaatttggctcacacaaaaggttattataacccaagtgaagattttttttccttctcacttccctagtccatcagtaaggaaaagcggggtgcctgcaggcagccgtcctgcatcttgtcagtaaggtcacacagtaaatgacagaggtcatagggctcatgtccaaaac

SEQ ID NO: 39600 - DNA, 651 bp, Homo sapiens
actatactcccaacaggtaggcagggctcctcctcaaatcttttcaatcttgcactccgtctataaaaaatgtgcattcctctgcagtgacatatacatattattcataaagtagccatgtattactatatttgcatatcatgcacattatacaacatacccaaaaagagaaacaaattaaactgtgatagaagataaatgtaaatggaagctcttcatatttgttcccaacctcctcctcaggagactgtcctgggcatggctcctgcacccaacctgggagaccgttagctctgtctgtgagttcctggagggcagagttcactgaggtcttagtcactgctctggtcccaacaaactgttggcactcagtcaagagttgtttagtgagctctgtggttcagcctggtttatattagaagaaacaaaagaacagcaaaaagcaagtcactcaagccagagtctgactccttgggtgtgaggaaccccggcctcccctgggaccctgggccaccctctctccttctctggacactgtctccctacctactacccaggagagccaaactgagtggtctctgagaataggtcctttctgctgtcctcagacatcagcctcaagcccctccccactcactcaaggtgggtggc

SEQ ID NO: 39601 - DNA, 588 bp, Homo sapiens
aggagatggcatcacgaacctttaggggaaaggagctagcatttatcaaagccctgtttgttgccaggctcagcaccatggctaagtgttatctcatttaatgctcacaatgaccctcagaggaaggacttatgattttttcctttagaggtggggaaattgagtctcaggtgggatgaccttcacaaggtcacacagtgtgtatggcaaaggtggaatgcctcgcattctttccacagcatcagtcaggacttgagggtcaaaagtgacttaacctcaggtgtgtgagtcatagtaatgttatctgctgggtcaaacagattcccacatgtataatagctcaaatacaatagatgtttatttctcactcatataaagtccaaagtcaaccccccatgcagggattcagggctccagctcccccaatcttgtgacccactgtttcaacgcaatcacacacatgaagctgatgaaaggggaaacaggagacaggatgggatttgggagggtttccgggtccaagcctcgaagtgccttacatcacgtgaaagacatatatttaaaatgcattgtcttagattaggttcc

SEQ ID NO: 39602 - DNA, 1888 bp, Homo sapiens
cctcactaagacccattaggtaaataaaattatatccccctttggaaactgaggcacacggaagttaagtaacttgcccaaggtcacacaagcagtaagccgtgaagagcgattccaacccagaaagtcagctttcgagttcacgtgttctttgttttttttttttttgatctcgactcactgcaacctccacctcccaggttcaagcgattcttctgcctcagcctcctgagtagctgggaatacaggcgcgcaccaccacgctcggctaattttttttttttcttgtattttcagcagagacggggtttcaccatgttggtcaggctggtctcaaactcctgacctcctgatccacccgcctcagcctcccaaagtgctgggattacaggcgtgagccaccgcgcccggcccaggagttcacgttcttaagagctgaaatatgtaaagtggcccataataagcactacattaatgttagctattattcttgttatttctactaagattaatataataatccttatctcgtacgctcttttaagaaccaactatttaacgtgtgaaaagtgccaggcagcaggtcctggaattgcagttaagattcttccggtcctcccaatccacctttcccgagacgctcgagttcacttacttaagcgtcagccttccccaagatggcgttatctttgtcgccaaccccacatccgccccacccaatatggcgtccatcgcaatcaaaagctttattccgcccttctcaagatggcgcccacaccaatccttgttaccttccgccctcaagatgaccttagcagttagcgtcaacctccgcactctatgacctttccaaaatgatggtgaacgtaatacgcaccacactctgaccttctcaagatggcgctgagctgacaaactcgcgtcgcaaactcacgcaaactcagtgtcgctgtcgaagacacttccggttgcgacggaggtaggcttacgaggcctgtgtcgggtagaaagggtccttcctggaccgggaccctctgccacgaccatggaccgtaggaaaaagcctttggacgtcacggcctcctcggtgagtgagggtatgaggtaactccacgggctccgggttcaccgtgtctccatcagacaagaatgtcgacctagcttgtttcttcactcggggacccagagacctgacctctcccctcaaacaggaacccccgaactggattttcttctccggcggggatccggttcagttttcttacaggaccctgaattgggctactctcctctgacatgcgcccgggccagaaccctcggacacggatctgaacctggtgtcccgtgggttaggaaactccgtgcctcacctctgccctgcccacaaggacctgcacctcgtcagccttctcccttacagtcaggaggaaccctagcttctttttgctatgcagacatatcctcttcctggtttctcctccatccagggacccacaaagtcctcccagaactttagagtgtgacatatttcgcaggacccgaaagtgtccagcgtgccctccctggaactaaacagttgttaatgcaggcatagggagttgtgaggtctgaaaggatgtaagcagatttattacatcagctactctagaaagaaaacttgttctaagtacacattttgtgccagcactttatatgcactatctcattgaatcctcccaatggctttaggaggtaggtgctattaatatctccgttttatggatgatgaaattgaggcctggaaagatgaagtagctttccccagcttacagacagaaatcttagtgatagccgggcgcggtgactcacgcctgtaatcccaacactttgggaggctgaggcgggcaga

SEQ ID NO: 39603 - DNA, 586 bp, Homo sapiens
ccctacaatgcagatgcctcctttgtttgccaacttcagtagtttcccatcagctacaagatcaagctcaggctcctctcacctggtcctaccctccccacctctacactaccctgtagcggcatccagttccttgctgttccacaaacttgtcagggctgtttggagccttcagcctgtacaagagctgtgcccatcgcctgtaatacaacctttgaccacttcaaataatgaccttttttctacctaacaattactgagcattcaactctgtgctgcgtgtgtgctgacccttcacacacaccacctcactaatcctcacagtccttgaaggtggggactagtgtcacacgtggccattgggaacatcacacagatcaaaggctgggctcaaggtcacattgcctaaacacacattcatgtgacgtgagaaccttaactcttgccctcccagtgacacttccttctctgggtttccattccgccttgcagagagcactctgacttactgtagccttctgtgtgtgtgtctcccctctctactgtgagcccctcgagagcagggcccatgccttccccatccctg

SEQ ID NO: 39604 - DNA, 831 bp, Homo sapiens
agcaaggcagtaattggaagtttcctttttaaatacacctaagttgaaaatgtggatggatttagtgaaagatattcaacaaataagacgtggcaaacatccttaagatgatgtatatatctctggcatgtgggaaatggccctgaataaacacgtttccaggggtgttgaggtttggctggtgtgctcctttcatttcagggtgcttgctgtgtctgttcccactctctgtgatattttgctcccctctcccttgtcctctgggatgtgggaacgagtcgggggattcagcctttgttccatccttagccaggttctgaggactctttttttacatgcggtcagtgctcctgtcacctccagtccactggggggcgtctctgcactggccagacccgtcccgcttgcagggtttggatgcactccctgccttctcaccttgcacccaggtactcgggcttaggaacagcagcaagttgtgccctctgtcccctgggactttccatggcacgacccccagctctgtgcaccatgtcctctgtccctctcagcagccttggaatgtgaggaaacagagatgacgagaccggctgaggtcacctggcaaaccggtggctgacccaggatgataagatgacagggatgccaggtaggctgagctcccacgctccatgcgagtgcctgggaaggggtgggctggaggagcaggggatgaatggagggaagggggcctcggggctgtgccccttcccaaacgtgtgactcaaccatgtgtccagtggctgtccctgccacaggcccagcctattagggagcaagccaggtccccag

SEQ ID NO: 39605 - DNA, 2662 bp, Homo sapiens
cacaaatgcacaagtgctcattaagctaattaatatggtctttccggagccactacctccttcaccctctgccacagggccggcagagagaacgcagtctccactctggagctcgaatggggaaaataaatcaggagtcggccctggtggctcatcaaaatgcctctctttaaaccaccacccttcctggtgcattggggaaggtgacattgctacctctgttctgcaaagccagcccacaagggaagggtcggccctgtgaggactgagcttcccgtccccaggattcaaggacaggtggctgtcagaggtaggaagttggagtcaattgcttgtcagggccttcccgagctgccccggctccctagctgggcacagcagggcacggacaggccctggcccttagactctaccacacattgagtgaatgattaacggccgggttctcctctgatggcctggttcagacttcaggccctttggtgagaagggagtccctgtgttcccccaaccccaggcttttaacagggcctccagagccttaaccccctgtttctccaaatgaagaatctcattcaagctgcagggaatctcacctcactgggcctgggggcaggcattgaaatgtgtattgtacccagcccggaagatccttcagatcagggagtttgggatgccctgctttaacccaaaggtgtggaccttggcagtgaccttgtcaactcctcagaaagtcaaatcaccttttttcattctctgtgcatgaggcccctttcagcttggtgggagggtaagcaggaaggcacaggtttaccctgggtttaccctcaactcctcgggaatgaacctttacttctctcagtctcctcatctgaaaaacggagataataatacatccctccaaatgcaatcagcaccccaaaaagttcctggcaattgtacttgctcaagaaatgttagttgtcttatagggcaaacacttaatctttgctccccgcgcccccaactaactcctcttgagagatggttccctgcactgagcagatgttagagtgagcacttactgtgtgccgggctatgttctccgtgctggaggtggagcagccaccagggaagatccagccctgccctcccggggttggcattctaatcggggagacagcacacacatacacagacaaataaatgggacagtttcagataggaatgagtgcagagaaggaagataaccgggtgatgggatggcaagggagtagggagtggtgtcagaggtgcctctgtgagggggacatttgagacctgagaaatgagaggagccagcccagccatgtgaacatttaggaaagagttttccagggaatggaaataacaggggcaaagtccctggggctggaaggactgagcagggtcagggatggagaggaaggccagtgtggctgaagtgagtgaaaagggggaggtggtgagagatggggtggggaaaggggacatgatgaggtgggtggggtgctggggcttaggggctgtggtaaggaaggaggatgctattcccaaagcaactggtgagcagctgttgtgtgcagccacagtgctgggagctgtgttcgtggcatccttacagcggccactgggggtaggggagggacggctggtggctggttacggagaaggctgggctcctgagtggtagccacatttgggtgcaagccagagtctccaccctcccccaccctccacaacaacaaatgactacgtctccccatgactcaggtctctccagcgttctcagggcaaagtcccccagaaaaaaacacctttcagagtcccaagtccctgtcactctgcactgaatcccaccagcacccatggccagaagacaatcttttacaatgtgagtgagaatccatccctcccctgcttcacctcctctgtggctccacatttttgttcagagaatgaaacccaaagtccttgcactgtgtggtccagatgagggccagcctctccacccctccgagttcacttcaatgttgccctccatctaatgggtataatacccagacttgcctttcccttggaatggtggtgagacttggggggtgtcccttgggggatgtgacccccatttgttgcctgtacgcccaggaggggttggtgaagaggctctcagccaggcctgccctcagaagggttaatgtggcctctttgtcccatggttgccatagggacagttcctgcccttcaggaagcagggagagcagtttcctgttttgaagaaggcttgagggctgttttcctccagtccgcctgcccagagaggggcaggaagcctaaggccagccgcccctgctgctgggtgtgtggcggagccgtgcccacacccagccagccaggaggggctgttgtggaaatgcagcctcgggaaaaagccaaacaggccagtgcaaggaaaaaaaatggctggccggaagagggtggccgcttcctccacagaccttgaatcccacccagtgataaaaatcccacccagtgataataaaaactccaagctggtcctgcccagcctctgactcccctcccccagagctcagccctttcttggagagccgaagactgatggatcaagaccttgaggcccctgcctacccctctcgcccaaatg

SEQ ID NO: 39606 - DNA, 508 bp, Homo sapiens
gctctcatactcttgatttgtttgcaccctcctcatctctgctggctggggcccccagagctccctccttggccctgccctcttctctgtccacactcatgcctctggtgatctcaacaggctcctgccttaaattccatctctatgatggtgacctccggccagacctctcttcagaagccagagcctgcttgacatctccagctgcttgacatctccaccagggtgtgtagtaggtgactgtgaatggagtttgacccgtgcaaactgaaattctggatttccctccccagcacctgcagtctttcctgttccagttggcagaaacttcagctttctagttgcgcagactcaaaaccttggtgtcgttcttgacttttctctttcttttacaccccacattcatatggtcagcagatcccctcagctctcccttcctgttgagaatctgacctcttttcacctcagcctggtccaagcctccatcatctcttgcttggataattgc

SEQ ID NO: 39607 - DNA, 578 bp, Homo sapiens
tcttgactctttgtgtgacccgctgtctaacactgaggttccctggacccctcccgacctgcccgggtcccagaatagccaagtgttgaaccagctggtttgctggggaccagggaggaggccagtagccctggggacagcctcaggcaggggcaggtggcctgatgttaacacccatagcttcagcttgagaaatgccatagcaatagcatgggccttggcacccccagcccccaagctcctgggaggagccctgttcccagaagcctgtccctggactctgccgtcagcctcggagttcatttcctggttaaacaaacatctatattaaatggcccagttgggcaacgcccagaagcagtttctgcgtgcctcgggcacacagcctgccaggcctccccgttggccgcctggcgaagacacatccatcatcgcagagtcactgaagcaggactgccccgtgcgtcccacccagaatctgcacgtctggcaggaggggctgggtgggacgtgcagaggggcccgtgtctggaccctaccaaaagcctgtcctcgacagcttggagattgtaacagtg

SEQ ID NO: 39608 - DNA, 911 bp, Homo sapiens
agagcagtcactggggaggggctggaggatgtggagcctggagagtatgaatgcactacaggttccacacaacacactcggctgtgctgattgccatgtctgtcgcccccagtgggctgtgatggattcaccttgttgtgtctgtctccaaggcatggcccagtgccaggcaggtgctcaatgggtatctgttggataagtgagggacaagcagctgtggcagcaatgctgacagtggtcctgggggcctggtttcatgctaatgtggtattgtgatggggccagcaggggagagagggtggatgcttcattcttccaactctggcaagagagggggtggccacagttgtgggcaggaggggctgacctcaccagtagctgactcctggttcttatcctgccaacagactatttaaacaacctttgtccggactccgccgagtacgacaacacacagggtgagtccagcgtgaatgcggagggaggtactcaagcctgctctgcctccttgcgccaaagcctggaccctgccccaattccaaggcccaggatatagtcccctccccaccagctgggtgggttctgcatatgacacatcttggacttctgtgagagcccacagctcttctgagatgggtcccctgtcacctcagctgtggggacatcctaggacgggaggacatcccgtcagaggggatgggggagtcaccagaatttggtgataggaggggtggtgccaggtctgaaaagctcaccacagtctccctgtttcctcccaattcgatgtggctgtccctgtgtatcacctgccagggtggtcactattataacatattcagtttacagccagggaaactgaggcatgcatgacagtggtcaaatcactgtcaaggtcacctaggcagtagtgg

SEQ ID NO: 39609 - DNA, 746 bp, Homo sapiens
caggcaaccgtctctcttgtgggactctgcagagagccgtgggttctggctctgactcttgatgtgtgacctcaggcgctgtgtgcccctctctgcgcctccagttcactgttcaaacaatgagaggaatgccccgactgtggtctgaggccacccccatcagcacctggggtgctttgtaaactcctagttcctgggcacacgttggatcctcccagtcagagcttctgcatgtaggatctagagagctgcatttttaacaagcaccctgggtaaatgttaggaccacaaaagtttgagaatcactagtccactagaatatgtggctctaagcacagatctgattctgactgtgtgactctgtctgctagagggcagagttgatcccgcatcccagctccattcaggtggtcaccacatgctcactgtcctgctaagctgtaggcatgccagcgctctgtgttgacaatggttccaagcccgagtcctaggtcactggaaaagagttcagtgaccaggtagtcacatcttctgcaggcacagaagggagatgatggccatgtgtgccgaggaggtgctatactttgctgtggcagagacacagtgagtcatccacaggcagaagaggaagggaaattgcatttattggacacctgctatgtgtcagaccttgtgctgtgttggggagtggagatacaagcccttgaggaaacctccgcttagtggagtaactaaatatgtggatg

SEQ ID NO: 39610 - DNA, 683 bp, Homo sapiens
agtcagataaaattattagtacatatatagtactaaagcataaactattacagaaaatttgatacaaagttgtacataagtacttgtaaaggcaattaagcttccccagtctatgggaatacaaaagttgccagcaattaatttacattacaaaaaaggaaaaccattatttatgctatcacaaaagcaatacccttaaaagtaaaaacaatctccacttgatattagtaatttgaaaaacttagcatatctacaactactgcttaatcaacacttttcattgattcaacattatcacttaaatgcagatgcaaaataaccttgcatggcaaacatgtttactctgtgctaatgaaactatgaaacagttcctccaagttcacagacaagtcaatcaatgattgactacagaacagactggtgagtgttacaaaaaaaaaaagacctgcccaggggaccactaggggtggaggaagaacacctgggtctcactcactgggcacttgatgctttcatttttatctgtaagccaggggacaattatattaatattgtatgaatacactgctactgggaaaagcattcattcaacagatgcccactacatactctgtaccaggtagtgtgttaagtgctgaaacagggaaggacaaggcacatcctacgggggctcgcagtgtggg

SEQ ID NO: 39611 - DNA, 2704 bp, Homo sapiens
aaaaatttgaccacattcccttaaggcctcttccaatttcaagagctgtgctttaccatgacaaaacgaacctagctcttttcccaattttgcaacgtcagaaaaaggaggaaggggaaatagctgtgtttaaaacattttttaccaaatagaaatattataagattatggaaaaaaaaatactaaatgttggagtcatcctgataaaaacccaaatggatactgtgtgggaaaaaaagttaacccatccattctggagtcaatatttattcttaataagcaagaaaactgaagaaaaaaaatcagtataagatctacagcctgtagcctaaacacttcagggcatttaggataaataagcgcctgcaccttcccaggcaagtcaaaaccacgacataaaacagagaaatatgtaaggaaaacctacagcccaagagtttaagagcaagacaggccaatttcttcaaataaatttaagcaatgctgctaaaagctgctttacacatccctattaccatgtactacttccaaatttcgaggaggaggggcatggaattacacaagatctggatcgtatgtttactaagaaaccaaaaattataggttctggggcgtttcaacatttcacctgagatggccagaacgggcgcatctttagacctttaaaacctaaattaaaaactatcagtaccgaggaagggccgaagagctcaatacccacccaatacaacccccacttccgacctacagacgctctgctgagcggctgggagaatccgtcgcgccagtcagggcccggcttcttccaacaacagacactttgcgagccttccagaagccttggctaagcgagaaggcagggtggaggccgccactgcgaggacggtccccacccagctgcgaggagctcgcggttccccagaggggcgggcctgcgtccgggtaaccgtgcgcgacgtccacgagtttttaggacgaccagcccttcagcctctaggccccgacgcctgcgccatttaagccacatatccgcccgcccggccgcggccaaggccggcggcagctacgtagccgccgccgcccggggccccacagcccacgggccggatggaccgagcgccggctgcggcgttccggtgcgcgcgcgcgcctcagccaatcgcgttctcgcccgccccccgccgcggcggcgaggctggcgctgggaagaggaagaagaacattcgccctcctcctaccagcgcgcgggcggcggcggcggcggcaccggggtcacgaactctgacctttcactgacaaaaacaataacaaacccccccttctccgcgaccccggcggcgcccccgggcccgtccccgccaccccgctcccacctcggcgtctcgtctctcgcccgctgccccgcgagcccgcggcccccgggctcccgccatccgccgacaccgggagcccgggctccccgcgccctgccctccgcgccgggggccgcccgccgcagacacgggacccgcttcgaggccgctttggcgccaaatcctgaggtaaaattgaaagagggtcgggcgggctcgggccggcggcggagggggcgggcctggcgcgcggacatggaggcgccgcggcggcggctgaacccgacccttttacctttgccacggggtggcggcggcggcgcccggcgctttgcatagtgggccgggccgctcccctcccctccccgcccgcggccgggcgaagcgagcgggttccccctgaccggcccggccggcgcaagggtgggggtggagggggaatggccgcggccccgccttatagttggccctccgccagcgccgccattttgttctcgacggagatggctccggctgggcgggctcccttcctccttatcctcctcctcctcccgcctgcagtcccttcttccttctctgccgggattttcacccctccgcttctagtccgcctttggcggccgtcgcagcccaaccgccgttttttctgaaggggagggtaaaagaaaaggaggaaggcgggtgcgaggcgcgacctcgtgagcgacggatgggctggctaattggcgcccagataggagggccggggcctgtggcaccgcccccctaagctttgctgattggctgaggcggaagagggtggtccttatggggcgcgggagccctggcggggcgggagtagaggccggggcgaagagtggggccgggtcggcgggggcggggccgggggcggggcgcgaggggcgcggccgggtggagaggccggcgcctggtcttgggtcagcaggtgggctgcttccctccgcctggaacgcgtctcgaatgagtactgaggaacaatagtaataaaggtgatgaagcatttcgagtccacgatgcgctctcgtgggaagaggttttcggaaccaggacacttttcagggctcctgctcgttatttcgcagcggccttggcgaatcccctaatgaggctcaattttatcgactgtaaatggggggcatgcgcattcttgccaggccggacctcccttctgagcattgtttgtggggctctactcagaaaatggaggcaacgctactttgcgagcttcagagtcacttgaaaatggtgttattgttaaaaatgggattacagccaccaggagaggcaagcgttaagggtatttggggtttgagagagcacaattcgggagt

SEQ ID NO: 39612 - DNA, 853 bp, Homo sapiens
cagtgagccatgattgcaccactggcactgcagcctgagtgacagagccagaccttgtctttatttaataaaaagaagaatattagattactgcaccgttaggttgaagatgctatatgcagaacatggtgtttctgggctctccaggtctttcctcctctccttgtaggtttaaaaatgttttgagttggttggactccatggtaacattcttgtgaactttcagttgaggaaaggtgatctttaaggggaaaggggtggagggagagagagtttaacagtggcagcaatctaggtgaagggagaactttgtaaagcagagtacatcttccctagaagcaattagtcatattattagacaaactgtttcagcagctggcaaaacagcaggaacatgtcgattttgcttccttggttacaggcagtgatagtgtacttgaccttccgcagagctgggtcacagagagggcatctttaaacagccctgtctggtttgggtgaatggaatctgcactggcagggtttgaaagcaaatgcctgtgagttccctcaaccaacctctggccttttgggttggactctctttggcctgggaggttgctgaggaaaaatataaataaagctgcagggagccattggcatggtaagtgtgagtgtcctaaagaaaacaagactgcagtattgaagtctattctctttccctgtgtttctgggggagaagccttgtaatgcaatgtatttcagtagtcacttatttttacagcagttagtataatagcagtggatttagacacctattgtatatttgaagaaattcaatttaatgtcttgctatgctaagctcttagcaaat

SEQ ID NO: 39613 - DNA, 827 bp, Homo sapiens
ctggcccccaaacaatgcagcgctctcttgtgttatggacatgaagcatcctggtggtcctgtctctacagctctctggctcctaccttagccttagcggccaagagggattgggccctctgtggtccactggacttattaatacctttagtgggaaaccctggcaggacagtctttacatccacccagcaaggcagctccttggtgtggaggtagggaagccacacacatgtttctggagcagagcacagttaggctgctggaacattcagatgccattacagacaggccttaaattggcaagcttattctctaaggatacgtgctatcaagggcaaaaacaagctccaaaagtttcagaagttagaacatattcattatgtcatctgacctctcatgttccaggtgaaaattctgaggtccaaagtctgatgcatgacagaactcactggcaggcagatagggcctcactccgtcacccaggctggaatgcagtggtacagtcatggctcactccagcctcaacctcctgggctcaagtgatcctcctgcctcagcctcctgagtaactgggaccacagcagatgatacaggtttagatggtgctgccaggtagtgcctcaaagagaagaaaagtggtcacttcagaataaggctgtgaacactgcttgtgcaagtaaaattaagaacatgttatcaattataaaatcctcacattttctctaattaattttctcccatttctgtatattttaaacccatctttcatcactactaaacaaaatagggaaagacaaaggtttaaagagaaactatccaggatcaag

SEQ ID NO: 39614 - DNA, 1537 bp, Homo sapiens
tcagagtgtactcaataaatgtagacttcatacctgcagagcctaaggcactgcttagggctgcctcagggtcaatccaaacctttcacttgccaactgccattcaatgagtccctactctgctccaagctgaaagacatcctaggcgttccctacagttccttctagtcggggtagggtctgccgctgcacagctgacataattaatcacttccttccaaaccttgagtcccgaaggaagcggccacactgcccggctcaccgctcaccggctggcatggtgtctcgtggagctgcaagttacttaacctctctgtgcgcttccccagccttagagtggggataagctggggtttctctaggcatcagaaaaaagaaagcgcgagaagcattcagaactgtgcgagatatgatcagtgttcgccgctgttatttctctcattttatcctcagattcgtcctggggtgtcacccccgtcaccccgaaaggatctgcggctgcccctccccagcgcttgccttgctggccagaggggccaagggaactggtggcctccctcgggtcagcctcgcccaccgcgccggaggaaggagatccaggagtggggttcttgtcctccgccccccaaacctcgtcacgactgcagccggcccggcgggggccccgccgtccgcctcagtctggacctctgtaaaatgggggtaacagcgccgacctggggggcccgccccggggatgaacggccgcccagagcgactcgggacctcacgttaccagcaggctggcacgactagcaggttacggctcgccaggcggccggggctgcgactgacctggcgccctcgcccagctccccatgcgtgttgtaattcactgtcatgaccttcacggagtccttgaacaccacgttcccctggctcagatattgcagggtgcggcggatggggaagcggcccttcatgggcatggcggcaacggtggcggggccgaccccacgggccgcgagccgagcagcgacgagaaaggactagctagcacccgcgcggatctcacgcggcttctccccagagccaggttccacttcccgcgcagacgcacaggagacgcttcccggcgggcagcgcacgccgcggagcactctgggacttgtaggcggccttcgacccggcgcggcgagaaccggtgtgtgcagcttcgctttaggacgccttccccttggaaggtttaggttgtcgcgtcctgtaaattagtcatttccccatccacccacgggaaaatatttttacataggctaaaagtcagacattgcaataagaaataatcaggaaagctcagtttggataccaagtcagctgataacgtcctattgaacgtattgtccatttttctccccaaacatctccagttttatcatgaagagttcaaactgcactttctgacgttgacttaaacttcttagcaaaagaaaaaaagatggtttgggatcaattccttcctaaattcagccacttaactcaggacctcaattttttcgta

SEQ ID NO: 39615 - DNA, 488 bp, Homo sapiens
gtatcaaggtacagtgacctggtatatgtgagagttggaaagaagaagcatctgtttttgtccccacattatccagacaccccatggccaacagtgtgcacagtcagcagaactctctagtgttgcaaatttaccccaaacttcccagaagccaatgagatcatcttcagcaacttctactcagcttggttgcaaagtcctggaggatcgggttccacctaaactttgtcctccacacacccccaactattctatttgctcatctattaacctaccctgggctttccagaattccatgcctttgctcctactcttcactctacctaaaatgtcctctttctccatctcttttgcaatcctactcatcttttaaggctcttcttgaacatcacctcccagccctaagcatgcatgctctcactgtccctgagcccacagcactcagcatctctcatattatgatattagtcttttctatatggcagtga

SEQ ID NO: 39616 - DNA, 1453 bp, Homo sapiens
tcacgtaaaaagtaaaaaaaataaaaataaaaaaaataaatatagctacatgttctgcagccgtacatccagcatgaatgtcaccccgccacatgccgcatcgacgacacatcccacagccgcactcaacccggcctcacgatcgcaaccacaacccacataactaacatgattatacacacatcgcatgaccacacacaacacgaacgactcaatcccgtgaagcagacatgacaacgtcacacatcgcacagacaccacacaaaacactccgaacatctccacacgaactcagaatacaaacgcttcagctttacacaaccagagaatcaaacacaaccgctcgggagacaagcacccacccactccacccacagctgcacaaccaaacccaagtgtatacgccccgcgtaaccgcacaaccacacagagcccaatcatcaaaggcacacacaagcgaaacgcacggcctgaaagccccatctcccacctctcacgtcacacccaccacaaccacacacggcccgcccgtctccgttctggaggagtcgtgtccccgccccccagactgggcctgaccctctgtatgtaccctgccgggctcctgcgggcacccaggtttgtcccccccttcaggcccgggctctgggcctccaccgtccgtcactcagccgcagccgccatctccatcggtcgctcggaactcggcaggtgcgcctgcggcggcgacgaaaccggaagacaagctggtagacgcctgtcgagcgccgagtcttcgagggcgcgaaaagggcggatacggattcgaatagtggagggcgggccggcggcttctgcgcaggcgctttccgaacgagggaggggatggtggggagcggagagaaagtggggctcggtaattttgtgcggttcttacgtcccgaattcgaactaatagcgcgtcaaagccagccaatggctctgcaccgccttgtacaggtgggaaagctgagaccagtagatctttggctcttgaccaaagtgcacaaagaataaggcagccaaggaatcaaagttcctgagagctagagacagaaaaaatattcaggggacgtggaggcgatggaaagtccaagaatagaaccacatgagagtggagacttggtatgagaaggtgtatcccggggtgtacagcatggccaagcctgtggaaaagatggcattttcaaaaggcaggacgattgatcagccaggacctaccccgtgcctacgctgtgctgggtaccacggggtatagagaggcaaaacctcatcccagtcccggagacctatttgctttgtgccctgcacacgttctggaccttagcaatagccagcctctaggagcaagagctgcagagaacgatgggacgatgggacgatcctgggcctccgtttacatccctgcagtgttactggcccccttttacagaag

SEQ ID NO: 39617 - DNA, 1125 bp, Homo sapiens
actcctccttgttcccaaaactgtaggcagccacttctagtgagagaatcgtggacagctgggtctcttcacccttgccccctgccttagggttctctatctttctgtctctctatccctctctctatctcactctctcactttctcttggcccttatttgtctaagtttatcccaagcagcacaagacatcttggcaccacattaaaatccttgggcaagaaaataaattatgatatggataacataaacgtcattggggaaggtctgggcacatcatgtaacttcccgaagggccaactgccctccaggctggcctggccccagctcccaggcctctgccagctgctgtggtctgagccagcgggttgagggcattgaggttggcacaccctgtctgctggcacagagaaatgagggtgatgacagacagcctggcagagccttgcctggaggatggagggagggtgtgctgggctgggcagtgtctgagggaagcaggtggcagttgctgtggccctgtcaggaaggaagcagggaatgaagaaggaagagaaaacgaggggagaaaggaagaggaagagggagggaaagaatgacaagaaaaaagcgaagatggagcaaaagtcgacctgggtttgaatcccagccctgccacctgtggccacgtgaaccttgggcgggtcacttaaattctctgagcttcagtttccttatctgtgaaatgagataattatagtactcacctcttaggttggagggttaaatagcttaatatttggaaagtgttagaacagcgcctggcacaggggaaggactatgtaaatgtttgttaaataaagaaaaaggaagagcagtgtaattcacatgccttggctgttgtgttgcgctgagtcagacaatagcatgagggtgtgaggatccaatctggtgtcatagaaatagctttgagagtcatggccttgccagatgggatgtctccaaaaagaactcagaatagaatcacatagcaactagattcattaaatccaatagtgggtgggggaacagcctcagcaaacctgaaaagcaggaaacatggaattgacttgggagatgtgagcttcaaagccaatcagtttgcagg

SEQ ID NO: 39618 - DNA, 1239 bp, Homo sapiens
ctttgatgtcagcaagggttgcacaatgagttttgacatgcatgcattcggagatgtatagaaattctggtttcttatacattttggggaaggaagcagggtactagataccagctttagatcatagggaaatcgaattacttctgaattcctcagatgaggagtgtcgcctctagatggtctgctttgtggccaccaggtgatctttgctctcctcagtgatgaggccagtgtggctggagcagaggaagtgagggagagagttttgggaaatcaggtgtgagagcccaagggtgaggggaggtcatagccattgaagggactttggcctttactatgagtgaggtgggagctgggggaagtgctgagtaggggagggacaggatgtgacctctgactgctggattgggaagagacacggaggtcggaaatgccaagtgtgcatggcacatagtaaacccttcagaaattcaggtgacaggatgcatgtagagtccctggaaggaaacaccaactgtaacagcgggcacctctggggagggaaactggaatggtggggagactgactttccacaacgtaggcttttttcctatgatttgaatggcttttttcctctatatgtatttttcttaaaaatatctaaatcaaaaaaattaaggaaaaggaaaataggagaagactgaaaaatcagcagaaagcaaaactgcggatggggtccccaagccacccctttctccaaagttgtttccccttcatgcacctgtttgctcttctgcgataagggaggcacttgacaggctcaaaagcctcatgcccagggaagtcgtttgccccaactcgtagcctcaaatgaacccccactttgctcacagttgggggtgggccccctccagttctagcttgtgggctgtctagcaggtcagtgagggttgtaagtagccttgccagccaccagggggcggcatctggccactttagaaccttgcagcgaacccgggtgtccaaagccaacgtggttctgctggtttatctccaatgccttccaaggctccctcctgctgaccaccggaggaggctgagcatcccagcagcctggggtgggagactcagtccctctaccacgcctctgcactgctgcccctttcctcttttaggggctcgccaagtagctgataacagggagccaggatgcacaacacgctgtcatgttctggaccagccttggaccttccacagag

SEQ ID NO: 39619 - DNA, 705 bp, Homo sapiens
tcttctagtttcaagagactctaggtcaaattctcatttataggcctgaaacctcccaaaagatgaaaattaactgtggctgttaatttctaaacccttctctgatgaatatcatgtcattttaacagaggcagcctgaaatgttgcatgtttctatgaaaaatctttatccaaatattaggccagctggctgtttcattttgctacagaagaactttcccttcgacttacctcagaaggaataaaacataaactcgctgccaagaagaatgcaaacaccactctctctatttgagacagtgcctattgcagggaaacccactgtgtccacatagtttcaaggtccgtatctgctttgatctgtgaaaaaggaaatctccctagcagagagccaaaaccatacatgcagaagcttgaaaccactgtgcaaacaactgaatattgtgaaacaaggtttaggggcaatagaataaccttttaactttctcttttgtctcctggtgtcctgaaatttcccctgtggtcctttttcataaagaatcaaaattcaatcctagattttaaaaaagggtgttgtccacaattttagcaaatctaaaacaccaacgctagaaactccagacatctttgacagctcccttccttcaccttcttgtaccaaatgctgttattctcctttcaaattgtcttcaggattccttccct

SEQ ID NO: 39620 - DNA, 565 bp, Homo sapiens
ccctgcaagtctaaatttcaaaactatgctctgctgtttctgacatttgtaggacaggccaaggaattcaacagtcaatagcaatagccatttaaccaaagggaaaaaaaaaaccaacaaggagcttcctgagcaggggtgtgtgcagaccagtgccctctcaatgtctgtctccaggtctcatccctctctatgtctgtctcagctctcggtgggggagggctcccaagctgcaggatgacgacatgttgactatgcagctctgagtgcttaacattggacaaattccactgtcacagagctggcctaaggtggaggtggtactggacattctggcaggcattccacaaaggcacatgtcgtgagtctccaccaccaagttctcagagttttttggataattgatgatcacagaatacaaggtcaatatataaatgtcaatgctatttgcatatactagcaacagttggaaattaaagttaaataagcgataccatttacaatagcatcaaaaatatcaactgcttagaaataaatctgtcaaaagatatgcaaggcccatgca

SEQ ID NO: 39621 - DNA, 2217 bp, Homo sapiens
ttaaactaagaaattagagtcccattttaaatgcaggccaaatgactgaaaaaaaatttagagtataattaaaaaattaaaagtacacacttaaaatgtagtttgataagttttgacaaacgtatatatttttacaccaccattgagatataaaacattctcatcatccgaaaagattcctttgtatccccttcccaaccactgatctgctttctaacatcgtagtgttttctagtgtttcttatagatggaattatacattatgtactcaattcttacttctttgactcagcatgaatttggtggtgcccatcactaattcatttttattactgctgacttcagacctttaggggagagaagacataaatcaaataatcacctaattaagtatttaattacaacagcatcaagttaacctaagggtaagtacaagtggaaatacattaccttgtttgttaacaattcaatcaatacgaccttggtgtacagtggggggctatagggtcatgattcagcttgtggaaaacaaatgaaaataaatgttagcgaagagtgactctaaagaacctctgtcctcacggtaatttttttaatgtgtcagatgctggtgggaggcattcttccttagctctttactcccatcccttacacttaacagaggaaaggatctgtaaggcgcgtacccctctactgcccactgtcgacgaaaacagcctcgccctgcaccgccaccgccacgcataaggcggtgtgtgggcagctcggacgtggcacctgccctcagctgctcaatcccgggcgccgcgacggtcacgtgcacagcggcaggcctttttgccccgcccccgcggcccggctcctgcgtgggcccggccccgcccacagcccgcgcagtcccgcgagcctggcctcggcggccccagcttctaaggagctcgtgagggccaggctgcgcctgcgtcgggcggctggtgggcggggcgagggccgctggggccgcgaagtggggcggccgggtgggctacaagccgggtctgggctgaggggcgcggcttcgcggtggaccccagcccggcaacgggaaggcgagctctcctccaccgtccaaagtaaactttgccgctccttccgcggcgctcccgagtcctcgccgccgccgggccgccgcagtccgcgaagagccgtcctgcgtcagggcctccttccctgccccggcgcggggccactgcgccatggacgccacagcactggagcgggacgctgtgcagttcgcccgtctggcggttcagcgcgaccacgaaggccgctactccgaggcggtgttttattacaaggtagggccgggcccggcgcttcggtcggagttgctcagtcggagtgcggcccgggcctgcggccgaggggcgggatccgggtgcggaggctagcggccccggctttgcttttccctcgtccgcctcccggccctcctcttgttgggagcggcaagcccgagtgcagaggccgacgctgaggctgcggggaggctgggtcgcggcttgcagccgccgctcctccacctgtagtcctgactggcaaatgcccaccgttgagccgctttggggggcaggtgttagatatgggtagttagtagccaattcttgctgtcacttgactctgatttacagctagcgggaaatggcctgtgatatatatcaaaataatgcatgctcgttaaataaacttaaaaagaataaaaaccatctcctgtcatagcatttgacatacagtcatgcgtccttagcgatgtgatattttctgagaaatgtgttcttaggccattttgttgttgtgcgaacaccgtagaaagcgcttacacaagcctgaatggtacagcctgttccacacctaagctgtatggcatggcctgttgctcctaggttacaggcctgcgcagcgtgttgctgtactcagtggtgtgtgcagttacatgcagtggtaagtatttgtgcatctaaacatagaaaaggtacagtaaacatgcagcataaaagataaaaaaaaaatactacaccagtgtggggcacttacccacaaaaggagcttgcaggactggaagttgctctgagttggtgagtagtggtgagtgaatgtgaaggcctgggacattcactgctctactcttgtagactttataagcagtgtacccttaggctacgctaaatttttttaatc

SEQ ID NO: 39622 - DNA, 3145 bp, Homo sapiens
ttgggactgatagtgataaaatgacaggtccaaagccactgttagaccagtcagcacccagggagccaggtaagcaagatacaccctgcttttcagcgtcattgattcacatgggctccgccctcatcagactgctcccctaccatatgctgaaggccagatggactggcagatatgtcaaagcagccttaaaaacaagcttgggctcaaggacaaaaactctcaaatcaaagccagtgccctgcccccaacctggcacagaaaacacacatcatgttctacctctgcttggcagaaattggacttggttttcaagatcacagaactggatctgactcattggctgaaaaatgagctcatatcaggaaaaataaaatcgatgcaaatttttaatgaaccaatacaatttccaccagctcaacaattagattttttttttttttttttttttttttttgagtcagggtcttgctctgtcacccaggctggaatacaagagagacatcatggctcactgcagccttgaacttctgtgctcaagcaatcctcctgcttcagcctcctaagggctaggaccacaggcacatatcactacatccagctaattttaaattttttttatttcatatagagacaagatctcaccatgttgcccaggctgaaattacaaatctttgtaaactcttcaaagaaaatcaagtgtgggaggtttttcccttttaagtaccctcaactgagacactggatattccagtggatagatagacatggatattccagacactggaatagacagacatggatattccagacataaaaaaccaccactatgctatcttctttttctccaaatggcatacgtacttttatttcaaaatattcacaaagttaagaaaaagtacagtacaaataactttttgctctcaaccatttgagtgagtacctgatgctccatcacccccccaaatactttttgtagttgttatttcctacaaataaggaccttctctcacataataataatgtaaccatcaaaagtggaaaatgcattgatacatgactatcatgtaattatcattatttcttttttttgaaaaaaatatgggatatacatcaaatagtaagagaaggtactaggattattttcttctgtctattttctaaattttctacaataaattctaattttttaatgaagccgaaacccaagctcatgctgggattccattgtcaaacacattatctcacttaaatcctaaggccaacctcatgagatagccagggctgttcccttgactgccagcatttcatgaatgaggatgcagggactctggggacgcagtgcctcctgactcaaactagaaggaactgctatctgaaggagtctctcaggcaccatttccctgctgtacataaccagagagctttgtaaatataaaaaggaagcgggggcggggggacaagaggaagaaaacaggaagtcctacttggcagcatctggaagtggacatcgcccccctcaccatcaggaaggtgagaggaacattcacacacaaacaagctcatccatctggcctgagcagcccaccctccacagagatgaaatgtgacatctgtgccctgcctcagcctttgaacatccttccagttccttcgctattgaccaacaaggtcccttggggttgaggggtaggagttagattaggaatctaaccttttctaccctgcttcttcctgcccacctgcaagaaggaaggagattacggggagggcttgcaggcataaagccaggcaggatgctctcaacattcatcttgggagctgcccattaagagtgactcactcatccccaggacctgggcatcatctgattcgaccgatgactcagtgccttgcccacaggactcagtaattgccctattgtcctcactagccaagagaagggatgaagagatggagaggagccaccatccactgcttcccaacagactaggagcctcccagccagctccctcctacctcttttcccaacaaagaagatttggggtgcagaagagcagggagtggtgtgaaatctgctccaggatgtgtcacagccagctggggacccaactgctaaacgggatttgaatgaactcaacccagacgaggctggatttgccagtcatgccactctccatctgcttacctagctaccaggtgggaaagaggctgtgagtaaaggagcaacggagaggaaatgctcatgacttcaagggagggcaggggaggaacctctggtctgttggtggctccccaacatcattcactagtttgttcatttattgatttatacaatatttgagcaccttctgtatgctggcattgcagatccagcaaggagccaaacgaatgaaactctctgcccttgctgagcttcacttactgtaaacaagtaaattataacaggtcatatggggagaagccccacagggaaaaaggaaagcaaggcatgggggctggggctggcagggatggtgggctgggagttaaccattttaaatgttagcctgagaaggcctcatggataaagggatagacatttgagcagaaacctgaagatgaggaaatcgggctatgaaaataccaggacatcgccaaacagagggacaccaccaaacagagggaaaggcaagtccaaagacctgaggcaggagcacgtttcacatcagcacagccaagggagtgacctgaatcagaggaccagccttgagaaaccccaacacaaagccccctagagccatctctgcccccaaacctgagctcagggaccagacaaggaaaacttcaggtagagaagccactgccgcgactccagtgggatgcttcaacagaccatccttcaatcactctgcagcatgggcacgtgggctgcttttaatagatacgcgtgggctaaatggcatcacagaaccataaatcccagtgttaaagactttcaggaaaggaggttttctgaattcctcgatatttatccaatgtttaaattaaatcctcagaagcttctcctcaaacctaacctgaaccctccatacttccgtttcaggtcaagaatgatacaaccttggcctacagtgggtaggacacatcctcaacttggggggca

SEQ ID NO: 39623 - DNA, 971 bp, Homo sapiens
acagcaaaggaaaaaaaaatcaggcaagaatagaacaaaattttttccatcttcctttaaggaaatgaaagaggctgacttgctgagctctccaagagctgctttgcaaattctgtgatactcttggttaaaatgcactacaaaaaagcagtatagtctttaatgttggaaacatctatgtggcaatcggcagactaagtaactctcaaagagaagggctgggcaaagttacctgggctgcctgccaaaggatgaggttcaatagaggtttaattcatccagccaaaacacacacacacacacacacacacacacacacacaccccactacgttaaagtccctacaacaaatgctgacaaagaaaaataacagctcaaaattaaaaggctacagtccacagggaccacatctctgtcaacctggggatttgaagattctcattaaccacagggatagcaatgaatccatcaacccccatagcctgtcttcttttgagatgacacctcagagtcacagggtaggcaccttgaatacagctggggatacagtcacatgatttgtaggaaagtcggcgtgtactgcaatagcaagcacttatgatcctgccatgggtttcagctgaggggccagaagagtttgtatattatcttgttgatatttgtagcttaaaaggaagaaacgcctaggattttttaaggcaatacagtccatgtcaatattagacagctatttctatgttctagccaatggccagaacatgttttggccactaatagcattttgctaatgtggttaccatgaatgaagttgtgcaagaacctatacgtgcccacatttattgatttagaaatgatgctaacagtcaaatacacagagtaactaagttcaaatatctaaatattcttaatatttggaatgttttccattatatcttgatttattgtattttctaaataagcatatatatgac

SEQ ID NO: 39624 - DNA, 673 bp, Homo sapiens
ttgaggtcaggagttgaccagcctgaccaacatggcaaaacccggtctctaccaaaaacacaaaaattagccgggtgtggtggcacatgcctgtaatcccagctactcgggaggctaaggcacgaaaatcgcttgaacctgggaggcagtggttgcagtggcagagatcacatcattgcactccggtttttgagaccctgtctcaaataaataaataaataaataaataaataaataaataaagcagggctcactcagggaaactaattttcacattacagcaggcaggccacagcgcaacgccctgctgatccagtgactacaaagtccatcccgctgtaatcctggcctgtatgagccctccctctgacccccttcccagtgccaatctgacaaagaaaggtcatggcaggacctgggggaagagaacaacagagccactgccaggccccatggccagtttggccccagtggacatctcattggaaccttctctgtttgcagcgcccagcgggtctcagccctccctgccagccaagcacacagggggccctcttgtccactcaggctgggcagctctcaaagcactctctcacacagcatcccttaccatcctccaggctacccagggatgtaggcaagaattgcagcccccagattcaaagacaaagag

SEQ ID NO: 39625 - DNA, 556 bp, Homo sapiens
tctcagtgtggcttctgttttaacaaacatttgaaaagagacagacctataaaataggcatttaaaaattacatcagcatattgagttttactatctcacctagcagggctgtcgcacacctgaatgacccatttatctctgactcactgcctcctcttccatccattactcgcccatgcctggcacaaggcccccttgctggccctcagctaagccaggcttagccctgatgcgccctccagctggaatgttcttcccccacatggcctgaggcttgctcactctctccagacaatactgcattcctctccctccccttgcctccaaacacccaccagctgagtccccttccagctctttgcctcctttgtatacatcagataacctaccatgtgtattttaactttttattgcgttttccaccccctctgcaatgtaagcctcagaaaagcagggacttctgtccattctcttcactgctctgtccccatcaccgaaaattgcccccatcacgtagtaggtgctcaataaatacttagtgaattaaaaagctgg

SEQ ID NO: 39626 - DNA, 1290 bp, Homo sapiens
agggaggcagatcgctctcagctccagagtttgaaaccggcctggccaacattgcaaaacccatctttcctaaaaatacaaaaattagccagcgtggtggtgtgagcctttggtcctggctacttgggaggctgaagctggagaatcgcttgaacccgggaggctgaggctgcagtgagccgagattgtgacactgcactccagcctgagtgacagagcaagaccctgtctcaataaataaataaagctgactgatcaatggatctgtgggaaaatgcttattttcctaacttaaaacatcaggcttatatccaagggctctctggttaaaaggttcctccttttacagcttgaaaaggttggcttttgctgatataaatcagcatgcaaaggggacccagcactgttcaaataaggtcagaggcaaacccaggttgcaggaagagacagacatccaagtgacacggcagatggctggcatccagaggcccttttgcaatctggaatttaaatggccaagacaagaaatgggatgttaaatgtgggcctcaggagcaacacctcagtctccagctacccacagacaactgcaccacagcgtgagagcacgttagcagctaccagaagcctggtcaccaattcaggttcatcagacaaaaatcacgagaggtgccgaacgccccagatcgcaatcaaaaggcaatgggaaaggaaatgtggacagcagaataccttcccctgggggccctgaaagtagactatctcattatttgccaattccatacttgtgaattcgtctactcgctaaaatttatatgtaaccccaaaatcaatacacgcagccctttcaggttcattcaccgacatacacaggagcgacgttctgcctcctgctttcagtgcccatcctgtaaacaagtgtccttttcatggtctacttagtgccatgtctttcacacttttgtgctttctttggtgattttgctgttaaaatggcccataagggaagtgcagaagtgctgtctagtgagctttcctgagcacgagcaggctgtgatgtggcttacagagcaaatacatgttaggtgagtggccctgagttcaatgctaatgaatcaatagtatatagtaaataaagtgtcttttaatggaaactgaaaagattaatattgatcagttgatgaaaatgtgaccacaggcttgctccaagccctgcattttccctacaacaatggttccgtattcactaattcagtgttcacaactttatggaatacaagtaccacaaaa

SEQ ID NO: 39627 - DNA, 1362 bp, Homo sapiens
tgctttttgcttaggggtgaagaggtgaaactgtcactcctagatctcggcttggaaattgttttttaatcatctctcttggaaatggaggcacagccagccagcccaatcccctcgccgcctccacgcgtcagctttgcgcatcagttgtccccgatttcttttcatgcccaacctcacaacaaggaaaagcagggttttaagcaatttcaagccaggcagaacgttgagccagtgatgacaataagccgctcagttcgctaacaatcaatcagagaaggaaaacggctcaggccgggcaccttggcaagtgaggactctgcacccggggcaccggtgccagcccgcgctgcagggcaacgcccacccgcccacggtgcccggcgcccacgcgggcgacacctcctcgcagagcctggacgccgtgccatgcccgcggtgccgcggccgggcaggggtacccccgaggataccatggcgcccccgccccctttttccctttgttgcacatccacccgaaccaccaggcacgctgcaccgaccccgatcctgctacgggtcggcgggggactccccgcaatagagtcaggccgcatccacgcgggcactgtagcctcctcattgtggagacgatgaaacggagcatacagaccgtctcctgccaccctatgtggccgccagtccccggaccacagttactgggggctgcgaagtggctgtacgcgtagacaccgacctccgtagcagccctcgcgaagcccggatgcggggcgaccccgcgcgccctacctggatccggggatccacctcttcttcctcctccagcccctgctccatcccctcttcctcctcctcctcctcgtcccgggcaggcggcaggatttcggctggctcctccgagcggctccgcttcagtgccgcgtccatgcaggcagccggcacgcgcgccgcgcagtgggctccggagcgccccgggggtcgcggctgccacaggctgggctggagccgcctcgccacagccgggcacggtcggggagccgccggggccgacacccgggagacgcagctcgccgatgcggatacctccggccgcggcggagcagaggaaatgggcgcggccgccccctttctgccgcggcagtcagcgcagcgcccgctccgcccccgtcccgccccggcctcgcgttccgccgccagtcccagctatccaggtctccgtcgcaaaaccccagctccctccacatctccaaggtggcaaaataggacagcccccacccccttgtaacttagcagctcggatatatctcaactacgtaacgcaagcctcccgctttcgggagtcccctcctccagccctcctcc

SEQ ID NO: 39628 - DNA, 970 bp, Homo sapiens
agcagagatggggggtggttctcaccatgttgcccaggctggtcttgaactcctgacctcaggtgatccacctgcctcagcctcccaaagtgctgggattacaagcatgagccatggtgcccagttagtttcaggtgttttctatctattgggagattgtctttctctggcactggctacaaccaattgttattttagagagacagtttaacaactgcctgaccatcatctgatgatcacctgacattcctggagacagggccctcccctgccctgctcatgtctgcctaactaccgattctaacataatgaacagtgaggatgaccagaggtcactttcattaccatcttggatttggcaggttttggccagcttctttactgtatcctgttttatcagtaaggtctttgtgacctgtatcttgtgccaacctcctatctcatcctgtgactaagaatgcctaactgcctgggaatgcagcccagtaggtctcagctttattttacccagctcctattcactttggttcaaatgcctctgacagtaggggccaagggaaaaacttcccctttgtcctctgaaggtttactgaaaaatcaactcacaaaatgcagattagtaggaaaaaggcatcaaaacttattaatgtgtacacaggggagaatcagagtgatcactcaatatcccagtggggcccaaatacttatatagccttatttgagaggggagtgaggagatggggaatataggtaattctgttgaggtacaataaacgattgctagggagaatgaatggatcagggaacagagattagcttgtaaatcgttctctttgaaaaaaagattttttttttttttgagacaggatcttgctctgtcccaaaggctggagtgcaatggtgtggtcacagctcactgcagccttgacctactgggctcatgtgatcctcttgtaaccacccatgggtt

SEQ ID NO: 39629 - DNA, 738 bp, Homo sapiens
caacacccagcacgcacagtgtgagccctgctgcctgcccctcttctcttcaggagccaggatttattctgattgtacagaaccactatgactattatccaaccccttcacactgggacccctcctccagatgtagttggagttgaagggcccaggcctgctgcatgtgcagtccagtcatgtactcaagacagggttctcacaaacagctttctgcagaaaggcaaacagaaaggcttacaggctcaactcgtgagcagaacaaaataacctggattttacttcataaaggaaaagtcattaaaaggcaatgattgggaaagaggtcagcagaccaatttagggatttccccatattctgcaacactagctacgtgattttggactcatcatttaccccttgctactgcttcctcatttcccaatagggagttggaatgtccattctaaagcccctctcaactctgaaattctaactctaaactagacaccagtcatcttctccgagaaacagcactggacaaatggggcagaggggaggacaggtgatggccattccctctctcccccccagggcaaacaatgtggcaaggaactggcccagtgataaggggtctcaacaatcagatatggagccatggagggttcttgagcacagacagagcaaaagtggtatttgtggaacactggttttgaagaaatacataactgaactaaaggggagaccaatgggcaaat

SEQ ID NO: 39630 - DNA, 2250 bp, Homo sapiens
tacaaaaaaaaatccttcccgctatatgagaggtcacaaagaagacaaacacacagtccctaccttcagtgggcttacattcatttcagtggccagactatctcatgcaccatacttttattcaaaccagatgagtcaactattacaataaatcgatttagtttacgaaaaaggacgctctcaagaactgactgggaaaccttgcgaagaaaatattcctcaattttcggtgcccgcgaaaggggtgacttaaaaaccacaatggccttagctggaagcgggtggtcaattgtcagatacaagtgaggtcatcgtttcccaagggtcggacctccgttttttcgggggaaatgaagctaagcctgggtgggctcatttcctgatcacactcacaagaggctgtcataggaaccagagggagcgtcactttgcagggactgagaccctcgcaccgccatcaccgggcaaagtggagaaagagacccaatgacgcgtggctgaggtcccgaggatccatctcaggaccctcaggatagactaggctgcatgggcccctagaccctgaggagggcgtccatgatggctagccgacccgcgttaatttagtcagccacgctcagggctcaccgtcatcagttcctaaattcacctgcagggctagggccaggcgcactcaccccacagccagccccactgggcctcggaggcagaatacgggaagaaccgcgaaacaaccctaaaccaattctgaggaccacgaattcggattatccgggagttcttttgccatggcaccgcccccgccacttccgctaggaacccggaagttcctacccgacgccggaagtcccacggccttgcctcctcagattcctctctcacccccacgcagaggagagaacttgcttctggacccgggtgggtgccggctcggctctccttgtcttccagagcggtggcccggaagcacagtcctcccagacgccagcgccagaagctcggatcgcggctgcaccgggagagcgccgatctgggtgcgaggcaggtgcggggccatgaatgggaccgcaaacccgctgctggaccgcgaggaacattgcctgaggctcggggagagcttcgagaagcggccgcgggcctccttccacactattcgttgtaagtcagcgctccccacggttcccttcggccgctccagccgccacatatcaaccttgactccttcctttcttccctcggcccttcagattccagggaaccccctgccagcgtcagttactttctctcgaaccccaaatcctttgggacatcgatttgtcccttcttttacccagattatttctcccaaatcttcgtcactccctactattcttctacctcacagtctcaaacactagttccaaaggtctttggcctctttccatttccatccctccccgcccccaacctcgcccctaaggcaaacctccctcccccaaggcaaacctcccccctcttatccgggtccacttctccctcgaaacccctcccctcctttccgatgctcccatcagggttctccacatttaaaagacgcttcttgtttgttatgagcctcatccactgccttagaacccattctcttccctgcttttctcctccgacttggtcctggactcccaaatactgtgctttgtcccctctacagccaaagaattggcatcctctctgcgcctcatcagagtcttcttccatctcctttctgtgcttcatttgacttggatgtcttttgaggtcacctataccacccgggcttttcctccagaccaagttccttgtgggtaaagagtcaaatcagagttcgtgagcctgggataggttaaagattggtctacgtttggaagcagaagagagcaggcgtaaggaatgtccaaatagtcattatgccggacctttttctacataattatagacgctgttgagagagtgcacttccaccctatgtcctgggtgaaggtttggcagttaggaattggctgacagagcatccctccgtgattcatgaacttctggtttccgtggtgctaacgctgttgttaagacttgtttttgtcagaggacctaatagatgtgactcaacacatgtgaagagggcgttttagataatgaaatcccatctttgtgtagtcacttgccatgccattgctatgcttcctactgacagcagatccagctctttcagagagaagagatgggaataagataagaaca

SEQ ID NO: 39631 - DNA, 1331 bp, Homo sapiens
ttcctaagatattgtagaaatagtcactttttttggtaaaagtacctaaaatttactctctttgcaaatttacaatacacaatattattaactatggctttcatgttgtacattagatctccaggctttatcgtacttgactgaaactttgtaccctttgacctatctccctattccccctcctcctcctcattccctccccggtaactaactctactttcagtttctaagaattgaaggggttttttttttccaagtctttctaccctagatcagcattagctctactcagtaaaatcctgcagtgacctttttaagaaaatgttttcagtaataataatgtcattaccagcagttcatgtttgcatttgccataccgcccaaggcatggatgagacctgggccagaaacaacaaggcagactcctggcctaaaagcaaaacagaatttattaaaatcaggtcaaatgtaacaactgattcataacactttagtgtgaaacatggcaatcttggacttcaaaggaaggacatacaagtctttactataactgataaaacaattattagaatatttttaattaaaaaacaaggcgatatatatatatcgcgatatatatacatacacacatatacgtatatagtgtatacactatatatgtatatagtgtatatatacgtatatacgtgtatatatacacacactatatacatagtgtatatatatacacactatatacctatagtatatactatatacgtatatatacacacactacatacgtatatatacacacactatatacgtatatatacgtatatacgtatacgtatatatacacacactatatacgtatatatacacactatatacgtatacatacgtgtatatatgtatacatacgtatatacgtatacatgcatgtatatatgtatacatacgtatatatgtatacatgcgtgtatatatgtatacatacgtatatacgtatacatacgtgtatatatggatccatatatacgtatacatacgtgtatatgtatacatacgtatatatatgtatacatatatgtatatatactctgggcaccagagtatactctatatatatgtatacatacagacacacgtatacacacacgtgtatacatgtagacacacgtatacacacacgtatgcatgtagacacacgtatacatacacacacgtatacatacacacacgtatacatacacttgtatacatatacacttgtatatacacttgtatacatatacacatgtatacacatgtacgcacatgtgtgcgtgtatacacatgtacgcacatgt

SEQ ID NO: 39632 - DNA, 2086 bp, Homo sapiens
ggttcaaaccctggctctgctactaccagctgtgtcaccaaaggcaagttttacttaacctgtgtcttttctcatctgtcaacttggtgtaacaacagttaatattcaacagtgattgatatgatatatgtaaagtagcagaagagtggtaagcgctatctgggtgtttgcaatgcatacctaccgctattactgatcattcccagtaacgcattcagccacctgagtccatactcaccgcttgctcattcctcatcccgatgtacttgatgcctagctgctgggcagcaatggcgatttcggtcactgggatgcctacgatgccaaatatgtactccacatcctgaggaacgaagaacaggggagtaaactcccaaggccccaccatatcgccacatccttccctccctcccgggcgctaaaaggaaaaccccccgacccccatcgcccatttctactcgtctccaagacaacatcgcggtccccgccagcttccgtaggagcctttcattccaggaaggtccatcgtacttgcgttttcagggcctgagcgatgactttagcaccagacacctgctcctcgctgcgctctgcgaagttactgtccggcatcttccaccgaaaagctctaagcactcacgcagccggcaaacaagcggaatcatccagcaaggcaaacgcgaaatcggcagcacgccacctctggtactgcacctctgacggacaggagggcaaccaactgccttaaacaacgggaaggaagaggcggtctaaattcgtccacttcccgggagaggtgagaatgtaaacacgcgcgttctccaatcagaactgcgctctcttctcggctcctccattcgcgcgccagaatgccagagggaggcgggactagcaggagattgctgcctatgcaaagcaggtaagaagccgaactctgaggcctctcgccattgtctccgagtcggccagctggagcgttttcggggctgtaaagggagaatggcgcatgcgcatattcagggcggaaggcgcgctaagagcaggtacggagggggcgtggtgcggcgcggagggggtgtggtaagggcgtgcggtccagaccccgccccgggcgcccagttggacttggggagggctgcgcaaaggctgccgggagctgggaagcccggcgcgcgtcgtttgctggggctgtttgtgcgttgctgctgtgctaccgcgttgcgttttctaggcatttacttacacgctttgtggtttacgctctcataaccttgtggttttatagtccttaaattattgtagcgcacgttacttaaatccagaagcagatgtgtaccccagcaagagataaaatgacgctcagagtcagtagatccagaccgtgcctgagatcctgaatcctgtttcctacccactattcagccattgggtcacaagcgatgaaaagagcaccttgaaggtagtatagagcactgttttctccagcccttgctactaatccatattactctccgctaatatctttccaaaattaggaactatggcgtttcataattcttaggttgggtccctacctacaaccagccctgcacccgatagccttttaaaacatttttgtgtgaaaatcgtttgcaatgtgcaatatctgaaactactgccttggagtcattagaccctctgctcagtgacaataaacataaaatttccaattgtaataaacagtggaacttttaattttttgaggatttggagtcattttaagcaaaaagaacagtgataagtggacagtaaagagatgagaggggagtgggtcatgggtagtgaaatgagtgagaagcactggaagtgaaacgatttctaaacccagacattttcaaactgtagtcctgggtcttttcaaaaggtcttcccctctttttctcaacccctcaaccccaccccaagcagaggagagtgaagtggttgcctccctgcatatgtggacggtgttagtccattttcatactgctataaagaaatacccaaaactgggtaatttataaagaaaaagaggtttaatggtctcacagttccaaatggctacgga

SEQ ID NO: 39633 - DNA, 1086 bp, Homo sapiens
tttgcactttgagtagtccttgacacaatgcctcctgtccttgttgaagaagtacagacttccccttccatcatgtattatttatatcagtaccttttgtgacagtctctgcccctgttgcattagagtcacttggaaagctttttccaaatagttacttgggccctaccccagatctcctgaatcagcatcttaggacaagtcaggcacctgtattttttaaaagctgctacctgattttgctttgcagcccagagttgagaaccctagctctgttttcatgccagaagcatgagttactaattaaacatatgattgcctgtcaccaaagtaatactgttgattaatttggattgacaggttcaagactgatttgacattgacagaacaagctgtatcgatggtagtcagttcactgggcctacttctgtgtcaaaagaaacagtgacagaaccactcagtatgaagtgcaatgaaaactgaactctgaattggaacaaataactggaattcagttaactggttttgcaaaaggataaatactcaactggttgttttctgccatttaacaaagagaaaaatcattgggattgtttaaacttgctttcacctttgcacctttcagttcaggatgcagtgttcaattgttaacttgggcttgatgattcagcagaaagaaatgatttgagttctggctcactggattaacagggccaaggagcaagtcctttgcaatccaattgtaattacagccagcttgtccaacccttggcccaggatggctttgaatgcggcccaacacaaattcataaactttcttaaaacattatgagatttatgcaccgacccttttttttgttgttgtttttggtttttttttttttttttagctcatcagctatcatttgtgttagtgtattttatgtatggcccaagacaattcttctttttccagtgtggcccagggaagccaaaagattggatacccctgacaggattccaggattcttttgtaatttctcagaggccctctgtgcatactccgtaaggactatccacattctttattactttcattggcaatag

SEQ ID NO: 39634 - DNA, 616 bp, Homo sapiens
aaaaataaaaaggcggaaacaacaaaaaaaggagtctatgtagaacactattttttatagcaatgcaaaaactgtacagccggaaatgtgttgtaggaaatatgtcaacataggaagtaaaataatgtaatgaaaaggttctttgaataaagtgggttaaattgattttctttgcttctcattaaatctgtggacttcagagtaccaaagctcagcaacaggcttgaaacaaacccagtgaaaagcaactttattattgagctgaggattgatatcagtaataactcattaataaaaaagcttgataataaaaactcccagtgcctgatgccagctgacagacactgggagttttcccaggtaccctgtgacctagagaaagcttggattcctgcctttggcttgggctggcaagccctgtgcctttactctacattttaatgccagggagacctggaactggagaagggagtgctgtgggaagaaaacagaaggaatgttgttcccttgttttagctttgtgttcatccattatgggttttgggtttttttgttttttgtgtttttttaagaacatttgagatagtttgacagcagcagtcattacatcactgac

SEQ ID NO: 39635 - DNA, 912 bp, Homo sapiens
tttttttttaatttttttatttttttggtaacttgctaaagaaaactttttgtaacctgaggttatgaagatttttttctatatcaaaaagtgtaaagttttatttttcatatttaagtcactacctggaattgatttttgtttgttgagaagtaagaatccatataatatgtcaattagatttgctgtgtaattaaccaccccaaaacttagtggcttaaaagaaccaccatttatttaacatatattcctatgaggctggtctcaactgggctcacccatgtatctgttagtcagttgccagtgaactgagtcactcagcccctggaggttagctggttgtccactgggatagcgggcatattgccagtgagccacatagctctaccactcagcaggctagctggacttcttcattggatggcagcaggttgcaaaagggaatgagcctcattgtgcaagcctctatgtgcggtgtttgctaacatctcattagccaaagcaagttatgtggctgggctcagactctaagttaaaggcattcgagttacatgataatggaacatggatacagagaggggagaaattgctggccttttttatagtcaatttaccataacatccagttgtccaagcaccattcataatatagttcattctcatcccagtgatacataatttcccctctgtggaatgtcaagctcgcatatttatgggagtatttctgtactctctgttcttttcctatcctaacaccaatcccacactatcttaatttctgtgtttttaaaataagtcttgatgttggtaggacaagtagtccctggacttcattcttttgaagccatcttgtttattatattaattttaagcaactagaggggatggaagaggaacctttagattaaaaga

SEQ ID NO: 39636 - DNA, 2061 bp, Homo sapiens
agtcatattgtatgaaattgcaacaaattcaaaaagatgccatcgtgggagtgtggtgagtaaaaaacagctttcatgaaactcaaatcttgaaagtcagatgctttctgggtcttgtttaactgtaaaagagatagatgaagtattagaaatggagaaggaaaggggggaaaagccatccatttactgcttaagaatggctctgctattgcgatacctaaggtcacatgcgtagccacttgggttaatgatactcagtttgtccacggagtggcagtagcaactgtctgagaatcagtctcagccggggttccttctgtctatagaaagtgaaagacagactgttattcaaattccatgtgcaaaaaagccttcttacattaaatacctgggcatttcaggaagaagttttatttgacttaaactgtgaaggcagtttctcatttgaggaaaagaaagatataacgtgtttcagttgaaatgtcaagatcctttgattgcacatttggtttcctaggataaattattctagccaatggagcagaaactggctaatcaaaggcacagtgcacagttacacttctgtatatcattctctttttttaaaataatagctggaattttttttgaaagtgaaattacaatttaccacctcaactcagaggacatattagcttgataacttattcacagttgctggtgagttcaggcttaaatcatcagctgtcactcacaagtgtttacccttgaactttccgaatgagacatcaaacgtcttggtagtgggtgggtttaaacaaagctgcccacgcgagaaccattgtggagcttcttgttccaggggccggtcacggacaagctcatgaccagcacactcagatgtgacaatcagataacaagaggcaagagaagactttctgggaaataaaagatcatttttgtgatttctttaaattcagatcatataaattaggtgaagatagacattatttctcctgtttatgtaaaagaatttagacaatgaagtcacgaaattcatgagaataatttaaagactgttggaacttcccaatgtttttcttggcattcagtcactacacatagaaatgtatactatgccggttcctaatgacttagcagttccctcaggctttgttccacaggatgtgacatctcctctgccaacttttcctgcctcctttcctaatcataggattgctattctccctgacaagtaaagaatgacaagatattttattaaaaagatgttttatttatcttttaaagattttttaatgtatgtatctgcctctgaaattattaagaatgccttaataataatccctctcattttatttcagaagacactattgtaatagcatggctaggaaggaaacacagctaattattaagatgaatcatttagcaaggtggggaaaaatcccttgtgtgtaaaaatatctagtgattgacatattaccaaatttacatgaaatagatttccatgtaattgagactgatttttcctattagatggaaagaaccttcctgatcaggactggtgttgggggaatgttttccttatgaaatcagaagcagagcttctgtagggccgtccaagatcaggatgcttacttcaagatgccactctgcatctctccccacctgccaagtgtttcctgtctcccagatgctttctattggcttattgtaaggactttgacttctgcgctacgtgaactggggagtcactggaagagtttcagaggtgcaccttggtagactcaggctttctctggatctcactggctgctcttatgagtccagaatggaagaggatgaggacaaatgcagggggatgttaggagaccactaagcaggtccctgtcatttctctctctgtgattccttttgctgccactttctccttgtccccttggctccagccccctgctgtccttgctgtttcttgcacccgcccgtgaggcatgctcctgcctcaggctctctgcctgccgtgctctcacctcgcagacccacgtgatttcctcccgaaccccc

SEQ ID NO: 39637 - DNA, 673 bp, Homo sapiens
cagatgaatggcaacaaatcctggggtttggtgtttggatggtacatttccctggggaaagaaataacagtttgagatggaaccgggttggggtgggagaatacttctcattctgaggaatatttaattttgccaagatgagcatttctagttcttagtctgttgacgaaaagagctatggtttgtttctggaacttttgataaaaaataaagaaatttgtagcctggggagtttggttttaaaatgcaaacacaggagttatgagttgagacttggacagggtgtcattttctttttaaagggcagcaatatgattctttgatttgtctttgttatcttgacttttaatccggattcctgggcagttgttcagccccaggacatctccatgggcaggtggcctggccttggcacactacccagtaaatctctgcctgagaggacgctttagctgggaggccaggctgatttttaaaggcagaattggactatttactctaaaacagtaatgcacactgtttagaaagaaacattcctattctgggaggaaggaggagacacacagaagtatcatttatttctagtcttttctggtagaagctatgaagctgagtttactctctggaaatttgtagtttattttctagaaaattgcattttatcactgcaaaa

SEQ ID NO: 39638 - DNA, 2889 bp, Homo sapiens
ccaaggtagaaatcagaccccattttagaatgtgtgttaaaaaaatcaaataaatgaatataagaatatacttggagataaaatgcagactattttaaagtcttcattacatttctttactaatgaatatatcacgccataaggtaatatgataacatcaaaatagttctccagccatgatttaaaacacattgtataagatagaaacaatggttacagatttagaaaaataattgagaaagaaatgaaccaactcatgtctttctaggttatacctaaagcttaagaaagaaatttttttaaacaaatcaattttgtacagttgtttaaaaatcattaagtcaatggacaaaaattaaccttaatagaatgcaaacacattaagacaaaaaaatttacattattcgaggagggaataatttatctcccatattaaatccaaatcaaataaaagcagcacatgcatggtaggataattctattaatatatctaagtagagaagaaacagccctggttcttggaagtatagaactggctgacagatcctatcctataagcaatcctagatttatatcccaaatcctaaatcactcattttctaaatgatgaaatacaggtatacaaaataacctaacgttggggtcaactataacagaaacaaagcttcatacttcctaacgcttacattatttctaggttttgagtgtgaggagtcagggaataatcaagtgcagtgacttcaagtaatgccttcaattagtagctctgggtccctaagtagttgtgtgatccctctgaacccaagtttcttcacaaagattaacatataataaatgtgcctagtacataatagcaaatatgttagaggtagactttaaagccttgaaaaatgagagaaaataaatgaaatggaggtgtaagaaacatccacaaatgtagtagttgagatgctgagagtagctgagttctctgtgggcagtggcagtgaggacacaaagaatcaagagctaattagagagctttgaacaatgctcacagttaggctatggaagaaggaaaggaagacagcaaataaagaaccagtcagagagcatgacatacccatgtaataaatatttgggcaactatctgccaggcactgtggaaccctagatggttaaaacacaaactgcctaatcacagtaatgccaacgtttgttttgggtagaagacggaatgtacaaagtacacacatttgaaatgtttgccagctggaagctggaaccctacagatagtgaaggagtgacacagaagctagcgtctttcgttttcccacttatctgcttaggacttcaatggttctctttaagccctgtgcctctttctacaggtttatatttatgtgcacatgcatatctatacacagtagaacggaaagctctggcagtaaggcccaaagggtatcaacacagacacctagtacagacagtatcctgaatcaacaaaggtaaataagaaatgaggtctcatgagggatgctgagaagtctgattcaaagtattaattagcaggagaatagaagggcacaggggctcatgactgtaatcctagcacttttgggaggctgaggtgggcagattgcttgaagacaggagttcaagaccagcctggccaacatggtgaaaccctgcctctactaaaaatacaaaaattagccagatgtggtggcccgcgtgcacctgtaagtctaattactcagaggctgaggcaggaatcacttgaacccgggaggaagaggttgcagtgagccgagattgcaccacacactccagcctgggcaagatagtgagactctgtctcaaaaaacagaaggtggctggcacaaaaaactgaggagactctgtgttaataaagatctgaaaacaaaaagtaaaaaagcagtaattgtatgactagtacgctttacttttatgtagaaaaaggaagagataattatttttatcttatcacacaatggtccccccttgtttcacttttcacagcttgttacccagtcaaccatggtctgaaaatattaaagggaaaattccagaaataaataattcataaattttaaattgctcactgttctgagtaacatgatgaaatatggcaccatcctgctccatccacccaggatgtgaatcatccctttgtccatcgtatcttgcatatgccattcaccctttccttatgggaccctcttgattatcagattgactatcatggtatcataatgcttgtgttcaagtaacccttacgttacttaataatggccccaaggtgcaagagtagtgatgctggaaatttgagtatgccaaaagaagcagtaaaatgcttcctttaagtgaaaagatgtaagttctcaataaaaaaaaaatcatgctgaggttgctaagatctacagtaagaacaaatcttctacctgaaattctgaagagggaaaaagaaacttgtgcatagtatatagggttcagtactatctgaggtttcaggcatctacttgggggtcttggaacatacctcttcaaaagggggtactactgtatttgcttaatatgcataaagaaaccctacaggaatgctaagatattaatgagagggggtgcttatacgtttgtgttggtggtgggaggcacattgaaaactgggcatatggaggtactagggtagtaatgcaactttatattatacctttaaatatgtatatatcggccgggtgcagtggctcacgcctgtaatcccagtactttgggagaccaaggcgggcaaatcacctgaggtcaggagttcaagaccagtctggccaacatggtgaaacccaggccctactaaaattacaaaaaaaaattagctaggcacagcggtg

SEQ ID NO: 39639 - DNA, 2814 bp, Homo sapiens
taaaaaaaaaaaaaaaaaaaaaaaaaaaaaaaaaaaaaaaaagccgcacgtggtggcgggtgcctgtagtcctggctacttgggaggctgaggcaggagaatagcatgaacccgggaggcagagcttgcagtgagctgagatggcgccactgcactccagcctggatgacagagagagactctgtcaccaaaacaaaacaaaacaaaacaacaaaaacaaaaacaaaactactctagaaaggggctaattgtttcctgcttcccacaggctggaaggcacatgtgaaactgagcccctttgaccatggaaatgcaggccaatatactagcatactgtcaagcaacaagatctggaataaataatcctacagaaaagagctgccttactagcttggatcactgactttcatgctattaagataaataaacttatttaaagtaggtagtatatttggggggcctcttaccatattagaatactaatacagttttcaagatttaaacaaatgaaaaattatacttcattttgtaataattttcttgtttaggaatcccttaattactttaagaaaaaatagttgggctattgagaattaaagtaaaaacctgcttgctaggcaaaagaaggattaaatatctacaggcaatccaaaaaaggcttagctgtagtatgtgatgttattatacagacgtatcttaacatttgggaggctgtggtgggaggatcacttgaggccaggagttctacatcagcctgggcaatatagtgagacctcatctctacaaaaaaataaataagtaaataaattagctgggctggtggcatgcacctgtagtcctaggtactcggcaggctgaggtaggatggcttgagtccaggagcttgaggctgctgtgagctatgaccatgccattgcactccagcctgggcaacagagcaagatcttctctggcggggggcggcggtggggcaggggggcaaatgtgtgtaacatataattatcactggtctcttcaaacatttcttcctataattttaatgctgcttttgtccttaaaatagtaacaggtgttccagtaaagggaggttgatatagtgccaataatgttaaattgttcagtaagctaagggttctttctctcaccacaattagcacaagaccttgttttttattccaacatataccaccccaggaaacagaatgctctacacagaaattattcaacaattgttgaaagagctaacacagaaccactaaagtaacagaatacatgcaaagatgtgtcctaatttagtcatttttttaaaagaaaggatactttgcctaggcttttcagtgttactcattaacacagcaaacttcctagagtgtttaaatatgatcagatttagtcaaactgagaaacatctattgcaccagataaaccacacacatagcacaacaacacagaaagtgagtcatctgtgtgtgagggatgtctggaattctatgactcaatgcctctcgaatcccattaatgtgttttatgattcatatgaacacagtttttcctctctgcaaatcaatttgaagaaaagggagaaatacaactggctaattttgaaagaaagaatttatatatcatattttactacagttaaacattgaaaattaggtaataaaatatttaagatttctttcaccaaaatgtattaaaattaaaaagtgacgatccccttagacacagtaattccattttaaggcttttttaaaaaaagcctacatatccagataaaatgattaagtatatttattgaatcactgtaggaggcaaaatgctagtaacaacttaaatgcccactaaatggttacctaaaattataaaacacaaaaaattcttaatctttatttaactgactcacaagattaaccaatatcctcggcttcctgagtaaaattaatagatgactttggcacattaaatattctgactagtagtttaccactaacaagcctacacagttttgctcccatgatggggtatgtttatcaagggtaagctgtgtttgttaccacaactgaagaatcaataaaagcaaactactgaaaaaagggaagtgctattgaattgggtatggctgagacaattggaaacactaaggcaaacagtgaacagtaaaaaccttaggggttttgccctaagattatttcttaagggtctaatttctcacatcagctacagaaactcaaaatggaagttatagataatgcactgtgagtatggtctgagcaaggaagagtacactgaacacctgtcagtggactccacatccattgaaaaagccttggtctaacttaaaaaaaaaaaaaaaagttatgtaccttataggcactagaaaggatttaacaaattatgttagtggagaacacttgccatataggttgtagaagacttccatattgactttgggtatgagaatgaagcacattttagaactacctctgacagacaactgtaaaacaactgttaaaactagttccaagatgcatgctatgatcctcttcctccaaggaatactttgaaaacctctgtggaaccttaaagtttcagattataatatgaaatatcattagcatttatcagagcaatgtaactttaaagaaaaatcataaatagtccacatttctattatcatccttaataattactatgtattgaatacatatatatacatatatatatatatattagatagcattactgggtacagaaatctaacttaaaccagtttaggcaaaatcgatttaaaggaaggacactgaagcatctaat

SEQ ID NO: 39640 - DNA, 2496 bp, Homo sapiens
ctgcattaaatgaaaaagcttttgcacagaaaaaaaaaaaatcacatgtatatattagcaaaccgtatatttgataaagaatttatattcaaagtatataataaactcaactcaaaagcaagaaaacaacctgattaaaagaggcaaaggacctgtcatgactaattttaggtgtccatctgactgaattaaaggatacttagatagctggtatggcattatttctgtagaaatccatgaggatgtttctggaggagactggcatgtgagtcagtggactgagtggggaagatctgccctcattgtgggcaggtctggatggaacaaaaaggtgaaggaaaaaaaaaatcacaaacaataagtgaagtgatggatatattagcttgatttaatcatcccacattgtatacatataccaaaatattacattgtactctacaaatatatacaattatgatttggcaattaaaactaatattaataataaaaagtagaggtgatgccatctgtgactggacaattgtaatcatcaaatgcaatccagttgttcggcaggctaatgtttagaatttctattccagaagtactgctggaatataaaagaaaattaccatttcacaaaatatgtaatgtctaagtctgaaaacattcagtggaatgtcagctgcttcaatcaataaaattcttaatgctgtatacaaagttttgttgttgttgtttttaattccctgtgagtttaggagacagtctgcagcgaacaaaggggctggaattctcaggacagagcaacagaggagaaagtagtacatggagagactcccaaagatctgcagaatctcgccttagtactcaactgagtactgagtgggaaaggagtgtaagaatactacctgaagctggtgaaagaaacagcagtgtttttcaaccttttcttccttactactcttttctgacagtttttcctaatcattccccatgaaatcttaataccactgtatttctaagttatgcattttggccatttagagggccacaaatcattggaatatgtaagatttttcatatacctacatacccacaaagaatctatttcctctcaattaggagtgatatcacctccaacgagaatgacggatcacagagaacagagtgttctgttccaactagccagttagggaaaactaataattcctggagcatggagtagagtactcaggagaaacttgtttcagtagcgcagaattattcggatattttaaaattaaataaaatgccacttacattaggacaaaaaattataaaatacagataaatctgacaaaagacatttataatgaaattacaaaatattggtgagagaaattaataagctttgtcatatactctgcatcatacacaaatacacaaatattaagtcaaaatagcacatttaaatgtgtgaactctgaaagggtcaatccttcaagaggaatcctgagtggctaagtggaactaaatttgaaatacagtcaagcagccatttggtaattagaggttacacacatactgagtgttcagggaaaaatgccatactcactaaactttgggactttcatagttgtctgttctgtgtatgctacctgaatcaatcaatagactgtgatctgtgccgaaccatcagaactcaacaagtttcaaacaatcagaactaactgagtttgcatccctcatttgtacaagcagatcagagtgggaacctgggcgagaacttttgccataaaagacaaactttctcttcattctcttagaacacacctttgttttgtacagaaggctgcattttcctggtgtacaaactgttagctggcataaagcctctttcctttttggaagaaaatccttttcagtggatttgttgataaatgtgaaacttaaaactataaaacttctagaagatatgagcaaaacaacatgacaatgggacagtttttttttaagatacaacaccaaaaccgagatccataaaagaattgataaatgtggatgtcatcaaaataaaacttgagcttttcaaaaacactcttaagagaatgaaaatacagccacagatcgaggatttgtttccagaacatataaataagaactctgaaaactcaagagtaagaaaacaatccaattaaaaaaactcacaagaacatttgaaaagacatttcaccaaagataaatggactgacaagatcacgaaaagattacagaaatacaaattaagaccaaattgagatattactattattaaaatatttaagattttaaaagactgattatacgaaatatttgtgagaatgttgaaaatttaggattctcatatcctgctggtgagaacgtaaaatgatacaatcagtttgggaaacagtttgtcagtttcttaaaaagttaaacaagcatattcaaccattccaccactaaacatttacacaagagaaaaaaaaagcacacattcatgcaaggacttgtaca

SEQ ID NO: 39641 - DNA, 2547 bp, Homo sapiens
ttcaggaaaacaatggcaaaaataagttgtcaacactagtaagtgtcctgcgacaaattaatgtgtaaatgtcacacattaattttccttttccttaaaagagggggaaaatgtttggcagcgtccggatccttcaaaagccttattacccatctttccaaatgtttaggtgtacaaaacattcagatacagttgcgatttcgttcctagatacaaagtagtttttcagttccagagaattacaagtcattttgacttgtattctttgaccagctcttcataagtcaagaaaagtaacaagatggtgcacaaaatgtcaaaagaaaacaagtctggaaacttgcattgagtaactagtcgctaagaggaatcaattgcctttaacccggagagagagtccctcgcactacccagccaagcaaacagaacaaggtcgtgaccctgggtcacggccgccagtaccgctcccgcccggcagcggggaagccacctgttaggcccgagcctcacctggcaggaaagaggaagcgattgcccggcagctcgcccgacgcgagggcggtgagcgtggaacccgcccctcttgctgcagcggctagacccccgtcggcacgtgggcttcacccaggccccggcagctctgacaggcgggtcgcccgcggaccccggcccgccgtctcgcgcaggtccccggggcaggacccccgtttccctcgcaaccaccccgccgagcgggcgtcccagcggcccacaccgccggtccgccctgcttcccttccttcccggacggcgcgatcccgccctgcagcccctcacctacctggtcacggagtttgaggaacgccatggcggtcgcctccgcgcccactccagcctcctcctcctccgccgctgccgctgccgccgccgaccggcccactgctcccgccccagtagccttggccgctgcccgggaccagcgggtccgcggccgactgcgctgagaagacctgcgggcagggggcggcgccgcctccccggccgcccgccgccgccgccgccgccgccgccgccgagaggtgaggtgcccggccggtcccgcctcctcctctgaggactccccgccctcttccttcctttctttctccttccctctgctgcctgccctacccgccgctgccgccgccgcctcctcacgcccccttcccgaaataccctggcagcccccgcggccgcgccgttccagcccgcggcagcggcggcatccaaactccacaatattaccaccaccgcccgccgcgattggcggccgcgcgggggagaggccagagtaagccgagcgcccattggccacgccgccgcgctcgctggtgacccccccgcctaccgcgacgggaggggcatgcggaggaagccgcaagggtgggcgcggggccgcggctcgggcggggcgggggagtcggcaggggtgcgggccgggggagggcggccaggtgtcccggctcccaggcgctgccgcctcaggcgtggtaggcggagtccggggcggaggtggcgtggggaggtggggaacggcccgggactcgcacgtggaggtggagcgcggacgcctccctcagccagggcaagactaaggagctgggtgagggaccggaagggctggaaggggtgggcacctgggggctgcggcgagtggcgatgggcgagccggacttgcacgtggagaaagcgtgagaatgtgcccctgggtttggggagggtggggagccaaggagtgggatgagaggtggtcacggaatggggggcgctgctgtcctccccgggggctgcaggccgagaccgggtgaggggcgggggtgatgctggcactctggacggaagggcgtcgtcttcgcagccgaacaggttgtggacgcccaatcgtttttctgcccgtagtcccaatccgaagctaagctgtgtggttttcccttgaaagctccccagccaggcttgctgcctccacccctttcgcatctgaagcattttgcctcccactcgagagaaatcaattttcttaaacaaacaaaaaaaaagatgtgcaggatttctaataaatagcatccttggatggaggagaagaggaatgactccctcatcctgccacacacacccccacgccaccccgcagctctgaaacggcttttctttcttagccagccgcacgctgttgccattccaggctcgtgtgggagaagattgttgtgcgcctgggtctgtccgcccgggcggctccagcctctggtttataaaaggtgcagatggttaaaacacaaacgtgtgacgtcagggtcggtttttaaaagtctcttctacccactacatcagttgtgtctcttgggatggactttagagaatcgattcgagcctaatggcagtctagagaaatggagatcttcgtcaggactatcagattattgtaatgctgcacttataacaaaaaacttagatttagccacgcaaaaaaaaaaaaaaaaaagaaaatagagtgcaagataaaaaaacacacctgattaactgatagtacga

SEQ ID NO: 39642 - DNA, 550 bp, Homo sapiens
tggccaggaatgtgtttttgtgctcatctggaacttgaggactggaaggtgagtcacatgtctaggaatacataacacttcaaacaacaaaatgatgccacactgtgaaaagagatgggaagctattgaatatccctgtcctgccctggctggtgacccctccccaacattcaggctgcaggaacacctgagctctggggctctctgcctgatacccagtggtggccttatttattccactgccgagttctttctggcaaccttgtaccattcttgggaaaggttggggaagcaataggtaaatgttgttttggtttgtagacatcttttggtggggatgggggagcagctgtgctggaactgggggaaggggagctgtgactcaggggaaattctaagttgctacaagctgcagcaagtgtgtgtcagtgggaggtgagaaaggcaaacagagggctgaaaactgagccaggaacctgcctagtggataatcaaaactcgactataaataactaatggaacgacgaacgtgtttagtgaagttattttc

SEQ ID NO: 39643 - DNA, 1718 bp, Homo sapiens
gacagggtctcattatgttgcttaggctggtgggtaccattttagacagtgtagctctaatcctcatccctcacctttggacttggctctggtgccctgtaggctgatgaaagtggagaggagacccctgtgtaagtcatgttgagctggtgttgacatggtgcttgggatcctgaaaataggaattttgtcctgccgctcattcatatatcccaagagcactgtctcagattagaaatagagcctgagacaaatttcaggcacaccaaatgtattgagggatgctctggaaagaagctctaagggagtgagagaagcaggcgagacaggggaaggagcctagcagggatgtgttcccaggtaaattctagccttgacttgatccatggggacgctggagtgcaaatgcaaattgtactatggagttgtcccaccttgaggcagggggaccaggcttttgtgcccctatatccatcagtcattggctgcataccaagcttttctacgtaagacagctcattcaagagcagttgtccaaagaaggtcacaggtagaagcttttagtcgtagcacagtgtgtattggctagtgaggagattttggcaggacatcaacggcctacagtgacctaagcatagaggaacaggccaggaccagaacattttattacttcctggcaatatgttctcaagcctcagtgtggaatcatagtgagcagggctggaccctgtgggaacacaaggctccctggcatagaggcttcaggcctagaatctaaacaggtcaggcattctccttggctcttttttcctaggtaaacattaaatctcagacttctgtatcacactttttggatgccaaagaaaagtgaaaataaggaaaagcaaagagaatccccaaagggagatactaaaccctaacagcatggcccactatgaagcaaatccttgttcttcattcattccactaaggaatatttagttgagtgcctatgctgggctgggcactgtgtgaggctgtgaagacaaattccaaggagcagttccaaggccattttgagcaatggcaacatgactaaaataagtgctgctgtggggtcttaggtatccacaagaagggacaggccaaaaaaggtggggcttggggaagccgtaggtcagtggagagtagtggaaagtatagcaacagggcacagccagcctgccagggactctaagggaaaagctgaggtcagaatctggggcactggccaagtctgagaaagcaagttaaggtcagcattcagagcctaggccaggacgaagggctcaggcagaggcatgggcagtgccaggtgctggctgaaggaagatgataacgtatttggcacctactatttgccaggcactttgaatacatttaatcctcacaataaccttgcaagataagtatgagtttcagaaagaagaaaacagtgcttctcaaactttaatgaacatatgaatcagccgtggatcatgttaaaatgcagattctgatgcaacaggtctagggtggggcccaagattgtacatttctgacaggctcccaggtgatactgatactgctggtccacaaatcgtacttggagtagtaagaggttaaaaccctgaccatgacatcaatgcttttattaggaaggaaaagggagagaatgaagggcaagaagacaaaagtagtctagtttgagagactagtct

SEQ ID NO: 39644 - DNA, 1866 bp, Homo sapiens
gagctcccagctgacagccagcactaattgacatttatgtgagtgaagccatttagggccttctaacaatcccaatgcccccagccaaccttagtttagtatacacacaccttaccccagccaaacccagtgaagtattcacacaccggatcaacccacagaattgtgagaaatagcaaactgttttgttcaaagtccctaagctttagagtggttttatgcagtaatagttaaccttgcaagggacagtaaatagattacactgaatgcatcatattcagccttatagaacttcagaatcagatacagatagcaagggctgtaggcctatgaaaattgaaaatgaaattttcattttacttgataattgtttctttggagaatcaatagaagagaaatcctttctatcccagtgacaggcagccgaggccacacttgaccctatcgtggtggtggtgatttagggagagactgcaggcatagaaaggcagggaagggagggaaccggagtcaattcatgtgtcgatagggaacattaagtctgtgacattttgctcagaaggttcagaatttggcattgttgtttcctatagaatgagggaagttcacatggatattatttattattcggatgctaattctttgaacggtgaaatgaaaaacctcctgctttctctctcccctttcctttcactttctgcttctctttgctttgctcacacttttccttttttccttcttttcaaagagaagaaacaacaacaatgtccaaacctgtttttgtgctccagcctgaaattcagatttggtctttacccaaagtcaatattttgggagaagtttgaactaagtcattcatgcaatcttgcgtttcaagtatgaaaaatccccacagttttctacttaaaaggaaataaaaagtctgaaagcgatgtaccaaaaatctatcaaacactggaagctgtcaacttcaaacctggcaggaaaaaataatcaccaaaggcggaaattcaagtcaagtgtgagtagagtggccaaagcttgtaatgtgtcaaaggcacgtagaccagagctcacgcagggtattcgcaggtgaaaccctgcactgcaactgacctgtcactatgcaggaacctctagacaggggcctcttgtttggataattgtggcgatctcagttaattggtctccctgattcaagtctatacctttttaaaatcacaaatctgatcaggtcatttttctgtttacaaatttcagtgactgcccattgtcctaaggataaatcaatacttctcagcaggccttaagagttgacaggcatgatccagctatgattccctctctggccacatctctggtcacacccagactcacacccctttccccagtcacgctgagctccatggtgttccaagaatgttcattgctctccagcttaagtctttgtacatgttgttctttctcctggaaccgcacctcattctcaactcttatttgtccagcaagaatcatttcagatgtcacctcttccaggaaggactaggaatatcccatctgaattcccacagtatctgggaatttgtcatgttgtgtaataatggtcagcttacatgtatatatctgtcagtaaactattaactccctaagggcagttgccatgctatatttaatttttttaattcttaaaacctaacacatagtgcttggcatataatagatgctcaataaaccaatgtgaataaaaaaataaatgaatgtccctgaaccctacctacatttttgcatcatgggaagaaaccagagggatatagggtagcagggctttgaggtgaccacacagttgagacgctgagacctgaaaac

SEQ ID NO: 39645 - DNA, 3880 bp, Homo sapiens
ccctgacctagacttgtgctttagccaatggaatgtgagtgaaagtgataatatggcaaagttttgggtctgtcttaagtgacagtacttgattctgtttgcctgtcttgtatctctaccattaccatgagaagagcttgtcctgggaagctcctgcctcctagcaatgatgaacacacatggagtagacatgagccccaaatcagtgaggagccaagcccagctgtaccttcaacttgcttcagagatacctagctgatgctagactagattaacagaaccacacccaacctttgaacacacaagcaagaattaatgattgttgtttaagtcaccgagttttgggttgatttgttacccagcaataaatggctgctacaaataataataataataatagccaatttgcctatgacttgaccaggatcattcagctagtgaccagtgcagatggaattcaaatctgcctctaaattccatactcttaatcacttccttatatgatcttgagaaataaacctagttaatacttaggtgagttattttcaggcagaaatttttatcctggaattaagacaatatgagaaaagacatacatttcttttcacatggattacagggaagaggagagctatagtcataccagaataattcactcataagaaaattcagtcagggcccccagatctgacagagagggaacagcatattaaaacagaaaactagaagaaagcaggattcaggatttaaaaatagcaggccataaaaagtacagatgaagggctgcccagtatgaccactatcatgctagaatttgtctgcctcttactatctttgtggtcttctctgtgccttagcttttcatctatgaaataggaataatgaaagtaactacttcatcaggctgttcagaggattgaatgagttggtgtgtgtcaagtgctgggaagagtgtctggcacattgtaagcagtgtatgcgtgttagcttagtggtgcctctagaagggagcaccatacttaactatctgcctggtatttctgactccaccactgtgatggttttgtattgtgtcaacttagctactagaactacatttcccagaattccttcccctgtatggtctagattaggagtgccatgtgaggaatctgcgtgagatttggaaggtgaatgtggagcatcagccatcactgtctggaggtcggtgtcggacacaaggggctgctgcagtcttcactcatcacggacctacacagggcagcagctgggcctgcacctcctctcctccttctggacctcctcctgtagctgctctggccaggagtgtgtgtcactccatgatggaggatcccagcttgcgggtcaccgatgtggttgagattgagatggtagaagacagatatgacttgcagttggtccctgtggatttcagttggtccttatggattcctctttgtcttcacagattttcgttttccttgcttttttgcacttcatgcccagctttccatccaaacagcctggcctgctgacccatagcaacttcaggattggcccaccaaatgcagagggaacagccttgcacagacatctccaccagctcccatcatgactccaggtccaatctctattgcaaatctgtgtttttctacatcattcatcgtggtcatgcttccttgattgaaccttgcctgatacatcccccaccacattgctctgtgagttggatataagacagtggtaccactgaaagctcaaggttctttttaacacattttgcatttactataactctaagcattttggctcccaactgccaccctttgccttctctctatttccccagaacttctctgtgggaggactttgagcaataaggaaagagtattgactgctgaaattccacagaaaaaatatccaatttctttcttcagcacagtgatgggtggggttaaccacagatttgtcatcagattttaaaatcaaagcagtaagattttcctaaaaataaatgaaaaagaaaaagaattctatttacctcaatattgctattttcacaatttcctagaacaagttgtacggagtaatacaaatgctaagaaggtgggtccaaatgaaatacagaattcataataagaggatgttgttactcagaagaaggacaacccagtgtgctttgagatggtattgcagcaatgaaaacaagctcaatgtccatgtcagataaacaattgtcgtcacagctctggaagtttgggaagtgactcatcttcaggaatgggcagtgagtgaagacaactgtttacctcagccctttggtggttgacacaaacattcttttcttcccctgtgacttggccactgggagatgctgttgcagccacgtgcatcggcaccccagcttccaccacatagatgctcacctctcctgccccgtgatgccttacactctctgccctcaggttcttactgtccttaggggtggaaaatctctaaaatcagtggatttcctggtaaatgggggagaaaataattcaggaagcctctccttgcaaggagggaccattgttaggaacttttggtctgagatgctatggctgagtccaggggggcaacaaagaacagaccagttccaaactcgatcagctagcaaaaaaaaaaaaaaagaaaaaaaagaaagggactaaagggggtgtagagactctggtggaggcagggcagagccaaaatcagggagaggatcctcccctgtcagtgggaggtagtgattgctggagtcagggccacagcaaggtcagggatggaggaatggagaattcatgcaggagaagcttggctggagctgcagtgaatcagagggtgcatcaccagcagggctctggctagctgcactgttgtctttttctgctttatctgagttgtttcattaccaggacccagaatttctactgctatagccatagagggctgactgctcaggaagcagggtggcagtggaggcatgtcatccagagaagtgcacatccttgcaccaggacacatgaacaacaatgttcacagtggcattgctcataatagctccaaatgagaaactaaccaaacgacatcaacgtcagaatggatcaagaaatggtggtatatttataagtaaactgcagctgtttatacagtggaatactatattcatttcctagggctgccataacaaattagtacaaactgtgtggcttaaaataacaggaatttatcatttcacaattgaggaggctagaagtgtaaaatcaaggtatcaggagggttggttccttctggaggttctcggggagaatctgctccatgcctgtctcccagcttctggtctttgcctgcaatccttggcattccctggcttgtagctgtcatcactcccatctctgcccccatcttcacatggtactctccctgtttctctcaatgtcttcacatgaacatcttataaagacaacagtcatcagattaagggccccccaatccggtatgaatcattttaactgattacatctgcaaaggtcctgtttccaaatgaggtcactttctgaggttctatgtggatgtgaactttttgggggacacaattcaatgagtgcaaatactatacagccatgaaaatgaatgaactacggctgcatgcaacatggctgaaacacagacaaaatattcaggaaaaaaagttacacacaaaagagtatgcactgtggtgttacactgtaaaactcaaagttaggaaaagttaaaccatagtgcttaggaatgcatagtttggtgatatataggatatatgtatcatattataatgaaaaacaagtaaatgattcccataaaagtcaggatattggtt

SEQ ID NO: 39646 - DNA, 2248 bp, Homo sapiens
tcatttgtataacaactataatagcatctacctcatgagctgtcctaaggattaaatgagatgatatttgtccaggtgatatttgtttttctttttggtaaggtacccaaatgttaccacaaggaaactggatagtttgttaggatggttgaaagaagtgccctgtcctctctctgtgctaaggtgtgcatgtgactcaggataagtcagttagactctttttatggaaatttaaatgttcggtagagaggaaaaaacatttaaaatggttggagttgattcatcctgtggggggcaggctgaagaggccagaggccagcactcaatttcttctccgagagtcccagtactactgtgagtcctgtcctctcaccattctgtgggccttagcttgggttccctagaaacagagcctgagggaaattcttgtcacatgatttattgatgcccttgaaagaaatcataaaaaagtgagggaaacagaataggatgggggaaagagctgaataaagatgttatcttagctggagtctggccttagcctaagagtctgtgagttatgaattgcacaccagagtaagttctgccttcaggcaaagtggttggctttttaaatctcccatatcaatccaatgggaagtggagggtaatcccccagatgagtggactcttgttggcagagggcaatttgctggagaagggggcagttatgcactgtttgtaaccaatgctcacagcagctggtgggtgagtgcaccaaaggtaagaaggatcttggtggagcaccaatagcaactattaaaattcccagtgtctcctttcctgcctacattagccagaatctgtttctgtggcttgtgatcaaagtgccctgactaatgcattctgtaaaatgctggtagttattattattattgatacaattgcattattattatgagccactactccccaaatctgctgagagattatgtagcttctacagaatgagggatgaagagccttctataaagcttgtgtaaaatatataattggttcagcatcagactactctttttaagggaaaaattacagagaaagtatgaagtgtttggagtcggtttctcaaaattccactgatttttaattagaaagaaaaatagaactgtgaaaggagactgagtaagctttgactctgaaacaacccccctcaagtcccctctcatacataatttaattaaatgatagaatttattcttttaagtggagagttagtatctgtttgaattctgatcaaacagtggtaccctggacctcatgcccaaggaagacagaaattgaaatataaattttattttatttgatgcctgaggtacataatctactctgcaaatacgttatttgaaatttccaaagtttcccttaccagatattgcttttttcccctgtctgtgtaagtgcatttcattcaaaaacaccctacatgccaggttctctgctaagcaaatttgaagatgcatagttgaatcatgactcactgattcagcctttcatgagcttacaggctagaaaaggaagtataaacataaatacatatctcacagaagaatgcattacatctactactgaagagggatacagacagaaaacctacacaggttcagaggaggtttggaagacttccagtgaggttcttacgaagacatcaagtggtatctgcatggtactgtgcatggacaaatggctggagtttaggccttcagagatgggccattcacaggggcaagaacagcatcaacaaagacatcaaggcaggaaattgtgaatgtgtttgggaagaattaagtggcttggctcagcatgtacccctctgaatataaacatgacgccccgagacacctgtgagaatgtcttgctcatcaattgcaggtccagctgagagacacccatgtccactgcctgctgtctgttatgatggaggatgagcaaacatcaggcagggaagaacgcaggagtgtaatctctaggggcagtgggagggtggaagagtcatcagggtttttttctgaggaggtcatgaattgggcctatgatgcaggagcaaagtcaggggtgcttttaacaggagattttaagacccaggcaaagcggacagaaagatgctgggtattggaaactagtgagcatgatccggcatcctgataaactctcccagggccctttatgggagctcatacccccaggtgtcaaggtctaggataggcatgta

SEQ ID NO: 39647 - DNA, 826 bp, Homo sapiens
tagtaacaaaaataatgcttatgaaggaaaatagataaagtcatggaaaccctaagtgcaatagaaacacaaggatacaacaagctgggtccagaagtagtgcccaaggccatcttagcaccctcagagccttccaccagcagctatttgttgagagtccataagaaacagagtacaaagatgagtgcagtatgcatgttccttgaatgaatgtcttgaagggacacatttgcagagtccttcaattttttaaatgccatcaactagagtgaacctagtgagtggttacccctggtatttaagagtacacacacgtgttcatgtacacacacccctgcccccatacatactttcttgtcaaagcactagaggaaaaccctgccaaatctgtgactcatttagcctgaactcttggtctaatcatagcttggtttttggatgaaatgtaaacttatttgctggaatatgatcagacacttctgggtttgatattctgtaactttaacagcaaattctgagtttagtgtgtgtggaaggaggagggagaatctgagaggagggaaactggttttaataatcttacttatctttagcaacttgcagcttataaaggtctttcatccagggttgtcatttgaccttccgaacatccctattggataggtaatttcacatcatctttatggacagagaaactgagatgccaagagtgtaaatccctgcagatccagggcaaggctgaggtctttaggctcattgactttctccttctttacccttaataatgaaaaagtcaggtacaatgaattctttaaaaacagtaacc

SEQ ID NO: 39648 - DNA, 3396 bp, Homo sapiens
ctcacgcctgtaatcccagcactgcaggaggctgaggcaggcagatcacctgaggtcgggagtttgagaccaggttgaccaacatggagaaaccccgtctctactaaaaatacaaaattagccgagcgaggtggcgcatgcctgtaatcccagctactcgggaggctgaaactctgtctcaataaaaaataaataaatttaacatagtgaagaatccatggaaagttcttttctcattaataataagtccataacaatcacaacagcaacaattaatcaaataaaactcaagcactactatattccaggcagtgttctaagctctttatatataaaaatttatttaatacttaaaatagtgtctatgaggtagaactattgttatgtccaacttaaaagctgaagaagttgagaccctgttactggtagttaggcatgagtagggcaggacagggctctccgcctaccaccctctggaaatgtcaggtgatggtttggcaattatctcattgcctctctaaaaatgacagttcagcagcaccattgacaggccatttcctgatgctccacacctgttaacatcaaaatgtcaattgaatgcaggcccagggagaaatagcactcgaatataacattttctttttttcttctcagcaaggcaatgtacttctatagaagggtgcaccctcacagatggagcaatggtgagcgcacacctggacaagggaggggaaggggttcttactcctgacgcacgtggcacctgctgccctgtccttcccctattggctggggttagactgcacaggctaaactaattccgattggctaatttaaagagagtgatggggtgagtggtttggcaggaaaaatggttatggcagagcaggaaatcaaaatgagtcaggatggagaatgagtcagggagaagcaggtaatcggaatgagtcagagtggagcaggtgattggaatgattcagggtggggcagttgatgagaatgagtctgggcagagcaggtaatcggagtgagtcagggtggagcaggtgatcgaaaaaggttgctttatgaggaagttaagtttaaaagtagaaggcaaagaactgaacatactgacatattgagtctttgaagataaatttagaactcgtatctaacagcatgcatgttaagagacaaaaacggtgaagtatgatcttttgggggcacatgccaccagaaaaggaaagaaagcttcagagggacacgtgggtaactccctaagcactgcgggtgctcaattcccaagggtaagaaagcactgggcatgcggaaaattcactctaagggagggatcatgggaaagaggcgagactaggatcaaggttaaaggccccttttttgctgtcttcttttgctctcttttctctctttgaccttcaggtgcctgcttcagtctctttcaagcaatttttcctttctttcctgttctaaagcctttttaataaactttcactcctgctctgaaacttggcttggtctctttttctgctttatgcccctcagtcgaattctttctttggaggaggcaaggactgaagttgctgtggacgcatatggattcactgacagtaatttggggtaactcagatctctttcactggtaaatgcccagagaggctaagccatttgtcaaagctcacacagcacagtggcagagcagggatatatcccaaaagagttccatttgcagagcctgagcccctaatcattatgctgtacaccatctctcatactcaatactgtattttctccaatagatttgaatgattgtccacaacaggcagacaagttttatttcttatagtctgcaatcttatgtgatctggcccctgcagacctccttggcctcatctcaaatcactctattcttcactccggcatattgacctttttcttgaacacgccaggcttgtccctgccttttcttaaagcctttgcatttgctgttccttcttcctggaatacccttcccccagatctttgctggatgcatctttttgttattcaagtctcagcttaaatgggatattccctagagaggtcttttccaaccacttatccaagcaactaactaccatcctagctactctttatcttatctcgtttcctttttttccatgactgttattaatatctggaattcttttaaaatttactgtttacttgttcattttctatctccctccctctggaatgtaaaccccatgaaagaagaactttcttgttcatgactagtctcagtacatagagtggttgatgtcagagaataaacatttgttgagtaaatgaataaagttctcactctttcatgacattaagtgaactttccagaagtacccagtctccaagcctccccctgtcttccagacagtacaaggaaatctggagatatataatccacatagaggcagaaagatgctagtgaagccaaatttatttccaacaagaaatagtctttgagtcttagtcattgtggttgaaggcaagtgaggtcatccattccattaaagaagaaagatcagatggaaatagtcattcaagatgcatagagaacagatagagtagagcttccataacttttgcttcacaatgattatttactgtattggatgaggttggataaacctgagcttgtctagagaagatgctacttgagttatctgtgtttggattagttttgggcagccaaaccatctggagaggtttagggctcagtcccaaggctctgatctttactcggctgtaaacgcctcattgccctgccacttctgcttcatgggctggaggtctgtcctcttgcaatcatgtgggaagaattggactctgagttggtttctattttcttatgaaaccatccaggggaatgaactgggggataaataaccaaatttctgaaatgcagctttgactacaatccagtgtctgggctgactctgaaacagctcagattgtgtgtcctgagactgtgctggctgatgacctggccacaagcattccatctcacatcccaggcatctgagcaacgctgctttccatgtggggaggtagaggatttggtgggttaattgaaactaaaatgtctgcaactctagatcctgcctctgttttggagtgacttgtaaggaaagtcaccagtgatttatacattcagggtatctttcctcaaagaactcaagatttgtggcagaatttgataaatgttgagatttgatcttgatggaagactagagattgaaaattggaagatgatctgctttatacagagaacaaatgcatccactttttttctttattttagtttattaagttctgggatatgtatgcaggatgtgcaggtttgttacatagataaac

SEQ ID NO: 39649 - DNA, 431 bp, Homo sapiens
agctgcagctccttgcagctatgccacacacacagcctttctgaatcagagggtattagtctttccttctgaactcttgggatattcctgttttgatttggctctagcagtgaccacaccgagttgtgcaaagcctgggaacagtgagggcattaggaccaggagtgacgcgcacgcttggctctgggttgtgtctggcagagggctctcggctgagtggagctatgtgtgaaaggaaaccaggcactgcctgccggctttacatctgttgatctgacctgactggaagcgtccaaagagggacggctgtcagccctgcttgactgagaacccaccagctcatcccagacacctcatagcaacctatttatacaaagggggaaagaaacacctgagcagaatggaatcattatttttttcccaaggagaaa

SEQ ID NO: 39650 - DNA, 2470 bp, Homo sapiens
aggagcagaataaccaactcccaggggcttaagaaataaagaactttagtcatctcacatgcctagttgaggacaggcagttctgtgcctggtacaatggcttacagacacctatgatccaggctctttttaaacttccactcaccattcctgttggcttttgatcctggtttctgtctctttaccagcacaagatggtcaccacaacaccaaacatgacatcctggccccagaatcccaaacaggatggagagggcggcagaagcaagttctcctcattaataatgtctttctcttcactgagaaagcaagatctttcccagaagccccccagcagaccttcccatctgtctcattggccagagtcctagcagcaagggtggctgggacagtggcaaggaaagtacctcagcaaaggctgggcacattgccacccagaacctcacaaaggttctgcaaaccaggaagtgggaagttggcagatggatggccagtgacagtacatgcattttgagatgcctcctctctcaggcaagattgggctcagcttctttttttaatgtcatgggatgaaaactgcaggacactgagacagagacctataaaatcctgtgctcacaattcctgggtattatccattcagctcctgccctctgcccaagtaggaaccttcaatgccccagaagcagctccgtgtactcagtttgggatatgaggaaagtgcctgccatctggaactcagccactgctatcataatcggtcaaacactctgggaagcaatggtgttctgatttcttttactgcacagcttccaataaaatttgtggcccaggtgtgacaaccaatagaactctttcactttattcttgtctctgagattctggtttctacttgctttctaaaagaaacataaaaggcaagtaagcatggcgtgtaaaagtgaagggggtgggcttcccatgggatatatgatgattttcttcctttgttgtaaacatatgatataggaagttgcgtgagaatcttgcttaaaacaatagtgacaaccttttaaccccatctgcttcccattaatgggaaaagccgttacatggtagtgtcaaggggcctctggattttctcaaggctttaccataagacagatgcttaagacaaaatcctccaaccctttggttctaatcctccccttcttagtccattcagaaagcacagaaggtaatggcatctggccgatactcatgagggctgggttggtaaagtgaaaacctttctgtgctgtgacaaatttcactggctgtgctttaggtagtttgcaaagcacaaagttaagtttctggatgatatgttcatgattaacaaaccagattataatgccctttccagagtgaattctagttcttaggattactttgcagatttaaaaacaataaatatttattaaatatctgttatttaccaaggtcacacctctagggccttgtcccgtgtgttttctgaaccactggcgtggatgacttgatgagtcactcatgaatcagaaaattgcaaaatatcatcttcactgaattttatgtcagcacagactcagtcagagttgaatatggactccctggtttctgggaaggcagagatatttcaaaaacatttccaggaaggcaatcaagtgctccttttgatgcatttgccaagtgggacacaaaatagacctatatttgtaaataacaatctttttcaaacactgccatggggatatgcccagcttatagtgatccttaaaatatgtattgtgaagtaataatccacctatgtttcagtaatttccaagtgtttctccagccttgactccaaccatgaacctcagattcacacactcaagcaccttcaatctacactagagcccgagtaatcaacctaaagcactctccttccataatctcttctatgactccgcatcaccttcagagtaatgacccgcctccccagcacagcctgactacaagttcctccctgaccctgcctccaccctctggactcacctgctactatttgccccatctctgaacaccaaagtttttgtagttcccaatacaacacccttttccttgtctctgctctaaccatgctctgttccctctgcacagaatgcccttccctccgtttgccagcttcttcttacctatcatgcatgactcatatacatcatgtctctggagggtcttcctcgaacccccgggctgaattaattacccctcttctggagcactgcatatgtagccctgtcttaacatggaccactttgtgttaaaattatcaaaaagatgtttcctcctctggactttaaacaaattttgcttagctttttgcccagagtccctagcatagtatctgactcttgacaggcacgtaatacatgcttgttgaacttcaactaaagcgatcacagcatctttcttttgtgcctagaaacaa

SEQ ID NO: 39651 - DNA, 2299 bp, Homo sapiens
ctaaagactaaaatgaaattgtaaagctgcacctaggaattatatctcaaacaagataatgcagaattctgtgtataagccagcacgaaataccatacaattgttcccttcaaagtaagtctagcagctctaaacaattttaattacatattaaatagaagagaaatataaaaaattgtccactaaaataatctatatactttctatttaataaataataattttcactaaagctagatttatctctaaagctaaaataaattacgtaatctgaactttaaacgttttaatttactattcggctgtttatcaatggtgtttaaaacctgcctaaaaaaataccgcactttacctagcacaatgaaacattctcctgcactcatcactgacaagctgatctaagtccttgccactgacttacaatacccttcccccgttttaaaattatatcccttactttgtcataaatcacttttataatgagagagcagctaggacacgttgccacgtcttccccattctccaaatcttcctacaacgaaatcaaataccatgtggtcaggatagcttctcttcgccatctcctcccccaaacctatcccacccctagatgcaagtctcttggtggcttgccttccccccaaggtgggtgagaaccccagggccttcagcgagaaatgccgacatcattttcccctagaagcgtcacttaggggaaacacctaggaaggtcaggcgagcttcggtcgccccaaaagccctgggaaacaaaaaacgagtcccctcctcgacagaaatatcccaggttgggaccctaaggcagggatcgggcagagagacagaggctctccgccaccctctccctgacctaatctaaggccagaactgcgtgcctaccgagagagctcagggcattagttggggtggggggacgcgggaggaggaagattcagcaacgggaaagagggcgtgggtgacacagcgcagcaaaggctacccaatgatggaaggaacgggcggaaccaaactgcgcttgcttgggtgaaccgccgggcgggaccctgaagttaccttggtgatggagaagttatctccacatgggcagggatagaaatacgtctccgagtcctcgtcatattggaagtcctcgatttccacctcgtcatgaaacactgccatggtcagcgggggtggccgaaggggtaacgccccagcagtccgaggccagctccgagggtttaacttcgccggaaccggcctgggctcggcatcatcaggtcgcgccgggcaaggactagcccttccggcgcataggcaatgacgcaactccgccctgcgcggccaaatggataaccggtagcggtcaccatggagatggctgaactaggggcggagacactgggaagactgaaagcttgctcagcggggtcgcgcaccgctcctcctattgggcggcagcgaccaatagaatgtggggctcgcccgcgctgctacgtcacgtctgggaccgcggagtattccaggcgcctgcaactaaacgtggccgggtctgcaagctaggtgccagcggggaaagtttccctgcttcttatcgtctgctttaacgccttaaatagcccgctgaaggctgcagcaggtgctaggtagcagcctcccggccctcgggaaaggcggggtggggaggcgagagcagcttagcctcctcgacctcccttcctggtgacggacgaacagttcccgtagaatttcgcttcaccgagtgaccttgagcccagggcgacggtcagcttgttaattcctggctgcaggtacattccgcttcttcctcaccccagacgccttaaaataccctaaattgtgttgctgaaaggaccaagccctggaaggcagggattgagttctagtcttctgtttgccaggcttataacattattaacgacgatgatttttagtaatagtaataacatcaccttttattattgggaagttatgtgccagctattgcactaagtggaattgtcaactctaggagtttacatgttattccattttattaatctttaaactgaggtacagagagttgggcatcttgactaaaatcatacacctgggaaataatgaagagcttgtctgtctccaaagcccaggaacaaattacttatgtgagtaccagttttttcgttgtgaaagaaatggtgtcagtaggcaggtttatcagtgtgaggcctatgtatgccttgaagcgaaatgcagataaaaggcatttttgtcttgaaagcagtgctagtgcctgttttgg

SEQ ID NO: 39652 - DNA, 2183 bp, Homo sapiens
ttgacagccatctatatatcttatgtttaatgaaagtataatttaaatacaatcttaataattttactttgaaaattctttttatttaatgcctttgtttactgtaccatggcctacagtcttatttggtccatcaaagttaagtttggacatggaaaattgttaggaaaactgctttagggagttaaatatccagcatatttgctttcttgttaatgaatatcctaagtgtgtatcctgactaattgttagtttcttctcaaatgaaaccctttctgtgtcttggctgtctgccttaacgctgtaggaggcagcttcttgcttgggacaaaggcattggtgatgtgttccatgttgaatctgccttcagtgcctgggctggcttgctatggaaatgtgcttagcattgattagggggtagagagctgtttctaaatcctgcttttctactttttatttcactcatttgccagaattgttcttggcaccagcagctccttaacatatagttgttgaatgactgaaagaaagcaactaatgttttaactccttgctaagtctgagattgggaggcagtcccctagagtggatagaaagaatggtggagcctcatcccaaagctgctctgatgaaactgctagaaagcagattgtagttctttgtttagatttttaaaaatccaaaagaagtcctgactgaggccaggccattccttttatgacaagtagtcctgggcccaaggttgcctgcatagagatcacaggagggtgaagggagcctgggaagaaggacagataagtgctggagacctaggagctccagttgagattctgttctggagcggatgagagaagacaggttaccctttcttatctttgttgttgcaggcctcccagggacttgtgggcttgaacagatatgattcatgggacctgaaggtgactctagcttctgcccagttttgagttttgtcaagttttaagcagagatcatttgtcaactattttgatcccagatttgaatttggggaggaagggaggagctactgacctgatgggaatatcataatccattcaaggaaatggtcattagtacctcagaggtgaagggaatatgtgaagctctggatcactacaaggagccctgacttaccagttggccccaaagtgcccaggctgagggcataggagcatgatgagatgcaaggatgtgggattatcaaggggcacgtctactaactggtgaaggcagtctgcgggggaggacacctaaaggtatgcggaaagtacctaacccagacctctctgcattaggagtggaggtgcaaagtgagcatctccagtgcagcatgggatgggaagatagggaggtgtcgcccactgtctcggtttagccagcaccacggctggctgtgtgcctgctactgtcagagagcaagggtcatctgtcctgcccagctatgcctgccaccctgttgctgactcagtattggcagaattgctgagatgggccaggtcatcacctttgcctggagtgttcatcctttcagtgccattattctggtgctaagtgctgaagaacattttcaggtctagccgagaatgtcctcttgctcttgcctgccaggcctgtccagatctttttggtacttaaattgagctaactccagccagagtggcttggaattcatagtgcggtggctcagagtataggctcgaaagcccttgagccagattgcctgggttcagatctcacctatactacttactaggtagatgaccttgagcaagtcacttaactgctctatgcctcatttaaaattacatacaactacatgtaaaagggagatgatactgctgcctacctacctacatgatagggctgttacggggattgaaggtgatcatacatgtaaagtgcttggcagagcactgcatgagtgtgttgtcgttattaatttgctattccttgtcctattcagaaaggatttcaagaggctggatgccttagatgtggtctaacttgaaaccttcatgtgggtgtgcgtctgtcttgtttattgctgtgccaggcacaaaataggtatttcataaatatttgttaatatgctcagagttgataagctggattaaagtgacttcttaaggatcctctggctctatgagtttgaaaaaatgtttctt

SEQ ID NO: 39653 - DNA, 10652 bp, Homo sapiens
tacaaataataattgtatatttatggggtagagtgtgatgttttgatatatgtttacaatgtggactgattaaatcaggctacttaacaaatccatcacctcacatacttagcactttttgtggtgaaaacatttaaaagctactcttttaggaactgtaaactatacaaggcattattgtttataatagtcaccattctgtgcaatagatgaccaaggcttattcctcctaactgaaactttgtaccctttgatcaacatctctcgtttgcccatccgccccactccccagcctctggtaaacaccattctactctctgcttctatgactcaacttttttagattccacgtatgagagagattataaggtatgtcattctgtgcctggtttatttcacttagcatagtgtcttccaggctcatccttgtaataaataacagaatgtccctgacccccccccttttaaggttgcatagtattccattgtgtgtgtgtgtgtgtgtgtgtgtgtgtgtgtgtgtgtattttatatatatatatcacattttcttcatccatctgatgagggacacctaagttgtttccatttcttagctgttgtgaataatgctgcaaggatcatggaaatgcagatccctcttctgcatactgatttcagttcctttggatatatacctagaagtgggtttgctggatcatgtgctaagtctatctttagttttctgagaaacctctgtactattttccataatggctatattaatttacaatcccaccaagagtgtacaagggttctcttttctctatacccttgtcttttttataatagccatcccaatcagtgtgaggctatatctcactgtggttttaatttgcatttcttaaatctgttttgtaaatttctttacatgttactgcattcagctacaaagtctgtaagaaaaaggagggagagaactaatatttactctgcacctattttgtgtagcggctaggctgggtgaattcacacataatggctcatttaagcttcacctcaatgctccacggaatccaactaccacttttatagaaggaaacaaaagctcagctcaagagcaggctggagatcacacagtgaggattcaaacacagatctacccagttccacacagtctccattccaccgtaagtggtcatttaaggaacagggaggtggaggattaggaaggattatttagcaggtgtgaaggtctgagacagagagacctgtctgtagcccctgggcttaggtggctcagaaccagctgggccttcacattcaaatacattctgagtcttgtcttctggaaattgaccaggaaactgactcagagaagctatgtcacttgaccaacatgacacagtgggtaagtggcagactgaagacttgggttcaagtcttcaggccccaaatccagggttctttctacaccactgcattgccctatgcctgtcgaagtcttggctgagaaagaacatggtggtttccagtggccaaggggctcaaaagtggccgcagactggctccccctggtgcactgacccactgtgacctaatgtggaatctgaggatcctggtgagccagaggagggactaggaaagacatcagttgtcaccatgattctgcactctcaatcaccctggtttgccagccttgccccatgctgtccatcactctgcagtggtgaatatgcagtagggcttggggaaggtggagctctgggggccacagcgggggcatccttgctggtcagcagagagacggcctgctccaggaaaagtgcctgattctgcagactgaggttctaggcccagtttctgccacttactggctgggtagccttaagtatgtgaccaagcctcccctagcctcagtttcctcatctgcaaaatgggaatcatatccatgcttacaaccccacagggcaagactaatttggatagtaagcccaacatatagatggagggccttttatggttggtgtgactgggctcaagggagcgtaagcagagctgagagtggacaaatgagcatgaacctgaaattataaggaatgccgcaccaaggcctgaaaggcaggcctttacagcccctttgtggagctggtgaccagtgcttgatcttggccaagtccctcaacctccctggctacactttcctcagctgcaaaatgggtttaataataatacaattctacctcatagtatttttcttttctttttgaggactgagatttttatatataaagtgcctacctagcctagcacaaggcacatagtaggtgctgaatttcttttgcattggaggctctgagccctctcagtctgagcggctcatctttgacattctgggcagtaatgactcacagggccccccatgtgggaagaggggtgcaggggagttctctgggtgacggtggttaagaatgtgaaattctggctctgctgcttcccagtgggagagtttacataactaccagcctcttgcacaggattaaataatttatagacgtgaggtgctcattaggaacagtgactagcacagagtaagtgttcaatagaatcctaatgattactgttattgttacctggtagtcttgacgacgggagttggtagcacacaggtgagctgccagccataggccgccagcgagttcagcaggggcacgtagtctgtctgcacttcgacaccctgggggaacaaggccagcattagggctgctgctgccacaagccaactcccaggcaatgagaggggactattcagtctgccaatccgcaaaacagaaaagaagtggcggtgcccggccactcagaggctcctgctccgatgcttgctgaagactttaaaagtttggagtcaaactgccaacatgggatttccttctgggccccatttcagtctgtgatgtcagcaaggaattacagccaaaagattaatccattaattttgtttgattcttgtctggacaaatagcctcctgtgagtttcactgacgaagcataactgtctcacctctgagcggtatccagggcatataactacacgtgctgctctgaatgagttcagagcgtgttgtggggagttaacttacatttgacaaatgatcaagtcgtttatgtccagccacagcaacacacacatgcacatccacatgtgtgtgtacacgcagaagctgctttgcctgtgttatgtgccctgccttgcagggataaatgaatgctgccatgttttatttcaaattaggatttggggaactaacatttgtctttcagttaaaaaactcagccccggccgggtgctgtggctcacgtctgtaatcccagcactttgggaggctgaggcaggtggatcacatggtcaggagatcaagaccatcctggctaacacagtgaaaccccgtctctactaaaaatacaaaaaaaattagccaggcctggtggcgggcgcctgtagtcccagctactcgggaggctgaggcaggagaatggcgtgaacccgggaggtggagcttgcagtgagctgagatggcaccactgcactccagcctgggtgacagagcgggattcccatctcaaaaaaaaaaacaaaacgaaaaaaacttcagccccctgctagcacagggagagagccctgatgtgaggcccctgcactggcttccacctctgcaggcgttctcactgcaacaggcctcatttcttactacgggttcctcactaacactcaaagtgtagcccccacccctgctctgtgtgtaactggactcctcatccctcatagtttggcttcttgtagttggcttccgaaaatctcaaacatgtatccagattccttccaccctgtatgcccacatagttcatttatcaggtactctagagccatgatgggtgcaaaggcacagccccggcccctggagttcacaggctagcaggggcaacagcacaaacatgccaggaactgaaaaacctaagggctctctggcagggccatgggactttgaatgccagcagaggtgggagagatcccagccacagtcaaagcaggcttcctggggcaaaaattagaaggcaaagctgggcctagagtgccaaggtctgtggtcggcttaactcagaggcagcgcgcgtgaccatggtctggagtgctccactcagaaggtggccacgtgtggtgagtggctatcctgctggtggccctttgggaacaaaaccagctcatctggatgccctgggcgagtgggatggaaggcagaggaggaacaacctacctgccctgtctcttcaaatggcttttaaagcttctataactggacaccagttccagagtggctatcaagtcacctgaacccttggcgactaatttatcccttggcagcctccctttcctccgctgtataaaatgggtactggtctatgtcggttcccaaagcatggcccgagccggcagcatcagcatcacctggcaacttgttagaagcccagattctcagggccccatcccagacctgatgaatcaggaactccgggagtagggccccggaatctgtgttttaaaaagcccttcccagtagtcctgatgcagctaagtctgagaaccatcgcctaggtaatcatgtaggtccctcctggcaaaagaaaagtctgtaattctgtggccagaatctatcagctgttgcctcaaatctaactttttcccatcattctccatgagaaaaaaatatatatttttaaaggatcagctctgttagaaattctgccacactgcaaggggagaaaagaaggaaagtgctaaggtttgaatgtatcccccaaaaagtttccatgtgttgaaaacttaatccccaatgcaatgacattgaatggtgaggcctggtgggagtgtttaggtcagaagggctccactcttgtgaatgggttaatgccaactcaggcaaagggcttgaggctacaagttcagtctcctgctctctcccctcttttctgcgcttccgcctcgggatgacgcagcaagaaggccctcacaagatgccaggccctcgaccttggacttcccagcctccaggaccaggagccaagaactgtctgtcctttataaattgcctgatctcaggtatcctgttacaacagcacaagtggaccgagacagggcggaagtggagaaagggaaagggaaagaggaaacttaataaaggaaggcggaagggaggagggaagggaggaaaggagagagaggtacaagaataatccgtttacaggtggggccaggagagaatgccattctggtcccttccctgaagcctctatcaggccagagatggcccagcagttgtgaccatcctttctgcctggcctctgggcacacgcacacctcccttccagaccagcacagcccgtattcctcctgctgggtgccacgctcaccacctgctgaaggagtcctgaggctgctttatcctgagaatccctgcccccatccccgtattcccagtttaaagagaggaggaaaaccaattttaaatccacactctcaagctttgcgaggttatgattacttgggcctatcaagaataaccttcccactttatcaagcactgtgacaaacccgccacaatcagacagtagccatggcaaccaggacaagctttggcgcctcacaaagccctgagtggcagaatggagtccttttattggtggctgcatctcgggccaggttttctctgcgggcacccagagctgcgagacaatgaacgacccctgctgcagcccgacccgcctgcttagacagactgcaaaccggctgcttctattttgctccgttttatttcattttgtcactctcttaaagaaaaaatcagcaggatttctcccaaacattttttccccctcagggtaggagatgtcagccagagggtacagaatcataaaggccaaaagcaaaagggaaaacacaacaaaacaaccctgcttgagagagctgaaggttcaatctcacgtgttaatttctggccatcacatggtgagttgacaagtaaaatacaaatggtaggggtgagatgttgcactctgccagactctcccactccgactatttggaatggtcttggcttaattaatgttaaatgtgattttccgtaagcatctatcacagcccgtttgcatatttatcaatatagtaaagagatggcatttctaaaatacaagatgagcctgtcagtgaaagacacttttaagtccattagctaagaaaggtggtaggaaacatatccggatggaaggctctctttgatctgcttttttgtgacactccagtgaggagagaagaaagcaccaacaacactcaaaagccagcctgcttatcaaacaaaaagacatttctttctctgagtaggagcaaaaattttaattaactctccactctcctgtggtggatacgtaatctccgatcacacctggagtgttaaaaaatggagcatgtcctgtggtttttcaactcgtataaaaggaattcatttgtatttatggctcttttttcctttgttccctataatttctccagtgattgcaaatcaactaaagaaatagacatcctacacaacctttctttaccctccaaaaattaggacaacagaatgtagagtttactaagaaatatgtttgtcttttgatgatttaaaagatcttctatgcagagaaataattaggaattcataaattggtccagtgagaaagtttgcattctgaatgtcagtttgctcttcttttctcctgtgtttcatcctgtggaagcaatctaggagaaaaggagtttgaaagaaaatattttgctctttatacatgattgtaaatgaagaaaggaatttgatttcccttgtctgaaaggtgcttgagaccacttctggggtgttctccatacctgagaaaagtgactggggacagtttgcctctattcctgacatccacaggactgagaccttgcctttcaccaattagggtatgtaagggagagtcctgcaaaaactacttctgtgtcttttgtaaaattgctaccaaaacactagtgcccacaaattactggcagggtgtgcttatactactcttattttacttatcagttttaggtatcctaattttctaccatgggaaataaaggtttagtgctcccataaacatttcttatttcctttttctttgtgctccaaatggttattttgtaatttaaagtaaatcaaaagtcaatgtttgtgttatcacagttttgcaaatattgctcaatgctgggtcaaataatgcactatgaccatgccttcttttttatataaccctctgtttttcctggagttaattattacctccatttttttcatcttcctggttgtacctgaacccatcactaatttatcccacatgttgcaatacccctatttaatgctcatcgataaatattccaagatcctaaatacattagttccatttttccccactggagacatcatttctgaaactttgctctaatctggtctggctgcttttcatgcctgggttcttcgtaaattactgtctatggctggtatgttctctttttttggtttccttctcattttgcaggagcacatcctgtagtgactctctaggcaacaatgccctagaagtcatctgaatccgtgcatttctaaaaatgcctttgtgttaactaatagtttaggtacagacgtctgggctgaaattgatttatccgtcaaaattttgaaagtacctctagtagtttctagatgtcagcaatgctattgagataatctattctgattactaatattttaactgtaacctgttgtattgctttgaaagtttttaggattttttttttctcccctagaagttccggaatttcatgacaatgtgctttggtgtgggtcttttttactcaaaggattgttcacctgatggccttgcaatctgaagattcttgtccttcagttctgaaaaatgtatttttcccccctttgataagttttctcccctcccttttctatcttctttttttctggacctgctattaatcaaaatgtgtgataaatgttttaattttattaccttcccccacagttttcttactcttttaattttgctttctgagagatttccttcattttgtcttccaacttttatgttttttaaattttctgctgccctatttttaagattcaaaagccctttcttatcttttgattgcttcttttttttttttacagcatcttgtttttgcttcatggatacatttattttatctctttaaatggtttcttctgatacctacattatctccacggttcccaggttgcatgtgacagagatggggaactagggatcttaccacgccacgttaggattttaaaccagtaccctggttttctgctctgcagttcacatcccccaacctcccatcccatggtgatttatgctttgaaaaccaaagcttttcttgggttctgcaagaaacaaatggcacccttctcgtccaggttgtagcttccttcattttgctaaattagttagattcctctatctactttccatctatctaaaaatttgttgaaatcactcatcttctactttatcttcttctaatctttttgttcttgtgggcatcgatttatctacctacctacctacctacaattgaacctcattattcttggtagctatgttctgtaaagtcattgtgaacagtgcattagtgactattgaaccattgcccataagagaaatatagggttagggtcttggaagcatctggtcgcaacagttttgcaaactgatcaatatataaccttgtttaatagatagtgttgattcatgaacattgaacttgcagccaacagcactataactcatgcctgaacaaagctcactggtatttgctttgtaaagcacatcatagcattcctgcacttaggaacactaggcaacagtacttcagcactatgcataggggctatttttaacagctaaatcaccaacaaaaagcacaaaaatgtgaaaaatgtggcactatgtgtaccacaaaaaggacacttgcttttagtatgaacattgaaaccaggcacaatattaccttgtttgaccttagctagaaaagtgcacattaggcaactcaaaatttttgctgttctgcacatgtttgcaaatggccacaaaatgccatttgtattgattttgggattacaataaattttagtaagcagatgaatttgcaaatacagaatctgagaatatgagaattgcctgtatctatctaattatgtcattcctttagtttcatttcatgaggatttttcagaaaagaaatagatgcctgtgtccaatccccctcatttaataaaatgttattattttaatgtttaaagtgaacactggaaggcctttctaaataacttagaatccagaaaccaaaaaataaaaatgacaaatttgattacataaaaactcatatgatataaaagacaaatgacaaaatggaaaaatgtttgcagctcatattacagaaaaaaaagggcttgtaaaaattgaaaagaaaaaatccaataatccaaattttaaaagggccaaagatatgaagagagatcacagaagattcaaacacccactaagtgcatgagagaaatgcagaatctcataagaaaaatgcaaattaaaactaccagccgggcgtggtggctcacgcctgtaatcccagcactttgggaggccgacgcgggtagagcacgaggtcaggagatcgagaccatccgggctaacacggtgaaaccccgtctctactaaaaatttaaaaaattagccgggcatggtggcgggtgcctgtagtcccagctacttgggaggctgaggcaggagaatggcttgaacctaggaggcagaagctgcagtgagccgagatcgtgccactgcactccagcctgggcgacagagcaagactctgtctcaaaacaaaaacaaaaacaaaaaacaacaacaaaaaataccctgagatactattttttcacctattgaactggtaaaaacccaaaagttaggcagcccgctttgttgccaaggccgtggggaagcatgcgttcttgtacattgctagtggaagggctcattgattcaaccctcctggagaacagtttgacagtatctttcaaaattacaaacacattttccctttgacccaacaatctcacttctgggaatttaacctacgtattaaaaaatgagaaatgcacagagttattcactggagagcggtctgcagtagcaagacactggaaactactcaagtgcccatcagtgctggatttgtatttaacattatgtttcacccagacaacagctcagagaactgggcaatggctgctcatgtgttgagccggggcatacaggatgaagagggacaatgagagggaatgaattctattctagacaccctgagtttgaggaacctatggaaatgtccaggaggcaactaaatgaaacagcctgtggtagacagaataatggccccaaagatgtctacagcctaatcccaggagcctgtgaaaatgttcccttcgcatggtaaagggatgtggcagatatgattaagctaagga

SEQ ID NO: 39654 - DNA, 1196 bp, Homo sapiens
atcaggggtgtctgcccacacacacctgcatgagcagaatgagaaccaggcaaggcatgcaaccacgcaaggctcctgatcacagggaaggtaatgaggccggacatgcggcggctaaggggcgatggctggggccaactctgacccgtagcagggacaggcactgcagttctgactgtggttaagcaacacaaagctgccacatcctgtcagctgctcatcgggaccacgtatgcaatagcacagggctcctgtcctctagaagctgacatcttaaacacacattgagtgcttcagggtgagggggtcctcccaggccaacttagaaatagctttgtttgataacaattaaaaaagaaacattttctccatccagagacttgccaggtccctcctactggctttgatgagagagaaaactaggctttctgggagtaaatgggacttgctactttattactctctttagactatcagagatgaatgagggatcctatatcatatctttagcccttctttctgatttttcaccttatgtattacctagaaaagagaaaagggattgaaaaaaggagcttttccaaagtgtataattaaaaagttgtttattttggagttggggacctggggagagagccagtctgtctgcaggaattctagaacccaaaactgtcaacgttgtcccctccacctgtcagcagtggattcctaacagcttactgataatcataaaatgcaaacccagaagaggtctctgaataaaggttggttcaaaaccttaagagacagggaaatggagattaaagattatttcactgtcctagctaacaacgaacagagccacacaacacaccatgtgctgggctgtcacagtcttgactcactaaggaagggattgggtaagacatgggatttctctctccctaactttctctgcctggtaacttcaaaggtgccacattctcaagccatgctggagcaatcacagttggccaatattctctttgtggtgactcaactgtcagtatcatgttgctatggctaccacaattctcactcagccctccctccttatgctctgctcttatttaaaccaaattgcattgcactaatcccacagcatgctctttgaggacccagctctgatagggcttctgaggtgccagaaacctccagctggaatatcctgccttcag

SEQ ID NO: 39655 - DNA, 958 bp, Homo sapiens
gcactctgagcaagcaatgggaatccaaagatggaagaggattcagcaaagggagtggaggtgggcagacatctaaaacacaataacaggagagactgagattccagcaattgctgtgtgtcgaaggcaggataagcagctcaaagggtgtgtgattacctctactgatgtaagcactacacagaaatcttagaggctgcaagatggcagccagtggcatgggttagggacaaacaatcctactttggaaaagtgaggctaaaagagaagttttcacataaaaatccagatttctggcttttcttgaaaaaagtacaagacctggcaacacctgataaccataggacagagctaaggcattgactcactacttcccaagagtccccattcaatgagccaggccactgtagggatctgagcttgcaagccctgtcttagaataaagacagagtcttcagaattttagattctgggtctcaagaggagaaacaaagggtaagggatgagcattctctgagatttactttcctggaaataaaacagcaaaagccaaaagaatcgtttctcttgcatcacttgaccctgggtggacaaggctgactcattcagtcatctgtgttgctcgtaagcacttgggagtacagcttgctgatatggcctaagaggaaacatttcacagactccaagcatatggtcaatttgggatgaagcagctcaccgtaactctcaacaacccactgcatctcttctaagaatcactggaggaatctgttctagaacaaggactgcagtagccttggctaagtcagcagctagagaagtgggccctggcctgaggggctcattacagcaccacacacagcctcctccaggcttctcatgcctgccctcccactgtttctctttggacaccacgttccacttgttccacaatgtcaatagtgggaaggcccttccc

SEQ ID NO: 39656 - DNA, 282 bp, Homo sapiens
accactgcactccagcctggggtgacagagttactaaataaataaataaataaataaataaaagataggatcggtgttttttcctttcactttaagctccaatacggcttgcacaatactgtcactgatcttgtctttatttattataaatgttgcctcactcccctcaccctaatcctggcccagcccaagatctccttttgtcctcttgtcccagagcctgcaaatgctgggtgtcgaccttatggaaaccaggggctgtcaacagattacaaggctgct

SEQ ID NO: 39657 - DNA, 571 bp, Homo sapiens
tctaaccaatgccttttctgatgactttattcaattctaacaacgccaggaaatatactgcattttacagataagaaactcagactcacagggcctaagtaactcatccgaggtcacagagcaaatgagagagatgggtctcccagcaaatctgcaggcctcagcccagagctgtgccacactacagcccatgcttttaatcactctgccagcactattccctgacatgcagggtgatggactgctacacagctgctgattaattagtgaatgctgctgctatttgccctcctcccccaagataaacaaaggctgaccatgagaaagataccagtacacccccaggaagccagccgattctctggtgatgagtgatgctgggaacagcagactggacatctatgggcatctgatggccactttaaagcactcaaggagaggtgaagaaaaaaaaaataggctcccctccaatgcaatttttaaaccactgattcaccatgcaatgcagtgttaaagtcaaaagaaccttagccactactgtatttgcaaaaattctgtactttgttttaaa

SEQ ID NO: 39658 - DNA, 694 bp, Homo sapiens
aaatgaggtgaggacgtaatgtcctatcacaggactgggcacatagtagcactcaacaaacgtcagctccattctggagaataaagaataatctcattagaactcctgggagaaaaacatgagagaccgccagggaaaggagtcagcatttagttctaggtttactaggacccgactatgcaagacaggctcatctcagctagaaagctgaacaaggaagacaaacagaaagataaacaaggcttggtccttgccctgagggaaacacaaataggtttaatatatgatgtaatcaaaatgtcaaaaggacagtattgacaaactacaggcgtgcacaagagactaattctgatagaatggttgtcaagaaggaacaaatccaggtgggtggggtcctagcaagcagtaagaggtaggggcctgtgcagaaagagctgcctgcactgaatcagagaagcagagaaaggagggtcctaggcgggggcagtgggcacgacacactgtcctccagggaacaatagggggaggatctgggaagggcaagaccaagctacagaaagccctgagctctggcttgaatctcaacttcatccatccaggggaaccccctaaagagttgtgcagaatcagatgtgtgttttacacaagcaggtcctatctacagggcaactgggcaatttatcaagagtgccga

SEQ ID NO: 39659 - DNA, 3539 bp, Homo sapiens
aaaataatccatgtatccattaacagaatatacaaacaaactgtggagtaagacatactccggaacataagtcagcaataaaaaaagaccaaatcatggatacgacatggatgaatctcaaaaatatggtgagctttacacaatattgcagaattccatttacatgaagttcaagaacaagccaaactcacctatgatgagatacagggcagtggttgccactgagagggtgagggcagagaatgactgagaatgaggatgaaggcacctgctggggtgacagtaatattctctgtcttgataaggactagggttacacaggtgcatgcatctgtcaaaacattatgcaaatggtactttccatctttgcacatttcactatatgtatataaattttatcttaaggaaaccataagcacatattgaagtcaaaataataaaatgtgtactaaaatgtttaggaatgacctgtaccaacatctgtaatttactttaaagtgcataaaaccatcagctggacttatggatggacacagggatggctggatggttgggggaggtgtgtagttaagcaaagatggcaaaatgtgaattagactctaggtgtgtatatttagggggtcactgttcttgcaacttttctatatcttaaaaaatgggatggggatagagtcacagtgtcctctccttagtccaccaagttagaaatttggcaaagcaccatgccccaccaagccatgggaccacatagtttcaattctgctgaaaagagaagactggaagaacataagtagctttacaggaactcacatcactcatgccaaagattttctgcttgtttccctacagacaaagcaattatttgaatgtaagccaaaaattcctgctcaagagggagaaaaagaactcactgacttgtattcccaatttattatctttcaattcctgtaccaaatctactagctaactgcacaacactccacttccatttgccccatgtccatacagccaaaaagcaaacaaagaaaaaccaacccagtgacttgatatacaaatgcagccagaggatgacgtgccagctctggggctttgaatcactcaggcgggccagaaaccccactgaaggcaaaagaggatgcagagctcagtctgaggttagagtgatttcactgaggttagcacacacgcaccaaagagtcccaaacagcttgcttcgtaacccctctctggggtttggtgacatctggggtcacttgaacttcgttgggattcagctgttcagagatacaaattaggaatcccggcagcagagaggccctacccacaggcccagaggtcgctcacattacacccggcttccttcctggcaaggccttaacttatcctgagatgacacacgatggcaggggttggaagatgcctagtctagttgagcgcccagctcctgaaacagctgtaccgactacaagggttccagcacatgagttgctggaaactggggtgaccactgacagagattgagccagactttttttttaaaaaagtacttcttgtttgtttgttttaagcccccgaagaaactcactgacaccacccagcgtccctagggatcacccataaccacacagggcagctgagggcaagcacagagtcacagacagacagcagggagcgtgcctggttctacaaccttggcctccacgcggttcttgctgccaaaggcagcgacaccggaggtgaagggcaccagccctggcctaggactggggtgcgcgtgcctgacaacggggcttcccgaaatacacaaccacctcctcctcgcccagacccatatccatcctggcgtcccttgagtctagagaagtgggttaagacaagggaagaaaatcccttacagaagaggagatccccgttttcagtgctggggactctcggcacccgcgtccctgtgcttctggtggttccggcgcttcctcggagcgcgcggcatgtctgctcctacacgtccagcacctctgtccccagagcaaacccacctcccagggcacacgcagaggggcagtcaggcaccgcctccaccctgccccacccaggccgcgcgcaccccggaaacctggactccgcgaccagctccctcctgttcttttccgaggaccccagcggcagtgtgtcctggacccacctgtagcctccaagctcccccacctctgcgtccttcctaggcgcttctgagcctgcagagcctacgacccccaacaggctgctccgaagtgcctctccctacatcgctccaggaatgactcccctacacccgttccccgcaaaaaaaagttggcccaagatccaggcgtcccaaggatcagcccaggtccccatccgacgcgggccagggggtgctgctctggcagctccggagccccggcaaagagcaacctgcagggaggcgccacgcgcggttcccactacccgccagagacccggtccatggggccaaacggaggggcctgtgccggtcgacaccccaagccctgtcgcgccccccccgccgcctaccgtatgggaccggcggaggagaaggcgcggtcgcgggctccctgaggcagcgtgttccgtcccgggaggaaagtttgtgccatacagaggaggcggcgcggggaggacttgggcgccggtgggtggaggcgtgggcggtggcgccgcgtggtcgtgtgtctgtccctccggcgatcggtgcgtctgtccctcgccggagcccgcggccgccgcgctctcgctcgctgcgcccagcgcccggcgcgctccggctccagccccgacgcgcccccgccgccgccgccgcgcgtccgccggctacacttcctcttcctctgaactcatgtgcaaaatatgctacgctgcatcttcagggaaagcctcgcggcccctgacagcagccgctggagcggtgggcccgcccagctctccccgcgccccctcggagttccgcccggtcacctccacgcggccgagctgcaagcgaccctggcagcctcagaacccaggggtcaggggctcatcgatcctccctcccagcccctcctaatcaaggttgtgtgctgtcaggaagagcgcctgggagacaaggatccttcaagatttgagccaggatgctgaaagggcgactgccatcaaggtgctgatggctgggggtggggttggggccgacttgagagaggaccatttctcgaccccattccacaggtgggagcatccctaaacatctcaggtgctgctgaaattctctcttgcgagttagtgcttcagggaagggtaatgccactgtctccgttgccatcccttggtctacctacttaagatgtccagaggtttgagaagatctggagaatcaccttgcgtggcaacttgaggcacccagggagaaaattatataaagagtgaagcactagtaaaccaggctgcattagtaaagtgaagatgtgaggcaaggagccattagaaaatattttcttcgtaaaactaaaccaagcagaattacagtg

SEQ ID NO: 39660 - DNA, 469 bp, Homo sapiens
cagcctgtgtgtacagagatcacacggccagagaggaggaaagagggaccgggggaggtgccagccttttttgaacaacagctctcatgggaactaatagagtgagaactcactcatccccgtgcctagggaattaatctatttatgaggaatctgccccccccgacccaaacacctctcattaagccctaccacacactgagggttaaatttcaacacaacatttggggaggtcaaatttcaacatgagatttggaggggtcaaatttcaacatgagatttggaggggtcacatttcaacatgagatttggaggggtcacatttcaacatgagatttggaggggtcaaatttcaacatgagatttggaggggtcacatttcaacatgagatttggaggagtgaaatttcaacatgagatttggaggagtgaaatttcagcatgagatttggaagggtcaaacaagccc

SEQ ID NO: 39661 - DNA, 1113 bp, Homo sapiens
gtgcagtggtattggtgcctctttgaagtgttccagtccagtgtaatgaacgagagttacatcaatttccaagaatttctttccctaaactggagtgatttaagccatgaatcagagagggagggaaatttctggtgtaaacatcaaccactgaacctttcaatgtctttgaacccatcaacttcactggacctcttcctaaaaaatcagatgagagctgttactcaagtcagttagctctgtactttcaaacatttttttaaggagctcaaggaattgccaaagaaaaggagaactgtttggtgtgatttctaaaaaactttcctaaatattgcattttttaggcaatgtgacaatctcaaagcactttgctgagggcaacattttgttgtggtctaacaactgttaaatttctcttcttgccctgattcccttaatttagattgagaatatctgtagagaaaagaagtgagacatcacgtgagtaaatacaacattgaaaagcccagcatttacagattagcaggaaaggttctgacaacaacttgattaatgcgaaactaaactaaattaatctctgatcaccataaaaaggagaagctgaaatgtttgttttttcccatgaaggatttttttcctgtgttttatgtggaattgactaaaaaaaagtccacaatttcaaaacttttttggcaaaaactttgtgtacctgcagctagcatttcagccagcatgagcaagtacgaggaagtgaaaggactaaagaagagaatacagtcaaaggaaaatcatggaataaagaaagaccagacacagagataatatacatactttttttaaaaaaaaggaaggaagttgagggaaactttttttgttatttcccatatctagtcagtcaacaagttttattttgttttgttttaaagagatgggtcttgttctgtcacctgggctggagtacagtgatgttgtcatagctcactatagtctcaaattcctgggctcaagggatcctcccacctcagcctcccaagtagataggacctatgggtgcatgccaccatgtccagttaattttgtttttgtattttttgtagagatggggtctaatat

SEQ ID NO: 39662 - DNA, 1127 bp, Homo sapiens
ggcctgattcaatcagttgaaaagccttaagagcaaagctgaggtttctttgaagaagaaaaaattctgcctaaaactgcagctccagctcctgcccaagagttcagcctgccagtcctcctggacctgcggattttagtcttgcctacccagcccccagaatcacataaagcagttctttgctatgaatgtcttattatatgtctcctattggttctgtttctctgggtaatccccaccaatacaccctgcttgacacctatgaagttatccatttcgatcatactcattttgtcagtctttggcttgcagagaaagataagagaaatgttaaagttggcaaagtaacttggttgccttcaatggtgatctcacctcagtaaaatctgaggcaggtcaccattttaggtgacttcaaagtttctgggatagggtggaaaatgggacaggagctcagaatgggaaaatcagatgccatgccattgctggtcccggtttgattggccaccaagaggccaccaggcctcacacggctgttccagggaagtccactcccatcaacaaagcaaaagtatgtgacacaaagtgtggattactccctaaaaggccccatcttagttgcttttaagtaacaaaggtgtttctatttaatactttagttggtgcctggctcatacattgttaacatctttgaggaaaacaactgaggaatggcattgtcaaaatctgtcataggctctaaaaactcagatttctatttcgtggtgtataaaattcgaggagcagacttcccaagtttctttccaatgccaacatacttatgtttctctttgataaacctgtcagtttttattaccaattagaatagcctacaaagtaaaaaatgtttggcaatggatttgggtgggcagtcctcagagaacctgaattgtggaaaatcagccttatcaggaggtctatcccagagtgggagagccagctgcagtcccctagaaagttacaagcctaccttctgagagacacttgcacaagtacgggaattcttctgaaacggagaactctgccaattgctgtttatcacagtttctcggtttgcttttcaagtaccagactgtgagagaattacc

SEQ ID NO: 39663 - DNA, 762 bp, Homo sapiens
ttttggtacaggaaaagtaagacactagattttggatatgctttcctattttcttaaacaaactctaacagttgttatctgtcaaacccaggggacttcaaatgctgatacttggtgtcttcaatatgactacatacataatctggaaatagtctagccttcatttcgtaaaagcacacattgtttttttgctgcaggcatctcaatgttggaataatgtcttattcttagactttatgtttttccattcttaagtaatcctgaaactagctcaatacattgagctggctatgttgtttttcagatggatttcctgaattgctagcatcaagtactttgctctcttttcatgacaccccacttctatttatagccaacagatgatcagaagccagggtcaaggacagttgctgtttggtcaagcccagctgttgaacgctgattggtaactggcaaggtgtggcaattgccatctggccatgccagggtcctgatagcactgccagcatttgtttaattcaggcaaagcagctaacttcagcttgctctgctgaagcaaacctgttttggacatctcaactggtaaaattggttcctgagtttaaatccaacttgaaaatttaaagcagcaccatctgagtcattggggtctatcaagacacactttatatcccccttggttcagattcagagacagaagcatgtagtctcaattcctttctgacgaacagcattgagtacttctgcagaacataaactaga

SEQ ID NO: 39664 - DNA, 784 bp, Homo sapiens
aaacatttacttctcatcagcttttccttacgtataactgccattacatgctctcaaatcaaagggtattacaatacatattatatgaaatttacgttactctgatgacattaactattttcctggggaaaggtaatagatcactttaaaacgttttctttgaatagctgtatagagactttttaaatcataggagctgccatagcaggtctctttctaatgtatatagtaatgttatgtgtgcaaatatatcatctggaatgcacaatatcgtaagtgcgaaactaaacatggttcataactcaataaaacaaaagtgaggctgtgccaaaacaactttgctcttcacatttcccattgcagcaacatttaaagaaggattatttctgaaaatgtgcatgagtcagaagtggggaatgagtaattctgtgctttggactttattaatgttttactgctgaagagacatcatccagttttttcagtaaagcgctgagtgactgcttcatcctcagattcctctggattctttgaaaaaacctgaagataatttgaacaactaagttactgttatcctctgaatttagcactgagttttcttgatatgttctaattaagtgaacaattatttgatctaatttttttctgggcagagaaatgactactaggggccgagagttacaataaccttagaatacaataggtcaacaatattctttagcaagtaggaaacaaggttaggctgactcattcaaagtcagaatatgcataaaaatatattagt

SEQ ID NO: 39665 - DNA, 2384 bp, Homo sapiens
aaacgagttccgtgcgcggggctggggcaggagtgaggcgcagcggccgagatcctgagccccgggacccttgttccgggccccgaggcctacttggtagttgcccctcggggttccgggtgggtgactgacagttgcagcagctctggggaggcgaaggataggcaatgacttggggctcccgtccactcggctttgaggtccccgcggcccgatgacccggcctcggtgacagcagccgcgacggcggcaatctcgacagggagctaggcggctcatggtgggtcagggggcgaccgaggagggaccacgcggcctgtagggggcagcgccgagctcgggaggagacagcagccggcgggtggggtgggtctgggctgccccctccgggagctgccccggggccgcacggcgattgtcatacccggccgcccctgcccgccgtgggcttcctctcggcgccgcgggccttaacggggctctgaggggacgtgacagagctcggcacgcggcagcctctggggagttagggtccggagagacccacgcgtcgccccccgcccgcccggggccgggagatcctcgggagccgcctccgcgtgtccagagagtgtcggggcggccgccacttcccctcgcccttcgccggaggtgggcgccttttcctgcgtggcgggtgctccgaccccagttgctctgagccccggggaagcgcgccccgagcccctgacgtgggcgccccgttacctcggggtgggtgcctggggcccctgaggtgggcgcgggttgccccggggtgggcgcccggcccgcgcgggttatttttggcgcccgcagaggcgcgtgtgttggggcgtgttttccttccccaggtgccgagagccggggctccgccggcgccggagctgactcgtctctctcttctttcccctgcaggaatcttccgataattctgccgccgcgactttaaccgtgcgcaaggcgagagctcgaaacaaacatcacatctaaattaaaaaaaaaaaaaaagcggaagaagcggccgaggcggcggcgggaggagaggagaggggccgcgcgcggcggcccgaggcggcggcggggacgcgggggcgcgaggacgcggctttgtgcaggcgggtctgctggggcgcccatggctggattgcgtgcgtgggtgggctgccgtcggcggggccctgcccacctccccgggcccgtccctcggtgccaagggcgccctgaaagccggagtgggggaagacggtgtcgggggaggtcgcctcgtccacgggcgggcgcgctatgacagcggcggggtttccaacggagactgcagcctcggcgtgtccggggacgaagcccgggctagccctaccaggggaccccgcggcgttgcgctcgccccgacccccagcgcggtcgtctgtaccctcccccgggagagcaagccgggcggcctgccccgccggagcagcatcatcaaggtaggtgggagaagggcgctcatcgcccaccctcagccgtccttggattctattttctccctgggggagtggtggtggaaggaggaagcccactgctaacaggaaccactggagcatgggtgcttggggtggttgagcggggattggatgcaaatggcatgtggaaagaatggagaggtgatccctaatgtgcagggggagctgtgctcagacatcctcagttgaacttggggctgtcacctcttccaggattggtctggcattagggccttgtacctgccggggtagggcatactattatgtgtagcctagtctggttaacagactccctgtaagatttctattgtatcttaaacacagatagggattatgtgaaatgtgagaacattttcttaaaaatcccaggcggcgaacagagggtgaacagagattatttaatagggttcttctgatccgtatacagttagttggctcttacaaatgtttacacttcgagggtgcaaaatctcctaatatccggtcactcagtcacaaagaaaaatagagtagatttctgaacataaatgcagatttccgctttcttaggctcaaaagctcagagattacagttccacacgatttaatctttttccttgctgcagtaggcaggcctcgagtactgtggaagttcttttgggcagtttgcttggttttgcttgcacagtgttagcggaagaaagccagcgattgttttgagcattttaaactcaagaagtaatattaggaactcccgagtttgtgttagtttcattctaatgttacattttggttcgcaatgtaaaaatatttttcatgacatgaagtgcaaaaaaaaatagttgatgagctaagaagagcagagccttaggcaagaccagc

SEQ ID NO: 39666 - DNA, 929 bp, Homo sapiens
aatattttaagcattctttccagtttattttgtgaatatatgtaatactttttacataataaattattttctaaaataaagcttcataaattagttttatgtaataacttgtatgtcttttcctgattctgagaagttttctatgaattctttgagtaaaaatctattttaaaagataacaggcaataatttgtgactaggaaatttcagagtggccaggaaaaacatgctaaaaatagaaactgtttgtttactctgtgctccacccagtctaaaacacagccatgtggttgcagacttggggaaggccctgtggtaacttggaaggtgttttttcccccctgagttgcagagtttaagagatcattcttataacttctgaatcctgtttcctttctttagcaactcagataaattatttttgcaagctgttatctgaaaatgagtttgaccatgttcgtttagtttttagtgtcttatcatcctcctttctacttatatatttaatttaagccctgtttcatgaaaggaaattttgagattggaggttttactaataacttatacctcaaaatttgtcagtttatagtttaaactttccggtgtttttcatgatagtctaaaaaaatagccacttatttgttcattttgttacaaaaggggctagattatgaatttagttcttgggtaggcttatcacctaggaacaacacaactttataggactgaatgttaaccagacaagcctgtgatttgtgtgcacagataacagaaaccataaccaccagaaaggcagcccagtgataccagtgttgggtcagccacacattttattagtcagatgcttggagcacctaccactattcaggactccttgcccaaatgctgttgctttgttaactctgtgctaaggtgttagggcattatga

SEQ ID NO: 39667 - DNA, 2959 bp, Homo sapiens
aattaataccatccatgtaaagaatcagtggcattgtggcatcaaatgagtgtgcttcatataatgctatgatctttttaattaagaggaaaagtccaaataattgatgatgaacatttacaattactttgatatcaattacttaaagagacctaaaccataaatatattacagaattttgaaagataaaagataaagatagttaaaatccttgatttttcctctttggtattcaaggctgtatggttacttatatctttggcttccttctctcttttgtgatcgtacattatccatgtgtcatcctgtacctcaaagggtggaggaacaacttatgtgttctttatctccccacctccccttgcctgtgttctttgtcgtacgagcccctgggagactcatagtttcctcagtaggttgcctggcagtaactggagaatgagatagctatgctataaaaggctcttccttccctggcccagccttttcctggtacttagcccctttctgtccttcacatccggatgtacataggacacggtcccattttgttaaggacacacatcctctgtgtaacagtgtattcctcttcctttcaattagagtcatgtctgaaggatctttttagctttctgggctatctggttacctaaccaataaattagaataattagtcctattactaggttcagcagtaatgtagagtcttaacagcttttgttttaggtcaaaacatgctcatttggttacctacaaactatataacaaaccacctcaaacttagtggcatagaacagtgaccattttattatgatcatgaattctgtgggttgacagtttgaacaggacacatcagaaatgtcttgtctctgctctctgatgtctggggcttcaactagctgtggggattctgatgactagaagctggagggttcacttccaggatggcttccatactcacatgttgggtacctttgcagggatagcaggactgttgggctcagctgagagtgtcagccagagtgtctatgtgtagcctctccactcatgatagttccagatagttggatgttccccagagtaagcctcccaggagaactagataaaagctgcatggcctcttctgacctaagcttagaagttacactgagtcactttgactgcattcttttagttacaagtgattcatagaccagcactgattcagagagatggaaatgagaccccactccttggtgggggagtggcaggtgcacactgaagaggatcatgtaggatgcaatattgtggtggtcatcttgggaacttatgcaaaagggaaactcagtcatcttgatgttttgattccataatgccagacttctattttcttatgtgaatcattcaaatgtctcattatttgaaaatttgatattatgtagaaaaaatttggatgagtacgtgaatatccccctttttacctatgtatattaccatctgacagataacttttgcatgactgaatcaaaggagcactgttcaacacagtcttggttcatacccttaatctgagaaactaaagtaaggctgtaagattgtgccaggttattataaggaagaacagattatcactgtgaactttacagtcagcaaggcatttaaaccaggaagacaaaaggagagagatgttaaaacaatagatagtttttgtgctttatatgaaaatctcattttttaagtagctggttattgaaaaattatatatttatgacagagaagactttaactattaatcacaaaattcaatttgtgtctcagtgataaagcgatttcctccttttctcctatttatgatagatttttatgtatgaaaatgcaattaatttcaaagaataataggtgagtctgggaaccaaataggaaaatagtctctttatgcaatgtatggaaagtcccctaatgttaatggctatactggctctaaatagtatgccacagagagatgcattttggggtttgaacaatagcttcatattaccgtaatagttaaggtgatgggaaagaattatgttccacaggatgtagaattaccataactttatgtgttgaaggaaaaaggctaagccagtataatgacctgggcaaggacttgactttgctgggtctcagtttcttcatctataaagggctgaaacctcacctagttatataattctttgattttgttgctctttgtgctcacatagcactggaataaagcagtcaaagttaatgttaaatataggagtacaaaggtcattcagctaagtttcagaaagttaataaatcctaatcactttacacttgacagcatgtataaacttgtatccactaatcccaaaagttaaatagaagtacttcaggaaaactctggattaaataaattatttaaaaatatatggacatcattcttaaacttagagcagttgttaaccataatacttcgttgtgaaatagtttaattaaaatttttagttttatttgtttgaaccaaaaaactgaattcactcatttggagccaaaatttaaattactaaataataatttaataggaaatagtacagttgaatttctgaaacttgttcttctgagtttaatagtgcctttatatactagctagtttgaagtctaggcactgcattatttttgtactatttagttataaggtattaggaatttgtccatttcgcctacattttcaaatttattagcataatgttcatcaaattatctcgcctttttacaacccactgcatatgtagttttgttcctcttttccttactagaattgtttgtccttttttactgatcaggtatgccagagatttatcagtttcataatctttttaagcattaatttgtggctttgttgattttatgtattgttctattgtatcccttttcggtttcattaatttctgatgttatctttattatttcc

SEQ ID NO: 39668 - DNA, 510 bp, Homo sapiens
ggatgatcatatgtttcagtttgcccagggcagtccctgttgatgtggcatgtttattgatacccacattcactctttttaactgtcccactttagatgtcattctaccttgggtaatatagttcaccagttgctggtggttccagccattcctgtggtttgcaggtgctggggacctcatgtgttccctcctgtcagaaccttctgttgggacaccatttcattcccagtgctctctctccaaaggtctcctctctaagtagcttgaactttagtgagtcagtatagagttgcgtaatggactgaagggtcagcttcaaaactctggaattaaagccttgttagaattggtaattggtatggcagcctgactcttggaataaggatagcatcctgctttttaataaggggatttggtaattagcttgcaggtagaatttgtccatgtttttatttctggataactttaatgaaataaaatacagtataattagatgtggcattttaagc

SEQ ID NO: 39669 - DNA, 1529 bp, Homo sapiens
gaaggattatagctaaggctcagtcttctcatccataacatggcttgctgtgtggattaaatggaagtaatgtgtaataaatatgcctagtatggcttagcacttagtaagtgttcatagaaggccagctcatggcattttatagtgttgaaggtttttctttaatgggtatttaaatggcatatctctggtgattagaaaaaagagagagagaggcattgggatcagcagtgacactaataggggaaggtcacaggtaaccaaggtccctgctgggcagactcaacagagaacagtagcatcctcaaaggttctttagattttgagccagcaggcataaatagatgagagattcaggtttctaccttgcaaatatttctttcccttttgtatggctggcatatttgatacttattttaaatctgatttgatttttttttctcctaaatctttaccctctttgaatgcagaagctattcgctctgtttgctcatagttgcatatccgcatcagcactactatgaactttgggctgaaaagaagccttgcccttcagaagaatttgacttatttgcattttcagtacttttgataaattggtgttacaaatgtccataacagcatttactttggatgacagccatttttcccaggataaaacaatcattagccaattctgttataacactgttaataacttttgtaccaggtggttcaagcataatcagatatatcaaatataatatccatgagaaagtaaaacccccagttaattacaaatgctcctttcattccatttaacagaatgcggtggtgtcattcaaggagctgtgtggcctctcctctgtggccaatctcatgcagtgcatgttggcggtgtctccccgctttctggggcccgataacacacccctagtggtcctaaatctcagcgagcagtaccccacaatggagctgcagggaattgtgccggaggttctgaagaagatcgtaacaacttatgacatggtgagttgtcctttgtccgtttacatagcctgggtgagagagatatcctaagacaacacagcagacatactttggagcttttgctgaagtgcactttcctatttcatgcttcattcacctatgctggagaagtaattcccctgaccttgctgtatttgaaagagattagtgttttgttgtttttgaaagcagaattcagagacactcacctcagttggattaaacattagttagcttctcagctatatctgaattgatttttaaaggatgcactattttccacacagatgtaggaacgagtttttaaaaatcttctcctgcagccagtcattgattatttgttttcattttattttcattttttcaactggtaaaggcaagaaatttaacttaaaaatgtaatgccatgagggacaggtgcctgtatcacatgactctgcactaggctatggtttcccttcttacaggagctgctctgtgatacttgtatttgtaatgagcttaacactaatggggtatcc

SEQ ID NO: 39670 - DNA, 1307 bp, Homo sapiens
aggaggagctgagaaacacatgtttctgtatagtctgaaagctgagaatggtttttacatttttaatttattggaaaaataaaaaataatatcttgtgatatgaaagtcatatgaacttcaaattttgctctccataaatgaagtgtttttggagaacaaccacctccattaaatactatcaatgactgctttctcactacagtggcaaagttgagtagggtagttgcgacagaaactaagcctaagcctagcagcctacaatgtttactgtctggctctgtacagaacaaatttgccaacacttccaaaagtggattgggtaaaagtccttagggtattttgatacagtgattttcaaagtcacctttgccaacctaaattatgactttctctttctttcttttctctttttcctttctttcttttcttccttcctttcctttaaaatgtactcactgcattttgagttttgatacataagaatgggattctaatcgttaacctggaggaaggaggagactgttatcgttgcctgagcactcctctgctggaaaaagcaatgagcctgaatatggttctactaattgttacggtcagaaacctaaagaaacaagaggtggaaactaaaagaggaaaaagccagtggaaattaacgtttgctctgattttaatagcgcccgtgaggcaagcatgctacgtcagtgggaagtggtgacaatccacctgagctgtgtgctataactcaataacatttgtaactaatttaacctcacatatatttagtgtttatgtataaccatggttgtgctgcttggtaatgaggcattaaaaatgagccagtccaagaattgagtttaaatagtactccttctctcagccaaatcaagcatttcttgctgaggggctgaagggctgggtggagagaagggaattgggtagagttagtgagcagctctgcatcgtctctgaaaacccctcatttcctctcaccctttcctaaggcgaggaggaggactttctctcaaactgtaaaatccaggctgtgctaaccacactcagtttaaaggaagggattataaaagtgcttgaggtggagactaatcccatgaaaccctctcccacctgaggaatgggaaagatgctctgaagcctctggattcccacaccttactgttgtttatgctattcacctccttcttatactcgtcacaacttataattatacattcattagcttgatccttttttttttctttttttttttgagacagggtttcactcctgtcacccaggctggattgcagtg

SEQ ID NO: 39671 - DNA, 2689 bp, Homo sapiens
tgcatcgatattactacctgcacatctgtttttgtctaatctgagatgcttattctagtagtttcacattaaatataaattatttattatttataataatgaattgtaaaatagagccaagtaatttattgctgtcattttaaaatgttttctcaaagtgctttatagaaacattgttctaaaaaacaactttgggtcaatgttagtagctgagatgatattactattgtaattgtgtgtagcaccttttaggagttacaaaatttcctctgcttttgtgctttcttcggattgaaacggcctttcctcttcacttgtgcagttgccactcatgtgtcaagacctataatggttttgtgggaaaagcagaggcttcaagaccaaacagaataccagtttcatgacttactaattacagttattttgcctataataccagattaccttgaaaggttgcttatgtttcaggtaggtcttcagtgttcacatgtgtaaaactaacctcataattactcacctcacatggataatgtgatcagtaaataaaatagaaagcaccaagtacatactgatgcagagatgttgaatcactttcatcttgatgcattcaaccaacacttgtactatttataatcacagcttgttataaagtagcagatccagacagaaagtggcccctgctagatcagctggtggccccatgttgcctctgctgcatcctcagtgccatgtgcactacattcaatcataattgatggcagaatgaaagggaaacatcagcctgctgagtaggggcctgaaggcccatcgcctaacctgtcctctaagcctgctggactcttcacctggtgttgctataggagcccacagtcctgagagcttccttaagagtacctagaggagctcttagactcaaggagaatttatgcaatagtgcaaaagttgaagattaatatatgcctgttaagaacaagaactatgaactgttaaccatacattaatttaattataaatatgtaccccaaaatgataaaaagatacttccttctgaagcaagtagtacaaatattttataacaggtgtgacaacatgaatcatctctgctgaggtctggataagttttctgcctgccttgtctaagctttgctcattgtttactatgggcctaccttctcctaggctggttccttctggaattcccctctaatacagtctgcaaatgcctcctgctgtttacttgcaaacctaggaggaatggcttctcactattgtgttctccaccctgaagtattagtcatcttcatattttatatactactcatgaatcgggggacgatattcactgtcattatcagcagaggaacttcctgtattgaaatctaagccacaagtggatccttctgtggctgtcaacatggataccattacactacaagtgcttcaccattaaatatcctgccaaagggctgtagcttcagaatattgaattttatcacatccaatagctcacaggttacaatagcaatcccacctttttagttattctttgtgcatctgttttatttctgtaccatagtcccagtgcagcaattgttcttttttttatatatatactttaagttctagggtacatgtgcttcattctcagcccttagctcagggtctcacacatagagggcctcagtaaacgattgtcccaagaataaacaaatgatcctccaagtgttacagagtttaggaggcagatgagcttctatatctggactcttgagatggatgtgcatttattcagccttaacgtatattttatagctggaaggtgcataattatttatcctttggtgatacttaaactggaagatgattctaagaataataatgcaacttgtttctctgagcttcatcacacccagcttttcaagtggaactaaaattagtaatgagtattggaaacattgccagtgaacatatgaaaggagggcattcagctaatttggggctaccagaaaatgctctgccaggcctcctggataaatggggagtcagccgtgacagctgccgcttgcaagtgtcttcattgtgccagtcgctcctcacacatcctttcatttaatcctcacattatgaggtgtaatgtctttaataagcttattttatgggtaggaaattagggttatgaggttaaatatcttgtcctagatgacaaagctaatgagtaatagaaccaggattagaacccatgtaaatctttgctgtttctgccgctacaccactcccaagatgagtttctcatctgcatgtgtgagcctctgcttaatgctgctgttttgttctcctccactcctgcttttgctcctgtcctcatttgtttaatgactgggttcatttccttgatcatatttttttttccttctcctatttgaatgatgggggcacagttggccagttctttgatactgagctgtaacaatcaccatccttgcttgaagaagtccttgcttctttgtatctctcatttggcttgacatcaaagctgaaaaaggttactgatgacggtatggaccttttcaatatgcaaattatgtaatggtacaaacgactttatatcagtataataaagttcttaacgattcatttttattgctgcctgttcaatacgtcaagctgtaaaatagaatattttaattta

SEQ ID NO: 39672 - DNA, 1314 bp, Homo sapiens
ccagaactgtttttacatgagagagcaggtaactggctaagtgaccaatgtgaggcaagggctttcctgctaccactagggctgatttttatcccctaaggaataaatgtaggtgagatatttcccagatgaagatttaagagatactaatatgattaaccggatcttagattgagaagtggtaggggcaggtgaagagaaattaacattcattgatggtctattaagagccaagttaattttcttaaaaagcaaaatgaagattgcacagaaatataatcaaggatcctctttggcatccagctgccagaatggctgaagacccaaaactcagcactgggagaggaacattacttaggaaaatctaagggtaagactaggcaaatttgcatattacactaaagacaattcttgaggccaatagttctcttaagtgaactgagtaagcgtggcacagagttctgaatctttactgatctctactctttggcatattattctcctagcacttatcaccctgtgcgccagagagtaacatggaagcatgacacctcccagtaaaatctgtcataatcatgatatggctataacattagggtcaaccaaaaaaggagactttacacatatttttaaacttgaaaggtctctaagttccagtaatggttagatgcctttgccagaatatgtacttctaaaaataaaaacagaaacatagctgatgccttagtcatatgaaataatctggggttttgccatcatgcccttacttgggagctaagagataggacagcagtttgggtgtgactgccttaaaattacatcatttagtcaagtaagactctttgaactgggcttaagataaatatatatgttgtgcatttcaggccataaaggttttgctgacatgaggagtgagtaaaagttaagtgccattctgcagctagaatgtaaacatggtccaaggcaatgaacatcagcctttaaatcctggtctgcacctcccctggctcatatgctcttgtcctcagcatgagatgcttgtggtggctccaaagcccttgagctacctgtagtaagcctgtttccacagacgatgaggtagatgggttttgtggctattggatcattagctaaagagagttgggactggagaacatggagaggcagcctggtgtgaaaggatgaaaacaggctgtagaatcagacagagctgggactgaatcctgcctggttctgctattacctagctgtgtaacctcccaccaagtatgcagagcatgctaagtcacaatttcctccactgtacactaggga

SEQ ID NO: 39673 - DNA, 654 bp, Homo sapiens
cagtttagtcactgagtttctcacctagcgtgactcagttataaaatacaaaatgaccactattaagaaatgatcagtgtttaaatgtgttcaaatactctgctcaaaatgttgatgttcatataagtctatgacttcatcacataacttgccaagaacaaaaggttattattccaaaaatataaagtagtttgccaaatacgcttacagtagcttttaccttctacaacccttttagaatataacatattggtatatgaagaaatactttatcacctagtgtaggggtcagcaaaccttccctgtaaacagccagagagtaaatattttaggctttacgagtcatacagtctgtgctgcaactctgccactgtaatgatcatgcagccacagacaataagtaaacaaataggaatgactgtgttccaaaacattttatttaagggcatggaaacttaaatttcatattcttttcacatgttacaaaatactattcttcttttgacagttttctaaccatttaaaaatgttaaaaaccactcttaactcataagatgtataaaaacagatggtaggccaaatttgacctacaggcagtaggatgccaacctctgagctggccaaaggcatgaaaaacatcgattaactatttca

SEQ ID NO: 39674 - DNA, 728 bp, Homo sapiens
caaagagaaaacccacagcaacacaatacacaatgaatgtataagggccgagggaatgtcatctagtagtagtagtcaactgggtttaatcacagagagtttgaacaataatttttaggagaggaggaacatggaacatcagtggaaaaggtaatcaaaacagaaagaaagatatgaaggcacagaaggcaatgggtatttcaagaatgcagcataacatggtaattattaatcagaaggaaaagacaattccatgaaatactgcctgctgggagcaggacagtgggatagaagaaaaggtggagtaaggctggaaagaactttgaatgctgaatttccaactatggaaacacagcatagtaaatgtatatttttgaataaggaagtgataaagaaaacagtattttaatttaactctatggaggaataaacctgaaagagtagcataggaaggacttaagagtgcattataataaagtgaaatttaaaagtcccaaacccaagtagaaaagcctgtgttcaaattcatgttgcataatttctagttatgcaaccctgagtgaatgattgcttaactgcctcatctattaagcagggataacaatactgatcttgtgatcaagataaaatcatgtaagagcaccaagaacggtgcctaacaagtagcagatattcaggaataagacgccattattataatagtatttgagtaatgatactttaggtaa

SEQ ID NO: 39675 - DNA, 681 bp, Homo sapiens
gcattattttctgatacttcagtattactgagcaaatatttaattgactttgtatatttcaccactatatcctaactatatattacaaacagtgatccataggactgacagcaaggcatttcaactgggaacaccagcaggaaacagaagtgtgtccaggggaaaggactctcagtgttgattgactcagagtagcttatcctcacatttcaaatgtatgcctgtcttttcaaagataaacatttacacagccttggatgatcaggctttcagctgactatgtaaataaacaaacatgaaaaaaaatttcccctaaagcctggcaacagataactaaaagggcttgaaggggtttctaaaggaaaataactcaaactgtaacacgtatgctcaagccagtgtgggttgataattagggctgtgaatgcaaacaaatcagttgacttttcaaaatagagggtaacattttttcaaagccttaagtaatcaataaattagttcagagagattgtatattataaagaagcacagatactatcataaaaataatacgttacttcgagaagatgtattcatcattcaaatgtgatttttctttactcaaaagagcctccactatggagataagaacaaaaggtaatattaagactctgatttctaaaaaacaaaaaggctatacat

SEQ ID NO: 39676 - DNA, 822 bp, Homo sapiens
taactttccttaatttcttccagtattgttttatagttgtcagtgtacttcctctacttttggtgttaaatgtattcctaaatatttagttcttttaatgctatcatgaatagaatttttgcttaaaattattataggattgttcactgctagtatacaaaaatacaatttttgctacctctaacaattttgctacctctagctggctttgttacttgtcttggccaagaaaatgtggcagatctgacaaggtcacagtaccaagtctagatctcatgaaatcctgaaacctggcagtttgtttacttggaaagctgacatcaccatgtaaacaagtgatggctaccctgctggaggatgagacatgtagcttactgaatctccagacacaagtgacacaatcttagatcatccattgcttagacacgtaagcaagctcagctcagagtaagagaattactcaacttgctcactttaccattacccataataaatgcttactatattgtgtaacaagtttagaaacagtacgtcatacaaaccaagttaactgatacactatctatgaataacatgaaatattaatgcttggtaaataaatggctacacagctcattttaatcactgagctagatatatgtcatctgaaaacatgcaaaggctggacgtggcggctcacatccataatcctagcttttggggtggcagaggcaagaggattgttgagcccaggaattcaagaccagactgggcaaagtactgagaccctgtctctacaaaaataaatttaaaaattagccaggcatggtagcacatacctga

SEQ ID NO: 39677 - DNA, 2401 bp, Homo sapiens
cccaaaactgctttttgtctccataaattagcctactgtagacatctcatatgaaaagaatcatctagtatatggtcttttgtgactggcttctgagtctgtagtttcactgcccatttctctgataaagctaaaattcttattttctgtggaagcaaatggaactgacttaggaaaaaattgccctgtgactaattcagactgtctcagcagtaatataaagtataaatttcaccatcttcacttttgtaacttttgcaacagtacagatgaataaaagtagtactgtttttcaataaccacacaataatgcaactctacattttatacaactgaatttgaagaagccatttttcatattatggctggatttttactacatattcatacaatgaacatttcatagcagtgaataagtaagagctacatgtatcaacatggataaatcttaaaaataatattgagagaaaattttaagttataaaagaatatataataaaaaatacagacaataataaatactgacaaggatgtaaaaatggggatcctcatacattgttaatgggagtgtgtaacagtatagccacttcagaaaacagctgggaagtttcttaaaaggttaaacataaatttatcatatgacataccaatcccactcttaggtatctacccaagggaaatgaaaagaaatattcacacaaagacttgagcacaaatattcttagcagatttattaataatagccaaaaactgcaaacaacataaatgtccgtggaatggactgacagatgatgaatgttttgacaagacatactagcaatgtagtaatattcaccaataaaaacgaagaaattacggataccatgctacaaaatagacaaacttcaaaaacattatgctctggacaaagataggcaccacagaccaaatattatattattccatttatatcaactatccagaaaaggcaaagctataaacactaaaaaataaataaataaattgttgcctttggttgggggaatggggattaggagttaatgtacataagaaatcacagtggaggaatgaaaatgttctacagctgagtcatggtgacagccacacaatttggttaaaaaaaaaaaaaactatgaattgtacacttgaaaagatgaatcataccttttgcacgagcacaaactattccccatccctcaccaaagataactttttgcgtgtaaatttataggagagttgtcaaaaaataaactatggtggtatctaaagaaggtttccaccataaaaaagggggtctgaggggatcaattttgtcacaataaattcaagtgtgtctgagtacgctttgaaggtcactaaactgctagaacacatcaacctaagaaagtaagatctcttactcttagactacatcaaatcctagacgtgaaggaaaaacaggtacagaacttttggtaatcatcccaacctctctactccaggaatagcaaataggtttcactcacactgaaacttctggctccctaaagatgggaaaattatgaaactgccctatggctaagcaagaaagtatgccatgacctgatgtcgcaacaagcataggagagggaatgcacatgagatcatgtatttgccatccctgctctagcccactctatacttagctaagagcacagttatacaaacagcccccttcacctctacagagaaaagacaaaggtgagataaccacagagaaatataatacagaggatgcaaggtgtgggggttgagtccaccagtataacaataaatgccaaactccacatttcctacaaaggtatctcctgactccctttaactttatagagctagaacattcttattaaatcaggtgccatttggtgtagctaaaggagataatctctttttatttaaaaaaaatcaacttaagagaaaataagcctgaattagcttatctgaattaaaactaataaactttattaaactttatttaactttattaaaactaaataaactttattaaaactaataaaaactgtttcaaagatttattttaattatgatagggaatctcagatttggccaaatccttccacccaaaatatcaatttcctcttaaaagaagaattattttagaacttgaaagttaggttttagggctaaggacaatgttataaaaaagaacattataaaagaagacaaagaaaaagaaaacataatgtctaagaataaactaatttagtcattatacctttttaaagatttctgcagtggaaacaaatgaacaagtgttagtcatcaaagactactactcatttgattctgccacagtccaagctagaaaaaaatgaaacaaaacatcacaagcctctctttaaagcaaaaatgcaatgccctt

SEQ ID NO: 39678 - DNA, 2774 bp, Homo sapiens
agcacaccaagcttctaatggaaaattcacagaccaggtgatgcagtcaccatacagcatacagacacaatatttgcactcttcctatcccctcccctggaatccagactcagcctgctcactctgaaagctttctcagttcatcctgccatttgccccttctcccaagccacctctacacccgggggtgagttattaaaaagaacatgtttattgataaatacaacactttatttatttgcacacaagttatccacttccttgctactcaaagatagtcccttgtccagctgcacatgttatcagaaatgtacaatatcaaaatgcaccataggcctactgaaccagaaaatgcatttttaataagagccccaagtgattcccacccacattaaggtttgagtgttctgtgatactgcagatagctgtaaaaattaaaaatgctcaagtttacaaatgaattcagagatatggtatgaaaagtaccaagacacggaatcagaaaagcccaaagagaaaaaccaatatataaatgaatttctttgccaccgatagcaaaggctcatttttcaacaatacctatttattgcttcctgctttaagtattttgtgcaagagcacaacacttataaaggtttacaaaagaattaccgggtctagaaattccaggcaacctggtccaaacgtgtgaaacctgcatgttaaaatcttaggattttgtccaattcagagttgacaaatgaactctttccagaaagttattattcgaaaaaaacctacaggatgttaactttaaacacagattataattcctgtaactaaaacgagtaactggtatcgaacaaattctaggtcacttgtagaatcgaatcttgtagtgaaggtctgtgtgtttttccaggaaaagtcggggtggggagcgggatttgccctccctgcgaatttttttttttttttttttttttttttttttgctcttatcctgaaagacctccgtttcttacgtgtgaataaacttaagtcgtactaaatccaggtcacggttcccttcctcaaaagtgaagtcaaggcttctctcttctaaagactattaaggtttgaggattcagggcccgtttcgcttccggctagggaaggaagcgtgcttcccggggcccaaatgaacatggaaatttactaagtaggaagttgagcactagtccagccgccaggccctgcctttactgcagttggccttccagtctagaccccgacctcctggggcagggaaagcaggcagactgcaagcagccaccccgcccagctcgccctgcccgccctgcccgccagggagctgaagggtccacccctcccgccatccacccccgacgccgactccgaggcgcacaaacggggggcggtgcggcaacccgtccgccgtggcggcggcaccctcaggccctcccgtgagaaggcggcggcggctgcggctgcagcagcggcgcgaaggggggcgaaacctgtcctgaggctgagtgggaggccggggcgggaacgactgcatgtggggctgcactggaggaaggcggaggcgttcagagggcttgggcttttttacgatcatcatcattattttattttacctgtggcgcagaagggctccccagctcctattccctgaatcctcctcctcctcccctcctctttctctctctctccctcagtctgcagggcgctcgcggaagcggccgggcccggcccgacctgaaagagaacagggcgggagggggtggcggcggtgaccagcggccacgtgaccacgctcgcgccgtaacggcggccgcctcccgccgcgcgccctccccgcgctccacctctaataacctcgcggcccgcgcgcctgggaagctcgtgcgcaggcgcccgcacgggacctgaagtctgcgcgcgagcgcaacgcgctcgctctcgggtccgggtttctggggcccgcgaggcgcgagaagcgagtaggtggggagtgagccgcgggcagagctctccttggctgagccggcaggctgctgagcgcatgcgcctgagggcttttacccctcccttctctccctgcttccaaccggcgcgcggctggaggctgggaaccagctcctgggtcttagtcagaggttcacatccaccaactatcttcccagggttggactgagaaggggagcagagggtcccagggactctcctgagatcctggctctcctgccaaggaatttacatttccttgtcacaggtaaatggccttccatgccacatttttctgtggctgagtaggcttctaactcagctcatctgtcactttctccgtgaaacttacccctgcctactttagaggagtcactagcactttgtgcagacctaccttgtagtacaacccatagaaagataaaggttaggagttattttttcacaagcccacaatactagactgtggtttctatctttatctcataaacttggacagggtcttcagtgttgtagtatctccctaaacgtctgatgactatcagaacacagggaatgtctaaaacttttatcgttgcccttggtctctgcataatcatgatttaagatcccctttaacccaagcacgtgggaaggtggtgtttgtttccccagtatgaaagcctttaaatcataatgttaattagagtggtaaatgcttcacttagtaaaagagatttatggtattttattagcttatcttcacaaagagctccaacgaaaattgatactgtttagtccag

SEQ ID NO: 39679 - DNA, 986 bp, Homo sapiens
ctcagctgacaagacacaggaagagatcatgttaatggggccccagggctgaggtcatcctgtggtacatacagagtggtgttatgcagagagaactacttagggcatctttcttcaggacatgactgtatgcatagcagagacctgcaaggggcacctcctctgcttaccctcccaccaacaaccacaaagagtaggagagagtctgtttcctaaagaagggtcatggctatttggcagagtagggagagatacttggcagacaaaacaatatttgttcactccattccttgtgttagttacccagcacatatatatatcattcttctcatccataatttcaaaactctttcacctaataaactaaccttgtaagtaaagagtgtgaggtgctcaaccaattgatcggtgatattagggagtggctgtaaagtcattttaaatctcatcctagtcatagaaaatgaaagtgaaattattcttcagaaagtctgccctcaaaatgctaaaaccagaaattgatttgtatgtggtgtctgcatacctgtgtatacctcctcctcctttccaaatctatttttctcttcttccctacacttccatacacaagtttcgtgccctacactgcctctccttctctattcttgctaccgggaacacagatatagtaatgactcaggttccaatgtgcagagcccagcagagcaaccagattgcaggaaactgcaaccctgtattgcttggtaaagtactgcctatccaacccagactgcctcactacacatttaaattagagagaaataaacttctaccttatttaagccactgaattttttctgtcttgctttaaagctgcatactctacctaatacaatatataaggtattatatacctacacatatatatatatatatatatgtatgtatgtatggtattgtattctgttaactaagttgataggcagagaatctcatgaaagcctatc

SEQ ID NO: 39680 - DNA, 746 bp, Homo sapiens
ctggagaatttacagcaaaaatgtctcaattggtccttggcatgttccacttgattccgtccatttgaatagatagccaaaagcactaaacatgcacacaggaagacaaatgcatgagaaccaacaatgggaaagatattaactagctattgttgcaacaatgctgcaaaacaaccccaatatctcaatgacttgcaaaaacaaacatttatctttcttgcttaaggattacaggttggctgtgtttcatatgatctcacttgagcctgactgggccaaagtgggctaggctggactccaggctttgggttgggttcaggtctgttccacatgtattcttcattctgggactagaagctacacagggcatgttcatgttctgctcatggcaaatgagtgaagtacaaaggggcaagcagaaacattctaggtctcttaaggctttggctcaaaattgacacactatcacttctgcccacattctgttgtcttaagcaagtcacatggccaaaccgaatatcaatatgatgtggtaatatatctgcttactttagagggaagcaatgcaaagtcccatgacagaggacatggtgaataaaattccactgtagggagagattgaagaatgtggaaaaatgaacaaagccaagcaagcacatgtagccagctgtgctagttgatcaagcttgtcaagttgcctgtgtcaccacaatgagatccctgactgccactttgaaagaacaagc

SEQ ID NO: 39681 - DNA, 3910 bp, Homo sapiens
ggcctgcttggatgacagcagcaggaactaactatggtctcaacagatgccaggctgaagagtttcttttgagttacacgttacaacccattttagtgcaatgtctggttgccacacagaaagcaagctactttctgaaaatcccatttatctgcccataaactaagaccatatatgataattactgaataaaacagtgaactcagtaacaacaattatttcctttaaaaggaaagaaaatctcgaaattctagttttttaggaaccgattttttgcaaagcgagatccttttcaatgagtttctagctggatcgcctccttcgcccccacacaaccccataatcacattttaagattgtgcccttatccattccatatggccggcacgatccaggccaagctttcactgtgaccttttaaagagacaaagaagcaaagtactatctagaaacagaaacactgcagttttactgagtgaaattagcaaaaccgacctgaaactcaccacttcaaaacttgacagcacataaataacaaaaacaaaggagatttcctttgcagcccgggttcttgaagagaagttcaagactgatgttttctatgtcctttttttttttaattaaaaaaaaaaaaataaaaaagcagcagacctgaaggcgacttcccctgaaattgtattattttcctttcccctacccccgcccccctaagcgggggaagggcagaaataaacgtctagaagagtagccatgagaaaggggtttaaaaaaaaaatcacaattcgaaaaccaacatataggggtttgtaaaatgtctaacctcagagaacagggtttgcgatggggaggaggggagagtgggaagcagggaggaggaagaagataaaattgatctgacaagtgattcgttggggggaaatcgtaaaaacaaagcaaaacccgttatgagctgtacactgtgatggtgctggggaaacgacgtggtgactgaggattctcttaaaaaaaaaaaaatcactgcggacaaggtctccaaaaaggaaaaaaggtctcttcgcgtctctccctccctcctgctcactcgggttcttcggtgtgaggacagaaagtctacttctggctgtcacttgcaatattattcttcaataaccccgaataacgcgcattgggaaggccacctcgcctcccttccaatcacccccacccccctcgccaacaatcgcgactaatattaacaaaccttaaacttttccccacagcctcgcacccccaacgagggcatctagcgggggacagcgagggtggggggcagggggtcgcgagaaaagccccggaaaggcactaaaatgccacttttgattctgccctcgctgacaacagccgcaaggaccctctccctgcccattgacgcggggctgtgagcgtctggggtcccagcaagtgaggagagaagaggttcggggggagggggaggaggaggaagatcagaaggcacccccagccacctccaccgcctaggcagcgacaaactccccgccccctccccccaaaaagtcgccaagctctcactcgtccagagtccgaggtaaacaacgagcaccacaatggcactaggactttgggggaaaagaaacccagaaaccccgacaaaactgatcaggagtttcccgaaatgaaagaggggggcgggcagcgtcctctagagtcgccctggctttcggctgggcccccgggcaggatagagggcggccgcggctgttgttgttgtgacgaggccgggtgttgctgggtggcacagggagaggtgtgtgtgtgtttgtgtgtgtgcgtgagtgtgagcgcgagtccccggacggggctgcttctctcgctctctccctcgctagctctacccctcgctgccgtctctgcccccattaaattattagttgactcatcccggccgctgtcgctgccgccgccgtgccccgctcggctccgcgcgtccgcccgggctgcagccctctccgccgctgctcctgctgctgctgccgccgccgccgccgctgccgctgtgggtgcctcttcttcctcctcctcattttaatacaaaatcaccccgctcgcagccccagccccgagcacgcagcctcctcccggccgcccgccgccgcccggagccttccccagcggggccggctcatccgccgcgtccggggaacgggagcgagcgagaaagtggcggcggcggcggcggcggcggaggaggaggaggggggaggagaggaggaagggggtgcggagccgaggaggaaggcggcgtgggggggcagggtgcacggagcgggcggaaaagggatggggattaaaacccgggctggagggccgggattgggggagggggcgggggcggcgagttaaaaagccgaaagacaagtaactagtgaatgagtgagggaatggggggagcgcacgatttccggccccgggcgcgcaagaatttgtaatgagcttgattagagtgaggcggcccgacatttattacacacaatacccagaataacagggcgctgtgcgagggctagcgccggccgccgccagacgcgccagggagggcgcagaggggaggaggagagggggcttccctggcagcgtccgccggagcggggaggggagcgcgcggcgcgcgggcggcaggggcaggtgtgtgagtgggagggaggaggggcaggacgggcaggacgggcacggggggcggggggaaggaaaatgacggggaggagggggcgagggccaggggagaaaactaaccaaccacccacacgccacaaaagccacaaaaaggagtacgcctggagcgtcgcagagggacaggcgaggtggggggacagggagacgcaccggccccgtgggagaagggcgcgggtacgcaggtgacaggcgctgaggaatgaggtagggagccatcaggaagtggctggaggggtacagacggaaggcagttctctccggggaagcgcggagggtgcagaaacgtgtacagcaataaaggccaggagcctcgaaacgctcggaatgtttatcctctaaggagggtggtccttaaactatgaggagccaacattagaaagaactgagtaagagcgttctgtactagtcagacgttggttcaaatcgccctcacttctgagccatagaatactttggaagaagaaatacgtggccgagttaaacaaaatttgggtcacttgaaagagacctgacttgttattataaaggaaaagatgccatcattcttcaaataatttacgctaggcaaaagaggaaagtttgggttggtaaatacatctgttgtagcaataaacacttctgctgtaatctagggtaggttacccagttagataaatggtcattaccacataagtatgatcctattatttagacaatctattaaatatagttcatgtaaaaataaagaatattacaatgtaacccaaaatagaaatgcctcatttatcgcttaggttttagttctaccattttagcaccctgaaggcagttaatcattaacaaaaaacaagaattatttttcagaatttgctggtagggaaaagagaaaaatcagtcagataaacattttgttacacataaaaaagcaacaagttagcacaagtactgagataaaagggaaatttgcaaattaagctctgtaaagccaccaatacactcttaggcacactgtttacattacaaatctaaagaaaagccaaaaggtaaagcagaaaagtgtaggaaatgatggcctcctaggggagagtaagtttaggagaaacaaaatgaaaatatatcactctaatagcacccacgtttcacccacaaaccagaaaggttagccaaatctgggaaggcaaccgtgaatcttggcacacaa

SEQ ID NO: 39682 - DNA, 866 bp, Homo sapiens
ggacgttgggggcggcggtggctgtcgagtgcgggcctgaaaccaagaacggctccccgggcgggcgcgccggcgtcggacttccgaggcggcggcttctgcctctcctgccgccgccgccgccgccggagctgcggctgccgcggaagttaattgcaacttgacttcaagttgtcctctttccccatacgaagtgggcgtttaaaggggagagcgaggcgaggagcgagcgagcgagcgcgcggggccaagggaaggaagagaaggagggggagggaggagatgttaacgggcgggggggggagaagggggagggggcggcggcgggggcgggagggggaaggggccggcgggagctgctctcgtctcgtcggtcgcggcgcctgcagtctggaggcgcaccggagcggccggggcgtcccccgcgggagcccgcagccacccgggacgcgcatccagacgtggcgcttcggaccgggcacgctgcgcccgggggctcggcggaccccgcgtagccgccgcttcggagcttgtgcggcgcgggctggccagcggggcggccagggcccggcccgcctccccagcgcccgcccggcttctccccctggcggtgggagcctcggcggccgctggcgacactaggcgcactgaagcccgagccgagccgagcccgagccgccgccgccgccgccgctgctgcgcaccgctcccgggctccctcccagcgcgccggccggggtgtggggggcggcgggccggaggggcgagggcgggccagggggcgcacacgggggttggcgcggaagacaggaccctcagcctcgaggggtaagtgtgggcgcttgggggtgcgcttggggtgcgcg

SEQ ID NO: 39683 - DNA, 1030 bp, Homo sapiens
ctctgccagtccaccaacactctcagtggggaagtaagaagcctggtggatcctgcttcccacacaaaggccatgatgagacagatgctttctaagtccgatatatctacccactttctgctgtcacctctgtacctcctgagtcacatggaatgtggtgctgagccaaatggtcagtcttctagaagcagtggaatgttggaggcagcttataccttagctgattcttaaattttcaggaattttgtgagccagtttttaaacacagccattgttgaaaattaaacaatataaacttataatcaaatatattaaaaataaagataatgccctcaactcatcacttcctatttattgttttacactttagtactatctatgcttattgtatgtgtatggtggaaatactacataatgatatttaatggtgtactgccacacagctcttcacaactctgcattcagtgacatcactttggtagcttgaaatcagccatgataggagtatttatatcttggaaattggcaaatattacaaatcagcattccaccctcccttacctccccaccccccagccagttgttaaacatttaccagcatgcaaccacccagagcctgcatctgggaaagtgagccactaacccaatgacctgtgataaccctatacatatctagctgttactaagctgcccttcccataacggtctgccccaaaaaggtgtgtgtgcagaggagaataaaaactaaaaccctaagatcatcttatttacttgccctatttctgcctcttttctctccctgccatctctggggtccagaagtagaagctttttattgcctccggagtttattcttatacatcaaggataaacattcatgacctaacatcatctctcttgttttctcccgccaaagctataaggatagtctaatcatgaaaaaacattaaacaaactcaaaatggggacagtctataaaatacctaaccagttctcttcagaacagttaaggtcctgaaaggcgaggaga

SEQ ID NO: 39684 - DNA, 488 bp, Homo sapiens
tgtgtccctcaaggaaatacaatgtgctgctcactcattgatacatcaggaaccccttttatgttctcttcagttttgtagcagttagagcactgttctcaaggaaacagttatcaacaggattggtttttccatttggctctgagattgcagcagtatggcaacaggccagatccaggacgccgatgcttgccaggaagggtgaggaaggagccagggatctcagagatcaggttgagcaatatgagagcaggactttggtgcaaatgaagcagcacacattttagctggtgtgaaggtagaaaagatatttaacctctttgagatcatttcttcatctttctgtagaggatgatagcaagatgcacctcgtgaggttattgtaaagattaaaggaggcattcatgtgaagtctgagcgcagtcccttgcgcaaggctaacatttttgtttgggtacactgatcatcactgctaattcaagttgagg

SEQ ID NO: 39685 - DNA, 519 bp, Homo sapiens
ctcaaaaaaaaaaaaaaatcagctccaaggtacataattaggaacatgcagagatgataagaaaaagaactgtcaggcacagagccaactctttttagtcaagaactgcctggagtatgcttctgcaacaatcaggaagtatctgtgggcaaccatgtatgtcagaatatcaataactgcaacatcattacacaacaatcttgagttgcattcacgaaccaactcagataaagctctttgtgtgccagtgaattcattcgttcacacatgcgcacaaacacatgcactcgcacaggcatgcctacatctgatgactcaaaccaaagtttgatttgactttggtttgattattcaaaccaaaggtcacaggcaaaatatagatagagatcgtttttgtttgtttgtttgtttttgtttttgttttttgagacagagtcttgctctgtcacccaggctggagtgcaatggcgccatctcagctcacttaaacctccacctcccgggttcaagcgattctcc

SEQ ID NO: 39686 - DNA, 2902 bp, Homo sapiens
ttggggattagataatttgttgatagaatggacaatggtttgtgaggagaagaaagaggtgaagctgattctgcagttccaagtctgggtgactgggaggatgttaatgccagtctctaagcagaagcaggtttggagtggaataggtttcgttttgggcatactgttgacatgacaaaactgatgtcacatatcctatttcctgactcctcctgggattgtcccagagctattaccatgattaatagttcatattgaacaactccttgagaataaaatgccacaggtatcatttacgtatgacacattacgttcttctggcaactaggtagttgatctgaaagacgggctgttcaaagttcaaatcatcttaattgcacaatgccgccgactgtacgcccataagataccttaacccggtacacttcaaagacaatattctcgcccttacaacagagctatacattgtaaactgcaaactgaaaagtagcctttattctgaaggaaaatcaatttaatattcttccactaaattatcaaaacaatttttttggcggaggctggggagggggtggtggctgaagcctcgccagagactgaatgtggtgtgggattcaactaaagcagcacatcttcagtaggtcccccgtggagggtaacgaacatcttgggttgtctttcaccagaattgtgttcaacaactcacgttctggagccaacccgccgcagatcagaatccagcttctgcaccacacagccgtgatctcggacaagttactcaatctcttgtgtctcaaattctttacctataaaacatctacaactagaactgaagacttggctgccaggcactgggctagacatagatttacagcggtgaggaccaccaaggggagctaaaattcgaatgtagggaacagacgattaacaagttagtttcagaatgaaagactcgagtgtaagaattcaatgggataattcctgtaaagcgtttagtacagtaaagagcgaagggaaattctgaataaaaggcagacactattttaggatttggccttccccgccccctaccaaaaccacgtaaactcttaacagaagcgacttcttattgtcaggcgcctaaaggcggcttttgggatagggagggtcctttcttcctccttggggtaaatgcgatttagcagcctttaccgacctacccaaccccagggccattttgtgggaggaggttctctcgtgctagacaagttccctctaataaagccccttagccgagatgccaggattggggttagggaacctcgccgctcccacaagggctgggcacaaaaaacaaacaaaaaaacacaagttattttgatcttcccccaaagaatagtaaaggaatttcccccgaccccggccgccaggagcccagagaccccccagcctaaataacaatggcgctggagagggcgtggccgcgcgtacctggggtgggggaaggggagaaaggcggccagttcggatctgagccactcgcagggtcacgtgacatcctgcctcgccccgccccgcgaacaaacctaggcggggagggattcgggaaggggcgaggaagcggaaggagcaggcggactggcgatgatgggaagtgacgaagtggcgcagttcgctgcgtgcagcgacgtggcggcggggccggcaccgggcagcggaagtggctccggcggtgggacttgagtgtttgtgttttggttcgtgaaggagccggcggctggccttaggggaggaggcagagggaggaggaggaggaagaattagtcggaactccagcgccggcggcggcggcggcggcggaggaggagaaaggaaagaggaagggggagcggcgagaggcggagacggagcccgacaggggcggcaccacggcacgagccccgcacagtccagtgtgaggggagcggcgctaagagcaggcgacgccgccgccgccaccaccaccgccatagatacactctcatcctacgggccacgcctgggccttgctgccaggaagcttcggccccgcagctcggcttgctgcggtctcaggtaaccgaaccgcccctcctcctgcgcagcgggggcctggaccccaggttatccgcggtccccagcctgtccgcggccctgccggtactgagaccccccaccccttctccctcacgcgcagcagtgccctggaccagagaactatcgaacccggcgtcttgttctgccagccctggtgactcatcctccaggggctctggagaccgggatttggggactgactgagggagcgacgggtgtcaccctttcccttctcaagatggcgccgtggaaagtgtactggaggccgcggttccgcctggtctccgtcctggcagtcctgggggtctcggtcaaagcaaggcaggttcgggggaggaggttggaaaggccaagggacctggcgagtgctgcttatccaggcgatctgtagttggctattagctactcaggtgctctccaagcaggaacctgggcctactgcaggtgtcaatgtggggagctccgcctatcttcaacttccaaagatgagtagtgtcggtgggtgggaggctcgtcaaaataggctgtctagagacttgttttctgtttggaaggtagtgaactacagcgttaaataaattcaagataacaggaccgctgaactccttcactgggtagagaccatggaacttgctctggcgttatcttccctggaagctgcttacctctgagactttcaaacttgttaagttctgaacgtcatagttcacatacttggtttttgtcttgcttaaatggaatcaaagcgttcaatcagttgcctttcacataataagaaaaaaacacttgtacacctctgggaatactc

SEQ ID NO: 39687 - DNA, 2760 bp, Homo sapiens
aatgtttcccacgaaaagcacaccccttaaagcgtctggcctgagagctatacagcatgcataaaatctgataataagcacattatgacccacattgcatataacaaaaagtagggcacttctgaagggtcctgagaaaaagccctgggcttttaaaacctgcttaagaaggcgatcaacggtacaccactttcaaacgcagcactgacttgtatgctccacagtcatcaacagtgaaaacaacagttttcaacaagagttggaaacactgagttgagggttttttttttctttttaaagtttgaggccaaaatcgatatttattcttttgaattatgcttatatctttttcctggttaatacgcacgcggtggcacaattttgaaaactacgtaacgttatagaaccaccacccagaaacgaatcctgttaacaaactttttgtattcaaactttttccactgcatagtttttgacaatgctttttagacaatctttcttttagcaaccagcactttcaaacaaaaattacagagaatagtaagtttttttcccctcctccggcagatttgacccagaaattgctatgggaagaaagtgttaattatattaaaaaatagtttgacagaaagtatttaaaaagagaaagggagaacatcacgtctttattttggtgaattagcaacaaagaaaaagattagcatggacgggtacttttcaaaaatatattttttttcctctggctcccgctagggtggaggaagttgtctctctgtcagagacagggtggaagagagtgaaaggacaaatgattgagaggctgccccctcccactggtgcaggcgtgcgggggtcggatggggggccgcggaggggggaggtggccagcaggtgcctgggctccaggcccctacccccaccctcgtccccaccctcacccacacccagggattggcctcgccccctggcgggcgagcggtaggtgtcgaagcactggggtggggggtgcaaaccccgcgggcagcggaaaagaggccgtggggggcctcccagcgctggcagacaccgtgaggctggcagccgccggcacgcacacctagtccgcagtcccgaggaacatgtccgcagccagggcgcggagcagagtcccgggcaggagaaccaagggagggcgtgtgctgtggcggcggcggcagcggcagcggagccgctagtcccctccctcctgggggagcagctgccgccgctgccgccgccgccaccaccatcagcgcgcggggcccggccagagcgagccgggcgagcggcgcgctagggggagggcgggggcggggaggggggtgggcgaagggggcgggagggcgtggggggagggtctcgctctcccgactaccagagcccgagagggagaccctggcggcggcggcggcgcctgacactcggcgcctcctgccgtgctccggggcggcatgtccgaggctggcggggccgggccgggcggctgcggggcaggagccggggcaggggccgggcccggggcgctgcccccgcagcctgcggcgcttccgcccgcgcccccgcagggctccccctgcgccgctgccgccgggggctcgggcgcctgcggtccggcgacggcagtggctgcagcgggcacggccgaaggaccgggaggcggtggctcggcccgaatcgccgtgaagaaagcgcaactacgctccgctccgcgggccaagaaactggagaaactcggagtgtactccgcctgcaaggtacgcgctcgccgctctcggaccgcggatgggtgctaggggcccagcccgcgggacccccctccccctcccgcttccacctccgcctcccgcctcctgcctctcgcctcccgcctggggccgctgcaccgcggaagtgctcttgtcgcccgcgcccaattagcttcttcttggataagagtcctgctgggtttgaagaagggggatcactaagacggagagcccttcattccttccgcttgaaaggagtagcttcggcatccgagctcccgggctaccttggggttttgttgctctgtaggagctcgctggagtcactttcccgggagtggagcggtgctctccatgtggcgggtgacccaggggcaaggaaaaatcttttgggggactgagtggtcccttctgcaatcgatcccttcctgtgtcccactgggaggaactgggtgcaaggagtgggggtggagaagactcccggactcctggcgctttgggaaagcgaaggggaggaaagcgcggggtgggaaggtgggcagagtccgaggcgagggtcttgtggtgcctggcgccctcggctgggggcggaggcactgccgcgcgcggtgacagccctgtcattattgtattattacttgtttagttaaaacgctgtcccagctgctcgaggtgtaaacaggatttggcaaagtgacagcccagcgcggcgggcgctactgctcagtttgaggacacccatttcttgctacccactctccatgccagtttaggcaccctgtcacctccagctgcagatccagatgtggaggctgtgttcccgaggtgggaggattgcccgaggccgcggggcaggctggccctgcgctgtcagcagcggctttgttttgacagggtgacagctgaggggggcggggacttggccttgtcagctcctgcggcctgtggctgaggcagggaagagacacactcacacacactcacacctccctgtatt

SEQ ID NO: 39688 - DNA, 4184 bp, Homo sapiens
tgattacagatgtgaaggagatggatgcatttattttggaaaaaagtgtgaataatgtctctaatggtccacttggaacaatacatcacctaatatcaggaggaggtttagggtaatcttgtcagtaacctcagggcaagttgtatggggttgcttccattaaattccatgccatcctaatcagtccccatgcgttgtgtactcttggcttgtgcagctttttgcgaggtttgtgtggtatgcaggaggttccagaagtacaaggatgagacctgagtaatatcatagtgattgatggtggcagtgccaatttgcatcagctctgacaagctggtgttgaaactagatggcagaatgccaaagatgccaaggtcagcatactttgaaataatgaagtgagtcatgtaacccaggattggcacatactcacaggactacctgactcatcccacctcgaaaggaacacatctgtgagcaccggttaggggcctgtggccacttctctgctacatgtgcaaaaggaagcaaaagccacaaggagcccttttcttgttgaggagacagatattaagtgaaagaaaaattaaaatgaataatcaagcatgaagtcaatgcagagagaaaccattgtgagccagggggaggtgaaagggtgggagagagacccagcccagatagagggaacagagtaaaaccaagcagagaagcaaaactgttgtgagccagacgtgagagtagtttagaacatggacctgggcaccagactgcctgggtttgaaccctgatgtgtgactatggggaggttacttatgctttacaagcctcagatttcgcagctgtaatgtggagacagtgatatatgtcaactttttccgtttactcaacaaattgttatttaatgtgccaggtgttgatttagatgctggtgatacagtgacagatgggtccttattcttgcagagcttgctttctggtagcagaagcagacaataagccagaaaataacagaaagtggtaagtgcctcgcagagaatgaaaacagagaattaaatgagaatgcctggggaattcctctagatacatgcccaggaaatccttctgcagaagggacacggaccgaggcctgcatgataagaagtgaggaagagggtgccgtgcaaagactctggggccagaagtggcttgtcgtgtgtgaggcctgtcaggagacctgtgtggctagatggaggtgggtggggtggggggtatgagtgtaggagattaggtggaagggataaatgggggccagattgccaacatataatttttacacagtgatgtcaagatctttagttctgatacgtttcaacaaatacgtatcaagacagaacttttccatccccctagaaaatttctgcctgctccttgccattcaagtctctctcccttggaagcaagcactgatctgatttgtgtcactttaagttaatttagctatttttcatataaatgttaccacatagtacatactgttctttcactcagtatatttttgagattaatccgtggtgttggatgcattggtagttaatttctatttattgctgaggagtattctgctgtatggacgtactagtttgtttatctgttgacttgttatggacatctgggctgtttccagtgaattcaaattagatttccggtttgaagtgacccctctggctgctctgagaagaataaagtatatgagagaaacagtagataaagagggccagttggaagttattatagtctaggtatgagtagatggtgtcttgggctagggtagcaggaatggaggggtgagaattagtttgggctatattgtaagggtagaggcaacaggacttaatttgttacaagggaggtggtgatgaaaagacagaaatgaaggataatgtccaggtttttggcctgagcaactgaatggatggtagttccatttaccaagatagagaataccataggagaagcaggtttgggtaagaataaagagttctttgttggaggtgatacattagatatgtctgttaatagacaaatgctattttgaggataaaatgaaataatgtatttagtaacttggtatagaatctgggacattctgaatgcctcatagatgtcagttactgttacaattaaaacaatgctaaataataattattgtttttaataaagaggctaaccaacttggaggaaaagagaaatatggtcaaagagaaactgggacatagggtctgctaggttaggaagaaatgagttgatagaaggtcttgaatttcaggtagaaaattttggactgaatccatttgataatagtgtccttgccttttaagaaggaggaggcacaaggtattttagaatgccacagaggagttctaggttttgatgttggcttcttgttctttgccagctgagtgaactcaggcaagccacaccccttctctaagcattgaattacttgtcctacagggttgttgggaggggaacataacatgatttggactgcaattgccttggaaagtagtaaacacaaatgcttgacgttcttaagtggcattttagagtacagtgatgtgagctggtattaggaggaaggttgggagtgggaatgtattggaagaggggaggaagtatttcttctagttggctgataagggcctgaactggggccctggcaatgagaatggagaaggtatagatctgacagagtttgaaagaagaatcaggtggcctggatgagggcattgagtgcagattaaccttaggagctgggagaaggacagtgccaacaaagggaatagggtagttgaaaagggagtattgggatggagggcaagcctttttgtaaaactgactgggcagaaatgctggatgtaagcagttagaaatgagggctggaagttctgctttacaggttgggctggttatgtggatgtgagagtcatcatctcagataatgactgataccatgagaacgtgagctgtccaaggaaacaacgtataaggcactacttattttgctcatcctggttgatttggtgccaaaacaacaggcggaagggtgaaaaattctattagtcagctggttgtctgaactgctcaatgttagccaagcagtttgacagatctttccactgtgtcgaagtctgagctgactgctctggcattttgacagataatttctgataaattctgtgtgtgtgtattaaatggaaagaaattgtcttggatttagcattccagggtactagtttctaggccccagtgtcacccaggacctcctgaggccttttcaggggtaatgcatgcttaggtttgctcctggagaggtcactcggatgtaatgaagggtctggccaacccctaggctatttggtaacaactggagccattccagcatcttcagagagcctgccaagggggttccagacctttcagtcagcgggacctaattataatatttagcaaagggagggcagtttcttattcaactccagcataaacacaaggatttcttccagacagggatgtcatgaagattttctgttgatttgattttggagtaaccatggagagcatagatgagaagaatttgaatgaggtgtttatttatacctgggttgttttgtcttgggtcatttcctcatgatatgctttccactctctttctgtagccttgaccactctttaatatttgtttttttgattccttgtggcttcacagaccaaaatggcactcataaattaaggtattcagccaggtgcggtggctcacgcctgtaatctcagcactttgggaggccacggcaggcagatcacctgaggtcaggagttcaagaccagcctggccaacatggtgaaaccccgtctctattaaaaatacaaaaattagctgggtgtgttggtgggcaataatctcagctactcgggaggctgaggcaggagaattgcttgaacctgggaggcggacattgcagtgagccgagattgcgccactgcaccgtagcctgggcaacgagcgagactctgtctcaaaaaaaaaaaaaaaaaaaaaaggttttcagagatgcttctgatagtgaattacctcactagttatcttttctctcttacaattctatttctatctcaatcccaggcagttttgttctcctgagggaacc

SEQ ID NO: 39689 - DNA, 950 bp, Homo sapiens
acagagtgagaccctgtctcaaaacaacaacaacaacaacaacaacaaaactgtggtaaaatatagatgatctaaagtttaccatctgaactatttttaagtgtctagttcattggtattaagaaattcacattattgtgcaatcatcaccaccattcatccacagaacacttttcagcttgcaaaactgaaactctgtgttcattaaacagtaactccctcttccttcctccaacccctcggcaaccaccattcctatctctatgaatttggctaccatagacaccttatctaagtggaatcatacagtatttgtcattttgtgactattttacttagcataacattctcaagtttcattcaggttgtggcatgtgtcagagttgcctttctttttaaggttatataatagccctttgaatgtatatactacgttttacttatttattcatctcttaagggatgctggggttgcttggaccttcttgctgttgtgcttaataatgatactaggacatgggtgtccaaatatttctttgacttcctactttcaattcttttgggtatatacccagaagtggaattgctgcgtcatatagtaattccatttctaatattttgaggaactgtcatactgttttccatagcagccataccattttacgtcttcagcaggaatattcaaggtttccagtttctctacatcctctccaacactgttttctgtttcttttgtagtagccatgctaatgggagtgaggtggtatttcattgtagttttaatttgtattttcatacgtatatatgaaaaaataatatatatgaaaaaatatattatacataaaaatatataatttataatacataaaatatattatatattatatattatacataaagtatataatatataatatacataaaatatatataatatacataaaatatat

SEQ ID NO: 39690 - DNA, 631 bp, Homo sapiens
ctaatgaccaactcccacctttcttcaagtctttgctctaaggtcatctcaaaaagtcctagttaaaattataccttttatcccaccctctgctaagttccctgtactcatccttttttctttctttccatagcaccatcacattctccagtatattctataatttactcatttgtgttaatcttgttttccccatccccggctacccctaatgtaatctccaggagagcagaatctttgtttcatagtcaatagtacctggcatgtagtaggcctcaataaatattgttgaaagaatgagtcagtgtgcataactgcttggcttgaaatgctgttctccaaactcaaggtgtttttggttattactgttttttccttctaggtttggcctgccatatttaattgctttgttggggccatttagtcatttttctttctctaacttaaggtcctttgggaaagggctgtggatcagaccaactattcagaaaagctggaggcttagggagttcctggaagtagctatgcggcaactaagagaggttggcccacaataagggtggtttcctctgactctacaaaatcttagtgatacttttgtaggggaagaaagctgttttccctttaccat

SEQ ID NO: 39691 - DNA, 737 bp, Homo sapiens
cattatatttctactggactgctctcatctaatgggctcttactcttaggcttctcttttttttcattccagatctgagattacagaaaatgaaaccacttttaaatgataagccttttgcacattagtcaatttgacagatttcattgtagtcattaattttacctcttctagcctcgatgccaaattcccatgaacaaaaaatgtatttgagcagccttcaaatcctattgtgttatttgcttctggtccagaggagcagggacatgttagctgcctgcccagctgctgcctgttcacactgcagggcatgtgaggactggctgactgtcttcacgagaagtgcaggccaatgatacacggagccagaggttagtgagggtcacggcacacagtgacagtgtgcttcctgttctcagcaaggttgacagctgcaccgtgattcttggcagcagtcacacggcgggtcactctctggcaccctgggtgtttgcaagtctgacacagcactgagaggtgccaaggtatacccttctggagtgatctaaagaaggcaaagcctcccctcgtcccctcacttgcaccttctgtctgctttcttgtgcccttcacacaaagtggacactgggggaactgtggcccaccaaaaggaataaactttgccacagctcaagggttggtcaatcttgggtaattagtgtatatcaatgctttgtatcaggctcttggaagactat

SEQ ID NO: 39692 - DNA, 371 bp, Homo sapiens
aatgcttgatgatctgaggtggaacagtttcatctggaaaccatcccttctacccccagccatggaaaaattgtctctcatgaaagcaatccctggtgccaaaaaagttggggacctctgccatagagcctaggtgccaagtgtgtagtaggttctaccatctaggtttgtgtaggtacactctccagtgtttgcacaatgataaaatcacctgactcatttctcagaatgtattcccgttgttaagcaagacatgaaagacatgaccatattaattcttacagatagtcttgtgattgcctaagtctcacgaaattgaacttctgattatgaagatctgtgactgtttaactctatggtttcattactag

SEQ ID NO: 39693 - DNA, 1389 bp, Homo sapiens
ggcccgagctttcggccaccgaatttagaatgatactgaaaaccgaagggaagtcaaacagggatcactacgcccttgtttcgcaccttaaaacctacttcttcctctttcagggactccaggaaggccggggggaggtggggctggcggaagtggacgcggcgaccctcctgccgcaggcgcgtccagaacgataccttggccactacttctgcaacagctatcttcctcctcctcacatttcaaggctcttcgaagctctccagccacggctagccccgcgcactgggccctccaggaccgtaccaccgtccgccgtcgcctggaactaccgccgccacattcgaaattttccgcctcgctcctccattggttggctgggaggcggtcacgtggcgcaggatgcacccaacaccaccgtcgcaggcagagtcccgccccgccaggcgacgtcacgtgacgcacattcgctcaagtccacatccgggcatccacctggccctggggcggagcctgcggtcgggtctcggcgacccgccgggactttctaatcagagtcgtggggattttacgggtggagttactccgaaacctttaaggccgagtgtgataggtagttcaaagcttcctgtttcttcagtctgacagcttcaaatgtcccgggttgtgctcaaagcctccctcttgtgagaagaatctctttggttgcctgttaaagcggtcagccagcttgcaacacggaagcagcttttagaggaattaaaaccaaaacaaggagcaaattctggattaaaaaggtattagggaaactgcagatacctgaaaattctagctccatgtttctctttgccggctatctctggctctttaactcttctcgagaaatggcaccaacatccatccagttaccgactagaagcctgagaaatcgtccttaatgattatttatcctctcttaacctttgcccgtccagtcggtcacacgatcttctcaactctgctttccaagtttctctcatgcccatctttttccccccaatccagcttccagcctaatctcattccctaaattgcactagtacccactctgaccgcagactccactccctatattcttcatagattaatatttttacaaaacaagtatcaaataggaaactttacaatggctccctattgcatttaaggtgaatttcaaactcctttaagatattttgtccttaaagagccccatgattcctggttccatcacttgtacattttctttaattttcttaaaattcttgccacttttgccaatgctgttctgtcaagaacactctttcccttggccgaacttactcctatgtatactgaagtttcactgtacagatgaattcttccagaaag

SEQ ID NO: 39694 - DNA, 972 bp, Homo sapiens
taaagcgattttcctgcctcagcctcctgagtagctgggattacaggcttgtgccaccatgtctggctaattttgtatttttagtagagatgggttttttccatgttggtcaggctggtctcgaactccagacctcaggcaatccgcccacctcggcctctcatagtgctgggattacaggcgtgagccaccgtgcccagcctgcagcctccatattttctggcccagtgattttcacccttaggattaggaccaactggaagctcttgaaatgaactaagtggtttaaaaaaaataaatgaaacagaacagaacagaaaaaaataaaatagaaaataatcagagtgtttacctcatagtaaaggtaagtatcattttatgaaactctctcttccccaccccctaaaaaagtctgaaagctgttatctgtttctgaaaatccagtaacaattccttgatgtctggagggatgattgtctctagcattgtgtgtttgaggacaaaagtcagatcaaactaggaactgccaggaaaaagttcaaatcaccaggaccaaagccgtctaagttccagaataatcctagctgtctgtggactctaacagcctcaggtgaaaatggacggactggaagcacatttagaacttattaaccagaagtttggctctatgactaggaaataagaagataaagtcccagagactatgtacaatcgactggttcacttctgaaatgggaacatgccacatagcccacatgttctccttgtgcaagtcaggtttaatatagcagccttttttttgttaccttctatggattatcaaaatatcagccaatattaacatttcttatatattttgaatgcttaaaaatctagatacaacagagccctcagaaataacgccgcatatctacaactatctgatctttgacaaacctgagaaaaacaagcaatggggaaaggattccctat

SEQ ID NO: 39695 - DNA, 1795 bp, Homo sapiens
ggttttaagcagagacagaacatgagtaagatgcatttggctacaaggacagaacattggtaaaagaatggcttcccaggagaaaacaagaagaaagtggtgggttatttttagtttaggacagtgaatcaagtcatcagcctaaacttaaatcatcatcataagtttatgatgggtcttcatatctttgtcctaaattaccttcagtccaccttgtgaggctgcatggtatagttaaaaaaacaacaacataggttatggagttaaacataactgagttttacttctgcctcctcccagttatgagctttacttctttagtttgcttgaaaaagtaaaattccccctttccagcatacctctacatggatcctccaaattgctaatttatttattcattcatgatcactctctgtctcctatctgtgctccttttgcctcccagataatgtaatattttattcttttgtaaactataaagtatacaaaggcattagttttaattaccttggctcgagccacacctcctctataaagccattcctgattattcccaatgacttttctctagtacactatagcttgttcctaccatctaattagcgctttaaagtgatggtcagcaaggatgcttgtggctgcaaatatcaaataactttattaaagttacttaagtaatgcagtctttttaatatctcttaaggacaacatggaagtagatagattcaggctggatcaatgccttcaaagctttaagttaatatctctgttatcttcatgaccttgtcttttgggttgcaaaatgtctgaaacttcctctgaggttctgttggccaaaattgggtcatatgcaaaacccacagatcaatatttggcaaaggaaaatggaatttcccagactggcttcgtttctccattactcaacttctcagctagacattgaaggtatgttggaagtaaatgactattgggtacgcagccaacagtgactgctgctcgtggcttaatgatcattcatgttctgattcatctacctgggtgcttctctagatttttaacatccagataaggcaatttcccacagctctctgaacatacgctgatttctttccctgtaccttagcacatgcaattttttcatgtggaatgccaacatttttcttattctatttgcctaaagaaagatttgactttttaagccctatacaatcatcacttcttctgtaaagccttcattgaatcccatacctaggtacatatataatcacttctttctttgtattagttgtgtttttgtatatacctgcattattgtacatattgtactgcattaggatttacttctttgtctgtccatgcttcagcatccccatctgtgggtataacccattgtctttgtcgaaattctctgttatttatcctgaagtctagcacaattcaaagcatttggggtagtgttaggcgatgaaaaacttgtcaggacataattttccattgacagatatttaaatagcaaacagggtgtattagttcattttcatgctgctaataaagacatacctgagactggggaatttacaaaagaaaaaggtttaatggacttacagttccacatggctgcagaggcctcacaatcatggtggaaggcaaagaggagcaagtcacatcttatgtggatggatgctggcagggaagaagagagagagaacttgtgcagggaaactcccatttttgaaaccatcagatttcatgagatttattcattatcatgagaacagcatgggaaatacccacc

SEQ ID NO: 39696 - DNA, 967 bp, Homo sapiens
ctggttaaccattaagcaatggaaagcagtctttacattgtaaaaatctgtgctacttacaatgatgttaatagggaggctgcaaaagcacaacttttaaagctggactccttgctgcaaatactgggtggctttttcccctaataattatgcatttgcttgctgtctaagattaatcagggaagttaatgatgcaaaaaattacatttataatccagtctgaatacagctgtactgcaagctaagttctaagtcctattaaagtaaatggaattaatgggctgtcgctggcaatctttagatctatcagttactaattaacattcttctgtaaagaatagttcatggtggggaaaaaataaagcataccttagtagcagctatggtaaaacataaagcggagtcattaaaggcaggccacagcagtggctactaggaatgaaaattcaggttgttgacaaggcattgagcaagaaactgccaatttgctgtgtcatcagttaaaaaaaaaattcccgtgtgtgtgtgtgtgtgtgtgtgtgtgtgtgtgcagtgtagtttgctttatgcagcagcaaatgatcaccactaaggacgacctttccatgagaaatgtccacttggctaataatgcaaggacagaggcatgtgagctgtaaaacaggaaagttaaattagctactaaggaaaaatgaatgtaacctattatcttctgagatactcaagcacattggctgctcttatcacaaaaagctccccatttgattactaattttatgtcttctgttcttgtattaatttgaagtgttccttccaacctgttaccactgtgtgtgtgtgtgtgtgtgtgtgtgtgtgcgtgcacgcacgtgtgtgctttctttggaacttagtctacaagaggaaatgtattactcttctggattttaactttttgtatttttgttttgcttttatttccttagcg

SEQ ID NO: 39697 - DNA, 2143 bp, Homo sapiens
caagataatgttgaagtaaatgatgccatttgagtacctgctgtatattccaggaaagactgaacacaattaaaattgtatctttacaatacatacaacggaggctcaaaataatagacattaagttcggtttgaagaaaaaaaagtaaatttcctgcatatgtacctcctggattaaaatttatactacatcacacaggaatcacacttgtctgagatgaaacaagccacattattgtgtaaaagtgactgcaacaacttttttaaaataaaaattgtgttccaatcagcacctagatgaaatgcccagcacagtgcctagtttatctgcctagttaatagatgacactcaaaactgattgcttttctgattacacgaaataaaagtactatctgagaagaagcaaaattcccatgtctacaaacaggaaagctaacttggataataagtgtgcaatgagagccaaatgaccttgaaggcttctaaatcagaaaactcagtatatgtttgatgcaacggtccctgagaaagttttatgatttcaaaatcatatactatatcaggttattttgcccactggcagtaccggaattggcaaagctgtactttcaaattcacactaatcagttaacagttgttgaaatcaaattgcagccaaggttgttagagtcactgataaaataaacagttgttgagagggggtggcacaaggcagtgagatcacactagcagctgggactcagggtgggaagatgcctgggaagtcagaaggcagttaagacctccacaacctacacatttgcagacactagtttaagctactgactcctttagtcttgaactctcctaaaggtgggggatcttaactgcatttgcaattaccagaaaaggtaaataaatggtaaaccgctgaatccactggcaatccaaattgcgagatttaaagctgggctgggaatttgagaaaaatagagttggtaaattagctacttggtacaacttctacagatgtttttttgtgagctctgagtttctggaaaagctaaagttccctgcagtctccacctacttccaaagcagtcaccatggctcgctgtcagccaagtttcctgccaacagtccctgtgtgggggaaggaaagaatcaaagaaggacaactggacaaaggtagtatgacttcatccaactagatattttttctccctcattactaagtcacagttctgggtcttttttcagttgaccttttctaggtccatgttcagcattatgtatagagaaaaactgtacattttcaccaggaatggtttgtacttggttattttaaaattcaatatagatgagtttcaaatttgtcttctacctcaaaatgcagcaaattccaagaatggagtttaaatgagcattgtgtaaaaagctcattcaaagaagctcggtcctcatttacagggaatgagaaaatacctaaaaagaatgtggaggctgaggccaaagtgtcagataagttttttttaaagaaagaaaacctcagggaaatttttaaaaactatttttcattttaaaagttaaggaagggagatgtataatttttagggtgtcaaaaccggccatgtaagtatatgcaatcatggttttgattatggttaagtaaatgaagaggagaggaaactgtcatacttatggacctgcttatttgtgattgcgcttattactgtatgtacatctcacagtaatctacagacagcttacaacagtgctgcacacgattaatctgacttcacagtgagacgctgagaaaggtgaagtaagtggactgagagccacagctcccaagggcagtgcttggataggaactcagatctttaccttcaaaggtaagctacaaattcaaaaactaataaccacagactattttcagtagtaactgaaactaattcagcaaatactaactgagtgtctattgtgtattgaccacctaacaaatagtgaattttggaaatatgtcagacctagataaactctgataatcttgacaactcttcagtctccatttacttcagaggcaattagaaagaaagaaacaggcctgccttcacttctcaaccatcagaggcctgtacagacccttccagttactttcct

SEQ ID NO: 39698 - DNA, 2357 bp, Homo sapiens
aggaaaattgtatgtttacccatatttccttaaacctcagtcatccaaactccatccagttcccatctctgtcaacagaatgatataactaaaaacatattttgacataatatttgaatttagtatgatttggtaaccatttttctttcgttgtttctttttttcttttcttttctttttttctccccgcccctctcctctgttttggattgttgattcactgactaggtttcagaaagttgatccagcacttactataaagctcctcattgacctaaagtgaactggccttagcaggtcaactcaaatgttgaaactcaaggtctgatcccataagggcaagttgtcagccctaatccacacaggatggtgactgctgtctcatacatcctgcttatgaccacagagaggaatgaggtgagaatgggagtatgagtcagggcaattggagctccattctggaaatactgattcaaaaacatttgcccatgtcaatggtcagtgattcgatcttttcccatgaaggaaatcacatggaagtgatctgggtttccccttgtccaaattatttattcattttcagttgtggtatttaaatattccagtaagtcacctcaacacacttggaaggaagctaggaaagaagcactaataatattttatctgtcactgtcattaaatgccacgaccaaaatcaaaacactgataattatccagttgccaatatcctgaatcaaggtctccactagaagaaaaacgggatctctcacttatttaactaactttgatgacaatttctggtgcctgaaacatactagagaaaaattatgttaggagtatcaggcaaggagttttaaatatttaaccccaaatatccctctgtactgcagcccctttgtcaggtagacagtgaataattcaggacaggtgcctgctttataggaaatcaaaagattttgcctggaatattcctctcaagtttactgctagtgatatagaatataaaatcacaaaatttccctccagaggaatttcttaaaattaaatttcacaccatgaatcataactaataaaagaggtatcatgctgggatgtctaatatggtggccattgacagtcacatgtgactattttaaatttgaatgaattaaaattagtacaataaaaaaaattcagttatcagtcacactagccgcatttcaaacgtctgatagccacatggggctagaggcttctgtattgtacactgcacatataaaacacttccattctcacagaaggtgctattggacattacagctccagtgcaaagcaatgttctcaagcagcaaataatttacagataagatgcttgatacagtctgtttcaaaatgaattgctaatgggagagaaactcttgctttctcctgggtcctttgacttttcagattgaggagaagagttttctcagagctgaatgtgtcactgtcagaagccagacaccgttgggaccatgccagaaagaaatcatcgtccatttctagagatgaccatggcagtctatgaatcttcatgtgtgagcaatgatgatcatactcaaagaacaaaccaaatttttaaaaagttaatgattaagtaaacactaatgaataatgtgtgctttagataaaaataatatcacatttttgaaccaagcacgcataaaggagccagtcatagggcaaaggagtgtttattagtatctgataacccttggaagtacaatcacaaagttttcatttctgccaacaaattgtgtcaaaatctagtctcattaatggcaagtgtttaaactaagctaatgtatgcagttaaacctggcttactacatctgtctctcagggaaattttacccatgatatctaggctttggtcatctcactctttaaaaagaaaaaataatgctaaaatcttgttacatggtcttgtttactcatgatctgtacctcttaactgagacttgcctgcacgaacttctctgtgccagtggggctgggcaaaagggagagactgtttagaaaaggaaagaatggtcaacattgtctcaggctgcagaaggatcaagtaagatggtaatgtctgatagatttaatgtcatggagatttttggtgacctttacgagccatttaagtgcagtcatttatgtgggtcgcattacagagaagccacttttgaggagggtgaggaatgagtgagggtatcataatggagaccaatggagacaattattttctccactttgactgggaaggaaaagtagagtgggacactatacatatgggtaaataagcctgataggcatagaaaggaactgattcaatccagaatatctaataa

SEQ ID NO: 39699 - DNA, 1637 bp, Homo sapiens
ggtggtaaccatggtaaactgcagaggcccaagtcatctgtaaggggcagttgggactcaactccagacatgtattatcattcaagaatgtagggttcgtgttgccagatcttcctatgtttgaagaaaagccaaaaagcttgttttttccatgttaaaatctattcattttaaaatgtagcaatgaatttaaattattataaaatattgtatgaaccaaatgaaatatctgcaagtacaatgcagctggcatgctatcagtttaagaactctgacccaaatccctgcttaataaaatgtacccataaaagaaggcacacttagtaaatatcaataccctggactaataagctcttttaaaaacatcagaaatattttcttggtacagattaagaaagggcagcaagttctcctatatttatatttttaaagaatgttttcttatagaagtcccaaagagcatgagacaaaactgcaaattagaaacaactaattaacttgaaatgagcaaaagtgaattctaccgtgttgaaaacttattgatctcaatgatcctacagctttcaatttgtgtaatgtagtcttctacctacgtgggcatgggaaggcaaagaatatgagagtaagaggacttcctcaaaggtcatttcttaatctcttcattttacacctggggaaattaaaactaagagaataaaagacttgtccatggtcatatgatggcagagctgaaaacaaaaccttctctgtgttccattgcttctttccaccacccccaaaatccacttgctcccacatgcctctcctttggttcagactgtttgcattcgaggtggattttgctgttccactcacatgtttggatttggctgtctggactgtcccttgcttcctgaccctgcagtacccagtagctcaattcctgccactcccacaccaagctctggttgccaaagcctcagcctgggacatgtgcccagatgagctcagtcaccaggaagaaagcatgactcgatcaatgatggcaaaggtgggggtgaggagtggaaatttaccatccctgtacacgacagaacatctgatgcactactttgactcctccaagggtctaactcactctcatatgtcttgtccttagaatagttactcattggttacaggactaataatgactgtaaaattggcttacctttctcaaaggacaaaaacagaacagatttcaatgaggacatacaaccttatgtgatttcacactggcaaaacaaaactcttgttgagaaatttgtccttatcatgcaatcagctttttttttttcctaatagcttgattgagatacagttcacatatcatacaaatcatccctttaaagacaatcaacttttgacagctcacgtgacatttttacactgggatcaatgaagaaccatatatttctccaaaaaaaagtacatcttttggtaaaaactacagtgatgccaggaattaattttgcacaagttgtagcatacttacaatttgaggagacaaaagtgaaaattgtaagagcttttcctaagttgtagctggccccttaactagaggcagaaactggggcttaggaaacatgttctcaaactcatgtctactttataatgct

SEQ ID NO: 39700 - DNA, 998 bp, Homo sapiens
ccagtctcaggtatgtctttattaacagcataaaaatggactactacattcctatagcaaagcttctcaaattctcgtctgcatcagattcatcaggaaggcttcttaaaacacagactggtgagttgcatctcaaagtttcaaattcaataagtctggggaggcaccacagaatttctatttctatcaagcccccaggtgattctgttgttgctggtgttgggactgcactttttaaatcactaggctaaataaaaagtgaacagggttgcttggcatatgtctcccacaaatgaatctacatgatgtatttcagaagtaagccatatgggccttctaggcaagcccactgggagatttcttggaatgcttttccagatttactcctgatcaatccttccatggttcctactcagactccactctgcaatttgatcccttggggttgatatgaagaatggttcttactcagtctccagagaaacccttccagggacattcctgaaagcccagtcagaagactaagttctgggaaccactggtgtctacattagtcagccatctgtagccaccagccaacaaggtatgataacaacgaaagccagtatttatctaagcacttactacgtgcccggatatttgctaagaactttacacatattatcttatttaatcctctcaaaaatcctacaaggcaggtgccattatctctatagatgagaaaatggaacttcatcaagattaagtattaattaaataataactaaatagcttgttagtggcaaagcttggacttgagcccagacattcaaattccagaggccaaaatcacaaccacatttctgtactaccttttcctaaatataaatctgcaaagataaaaactaaaatgattaaagtatttggttctcaacctgaatggagaatgttcaggccaaactgacaatcacaactgaatcaatttttaaaatgattagtattgtaaggtttatttgtct

SEQ ID NO: 39701 - DNA, 481 bp, Homo sapiens
taggcaataatgtaataatagtgtgggagtaggatagttacaggagtaataaaaatggttggtgtgcattgcatgcattgtggatgccaggcactgtgatataagctttagaaacactgccatttaatcctcacagcaatctaaggtacatcattatcctcattccacagatgagattaaagtttaggatggttaaataaacagttcactggtagtgtcgcaatctgatactttatttagcaccaaagcttacgtgttcgaccaatgtattaacttgcaaaacaagcaactttgaagaaagctataaatgtgacaagtattaggggataagttggtacaggaagacccagactaacaggttatttgaggttaaaaaggaaagtagaaatacttggataacgaaagaagaatctcagcaaagggaaggaagacacagaagagcgttcagtctagtattaaaactaccatgtttagttccctt

SEQ ID NO: 39702 - DNA, 664 bp, Homo sapiens
gaatatgcaacagagactataggtgtcccccaaagattaaactatgtaccatctggccatttagagaaagtatactgacccctgatttatgggactctgtctccacagattttagctttttgagagagatattgtgacttaacactatgaccagggcctgacagacgcagtgcttcaaacacagttgtgtatgataaatatttttgaaggaaaaaaaattaaaaattgcttgctgtaactccagggatttggggtcattgttacagctgtgacattttgaatatgttacattttatttatttgttgcacttaatgtacagatattacagacagaaatattagtaggttttttttaggtttgggtttcaagagacttcagagcttacagatagaaagctgtgagtcattaacataggcttaagcaagccctgaaagtgactgagatcattctggaagaatgcatttagtgataagaagagggttgatgatgatacaatgccaaaaaaaaaaaaaaaagatgaaatggaaattcttttccttcatgctctaggatactataattttgtggggtgaagtaaagtaaatataattgatgaagttaggcaactctccccacactggcgctcttaaaactaaagtcaagaaaatgagaaatttgaggaag

SEQ ID NO: 39703 - DNA, 1348 bp, Homo sapiens
atatatattaactgaaggtaaaacattatttctatttcatttttaaattatcacagtgacttactaagggaatccatgttcctgttggactcaaaacaatttcctaaactttggaataatgttagacatccccaccctcacttccctttcctcactgacttttgtgttatacttgcatcatatcacagcaaccactgaaagtgaagctttacaaaaatatgacataatgaaaaggaatgtagcacaatctaatgttgaaactgtgactagccccaagcaagcagcctgcaaggctgtctagccttcgaaacacttagaaatctggtgatgcccctgtgagttcactggaatgcttaagactgacttttaacttttattgtaaaaagtcaaggttttttatcgttaccaacagatgtttttgtgtttactacaaatggagcatcattgtgaaaaggtatgacaagttatttcatcaaacaaaggaaaaaaactttataaaatttctccttcctacaaaacacagtacagtaacataaatgtggatgcaacactataggcaactgactgcttatccttcttgctggctctgttcttaaaatggctggaggaagcaggtgatataggagatggaaactaaagttcttactttcttgtagggagtggggacagggcatgaaagaaaaaacaaagctacatggaaaatgcaggtaattccacccccaaaaatagggaggaagaagatgggttctcttgtctccaatgttcttccatatccatctccccaattctggccaataaatatcacctaaacagggaggtgatttcttaagcttctgatgcatcttaagaaatcagaagcttaagaaagatcattctggattcagaatcatctctgttaaaactgaagcctgggtgaggaaacattacttgcggtgccaaaccaaacaaaaacttgaatttacctaaattttgcaatctgttctcaaattctgtttaccctgctgcatagattcagcctgaccatttaattaacccacatgttataaaattgagtatcttcgattaactcattgagttatggtggtaagagggttagcttcatcatttattaaatgtctactgtatgccaattccatactggcacatgctaagtactactggtgtgacacagataattcattctttcataattcaaaggagggaatatttttgtggtttttcacaagtaggtaagaacctgagtttattggccaggcataatggatcaggtctgaaatcccagcaatttgggaggcccaggcatgtggttcacttgagctcaggtatatgaaacgagcttggaaaacat

SEQ ID NO: 39704 - DNA, 985 bp, Homo sapiens
actttcatattactttaatcataaataagttttagtaaatacagtagtatccctagcatatgcttagtcattattgataggataaatcacccctaggactctgaaactctgacttcagcaagagaaattctgatttgataggactaaagcagagcccaggtatttgtggctccaaaaatctccatgggatgttctcacttgctacctgagttgaaaatcactgccataaatattaggttgtaaggaaactggtcatcgacataatcaggtttttcccagtaacaaacctatgcccttaacacatagtatctattctacacaacacttggatgaagtaaggacaattactgcttacatttgaaagatgatgaaactgagataccatctgccctttggtcactgttctcctaggtccagctgaaaggacaaaaaaatcttacattttccaatctctgtctcatacaatacagagtacctgactgggcagccttttaggacctttttccttaaatttcagtgagttactggaaaaggtttgctgtcttctttccagatatgactttagctcctgggcatctgatttgatgcccttattagtcagcttgagtctctctctcaccagtccctgcccccttggtttaataccagctccagaaagccaagccgtcaacctgaggccagttggctgaaggcctgacctcttacctactacttgttggttgtaacccttggagttgaacctgtcttccagaatccctacaaattgcctcatgtgacgcaactggatctgtaacttgatcttctacctaatgcggagaagcctgacaatcttggatcagtatcagcataggttagactatcaaccaccacgatcccttaacttgtgatttgggcactcattcttcataagagtggtcacctaactcttcctctactcttgctagttatggttagttgctgctctctctgaaacatctctctgaca

SEQ ID NO: 39705 - DNA, 905 bp, Homo sapiens
cagaagagaactttgagaccatcttctttacacccataaaccaaaatgaatcaccaagttgtatttttcttctgactagaccatattcaacatctgaaagactactgaaaataacacatagaaatgcaaagttgctttatatctaaattatttttatttaaagacagcctgataaagctgcctggttgttgcctactgtgaattatgtttctctaaaacaatgtgttttcattttatcaacttcatcagtaaagccaaaatctgaagaagcataatttcaaccttcctctttcacttacttctaaacactcactgtcttagcgatctgtaaataattgaccagccaagcactgaagcacaaagacaaatagatcaatagtcctcctgcaagcgcttacagcagggagagaaaccgtttcccttcatttcctatcacacaggacctcatgcatgaatcaatctgcagtctgcagcccccagatttaactcagcatgcataatcagcaacaactgctgaagtctttgattaaacttttaaattgcctcttaatatgatgtaaatggaaaaaggtattgattaaagaaccttaaaatggtaacctgttaaaatgagaaaggacaaacgctttgagttggtgagcctgtacagaaggatgactagcgtgcacaatgcacaaaggatctccaaagcacaaatgcaaaacaaacagtaatcatacctactggtcctcatgttcctgggcttgcaaaacttaggggaagttgttgaatgatgtgatttttttttttttttttaaataatgacaagtgagaattgctgggtaaacacaatcccctgtacctgggcattttaaaagttttctttccctttctcttgggtttcattatataaccttgaagcaaac

SEQ ID NO: 39706 - DNA, 407 bp, Homo sapiens
cttcacttaattttcacttcatctagctcttcaaaacaatggtcatgaaaaactagagtatacttcatcttggacagagtaacctattggatggattccagacaggagtcggtctggattatcaggctcaggttgtaaaacctcatcattgtcctagtacacagggtttctcagggacagagattgcacaaagaaatctctgtgttgcaaaagacagtgcccttcaatggaattcatattaagtccaggtaaaacaaatagccagtggctggaactttaaataactgacatgttttctttttagggtgaaaaaaattggtaacaaaagccagaaacatgatccaaatttgaacacagtgaaattagcatttttcactttcttctacatttttatccttcaatgataa

SEQ ID NO: 39707 - DNA, 954 bp, Homo sapiens
taagaacttatgtgtggggaagttattggaggtaactgaatgttctagttgtagatgtcaggtatgactgagtcaaacaaaatcaacaggcaatctgtctcattccatattggggctttccttttctttgattaatttcactctcaaggcagttctcaccttatggtggtaagaaggtcaccaatagttctaggcatacatatcaccagcttaggaactagtgtggaaatagagtccttgcccattttttccaacaaaagtcccagaactgacgctaatttaacctaactggggtcacatgctcacccccgactcactctccatgactacagtgatagaacatcttacttggccaggccagtagactgaaagtatgggagggatgttttcactaagaaaagaggatgtcattcaagaaggggaatgggtgcatgtaaaaaacagatgtccaccgcaacaacatcacaaggctgagcatgaaacaagggtaacagagagtgctaaagcaatatagaaatagaacatttaattgcaatgaaaggaggggacttaggaggcaggcaggtagttgtcaaattcatagaaaagtggcattttcgaagcggcaactctggaaaaagatctgggaattccccacatatttaaacatagctttatcttatgactcagcaattccactcctaggtgtatacccaagagaaatgaaagcaaatgcgcatacaaacacctgtacacaaaggttaagcagtgttattcacaatagccaagaggtataaatagtccaaaccacccgtcgactgacaaatttagataagcaaatgtggtacggacacatagcgaaatattatctgaccataaaaaggagtggagtgctgataaacactacaacatggatagaccttgaaaacattacggtaaatgaaagaagccagacccaaaagaccacttactata

SEQ ID NO: 39708 - DNA, 510 bp, Homo sapiens
gcagactcggccggctcaagtgatctgccaacactctggctggttgctctttgctctcttctgcccttttgaggtcatactacctccccttaggctttcaggaacccctagatagtctcagggagcccacattacatagcagcttctacttttttgaccctgaaacacaaaattctgattactttccctgagcaatgggaatgaggagtgaggagagggatttgtctgtgattcacctgtgagtcatcttttaaaagggcaccaggtgtctctcactgaaacagagaccaaagagcaaggttaacctctgggcaggcattctaccccacacagaggaagcagcaatcctagaaggatgggtcttgaaggcccaggtgacagaaccaagtgaagggtaccgttttgggaaagagttgttgatttatttattggttttttgtttgtttgtttgagacgcagtcttgctgtgttgtccaggctggagcacagtagcaccatcttggctcactg

SEQ ID NO: 39709 - DNA, 2102 bp, Homo sapiens
ttccctcatgccacctacagcactgctactgttcccatatccttcaactgggcatgaaggcagcttcccactcactctgacagtggtgcaccctgtacccccacccctctcttcaataccccagggctaaacggcccgaagctcctctctaccggctggtgcgcattctgggccagggcgagccaaaaggcagaagggccttcgtgctgcagtgtctggtgaagactcaggcttagcctggaagaagtttccaggccaacgtgaagttttcctgtcttgggtacatgcgagccccacgcgtctgcgagtttgggttagtgtgtcaacagggtcagtccccgtatctactttgcgaaagcttcgaggcgagcgtgaagtcaagggctgcggtggatgggggtaaaaggcctcctcgtcccactgcctgcaccgtcttggggtaacccctaacccccagccggcgtttccctttaatgcgcgtgcccggcaaggtcctcgcgtcccctcccctcaagccaccccgtcagcctcggtttcccccacttctccccgtccttgtcgttccttccccgtgggacgcccctcgctcacccccgtcagagcccagtctgcgcgcgggacccagctgtcactttacttttcctcgccgcctccccaccccctctcccgaccggcggggcagcccgcccgggcgcgctcccgcccccgccccctcgcggccgcgcgccggaggaggaggggcggggggaggagggaggcgcgcggcgccgcatggccgacgtggggctcgcgctctcgcggtctctcccgggcgggcgcgcaggcacgcgcactcgcgggtgcgcgcgcggacggccgggcggcggcggctcccggaggtggtggcttcactttccaggactcaggggcagccacagcgacagccgcgggcagcagcctcaggagccggagctggaacggccgggggcggcggcagcggcggcgctgagggtgagtccgggcgggcgcgagcgcggcggggacaggcgtggtcgggtgcgtggtgcgtgggtccggctttcggtgactagacggtccgcaggggacatcccgtccctggggcctccccagtctccctccccctcgcgcctgggcagctctctcccagggcttcggctcgagcctgcgacctgcacggacacccccccctcaggtattcgctcgggccgcgccggtgcctcccctcctcgggcgtcctccctctcgctgacgtcctcctcactcccccgacctcccctccgcgtcgcaggtctctgcttacaccgctcgtgccctagttccctccttcctcgctccccgtgcccggttccctacgccccctcccgcgagcctcctgcccccgtttctcgccctttctacccctcccccttcttcccatcccccccttctgcctcttctctccctgtcctccttctacccccttccgttctcagttccccatccttctcaaccctcccagcgctttccttctcctagccgcatcctggaactaagtcttttcaaaagtacaggataaatgtcacggtggaaagtgcccggcttgatcttttgctattttccctaattgcataattgctgcacatggtgtgtctcctggcgagtgccgggtttggctccttcgccgccgcaccccggtggcccgcccggagaagaccttgtggggtatatttgtgtgtgtcctggtgaggggtgtgtgttgtattggtcttttgtgatgcctggcgcttgtcacagtttggaaccgaagcccatttttctctggtctcttctctgcagcccccactggcctggtttgaaactggattccctctgtcctctcccccttcccgcccaccccacttctccccctcttttctccgatctctctcataatgttttgatctttttgccctttaccatttctaatgaagataaagcgtggcttcttgtggcttttttcccccacgaccaaccagaaatgtccaatccatcttcccttaaggaaattaaggctgctttagaaagacatcatcctgtgctcggtggctgttagacccatttgcatgttttcaagattcatcgtt

SEQ ID NO: 39710 - DNA, 1750 bp, Homo sapiens
taaatatgtaaaaaaaacaagtattatctattgttttcttttttgttgttgttttttatgtattgtgcataattgtatgcataatgcttttatatgactggcagtgaagtaggtttgtttacaccagcatcatcacaaacatgtaacacatgtaactataacacagttaagtcacctgcaacatcactaggcaatagccattttccagctccattacattcttatgggaccactgttatatttgttctccctcactgactgaaatgtcgttatgtggtatgtgactgtacaacataaactcttcattgtttactttgtggcttctttgcatggcagtcatctgaaccttgttcctaaattcggggacttccccactgttatggtctgaatatttgtgtccctccaaaattcatgtgtttaaacctaacccccaaggtgatggtgttaagagatggggactttgtcactgctgtatgtggaaactaaataaaaaggagatggggatttggggaggtgattaggtcatgagggctccaccctcgtggatagtttaagggcttgagggaggctttctgcccgttctgccatgtgaggatgcagtcattcattgctgtctatgagaaacaggccctcaccagacatggcgtctgccagtcccttgatcttggacttcccaaccttcagaactgtgagtgataaatttctattgtttataaattacccagttgaaggtattttgttacagcagcctgaatggactaagacacccactgtatatgtttggggattgatagggtgtatcacttaccacagaagtaaaaaagaaggcagattcttgcttcattcctgccccaaacatgagtttgtggtggacatgtgtctcagtatggcaaatcagatgcccctgcccagggctttgacgctcacagtgggaggcaaagaagcagagagagaaaactatcccttcaataaatccttttcctgcttaagtctgatttagagctggtttccactgctttcaaggttaagatgttcaaggctgtgctgggaaggcaggttgccatgcaatcccaaagtgtgtgtgctcgttaaatctacacctcctctgagagcccagggtaggtcaccagccatctcattcctcctgggactcaggggatttcctggaatatgggactttccgagataaagctagacatactgggcaaacccaggtagttggtcaacctaatctgagccccatggacttaaaagagctttggtgttccaagtcaaggctgtcttggctccaagtcaattcattaatatgtcctggagaaaaggagggatcccaggaatgccttttccagagacagcttctgaaatcaaaggccctctgaggaaatgcttagtaggagtcactgattttataagagtgactcattcagaacatttcgatgtaagcagaggtggatttaccagcgagctactgaaacttgagcttcagaggcccttgtttgcccttggaagccatggtaggggcccaatgaatagtcacaggatcatatgtttttgtcaattttacaaaagtaagatttttttttttctctgcagtaggttaagatgcctgtctctttctcttctgacttcccctcctattaagtggtggacgttggcatgtccaagtgcatttctgaaaattctgctaaggggtcattcagtttagaatacatttagtttggatttaatgggatgtgtgcctgaagtcact

SEQ ID NO: 39711 - DNA, 1031 bp, Homo sapiens
catactcagtctttgaagtctggtgagtattttatacctcccaattcggcccagccacatttcaagtgctcagtagtacttgtgactggcacctaccatatggcagctggactgagcatgtctaaaggaactctcggtgtaacccttagacgctgaaataaccaggctgctcttactccctacccacaataaaattcccactgtcccagccagggaccgcgaagctctgccccctttaggatgccaatcagttattggaatacctgagcctgcctctcaactcagtcttgggtgttggggggttatgaccatcttcataaactgcagttatctttcaccccatggacaagaatccagagtccacagtccctgtcacgtagattgggatcttggtttgccagtggtgaggcggccagttctgtgcactcaccctgagcctctcactccctctctgcctggaatgagtccaacttggtgagtcagggcatgagttatgagtaatccagaaggccctgaacaattgtcttcctgacttttgaatcacccgatcctctctgggatcagatcaagttgggggagttggttctgttggttggcagggacgggccccctgctgagatgtctcatctggtccctcctttttctcttggctccctgacagttcaggcatttggcagagggaacttaaattttctggaattgcttttgcagggaatttatcatgaactcaccagtcccttcacgtggcttccattctctcaaggtttagttcattggtttgggggttcccctccctactttttttcccttttaaaagctctaaccattaaaacataacttagtaagctagagagtggtttaaataaaatgaaaaatcgaaagacaattatggttatggtgtgttgtcaacttctcacttgtgagagaccagtctttccacctgaaccctcacccagaaaattctgcagattctactttcaggcccctctgcccacagtattggcagagacttttatacactggtgcaaaat

SEQ ID NO: 39712 - DNA, 2487 bp, Homo sapiens
tatttgtcatctggactaaaggtctttgtccattggaatggcatcccgtgtatggaatggcatacacgcccattgatgtacattctttcttctcaaaccacaggttctcttattttgtgaaatttttggttgactcagaataaatttgtataattcgcccttctggtctttctattagagcacttaaattattccactgaaacataccaaaagctttcagacctttagcattgactgggaagtgattgaataacaaatgaactcaagtcatcagggaaactcttgtttaaaaataaaggactcagctgcttttaaacagttttgcttcagcccccacttatttatcacacctcttagaagtttaaaactatttgcttttctctgattgatttgatccttggatttagctgtcttcttccacggcaggcaatgcgtggagggtaaccctctttgttcaggagccgtgtcctctggttaagacagtgcatttttgcttccatatcaggaatttcagtgatatccattctcctcagggattagagattgttaattactttctgtttaaaaaaaaaaaaaagggaacccgcagcactgcagcttggcaggttctctaaaaatagaggatttaggttatttttaaaaaccctcattgagggatcatgaccatgagtcacatttatctccagagtttgcctgctgaaggaaaaccacatggttctgtggacatttaaaccctccctgaaacactgccacctctacagaacaaacagtcccatctacccatccatgaggaaatggagaagaatttgtgcctgtggaatttgaggacccaatttagtttaaaatagatatttcatgtccagaggctgtgaactgttttctaagcacgagctcttactaatgtttgtcatgctgctgtatggctcattttacttattgttaggtttattcttttcctttttcagaaatattcacaatctaatgaagaaatattcattgaggaagagctctatggcctgggaggtatcagtcttctccaagacatcaattttacttgcttacagaacataaaaaagaaattttatgtgataaatgcattaatctacagctacttatgattaggctgttctggctaaaatggaatacattatctgtaagacatctttcatactcccaaggcactttaaaataatgaaaacatataaaataatatctaagtaattaaagtaatggcaaataaaaacttagcattatatggaattgcctatcggagtaatatatctctttttataagccctttgtgatattgctattaatttttaagtaacaaaatattgctcttgaaccaaaaatgggatattaactaacatatacactattaattgctttacaaatgcaaagtgctaaattccagctcataaaaataaacctttgaggatatctaataaaatctacacacagtgcctgcttctgaatcatctaaggagtagaggagactcctcatattgcttcataaaaaaagagacactgtgtcccttctgtgagtggatttttctgcctcaggaagcctggtattgtccaccctctctccccacctggcagtcattctttccgttcacccctccccttccttgatgactcaggtatttattcacatccccctttctgataatgagtcctctaagccacaaagtaaaaccagcatctttcaaaacattgtcactttttttttcagtttagtttgttttgttttgttttggtttgtttcagacagggtctcactctgtcacccaggctgtagtagtacagtggcacaatcatggctcactgcagcctccacctcccgggagtgattctcctacctcagcctccctaattgctgggaccatacctgactaatattttgtattattttggtagaggtggggtttcaccatgttgtccaggctggtctcaaactcctggactcaagcaattctctcacctcagccttccacagtgctggtattacaggcatgagccactgtgcccggccatcaccttcttatagatggtattctgccccagaccagcctgttttctcggcaacctcctactgtcgtgatgtttccagtcctgtgtgtcccacagaattgacctaatgccagatttttctttattcaccagaatgtgattgattcagcacgtcctggattacttagtcccaaatgaactcatttccctggggaccacacccaatgcccctgtgtacacaccacttatgccaggagccttgggtgcgtcatttaaggaggcactcgctcttggattcatgtaagtttagggttagcagttgcataattcagaaagcgagtgcttccttaaatatggtgcccttcttacctgagccctaacttattcacagtccagcttttccagccctcaacttgttttactgaaaatatcaagcaacaggtagagagaggagttaaagtgaacaattactta

SEQ ID NO: 39713 - DNA, 2078 bp, Homo sapiens
ttataaaaaaccacatcactttctataaaaagtgagtggaagaatctaatattgtaaaactgcacgtgcctcgcgtgacctgagcagaaaattcctagtttgggattttctcacaggcatacctaaactgacctctgctcctagcaggtaaattgctagaaggagaagcaagtgtcagtccaaagaaaacccttgttgtgtgattttttttttctctttaatcgctttttaggtggagtacccgctgcattctctaaagtctttgccaccaccagattaccaacgttttcaccaatttgccacctccctactcctctcctttccaaaagccctcattggaaagaactttctctcgtgacccccctattccatctagttccaatcactcccagcgccccccatctccatcggcttcccctctcccgcccagaatccaggttcccaaaccacttaagagaaaattcacaaccctcgcccccttcccgggcgtccggaggaggcgctggggtgggggtgtctgtgggggacagggtttcctggggtctcctgggtcttcctcgcgcacccccaggaggtgttgcagggggaggggagcgcgggtgggtgggaccgggccgggtgggggaggggtgagggcgaggaggaggaggaggaggaggcggcggcggaggagtggtgtgtgtgcgagcgtgtgtggctgggggaagccattgcctgtttaatagttgctgttgctgcacttccgcttctctcccagcgagagagagacacgagtggccaggcccagccgcagccgcagcagcagccgccgcggcggcacggaggagccagacacaaagagaggtacggggatccccccagcggcccgccgccccccggccgcgccgccgggcctcggggacacccctcgccgcctcccccgactcgcgccgccggggccgccgggccgcagggcacggggccggcgcggggggggagcggagaggggctggggagccccaggggtccggggcccgcccgcgggggatgggcagggaccccgggccgcgtggggtgcgggggccgcccgcattgaggacgggggtcattgtggctcgaactgtcagcgctgccccaagagccccccactggccaccgaggggcccgggagcgggggtgggagggagttgggggagccccgttttccccaggggcgggggttcgcggggattaacccctccggggcggaagggctcattgttatgtcttcgctgcggaggccgacccccccattccccgccgcagcccctatccccctacaggagtggcgatcgggcgtgtgctccggacccccgcccggccgcatagctgtgagcagggcggccagaggcaggcaggccgggaggggcgtcggggcgcggcgcgggggggcctcgggcctcgtcgcccctgccccccgccggcctctcccttcccccacccgggcacccgctccccgcctccgtccccctgtttcggcttcctctcttactccttcccgcccctcctctcttcccgacctcgccaaactccgctcgtggccccacagtctcacccgggccaccggcccctcacgacccccggaaagcggacaaaaacagccccgaggccggccggccgccgggaccttccctccctgccccgccgtggcgccccgcgccccccgccctgccctccttcgcctcccgggctactccctccctgcccagcggagagccccggggggcgagggaggggcctctctcctagctccagaccgttttcccacagcgttccccacttggggccaaaaataaacaagccgcgtccgatttgcaaaagccttaatgggcctgcagactttgaaaagcgagtggagggcggtgggcggccgcgtgcgcccctggtcaatgccctcctgacagcacccgagttccttatttacactggctgcatggtttgtgtgtttctgttttgtttctctccccctgcaggggctgtttgcggggtggggtggggggttcgctatgtcggatgacgattcgagggccagcaccagctcctcctcatcttcgtcttcc

SEQ ID NO: 39714 - DNA, 1542 bp, Homo sapiens
agaaaacctttggaaaggaaaacgtatcctttgtgaattagattgctctgtgtgtgtgtttaaaatttttttaactacagtgctgcctcggtgagatttttaagttgtaacatagccccattgggctttatatgataggaggaggaaaggttataaaattaggcaccgtttagaaggtggaagaagcttagaggccctaaactgtcgtattaattgatgctctaagtgcctaggtaagcaaaagacaaaggccagggcttggtgtgaactgcctggtggcttcggcctatgagtgggggatggggccctttgtgaagtcgagggttggtgcggagggagaaaactgcaggtctccagtctatccccagtgtgagctagagagcggaccatgaaggaagtgggcagaccccgggaagttagaggacgcccggggaaaagcaggtccggggaggtgggccgagagtcccggccagcgtgcggggcggaggcagggtccggtgcacctgtgcggccgcgggccggccacttggggtctgtggtgcccgagtggcgggcgggggtgttcgcgccctgctttcgcgcgcggtctcgggccaaggttctgggcgccgggagaggagagctggggcggcgcggagcagcccccgtgcgggcaccctgttcccctcccccgcccgcaacttcaccggcgcggcgcgagccgtcgggggcgcgcgcggggtgggggcggcgtggccgggcggtggcagcccaccgctggggagcgacctgcggtctgggcctcccgggcaccccgccacggctggcaggtcactcgggcccgaggggcctcgtggggagcggccatgttggcttcgtcactgaggactccgggcgggtcgggtgttgagcgaggcctcggaccttcggcctgtcgggggcgccctgccggggtgggcatgggggcatctgaggggtgaaaggggcaagggaggctggaggctggcgtccttcccacgcaccgatggctgtgatctctccgtgctggggagaggtgcaggggagggactgaggaaaccggtcggcaagtgagaaactttaaaattaggtcctacatggaaaacaccgaggaatagaactgccctggtgtgcgaggcaaggttggaagccaaactttgcagatgagaacaggagattccaggctgcctcacttcctccgtgaaaagtttttttcctaaactagggacctgaagttcttgatgtgtagttcctctttgcccagtagaatccagtgatcgcgcttaggtttatctgcagacctgcacgctacaggtgggaggcttccgcgccttaatgcttcttgtgtttgtctttcccatttctcccactccagaattcagaaggagctggcggacatcactttagaccctccacctaattgcaggtgagttgcttttcggattttttccatttttaaaattcttctaacctttgtcttgggtttttctttttattatatactttttctttgattctttggctaatgcttgttatggcactaac

SEQ ID NO: 39715 - DNA, 627 bp, Homo sapiens
cccaggggatggatgccgatgttgcttgtccagaggcggcactttgaatatcagtctacagaacattcagggtatatgcaaattaacttttaataataacaacagcaaccatatatattgatccttttttggtgtaccaggcacagaaaaataaaataagactgggcactggagtctaacagctgggattcagattgaagctcttccctttactagcttaaccctgagcaaattttctctaaggcagggtttctcagccttggcactgttgacattgtaggctgagatcattctttgtgggggctgtctggtgcattgtaggatgtttagcaacatccctggcctctatccaccagatgccattagcacctccctcccgtttgtggcattcagaatgactgcaagcattgccaaacgtcagggggtggggtaggaggcaaaattacttccagttgagaaccactgctctaagactactgttgaaatatgggtgtttgggggggtttgtgatatgaatgatgtactttatgtaagtgacatagaagcttatcatgaagcttccacagacaaaaggagaataggcatgcagtagctaataagcagtccgtgccacatctggctttctga

SEQ ID NO: 39716 - DNA, 3557 bp, Homo sapiens
gagcaggactacgcccataggcagcgtacctacagtagcacattcaactttttagtcatcctcacctttgaaatacatacagggctgcactacttaccattttcatcactactgaagtggtctgggtgaggcaccatgttctctcacctggtctctcaaagatatcgtaatcccccaaacctgtgaatatgtttactttacatactcatacaagaattttgcgggggtgattaaattaagaacttccatacgaagatattatcctgaattatctaggtgggcccagtgtaatcacaagtgtctttataagagacacacaggagtgctggagaggacagaaggtgtaattggaagatgctcctttgctggctgtgaagatgaaggaagcagtcaggagccaaggaattcaggcaggcttcataaggtggaaaagccaaggaaataaatgtactctcccctagtacctccagaaggaacacagccctactgactttggttttagcttggtgatatttacagatttacagacctagtctgatgtacaaactaaaagacggtaaatttgtattattaaccaacaaagttgctgaaatttgttacaggagcaatggaagactaacacaatttcctaagcagtctctctgcttccattttttctctccttttagcctcaaaaggagcaatccgagttatctttttaaaatgtacgccatatgaagtcatccttctgttcaaaatctgccaatgaaatccaaagtccatgtgagaaccttcacctctccgacgtcatttcccactttcccctactgtgaatttcagccacactgcttccctgctgttcctctattaatcttgcatgctccagtcatggctcttctccctctgcctgaatcagacccctactcttactcccagactcctatccttgaagtcctttcttaaatgttaccttctctcaaagacttaacctggacactccattccaaattgcaaccctcagccgctaacactccctcatcacttccctccccttatcttttttccttagcatttaccaccaaacccaaaacacagcttacttctgcttactgcccatttccaagaaggccaaaaattctgcgttgtttcctgctgcatccccagcaactatgcctggcacatattagacacttaataaatatttgttgaatcaatcaatgaaccagatagagactcttaaaaacgtaaagctgtgatttaaaaagaaagaaagaaaaatatgatgtgggaaaaaagataatcaaaaccgctacgattaagagataatgattctcttaagcctttgccacatctgaacgcataatctggaaggaaattaaagccacatgacttaaattaaagccaagtgaaaatattctggagaaacaaagtaagccagtaacctatttctcaatttaaaaaaaaacccgcaacgcaaaatgccagcattttctcggcatttcttctctaaaacattcacacctgccaaacaggtcttggcaaataaacattctgctcttctgaaaaactgtggttctcatgttagcaaatttgggacgaaatccgtatgcagaaaaagcgccgggccgcccgcaatccacccactccatgacccttttttaggacaaaatccctgggcgctggggcctgctggaggagcttcacgcagtctggagctgaagggacacagcgagcgccccgacccgcgacgccccgactccgcgaaggcctccctgggaggctggggaagcgtcgggggatctctcagcgcagctctggggcccagatttctgcgcccgtcgtgcggtggccagagagggacagcgcagcgcggagacgcggagacgcagagactccgcagggggagagcccgcggtgcgtgaaacaaacctgttctctcctcagacctcaaagacagcggctccaccgcggtacgcggccaccggctttggagcctggaccccaacttgcctcctctcgcggagagacagtcgccgacgctcgcttagccgccgagacctcgccgccaactctctcacctctcgagacgcccaggccgctcaggctcgaatcttgcggagcagggggcgggacaatagcggccgcggcgccccactcggcagaactccgccaccaggcgcgatgccggaactacatgtcccatgacgctctgggaggccgcagctttccaccggaaagagggtggctgaggtgggggaggagcccaaaaggcattgtgggagtacagctctttcctttccgtctggcggcagccatcaggtaggctgcgttgaggatctttgctcttccatccgcctttgatcgtcttcctcttcagccatccaggtccggggaccctgcgtcctcggagataggtctccctcctgtgcggccagagtttggtcaggatgcgggacagcaaaggggtggagaggcggcccccggggcgggttgagcgaagatgtgatggcggcgcgaattcgagctgggcccggatcctggaggaggcgtggggctgacgaatggggcgcccgggacaaggcagcctaaagtgaggctgctggttgggtggggtagatgcattttcctcgagagttaatcctcggtggccgcagcagtaccttgtcctgtgatgtcagcggcatctcctttcaggtcctccttggggacgccgcctgccgcagccacccgcccccttggtgctcagttctggttctgttaattcgccccaccaaaacgtgccgagcaccgctctgtgctggggttgcggaagtgactgaacgcggctccgtgggcgcagtggtgggggttgggctagctgtccccggcagttggtgcagagccattttcattcccggcggtttccttgtttttgttggggaactaagatggacggatacagtcgtcttattgtacttaaagcggatgatatttaatacacagtttgatttcacaggtaagccaagatgggtgcatacaagtacatccaggagctatggagaaagaagcagtctgatgtcatgcgctttcttctgagggtccgctgctggcagtaccgccagctctctgctctccacagggctccccgccccacccggcctgataaagcgcgccgactgggctacaaggccaagcaaggtacgtgatcgactgcgtggatgcttggataaaattatattcgagaaaagttggaaaccagctgttaggaagacactgctgcctcagtgtctttcttcgcatagggctttggcagaaaaaagctagcaacactggtcagttactgtatgcactgttgtctaaagtggcaagtgtgtcaaaggttacaaatctgaatgagttcagactaaagcaaaataaacagtgtgcctccctgtgtgagtagcctaaggtgcattgaaaaagactgggatgtgttttatttttttctattagatagcattaacttactgttgaagtatttttggtggagtattagtgacaagccattgagtcttaagccttacggcttcctataaaatcactaatttcgtgtgtgtttg

SEQ ID NO: 39717 - DNA, 601 bp, Homo sapiens
gcttgtgacattaaacctcataatcaaagcattcaaacttaacgaaatgctgtagctggaatgcacacttcagctcactctgaaatcctggcaaacggcaactcactcctccaaaactgatgaaagcatttgatttaattggcatgctgtgaacatctgaactcatttattggcaattctcattgtcatttggagagaagttcattatttggcagtcctagttagttagagacattaactgatggatgatgtaattatcagtcatcaaatcacgaaacttgtttctatgagagtgtaaacatactatttagcttcccgaggttgattattaactaagctaggatgttttgcttatcaaaaagaaagattcaaaaaatgatcatccaaggctgggcatggtggctcatacctgtaatcctagaaatttgggaggccaaagtgggaggactgcttgagcccaggagttccagaccagcctgggcaacatggtgagatcctgtctctacaaaagattaaacaattagcctggtctggtggtgcatgccagtagtaccagatatgcaggaggctgaggtggaagaattgcttgagcctgggaagt

SEQ ID NO: 39718 - DNA, 3522 bp, Homo sapiens
taccatatcatctattcatgcctctatcagcccatcttacttcagtaatgcgtttaaattgcgggcatcaatgcactttcctcagaattcacctcagcacgcatacaatttatgtctagcttttttcttttgatctaaaatttacattcaaggtgaaacgcccagatcttgactgcacattagctgagttcggacacacgcgtacacccgtctaaaatctgagatgcaaaaaagcggcataatcaaacgggctgctggatgtaggaatctggagattagaagagaggtcttggcttgaaatataaatctgggaatcacaagaacataggtctacttaagctatgagattggataaaatcacctagagggtgcagagggaaagggaagggtctgtgccctcagagaccagcgtttggaggtcggtcgggtgggagcggggggtgggggtggggggcgcaagggttgagcaagcccgaaccagccggcccagccggggtcctgagaatcacccttgctcggcgccaagccaccgctttgacctaagagccaccaggttggggggcagggcgtggagaggactcccggccagaggcgggaaaggcagccgggaggagaggaaagaggaggaggaggggaggaatatgcggcggagggaaacggagaagaggtttacggcacggaggggaaaaacgaaggaagaggaggggctcggcaaggagaaggaaggggagaagggggaagcgcaggagaaaagggtagccggggagccgggaagcgggcgggagggaggggagcggcggggcggaggtcgccgcagcggccggccgagggcgggcggagggagggggtgtgtgcgcgggtcacatggtcgcggctgccctccccgtcagccgccctcgccgccgcggtgcgctggctgcaggaagccgccgcgccgccgcttttgttgtcagggacccagcgaggagcgccgctcgccggccgccgccaccctctctcgctgcagcctgctgtgcgctgcacggcctggggcccgggagccccgcccgctctgcccatgagggggccccgcgaccaccgctgcttccagcccggggcggcgcggcgctgaggcggcggcggcggcgctgccccctctgcgggaagcgggcggccccggccgcctccgcgagggcaccatggaggtgaatgcaggtaagaaccggactgcggcgggtgggggatggccggagggagcgctcagagcccgcggggcactttggggggcggcggcagggggtgtccccatggccggtggggcggggtgggctgctgcgcgccgcgtgtccgcctctggctcggttcccatcgccccccgggccgcccggcgcccgccctcttgtctccctgcaaagccgcagcgcggcctgccggcgcccggcccggcccccccctcacatggcccggccgcgcgagccacgtgcgcgctgtgtttacgttcggcggcgcgcgggcgccggttggctgggcgggcgcgtgacgcggcattacataatgggcgctgaggcggcggcggcgggcggggacacgtgaggccgctcggctccctgacccacattccccggggccgcagggacacgtgggggcgggggcgcgcgcgcgcgcgctggctgggagcgccgcagcctcccgggaggctccgcccctttggaagcctcggggcagtgacgtcgccgcgattccctcctcccccgcggggttgcacactgcggaggaggccgcgcgtgcgcgcccgctgagcccccgcggcggggcgtccccgaagcgggcgctgacaccgcagtgcaccggacgccgcacgctcttttcgcgaggtgaccccaaggcgcggaccccgcgcaaaccaaacgaaccggcgcctggggaggctggtagctgcataccttgcagattccgaggaggaagtgcaggacgagggcgtgctgcaggccggaggaggcgcctcggggaaggcgtggggctttcccgaagggatacgctcgaaggagctctgaggtgcttcgatcccgagcgactccccgcagactgggtagcaccgcccctgttaggatgccgtctgtttacaaaaaaaaccgtttgctctaggacgcgacctgtctcatacacacacagtcttaaaaactgcttccagatcccttcgggctggagttttccagtaaacgggtcacacccgcagctgagcgtgcagctcacgtatggtcaggatgactcaggtgatcataggtgactccaacaccatatgtaagactggacattcttcatttaaattaaaaaaaaattaacctgtgggtcgctgacttttcctgaatctgatcaagagaatttggctttataaatatttttcttgtcacattttgttacattgcaacggaacaacagggtgcccttccctccttttgtctgccccaaatgatgaggtagatctgaagtgagtgaggttatggaaacagccagcttttgttttattttttgagttgcaatgcgcctctaagaatcttgcctcgataacaaatgtattgtgaacttttcaccaaaagtaaaaataaagtcactttctaattttatttacgtatttttagaatttacttattttttttaacctgttgtctcacaaaaatctggatctaattgtgttttgattacctaatcggcctacttagcctttgagggtatttttaaaattttatgagtttatcatagaattaaacttctacatgttagaattcagaggtgatcagggtgaacctcttctaacccaccctttagcatgaattctaatagctttagtaacctcataagggctggctcaattaggaagtttttctctggtttgagccctcttccaatacttcgctgatctaaatcttgcctcgtggagcaaggcacattataaaaattcctccggatgaatgttgaccatccccttcccccttcagttcttccatttacagttctcatctctttgtccttgcccagcattgttttttctgatcactcatcatccttgttgccgtttgggatggagcacccagaagtgaacaggctcttgtggaagtggttggatgattatcaagttccaagttgccctctttgtcttgaatcctgttgcaaatgaattccctggcaggcttagtatttttggcatgttgctttgctgactcacagtaaccttgcagtcaactaggacctttcacgtgaactattatgaagttagatttcattcattgtgcagataattgcatgacttgaagtgtaggaatttacaatgaccattcttaaaatttctctcgttcatttggccttaagttcaaagctgttacaagctgttacccaccatgtttacagtttctgctatctatcagtaagcaggaggtctaataagaattgccttaaactggccgggcacagtggctcacgcctgtaatcccagcactttgggaggctgagccgggcggatcccctgaggtaaggagttcgagacca

SEQ ID NO: 39719 - DNA, 401 bp, Homo sapiens
tgcaacctccacctcttgggttcaagcaattctcatgcctcaacctcccaagtagttgggattacaggcatgcatcaccatgcctggctaatttttgtattttcagtagagacaggtttcaccacgttggccaggctggtcttgaattcctggcctcaagtgattcacccacctcggcctcccaaagtgctgggattacaggcatgagtcaccacgcctggccaagtggctgccttaatgaaggaaaaatctgtgggcattttggttctgatttcatgatattctctatggttttgtaatcatcccattcctagattttgtatggatttagtgaaaatttaaaggctgattttactaatagaatatacaggtgtgtttcatcatctttttggtgttttttt

SEQ ID NO: 39720 - DNA, 550 bp, Homo sapiens
gccattgaattatgtgggtaacttgggtaagtaactttactcttttgggtcttggattccttcctcatcctgtcaaaggaaggggttgtaccatgtgagcctagtgtggtgtctggcatagaagagctactcagtcactgtttgaatgagtgagcaagatttttgagtttctaatgtttatttatatgagtcatttatgatgtttcccaatgcccctgccatcttgcattaatattacagttatttctgacagtacccattaaggcagagattgttactcccaataacaaatggaaattgaggtactttcctgggtatgtctaagtaagtgccagctatttttaggcatcattttattgtataacatttgggaattttttagtatttggttatgactttgtttcccatttgcttcctactgtgtaaagggcactgtgctaggcattgtgagagttataagttacggcctctgattatgtagctaaaccataaattagtagctcttgaaagagaacaagttcttggccaggcgccaggggtgcacgcctgt

SEQ ID NO: 39721 - DNA, 888 bp, Homo sapiens
tggaaggccattctctagggcaaaatcccttttataatagccccaggctcatgttcctgctgcaggttccacatctgatccccaggatcccatgtctttgatatgaggaaagtttaattactacccagctatggctctttagtctgtagccaaagaatgctctagttttctcaggcagactctgaaccatgtcaaagtgtctgagcagtgcctacaaaggccctgttactgggttaggctgaagggaaagtttctcttataccttcccttagatggctggctactactcacagcaaggcttcttcgaaatacattctcacaaatttttctcagatttcaactctcttgagtcttttatgtccttgaactgaatgaggatccccaagaggtgtataactgattctccagcatttcacttgaaaatttgcatttcctatcagctaaattaatttgtgtttgtatttagctggtctgtctcacacatctctgttggtatctagtttctctcatatcttggggcctcaatcaaaacttctaatttaacatctggtttcacatgccttcctctgccatgctggtttgaactctgactcatctttgagtcatccttctttcttaactcctacatccagttagttaataaattctactgatttttatgtttcaaaccctccttttctctctcactgccagcactctgcttcagactttcattatcccttgtacattggcttagtggcaaggtgatggtatgactaggtgagtaagtgtttgtgctctggatccagtttggctgggtttgaatccagctacaccacgtgtgtgtgtgtgtgtgtgtgtgtgtgtgtgtgtgtgtgagggagatagagagagagagagacggagttt

SEQ ID NO: 39722 - DNA, 1531 bp, Homo sapiens
ctgggctcatgtgctcttcttgccttggccttccaaagtgttgggattacaggtgtgagccaccatacccaccctaataatgactttataatttggcttcatcccacacatattcccactgctccctgaaatgctcccttactgttttgttgggaatcttgttctgatcttcagaatataaacactcttggctctagtgaataatcattacagatgatatgacaacctgggtggcttttaagtcatatatggatgaattttgaatcagatgctctctcaaggggattcttcttccagaatccacagtctcgactctgccttcatgcactcgtagcccagaatccctgcaggggctggtgtgcgtttcccatgcttgctgatcctgcatatatactttgtagaaaccacttacattacaattgctcctttagcttctgtgaattaaagtagttttccattttggtgcttcctcctagattatgacatatgttgaatttaggtcagttaaagggctcatgggaagagtttttgctaggactctaatttgtttactcaagatggaatggaagacctcttggcacatgtcccatgaagctgactggccagcagtagctgtattgagcaaaaagtccattcaggttctggagtggagactggatccagttgcttatcgggagctctgggaagggatggggcccagtctattattgtcaccagaaaagaagcatacgaactgcttacttttgacagttgcttaggaatattcaacgcaagacctttattaatataaagcttccctgtgtttcttcctctctggtcactgaatctgtggatgatgcaatgacaggacgccgacattctaaaacttattaactctgggcggatgcgtgctctagaatgagagacagagttagtatgctgctagataggcatgtgttgatcacaggtagaaagggctgccaatggaacagcaagccaaggccgatggtaatgagtcaggggtttccgtttctcatctcttcctctgaagggctcacctctccaggagggagggctcacctctcgcccaggcaactgtgctggcctccagctgggtcccccgactccaggctgtcccccttggatccgtcttctctgttcagagtctcttatctctgtgctgatagtagacctggtctactccccattttgtgttgcttccaagctcttgagggagggctctttcatgcagaggactgggtagttgctctgtgaaatgtgtggaacaaatgaataaatgaatgagaagagaaggggataattttgctgggcaacaccctccatcagtggttcttggtctggggccacatctgagctatctgtggatgttttcaataatatccaagtcaggactccactgcagaccaattgcttcaggaactagagtgaggcgaggacagctgtgtgtttgaaacactccagctgattcgaatgtgcatctctgtgtggaacagctgccctagattggtgggtctcaaacttgattgcacat

SEQ ID NO: 39723 - DNA, 425 bp, Homo sapiens
aaaaattacgagcttattttagaacctgatgccatagccgttggaaagggcaaagagattcaaatgtcgatcatcactctccatttgaggaggaactgtggcttggttattcacttaaattcagttcatgaaaaaggtttagccttacaaatgctggctacatttcaaaaactgtaagactgatttcataatttatgactcatgcagcaaaaggtcaatatgacacgaataggttagagttccatagaataaaaaggtatcactgacaatgacatgcttcaagggtgctcagcggttccttggaggctgagtctgtggggggcttagtgtcgaggaggggccagggcttgtacccctgttcatggaggagcaacaagaacggcgttgctggcacagagcgaaggcctggcagtccaccccaggcc

SEQ ID NO: 39724 - DNA, 1594 bp, Homo sapiens
tagatgttttcccaggtgacctcagtttgaaatgacatttacctcattcaaacacacatggtggcccatgactatgagtcatatggtatttaggcatttattactatcactttttattatagttatgtaagtacacaccaaagatatgaacttaagggggtagagaataagtcttacttgtctttgcctactgtgtacaaggcattgggccaagttgtggaggacagaatgcttattggttgagtgagtgaatgaatgtatacttataccaatatttattgagcaggtactgtgggccaggcctagttttagatgctgaggttacagcaatgaacagtgtatcctcaaggaccttgcattgtagtgaggggagatagacaataaataagaaacatgtattcgtggaagaatttgtgataagtctggaggtgacatgataatacatggggaggcaggagaaaggaaggtcagccaaggcccctttgagaagcaatgtgtggactttgacttgaggaatgtcaaggaagtagctttccttagggccagaggaagaacactcaaggcagagaggaaagccagtgcaaagtcccaaagccagaaaggaggcccgtgtggttagagcccagtgatggcatgaaatgaggaagcagaggtaggcagggggatccgtgatgctaggcattgtagaccatagaaaggagatgggcttattctaaatgcaatggggcatctactgaagggctgtaaacagggcatagacatgacacgatggttactgcatggagaagatatgcggggagtcaaaggaaaaaacaggcaggaaacagctgtggtttgggcaggctgaagtgcactatggggatggcagtagagatggagaggcctagagaattacagttgtatattggcagctgaaaacaagggccaaaaatggactggctgtggggtaaggaatccagaatgacttcttggggtagtgggggtggagggtgcaaaaggagagattcaggtgtgtgttcaggggtgacctcagcccctgctcagcacgggtgaggctggtcttatgcaaatcgtggccaactggctttctgctttgactatttcattagtattgttcaaggtgagtaggaaacgctgccagctgacctctgctgagtccttggctcagagccaaggacttcttggcttgaaaaggtaactctctgacacatgcagaatggagtggggccagatgggactctcacttcttcacttgttcataggatgtcttcttgtacctttgccaggctagacaggaagacctgggcagataataattcaaggtccttgggccatgggatatgactacagcctcacccttttcctgggatgagcaggaataagatggtggcagtgcggggtgtgggggtggtaaggatagtgcatgtagtaaccacttacgtggttgctaacaatatgccaggcagtgttaacccacttgtatctattgctttatgccattcagcaagggcataaggcaactgagcctgaaataacttgcccaaagaagtcacacttaaaaaagcaacaaaggcaagcatggaaccttggctgt

SEQ ID NO: 39725 - DNA, 1330 bp, Homo sapiens
ttgattggattgtcaaagtcatgtgagcgcttacaaatgaggaaaatatgaatgagccctgttaagtcattttggttcagttactaaagggaaaggaggaatggtaataataccctcaaccccttcccaaatgcttccggtgtgccagggactgttgtatttgatgaacattatctaatttaatcttgaaaacaactctacaaggtaggcaatgatttcacagaaggaaaatctcagcttaattccaaaggtcacacagctagtaagtgacagatctgggactcgaacagaagtttttctgattagaaagcctgagctcttagaatccctcacaagcaagtaaagggcactcaaaatttatttccatacagtctagattaacactgagtttttaaacctcatagacactagtatcttaaacttctcaatagaacactgaaatagataatcaataataagtttgtcatagtggcatatctaagtatttggctgtaagtcaatcatattcacatatccctatcaggcatattgttggcaagggctaaaggcctttaagagataaagataaagaaaatactcagccagaggtggggattaacccaggatttccagcctaacactctaacataaccctcttcctttttaaagattctccattccttcttctttaatgggcaaaccagaacatttcacagatttttttttctcagtgaaagaactctatttctcacataaaatgtgagtcatgattacttctttcatcaggaaaaatcctcactgtattttcttttttctttcttcattttttatctttctttttctttttaatttttaactaatagttggaatctctcactgatgtgcaaaaaatttatgccagtagaatcattaatactgatgcctggcaaaagggaggccacacattctgaatgacatgattcttatttttatgattagattaattaaagtgactggtgtaaatccctcgcacagtgtggggagaagagaccccaagggctaatctcgccaccatatgctgtagcactttgaaaactgggtaggacgacttcagctcggaatgtctttattgctaaaaatataacaaacaaccaactgcaggatgactcatgcaatagcactcaactttgcattcttcagaaatttctgaacacgatgttttctgccagcgccccatctccaaaaatgtccataaaataaattcctgtctttgctcttgaaaaaatattaggactagtccctgaggctctaccccatgtgaacactgtgtatagaatgataccttatcaaggtaaatggaccagacctctca

SEQ ID NO: 39726 - DNA, 720 bp, Homo sapiens
ctgaaaatgggtttggatagcctgaagactcctattttcctgggaaaaagatatcctcaagggaagtaaggacactgaaagagatggtttaaggcaactgatttcccaacttatcctggaactggtcttatgttttcatgatgatcatagcttgttttagggggctggtaatgatttaatatatttttccttgtcttccccacaagggaaaatatgattatcatattggagggccactttaaaaatggagtgtagattcatctatttgatttctttgtggtcagttaatctctgactacattctttgttggagagaattattgatttagccaaggttaaatagctggtaagcgtcaaagccaagaaccaatggtcatctgttctaaacattctcctatgtgtttactaagtgctgggcaaaatccctaagatacgatgcagcaggccagctgtgtaaggtgaggcctttggggatatcttgatagcctatgatcattacgtcattcacacatttgtctagatttggctggaaactctttgtagtttaaacctacgctcagggtcagcccttgacaaacagtgagataggtgacatttgtctttagagccttgacaatgaagtgagtgctgctcacaacctgacaagctgcacagtattacttgttacttggcagtcctgctccttattattattcttttccttctctcttatcccttgct

SEQ ID NO: 39727 - DNA, 687 bp, Homo sapiens
tgatgcaaaagcaattgcagtttttgccattacttctaattgcttttgtttttgcaccaacctaatacttgcctgtctcagtattcaaggtcacaaggctagaccagtgccagagagaacacctccactccttcttgtagaactccagcacgcttgccctgaccacacacctttgtccccttgtgtttcctttctctgtatcgaaactacagcactgaaggggcatctgtaaaaattacctcatgaaaaatctttccacgtagacctggtgagtcattgtttatccaacctgtgcactgaatcaaaacatgcttcccctcacagctcatcatcaaccttttgtggccttttcaaactgtcttccttagtttttcttctccttggctctctcaggaggaagggtagcagagtgtcatgcagcctgatgtatcagatgataagatttaacagggctcatctattaatacttcagcaggtgcttcatgggcagcccagaaaagccatgactgactgggttgggggctgtgggttggggaaccttcattagcaattctcttggttcattttaaaaggtcagacccatgagtgtgacgttattacataccctagcccaagaccattaaaactgggaaggccttcagagaaggacatatccatcttctcacctagcattgagcaaacgtgact

SEQ ID NO: 39728 - DNA, 2541 bp, Homo sapiens
agcgagatctcttctctacaaataataattttaaaaattagccagatgtggtggcccgcacttgtggtctcagctgctctcaaggctgaggtgggagtatcactagagcccaggaggttgaggcaacagtgagtagtgatcgcaccactgcactctagtctgggtgacagagtaagactctctctcaaaacaacaacaacaacaacaacaacaaacaaaaacaaacaaacaaacaaaaaaaccaaccaaaaaccctctcaaagccccccagaaaaccaaataaaatttccctatataccatgtttgttaagtgcctgcaggattttgtcttagttctgaaaaacattgccaacaatttgtaatgcactcacatgttcccctcacttaaaggatactgatactaccttacccttatttgggggtacatcttttccctggcaaggaatttttgctcattgactcacacttttctcaaaaccatagcatgtaagtcaagacaagaggacagaactaattcatttctggtaggattaggtcacaattacactagtttcttttttgacatcatatttcacctagctgtagtcacttttgttgtgaccatataaatcatttcagatccttagcactaagcaatttccttttcaaacttcaaatattcattcgcaggattattttactcttcctatggtctttcctcctattaaagttcattgacccttcacctatttttagaccctctggatccaaaatagcaaagaaaattaaatattcagttttttaaaaaacaaatatcaatactaagtacttgttggttttgactcagagtttcagatacctcagtatatgacatcatcacctggagctcccttacccaaattctgtttacaatggaagaatccgtgtgaagcattcaaatgtacacgtgctttttctaatagaaagaatgtaacaggttgctatgaattaaacacacacacacacacacccacacacaccacaactccactctttctatccaggacctgccaacaataattttagtatttgcaggaggctgttaacttgcaaatctttcatttatttaagaaatactgagtagctacaatgtgtcaggcactctggcacacctttaagtgcttggggtaattcagtggacaatatagatttccctgcttcatagagcttacattctaacaggtgtccatttggaaatctctccaataagattaaagtggaatatgacattaattaatatctcttatcatctaccacagggttatggttataactgaataattagaataaattgtgcctgtcagaaagagtggtccctgctccacaacaaaatgagaagaaaaagggcaatgatatatatgcacataattccttagctttaatctcaaaatcctaaagcttgtgaagacagaaagttttttcataacttagttggtggcagaagctgacctgatttcatatgagtgtttcatagtctttattgatccaacttagtgtaaatatttgtatgcttcactgcagaaatattcatgtgtttgcaatggggcattcccccagatgtcactggggtagagttctacccattgcggtagagcacaatactatcttcccgaacccccccacccctcaaaaacccaagcaaacaaaactgaattatttctggcaaggattttggataaggaactatgggcctgtatgtatgtatctttttgaatctaccaaccatattttctcagaaaggcctatcctttatttttcttgctttgggggtaggaaaatattatttctttatgttgtgatagcataaatattggtttgttctgttttcagataactttatttagcaaaatagaaagattgtcaatcctctattttttttcttaacattatgctcacctgtgaaatgtgaaactcaggcgatactgacctgatctaacaaacttgttgcctagacattcatattctagacatctgccctattatttattatacttctttacaatgatccacttaaaaaactgaactattatatcactaccataaatggaaagcctgtatcacttgccatgaatagcatctgatggcacttacacaggcctaataatggtatatactatattgaaatactgtttatatggacttaaattatagaacgttcagaacagaaaacaaaaaataagcaattagggttacctagggaagcaaaatagtgctattttgaagagcctatagattcatttgtgttctctttctttgtgggttatatgcatgcacagtattaccaaatattaaaaaattatctcaagaagccaggaatgagtatgtgtctaaacactttttatagcctttgtaatgaacaattttggtgactttcactcctttccattttcctttccttctttcccttctctctttcttgtctatttctttttttaaattatcataatcaaaagcaattataccttatatatgacatacaaagcagctcaatttcacaggtgtctgcctagaaaaagtgaaggg

SEQ ID NO: 39729 - DNA, 1117 bp, Homo sapiens
cgatgctgtatcctatacaatatgcaaaaaatttgaaaagatcaagaactctatctgatctctgtttttcacagattaccaagtgtaactgcatttcccccacaattttttaaaacagtttctgtggtcataaaaactttctttttttttcctatttgttaacagaattggctgaaattgtggtatttagaaatttatcatcagtacatctgaattcttaacagaaattccaggaagccttgaggcttctggggaagtatgcttttttatttatttatttatttatttttttttttttagcaaacataccagagtttatacctttaaatgcatgtggttttctctggaggaggaagcagtgtactttttcagtgtgttcctattgctgaaaatactccaggggaattacaggaaagaggagcaggacagctttgagttgcacatcccaacactgactctcaattcctagactaaatggcataaaatttttctcacttactcagcaatgactcttcaaaagccaccgattacatctctagatctgtccagccaacacaaaacaatattttccctatgcctgagggagggcagaacactttgctactcctggaatttagcatatactcacaggcagtgccacctcctcacctgaggctgagcaaccagagacccagggtggctggttacacgtgactttgctcagttacaccaggaattaaggacaaagttgatacactattccaggtgttgcgactcaaaagaaaggaatttttttcacttaaaccctcaaacatggattcttgcatgatctaccaaccactctggccatgataaaacctaatactcatccatccatgtagttctcgaatctctatgcatacagtatataatatccatgatacacgtgcaccacatttatttcccaactattccccaatttctgggcattcgcttggtttccagattcttctttccctccctacaacaatgatgcaataaaattcctgtacacagaatcttgcatatcaatgcttttatttttatgggctagcttccaaaagctgggtcatatatgatatctccctgtgttttttattaatagagtttgccagattgc

SEQ ID NO: 39730 - DNA, 1715 bp, Homo sapiens
agagaacatgtttctgctggtgtgtaaggcctggaagctgtctgcatgccaaggcaatgccccctaaatgaagtcttacataaacctgacaaagtgtctttagatagaagcaatctcaatgggctactacagagtcatgaaaataactgctggtcaaccaccaaaacaaaatttggctgagcacatacttctaaaagcctgaatcataggactatcatgccagtaacatttcatcataatatattttttaaatatactggtatattcttttctctcctctttccatcctttccttccttttttctcttttcccttctccctcggttccttccttccttttttcctttcagaagacattgtgctcaccctctcccccttttttcttccttctcgccctcttgctctcacccttgttcctcctcccccaccacatgctacagttcagactctacatttaattgtcaactcacctgatgcccctagagtctacacaacctacactgcaaattttcatcctctcttgaattattgcaatgttatccaaaccagatctctccagagggtggtttatcaagtctctcctctacttaacaaccctcaattacttcccaccaggtacaagctaaagtcctacttctcagcttcacatacaagacccccgctcccagccccaagtaccaccttccaccagtcctattcctaacttcagtctccacagcacaccttaaaacatcctccaccccccagaacacttgacacctcccaaacaagctatgccttatcacaactcagaactgccctgtctgttcactccttttcgtgaaaggctgagcccgtatttcaggcagaagcccttccctaacttcctcaggcaaagttagtgactttcctcctcaggttaacattgcattacaaacatttattactatctgtctccccaaatcggttaagagtttctggggcaaaggtgtcactgactcacccaccaggcagttgctcaacaaaggtttgctgaatgaactttgttcctttgagtttatcctgtatattttataagtaaaaagaagccgcatagtatggggtctgtaagtatgagtttgtgggttcaaattccacctgtgacttgagcaggttatttaatatcttggtgcctcagtttccccatatgtggaaactttccaactctagggtgcttgtgagaagtaaacaagttgctacatagatggaatactgcatggaaaatcgaaagaggtgcatgctacctgagtgtttgttaaatataatggaggtaattctgataccccatggctgcctctgttgtgctcacggcagaaggttcccaacaccatcaggactcgcttgatttcaacgagcagatcttttattagaaatgtaagtgtctgccttactcctccaataaaaagagagatgctaacaccaagaacattactcaatcccataagaaaactaaaagtgggcttatgccacactcagagccattgcactggctagggtgttgggtctggaaggcatacaaaacacaacacaacacaacaaaacaaaacaaaaacctagttaagaaactacaattcaattcttagactaccatatatgggaaaattcacattggttctaaactgttaaatagaaaatatgtctatattcacaaaaagagatggaaagaagtctaacttcagccaggttcagtggctcat

SEQ ID NO: 39731 - DNA, 912 bp, Homo sapiens
tcactccctcactagacagtgagtctttcaaaaaagagggggactgtgtctatttccctgttgctttctcaatgcccagcacagtgcctggaacaaagtatgtgcccaataaatgctcactggatattattgaacagacaggattccctgtgtatggagaggcaaattcattgccaaatgcctatggtagcaatgttgggtcctcccctgtgcattgtttatcaaggccatgccatggggataccacactagggatgtgggtgaggaattttcacatctgactaggctgagatgattgtacaattacacatcacttctctctagaaagagaaatagttaggattccttaaaagggttaggaattcctcaaaaaccattgcacatgcagtagcctgaaccaagaatttaaaaacttctacatgacattcaacgtttatgactcacccattttaggtgaaaatgcaaaggagtaggcatattaaagccacaatgagagactattacatacccattataatgactaaaatttaaaaagactaacattatcaagtattgtagaagatatggagcaactgaactctcttacactgttgggggcactgtaaatttctataaccactttgcaaagctgtttgaaagtttttaataaagttaaacatatatctaccctatagcctagcaaatcttcccctaggtttatatccaagagaaatggatatgtccaccaaaagacagtcccaaactggaaacaatccagttttctgttacacaagaaaatgaataaacatactgtggtatatccatgtactcaatactactctgcaataaaaaagaataaaatactgacatatgtaacaacaggtatgaatcttacaaatgttatgttgagcaaaaaatgtcaaatacaaaaga

SEQ ID NO: 39732 - DNA, 969 bp, Homo sapiens
tcttaatcttttccagaacaagtccttaaaacacactctcaaagtcacacagtaaatcagtcagagcagagacaggagagaaaaggtcatcccaaggcacccaaggtgctgggaatgagaagcttaacacctgtaggacagacacttcctgtcccacctctgtaacaatgtctgtagtgctagacacatgagagcagatggtgaccgggactaagtgcctggagctcacctctaaccttacagggaaccctatatactcttgctttccatgaagttctcttgcatttccgacagatgggagagagtgagccagctcattctgagaaacacaaagacactttttggaagaggaacaaagggttctgcaactgacaatgaagaatggtgtgagcatctatgtgtatcactgtgataaagaagctcatggtcttgagtttcctttatctctcttttgagggtgtaaagtctttctcaggccattgacattttgtgtcaacagaaaagctagcaaacatgttggaaggaactagttcaggcatgtgagaataaaccttatctttctaacacaggaacaaatttaaccttaataaaacttttattttaaaaacattcctgttagtactattaaacaaaacttccatacaaaagttcttggatcacttttgggcaagctgccattctggcttatcttcaacaaccaaagaaacgaaaacatgttttaggccaagcaccatggtccagttcagtaatgctgtccctatgaggatagggctgtgagctagagaagagaggtgaacgtgactggtcattgctttagctagaaagggtcaaaaatgacaaggaatgtaacagggcttaatggaccagaagccaaaaatgcagtctaagatttgccttcacagatgtctacaggaacatttgttttagcagtatgaaatcagaagcagcctgcaaatttcaaaccggggt

SEQ ID NO: 39733 - DNA, 751 bp, Homo sapiens
atcatgggaaataaatcaaggcttagcaaactgtatttccttgggggtaaataagtcaaaggccaatttagatcttaaatcgcctaagacatttcatccaatgagagccaactgcaggaatttaagagtccaaagacactgtaggaaattaccactgcaaacatgtccccaggactcttaaaggcttctgcagaaagctcattaactctgtttttaatgtttcaaatactctctcatccaagaataaatcagatagaattcaactcatgccaaacacagggtgcctgagctagctaattgtgcctaaagcctcaggggaacttggtaaatattaagcaatccactggagctggagctttcagtgggtcaaagtgcttagtccacaacacattcatttgtatggtgtttggctaaaccaaaacgtgaagctcaagggatagaagattaaaatattttctctagatcaaaaaaaatttttcaaacactttttgaaggttgtctgaagaaaagatatataagcaggaaacatcttttggcaactctgtgatgagtttgacagacaagagtttcttatgtccttcatacaatttaaagacaagaaatatactagtgacttgacattttaagctcattaatttcaagtaatacacttcataatttccaaaaaaaagtcatgtctgtgtattcggctcgtggcaaaatctaaaattctatgcttggaacaaagaaattagaaaaatgtggcagtatt

SEQ ID NO: 39734 - DNA, 992 bp, Homo sapiens
ctaatgaggatattttaaatgttagaaaacttagttttgctttagagaaataccaaaaatcaaattacataattttcaataagattttagctcatagacatgtacatatctatgtgtaaatacctagctttttcatatcagaatgcccattttcaaaaatcttatgcacttatatgttacttccaaatatatacagaatatgccagaagtggattttgtataccttgtatattacaggtaaactgcttaattcaaaaacatatttctaaaccctgtgtttataagaaaaatcatttacctgccacatgtattattagcctggtcatttcttatccaggaacataatttcctgccttattcaccaacagttacttgaaagagtacactaatccagcaaagagtcactgcatcaagtttacccccctaccaacttgcaaaagcttgggagtgtgcaggaacaggcagagggcagaacaggcactccctctgcccatgtttgcaagctgacagactgcagggaggaaatgattcatgccacagaatctccagccaacttcgtgtcactggactttataaaaacaaataaactaaagcttttcaacagactggaactgcttaaacaactttagtaacatggctgctttataaggtccccgggcagttcaatctttagaaacttgggccatagataagatactttgtaaagagcaaatccattaccagcttattattgtaaactggattgtcactttgggaatcacaaagaaatatgataactgcaaacagcagcagtcaattgccatatggataatctttatcagctggaaaaaattaatttgattttcttagaaaccttaattttatttttaagagtttgaactttaaaagtttgaaaactgcatggtacaattactttatggaagtctcatcaaacagtataccttataattcttatgccttatatttccttccctattgactacttattttat

SEQ ID NO: 39735 - DNA, 537 bp, Homo sapiens
aaaagttagaaaaccccaacaaagaccaaagtctagattgttaattttcaaacaaagctctttggtgagagttactggctctcataaactgaaggagcctctggctgctcttttctcacgatctggagagataatgtatgtgcaaacacactgaaaataaagaacgtgtatgcaaactgaagtcaacgcaggccctttaaccccagtctgatcctttctgaaaggcactgggtatttcagtaccatgtagatttttctatcatatgacttcccaaacatgcagacactccaggtcctcagctgacatcttggaggccagccatgacttctggctgcctgaacaagttcacaaaggtaactactcttcccacacttgctggcatgacactatcataggccacacagacctcgatgagccctctatgaaaatagatgaagcggctgggaataacaataagcaccaggttttcagacctacaaatatgcagccacttcatactgcattccacatgaaaggctgaaaaaactgttaaagcc

SEQ ID NO: 39736 - DNA, 2456 bp, Homo sapiens
ttttcctacttctacaaaattgtttcaacagatgaccatatcccaatttaaaagaaaataaggagataatttacagaaatatagacaaattaggaaaggattgaattattcatttctcacaaaggatttacccccagattaagttatcagctcctataactcctctagaggccaaaacttgtcctcagtatttgagaaaactttctgtaaatatgaagtagctttgtagatagagccaagcttggcgagtgatcaaatttatgtgtgcttcagttgcagtatattgaaaaaaaaggttttaagtgtgtctataatggagaaagggacgtaaacaactataaacatggacacaaatatttgaagccacaattttaggcactagacaacagtccacggctgtgatccttgagaggaggaagacacaggagataagctttatgtttaccttggctttttgccttggggcacttttcaaattgcaacctggggaagtggaacccagagagcagctgggtgaagaaaactgagacctgatttttgggtggcagatatggtaggaatttgtggagcaaagtattagagaggaagctgcacaagaaaagaactctagaaacatgtatagggggtttcttgagcctttagacaaatattaagaaaatcatatgtgagacctaccccaaacagctattctgtgagcagaaaagggtgtttgagggctacaaaaggtcagatgttggagttccaaccagccaaggaaaagagacgttgctgaacactctcaagattcagctgagactccaaaaaaaggcaatgccttagaaggactactctaatcctaaaataaagatcactctagatttgccctaagagaatctaaaaccaggcctccactatttccagctgatctgccagaaaattaaatgcctgccagaacaaaactcattactctttaaaggaagacaatgacatctaaagttttaacattgttacactacagtgtccaccataaaataaaaaattactacatatgtgatctggctgacatctaaagtgaatagctgctgtttctgcctgcccaaaatatctgtctcatacttttttttctttttgagacagggtctcactctgtcacttaggctacagtgcagtggcatgatggcggctcactgtagctttggcctcctagactcaagcaatcctctcccctcagcctcccaggtagctgggaccataggtgtacaccaccacactttgctaatttattttttattttaatttttgtagagatgggtcttactttgttgcccaggctggttttgatctcctgggctcaagtgatcctcctgcctcggcctccctgtctcctacttttaagaacacaaattcatagcaagagaatctttctgtcccccagggagcacattccatttggttcagccagggcccattcttactagtggccaagtgaccaaaggaaataggatgtcctatttcttggacacagggaggggcacatgacccaagttgggccagtgactgtcctctttggcataggtctataaaaatgttgtcattcaagctaagtgatgtaagggtgaggggctgatggcattatgtgtgctacaggaagtgagtctgttctagggatggggaaatagagatgtggctgtggtgatttcatttgtgcccttggatttagctctgtcaaaaggattttgcaaacctgatatggtgaaattcagaagtgttttagttctggattattaacaacaatagttctgatagagccttagatgctcaagttagcacacatgctacactgtgacccacaatgtaactttctagtgagagagtcaacatttgatagctgaaaattgatagtcctggctccttgttaaaaagctgtgtcttgggccaatctcttaccttccctcctcctccctgtacactgagaagagagaccttctagggctctttctagtggcaaaattccatgagtctatgaaataagggactttccacagtcagctagataacaggtttaatggtaatttacaaaagtgacttattcaaggcaacaaagaaaaggtgtaaaatgagagatacaggaatccagtggcaaagcttaaagaaaaagctcatatagcctctcaatgtcccaatttgctgattctttgaccaatttttctccttttgtttgcaaggttgaattagaccaattttatcctccagtaatttgggctcctgagaaattcactgtgagtgaggcagaaactgaatcaggcaggggcattattgttttctctcagcccagctgtctcttaaaggtttagaaaaaaaatcacacttttccagttcccactttctaatgtgtaaaattactcatgattatttaagattgatatgacaaataaaaataagaaaagattgtttgtgcaggtatttggataaatgta

SEQ ID NO: 39737 - DNA, 3089 bp, Homo sapiens
ggcagaaatgagacaatctagcatctaagcattcaaatgaacattttaagaattaatgaggaaggaaggaaaggagggaagaaggaggaaggggagaaggaagaaaggaggggagttagccgggaagtaaacagagggaagaagggagagagaaggaaggaaactagacactcttaaagaaagcatcataacttaatatttaagattcttattttatacaattaaaaatctcgtttaattatttaagaaagaaaacttccacaggtataatgtacaactgtaccttagagaccatgtgatatgtattcatagtctgaaaagtctttgtatttattcttgggaaataaggactacacactcaaaaagaaattcctgcagagaggcaggtaaatggacagcacgatttacagtagacctcacatttacacattggcaaccctcacaaaagctgatatgccctgacgtttatttcctctgaacatttacttacgagtgtcaaagtctgaaagaaacctcattacaaaaagtgacattttatctccatttgtgcatttatgaacgtattctacatttttctgaagtgttatttattctttactttaaaaatgtactacccaatttatctatgaggtctttcagtctcaattcatgacaacctttgtacttactgttcctaaaaactcaaagacgagtttctgagctttgtaataaagaacttcattctgctgtacaaattaaaccaggtgtaggtaaaccagtgtaggtaaatgaaaaactggggttaaaaagaaaaagatgccaatctatagtaggctcagcttttttttgagagagagattaaggtgcatacagtcaactggtgtgaaggtcaccaaacaaaatgttgcaatcttaaagtgccactgacatgcagtcagtgtgctgcagcagctcaggattaatccatgcagctctttctccttccttgctattgtttcagaatccttcataaatgtgcattatgaagtctgttatatttgcaggaaaacattctaaaaattagacaaatttttcttcaaattgaaataaaaatatgtaaataatataacttttaaaaatttggtttcccacacccaggttttgttataggaaaagtgacccacaggctcaaaactccataaatatttccttgtgatacatatgagctatgacaagtctaaccttaattatttattatccacttactaatgacgtctaaattaccaaatatttcagttgaagattttctgattttcctgggaaacagctgaaagctacaagccactacatgtacttttttttttttttttttttttgagacagagtctcgctgtgtcacccaggctggagtgcagtggcgcgatctcagctcactgcaacctctgtctcccagattcaagcgattctcctgcctcagcctcccgagtagctgggactacaggtgcctgccaccatgcctagctaattttttttgtatttttagtagagatggggtttcactatgttagccaagctggtcttacattcctgacctcgtgatccacccgcctcagcctcccaaagttctgggattacaggcgtgagccaccacgcccggcctacatgtacctttagctttcaaaagtcagagtcaaaatcagaaggaagcattcctggttcagggacctctattctctttcacctgctcctgacctgctgctttccttttggtgaggacagctccttataaagcaaatagctccccactctgaatggaaaggctcatctcctcagtccatgttgcaagcacaaatctccctgatagtcatttagggagtgaatcagacttgcagccaataagcacaaagctgacctttaaacctcagcctttaatagagcattgggttattttactttgtgtttgctcaacatttccaggggtcaaagggcctggtttactgacgtggggtgaactagggaaccttgcttcaacttctatgttgcaacagataaaaaagcactgggggctgggctggtaggggcctaagccccaacctcaagtatgcccagtatcacaggtgttagaatacattctgaagtctttagcatttagagatgactagattgcccgaggctgaggactagcccttagctaacaactatgggagaaatgagaaagagtcttgggggctggggagtaagctttcacattttcccagtactgcaccaaatgacagatcttgaggtgaaaggagaaatcagttaatactgattctgtctttatttaaacattaatatttattttaccatgggtatttgtgcattacttttgatttttaaaagtagtgcattaaaataatatttgttgtgattgcctggatttttggcacccccttccgtttggtgcccaaggtgcgtgcctaacttccctcaccctagtcctagccctggtctgtcacctcatggttcccatccaacattttcacataaaaatgggggtagatttaagcaggctggtggagatgcttacagcagggttgagaaggggagaagtgtccaagtcatccaagaaaatcattactgagcatgtagtatgtgccagatgtacattcctttggtcctcacctatgaggaaggcctactaatcttctgctgagaaagatgaggctccgagaaacatgcttccttccactttcctccaacccaggaaccggcgctataaaccacctggtgctcaagcagaaacgtgggggctgtccatgacccctccttgctaacccacctgtaactatttatgatcactcaaatagtaaatggaggggtaaagttcaaaagatggtctgcttgatgacaatgtccacactctttttgctatatctgcaacctctcccaagaaaactggtcttgttaaattgttctggcatcctgttggctggtccaggacaaggttaaattatttttaagtgctgttttgcaaatttctccagtatatttcagttcgaatttgaataccagctctatctctggcccaggatgctacttgaagcccgacatctctccactcagatatctcacatccatccaaacaaaca

SEQ ID NO: 39738 - DNA, 425 bp, Homo sapiens
gaggccctgaagatcaggaaagagcctgagggcacagttgggaagctcagaagaagctgctaggtccacccagctgctgctctttggtggggaaaaggcactttcagagacaactcattgtctggcacagattctgcctgcaagatcgaaagtacttccctggaattgtgtctcagcctggcattagcaccctgctgcacaaaccaccttggtttcaccccatggactggttctttcccacagtggtgaaatctgactctccaagggttctctgaggcttggcttcacccagatcacacctgaagagcaacttggttttctttccctctacagggtgttcatagcttcagagggattactgctacaaatgtacaaattaacacaaaagttttactatctaaatttaagtactcatttaggtttgt

SEQ ID NO: 39739 - DNA, 639 bp, Homo sapiens
taattttaaaaataacatgttacatcttactatatactttattagctaatttgccataacatattcactttattgtactgagcagaaacctttaaaaaggaggcagaagtgaaaagtggaattctccaaattacaattgtttacaatgcagatggggaaaaaaggaaggaaaagaaaaaagagatagaggaagagaggggagaaggataggaagaggcagtgagagacagagtacaagtgtaggacaatgattcgtaatttctgggtggagtagaatattggcccacggagcaggaggtgtgtcagaatcaaccggagaaaatgttccaattttccggatttggaaacatctccccctaccccatgagggcgaagatcatcatgatgaaaaagcagctataactgatgaaaagcttagggggtggggagagattaagaggtagaactaaagtctaaacagtggtttccaacagggatgattttgcccccaagaggatactaggcaatgtctagagaaatttttgattgtcataactgtggcaggggatagggggagcagtgctaatgagatccagtaactagaagccagagatgctgctaaatatcctataatgcggccgggcgcgggggttaacgcct

SEQ ID NO: 39740 - DNA, 3511 bp, Homo sapiens
aaggtatttcaaatatatttactgattacacagtgtttgaatcttcaaaaattctaaatttatgtggacaaaggagaatggagaatctgaacttggctgttcatgcaaactctttcctttctttgactcactttatgaattgttatgtttctagatccttcttttaaaattttccatttggggaaacttgtacatttaaaaaaaattcatctcattttctccctccccctccttaaaataaataagaaggcttaagaattaacactaataataatcccacaatggtcattgggaaatcctcccccaaagtgacaactgccgctaagaagggcaaaatccactaagaatgaaaattcccccaaatgagtccttctccgagggggtggaggtcacacagttggcacaattggtatcacaaccaactcgaggagacccagaggaagatgctgcgccaagagaagcaaagcgaaggagcgcgacccaggaggctagcgaaatccccgccaagcccccaggaggcggagagaagcccagtcgccaggcaccggccacggcgcacgccaacatccaggataattctcctttccaagcccgggagttccggggcaggcgaaaaaggggggatgggagacccacagtccctttaaccctcccccctggcctgccaaccttttccgaacccccatgtcacacaacttcctcatcatggaaacttccactgggttcggcgctgaggatgccaaactccatttcacaaggaacatgtcaacagctgggcttggggtttgaggaacagagccgctgcgattggaacagagcccggccaccctgttccaccactgtccactccgtagctcccagcctgccgccgcgcggtgcccgaacacgagagggcacctcctcccagatccggggcgcagaagccccgcggaggcaggtaatcaggctgatgacacccccaccacccacgctcacccgcctgcccgcccgcgcgcgctcggcttagccgcccgcacccctccgggttcttgcgacgctccgtcaccatcccgcccaccctgtggacagttggaactgtcgccccctcctcctctcaccccgctgcctccgcgcggtcctctagccaaattaccagtgccctggagccggttgggttgagcgcccctgcccggggaaggtagcctgcgggctcttgccccgagcccgcggagcaggaggtctcttttccaagcgcactcacattattcatgcaaagttaatccccgccgcgtcacggccgcccgcccgaggatgtgcgccttccttggccaagccccgcagtctccaccctcctccgccccctcctcccggcggcggggtcccggggagcgccggcgactgggcgtcgcgcgagtcctgcaaaatgtcaactccttgggcgaagagaggcggccgcagccagggccgcgccgcacctccccggtctctccacttttataggcgtaggaagctactgcggctggggcaccagagtccccgcctctccgggtcccccgcgtgcccggcccgccccggcccgcttcccgggcgctgtcttactccgggcccggggcgcctgctccgcgccgcgtctgcgaaccggtgacctggtttcccctccagccctcacggctgtccgacttgcgcggcggtggcggcggcggccaagagcaggcaaacccggctccgccaggggcgcagcgaggaaatggcctcctggcgcacaccccgccgccgccgccagccatcgccaccgccccgggctgcccagccggtacagacgccccctgccaggctccgggccagcgctccgacgcgctcacagcgcccggcttgccgaccccgaccccgaccccgagtcctacgcactcgaggtccccgggccggccgcctccgcacctgcctccccaggtgtgggcgctccccctcctcctaatcccggccgtgccctcccagggttggtgacggtgctgtgggtttggtggccgcgcgtccacccacccgattgcctgcgcgcataggtgcgggtttgggcgtcattactctagttggagaagaggaaagaatggggaacgagtgacaccgggaccggagggcgagtcttccaggagcacgtctcggccttctttgcccggcccgaccggcccgacccgtgccgcagcgctcctccctccgctcctaaaccacttgtggcgcgtgtcgggaatacagggcgctctggctcttcttggggcctccgctggtccgaccatctggcagctctcttaaccaccacggccaccccacgaatggaagtttgggacgtgcctgggttgcccttaaggaggacacccccgcccccaccgccattatgcatatcgtgggagaggcgcgtacagggctgagacactcctcaggtcccagaacggccgccctattaatttgtctttgccctggaaatgtatagataaaaccaggaagacaaaaataatgtatactcttcaagagatctttcccgggcaaatataggtctctcaaatgcccccgaccttaagtcctggagaccaggaagagacttgctttctgagctagaaggatacttgggaaataccgagtcctcactcagctaaaaggtagtcaataaggaactatagttgcaacaaaactactttgacaacagagtacaattaatttcttatagacagtattaaaataattccgacatcataatttaatattcacatctattcgtgtaacacgcagtataatagagttatgacgatatggatcctcagctgcctgacaatgtataggttatttattggaaggttctctagatttccagccagtgacatgtatgttttattctcgcttcttctgagcgtcccagggaaaggggtgagaggccccccacccctgctgacagcattaacaaccaccccgctggataagcagggtttcactgatgcacttttaagaaagttgcaggccccagagaccccatttccctttggtcctcggtgagaagtccgtgctttcttctctactcttaataagtctgcaccataggacttgcaggcttctgtagttggagagctgttctcctttgcagggaagttcctgggctttgctccaaagctgccccggaatgttttggttggtttggagaaaagctgtggcgtctacaccacttgttccaagcaggcggccccctggtggctaacggggggtgagaaagctggccactgaggaagaagtctggcgcaggtaggccccaacagttgacaacctagtcttcgggtcttcttcacagcgtgtgaacagcttagtattaccgcgggggggcgggagggggttggggggtggtgaggtgaagcaaatcttccttcaacacggtggatcatgggcttctcggcctactggaacttttaatttttttctcttcctgagtataacttggagctaaattatttaagaaggagacatacagaggacaaaatgaaatgtaacaaaa

SEQ ID NO: 39741 - DNA, 1799 bp, Homo sapiens
aggcaaaagcatggatgaatctcactaacatgctattgagtgaaaacaaaccagacacaaaagagcacattctctatgattctatttacataaagtacaaaaacaggcaaaactagtcctggtgttggaaggcagggtagggattgccccgattggtggaaagagctgagggggcattgagagtgcaggtcatgttctgttgcttggtgtgactgctagttaaacaggtgtgtgaagttcgtgaacaagcatctagctgtgcaccaggcacctttgatactgcaatgaaatatacattacaacaattgcatggggttttccccaggacagtgtagccagtctcagtaacatttccattaaataagacttgctgggagcttggagccccagagttaggagctcactcttgcagagatgtgcgcggccccacccgccctgttcttccgacgcactgccaggccagcgagcgctcaccgggctgcctaacgcgcagcggaggggactcgagtcccgagacccggaaggggccgcccagcgctctcagccggctcgtagagccagggccgggctcagggagcttcagagcaagaaacaccgaaggtgtaaagcccgagcgagcagctcgagtctcagtcctgcagcctaaggcagcccctccaagccgtgggcgccggccgtccgtctcctcaccgtggcgccctttactcggccacccggggcacagccaggggcttcaccgagccccgggtccaccgtggtcgcggccgccggtcgccgggagcccggagccgggacgcgagggttgggggttggggatgggtcccagtgtcgcgcgggagttcaaagcccggcactggcacggggctccgccgccgcagccgctggagccttgggctcccgccgcggggagagcgggggtagggcgcctgtcccggagtgacccggcggcggaggaagggcgggccgcaggcggcgggcccgggggaccttgagcgggcgggcgaggagcgggtgagaccgaggtcgacagagtgggggccccacgaggcccgcgcctggtcgggaagagagtaggagattcccccgcgagctcagacccggcactgagggaagagacactccgagtcctgcgtctccaagttttgctccaatgcccttgacattgaatgcatgtgtggcgtctatcctggcgcaggcgatttgatattttcaataggcctaacctcaccagtggcgtgcccggcccggctggctagcggctcctgtccccaagacccccgcagtcaccagacctttgcactgcccagcgctggagggggcgaccagagccttacaggctccacggtgggcgggctcttacctcctgacttattcctcctggcgctgcaggggggactgaggttaggtgtccggtgggaggctggactgtgtgtgcgtgtgtgttgggcggaggcgtggggggaagggaagtggagggtaggttgctgagcccagggtccgtaacagcagcacatcccaggttccacccccacccacagggctggtaaatcctcccctttcctggggtctgagtgagaggatagtacaaaggtcagattgtccaaaaggatagtgggttctgctgtgagatttaattgtgacggcatcaccaaatggccgttgaatttctcgatcatttcacagaggaagacatcctattttgagtgtcctgaagtgattttaattttcatctgggcaggtggtgataacttctggaaacaccaaggactaaaaaggaaggaaactgcagaaagtggggg

SEQ ID NO: 39742 - DNA, 1487 bp, Homo sapiens
atacatatttgatataaaaactttagaaaaattagtggcaaaaataatttgacataaaagtcactttttaaaactgacttaaattattatttgaaccacattttgttcatgcatgtgacttaatacatttttctcttttgttattgattttaaacctgaactagtagcatattttataagatgagacaactagccctttaaagaattagggcttgtggaagatctataggttatttcaactccctaaaatgttgaacttcctgtagagttaacaacaatgaagtaaacaacgataacaaaatagaattatggccaagcaatttaggaaccaacagacatagaagcttacagctcattctacttgtttttgtagaatctaaacaataattaatacttcaaacccacaaaaggagtgagattggagggcttggcttctggagaaatacttgcagtgaaagttaagaagctggtgaaacagcttattaaactagaccatcccatataaataccatagtccgagtagtgatgaaatcttgttggaagcctccaagtgagatttcagagcctgggtcagttttcattatacaactgaagttggcgctttttcaggccagctgacctctttttgcaagagtgtggcccttctggcttctctaaaaataaatatttgctcctctctctacaaggacatttttggaaatcgatttgtcattttggtgagtcacagtggtatcaatgaatggcaaatgtggaggaattagaatgcaatttaacttaataaggaagctgcattattgatcatacccacatgaaattcagttgccatttatttgtagagcaaaacaggaaataattatctaagcgaaccacttattaagaatgagtttacataattattacatctacttcacaaaaccaccagtatttaaagcaacaaatgctttctgaattttctaagatttttcttcttggcaactggaagaagatggacattcgggagccacattgtgaacagtcaggtcggctacttaacagtttttcaggaaaaatgccatcagtgagagaagcaatcaaggcaaagggtactgttctaattgtaaatttggtcttctttctctacttgggagggaatctatatggcagtgttttgtgatcatcagttccgccatcttatggattaatctcagtaaaatctctttcagagattgtcttagaaaatgaaagtacagaaaaaataaataaagcactataggagcagaagagacaaaaatattcatatacttttgtacacattcagcctaattttccaatatatagtaaaaagagtggcctctgaacttttccaggatgaaagtctcaataggatactagttctttgggtgatttagactctggacaattcttggtgggcatatgtatattctggaagccctggctgaaactgtttggcccacagagatctgacgaggtgcattaataggattatt

SEQ ID NO: 39743 - DNA, 1249 bp, Homo sapiens
aaagaagattgtaagtgagatcatgttactgatgggacttggtcctaactcagaggatgttattctcatctccaataatcaaagagataaaaatacccagggaagggcattttgtcatttaagtcaaacttaagaatcttcctgttttcttactctaaataattcttgaacaatagttatgttcgtatttttggctggcctataaagcaaaacattgtaggtaatgaatgtggatagaccaaatgatctgtccacaaactgcattctttagtactaatgaacactataatcaacaaaaatagatacatatatagatacatatatgaaaataaataaatgtcatatctcaattagctattctaagtggatgttttgaggttagggaatatagaagtatcccaggctaactaacattctcacattgtatgtgggaaatttcaagttcatcattagctagtcctaacctgaaacataatgatcatgataatgaaaatgccaattaacatctgttaaggatgtggaccaaacaatgtgtctttcaggcattcttttcatcttccttctagctttgagaagactgaacaatatcttcagcagaagtagagaattgtacatttaattgttatttattttattctaaactataaatgtcactgagagaatactgaaaatgaaactagattaaagcttaagaaaatatttaatgagtgatctcatagagccactcttttagtctgttctatgatttgctgcacagatgctgttgagtgtccagggttctgtggcacatttgagcttgtgccaaataccaaggaaatatgagcaagtagcttcgaagctaattttggtaaatgagggcacgttttagaaatgaataatcacttcatcaaaataactttattttacacactttcccctcattctactcttctccatggactaatgtattgtttgctttttaaatttggatggtaattcactagttagattgcttatttaatttagtgctgccaaaggcattggtcctacttgactcaaaataacaagtaacaatcaacagaagtttaaactagagtgactactacatattattaattcattgtgccaccactctcccaactactttataagtattattccttttattactcacagcaaccccaagaggtggatactatcactattgctgttttgtagctagggaaacagagtctcaaagaacttaagtaactagctcaaggtcccaaag

SEQ ID NO: 39744 - DNA, 969 bp, Homo sapiens
agagtggggccagttgacatttagtttcagtttaggatagtcagctaggttgtgtgttgggacaaaccaatgttagtattttatatatttactcatgggctcgttagattcctctgagaagggttttccagttgtctccctgcagggtaaaggtctggctgcccagtgtcctgaagatggggaatttcagcatccagtaagcatatgttcagttcatgcccatttttggttcaaaaattatattctcaactatgcttgtaattccctgtacaaagtccttccatttgccctctccagaaaataaacttacagtcttttgctagggtgaaggaagagcttttgctgagcagcatgggatagtaaagaggttttgagaaagtaactgcttcttacagtgcttttacccaatcatttttcttttaagtccctattccttcaccctcttccaaaagcacctgttgctgctcatctctgagtcctttgagagttctgtggcatgcaacacgtttggttttcagtgtttgctgttgctgactcaggatttaggcttgctgaattggtatttgctcatctgcccactttctagcttacagtatgtttattgctattctctcttcctctgtgttcccatccttgtatgtctttttaaaaagcttcctttccatctttttcatgaaataccaaatggatatttcatgagaaattgaaatatcaagatcactggctgatttaaaggaatgacattttatagaaaattaagttacatgttttcttatagtaatgcattacacttacataaggaaaaataattaagcatcttatttgtagagttgagagtaatagtgttttagatggaaaaattccattttggactagacaattttgttacctctatttaaaacaactccagtaagaaagccaaaatattaactggtttggtcaatatcagtgaggtacttttcacttaat

SEQ ID NO: 39745 - DNA, 1558 bp, Homo sapiens
tctcttacgcttagttgttagcttcatgaattgttagcgtctgaagttttcttatacactattgtctccccacacccttggcatggtgcctgacatgtagaggcacattttgctatgttcaaaatattgagcttttcaccctgtaattttataagataaatgttggcctatgtcttagaaatgtctgcaagctcttgtgggattaaatattttaatatcaagaatttggccacatgtactcaggaacatatcactaagactgataggccattgtcaactcaacttcctttatgtttgactatccattaataatgtcacttattgatcgttaaataaaggaactaaaaggacttagaaatgggagatgttgaataaaattaggaaaacaggaaccaaagccaaggatgtaagatgaaggtagtattaaacactaaggggctaaaaaggaagaagttacatggataaagatgcaagggagaaagatgttttcagaaaagaaatccattgaatagacaatattacagatgtgtcaataagtttaggccgaaagcaagaaaattcagctttttttctttcttcctttcttttgcccttccttccttcctttctttctttcacaattaatgtactactcatgagaatggaatttttttacaaacactgggacaaaggtcaaggcgtgggcaatgctaaaagagaaaaaagggtttcgattaggtaatttgctggtaacaccttcagtaaataaatgtgagaataatacggggtgtttgtcattacagtgagtctttaatcaaatccattcaatagaaaagctgtaaagtaatttgcaaagtgctttgtgataatgaaagactatataaaaacagtcttaacctagcaactgaaattataaaactatttgttttagggaattcaaactctggcatttttatctcccttgagtagtgagaataaattgatttatgaccctgagtgtttctttatttgaattaaatggttctataagtatttacactgatgaactgttaggggacgtacactgctagcaataactttacttttgcttttgcatttcattttaaattgttcaagattccaaaaaatagcattttgtgaaccacatctggtgtgcaggacatgggtgagctttaagcctatgctttattggcttgataaaaatgagagagagaaaatacaaacaaaagccccaaaagcgtcatcttctaaatgcgtggtcagtaagtaactggagatgagtagagatgtctagcagactgattccattttaattttttcctgtaattaaaagaagagaatctttatcaaaactcatagttcagtttccctttttgtaatttatttactaggggccacttgcagaagtggaggttcccaaggttcagagaaaccataaactcaggctgaagctcttgctgcgagttactacactaaaagcccatagatacccatagatacccatctcaagtctatgatgagtttatctgctggttcataaaatgccaaagactttgtgggaaaagggacaacagcatca

SEQ ID NO: 39746 - DNA, 993 bp, Homo sapiens
tgtcagagagaaaacactttgagttataatcatatgctaagctaaagcaagtattttataattcaaaagtaagcaatgatatcattattttgaataaaagaacatacaattttttaaaatttctgaagtgttttaaatagtaaccatttcaataagccattttattaggctcctggtgaagtaaataatataccatttaaagtacacagagtaaaataatctttcacctgactgtatccacaggtatctatttcagtttggcaagcattcttgatattcgtccaaaatgtttggatgattcacttaggaatttagccatttaatgcaatccaatcctgtcctattaaggccaagaactattgccacgagaacattgccaatctggtaacgttccaaaagccttttctatttctaaggaaattgtacaaacttttaagagaataacaagttgcactttgttatcaaatgaaaagggctttataatacagaatcaaaaccatagaagagacatgtataactcacaatgtcatcagcaaaagggagtgtaaataatgagcaggggagaaagaaactatataccaccagtatttgttaatatttaaagaagcctaaattctgtcatcattacctaactgcatcagtatcatttaaataaaattgctcatacataatcgggggtagaagtttgtctctggaagctctaattttccttttttgactgatttttccagctgtatagaattttcagtggcatcccatggtcttaagcaatctaccgtgaccaatgagtcaaaaagatctattcagattcctatctaatcctactattggcatcaaagaggcagtgcctcataagaggtgtaaagtattacctcctactgagatatttgtgttaagccaaacccaaagggtgaagaaggaattggggatcggaaggtcttcctgaaaatcagatcatcttaggtttgagggggaatttttaagacagacaag

SEQ ID NO: 39747 - DNA, 474 bp, Homo sapiens
catttcctaagtacttgtattacctcatttaatctttaccacaactctttgacgtaggtaccattaatatttacattttgcaggtgagagaatatagaagttaagtaactttgcctagccagacagctagtaagaagcaaagctggggtttaaacacaggtagtgtctaaactctgtggccccacctaccatgttacactgcctctctaatcattaagctgacctttgagagcactatgctgcaatagagctttctgcaatgatggaaacattctatgtctgcactgtcctattaatgtgaaagccaccagtcatatgaggctgttgcacccttgaaatatggttaatgtgactgagaactcatttttaattgtttaattttaattagtttaaacagcagagtttaaaagccgactaacagtttctgttcatacatatgatctcaaaaaatgaagtgctgaactaggaattaag

SEQ ID NO: 39748 - DNA, 2380 bp, Homo sapiens
ttgggcaggggctggaatgagagaaaactggtccttcaaaatgtaaaactgtcatacttaaaccagtttacaaaatatgcgtttaattatgtggtgggatgtgtgtaggtgtatgatgagagaggcaaccaacatggctatttggggtgcaaggatgtgggaacaggcaagtaattttcacattggactttcatcctagggagctgggttctagtcacagctctgagctgtgtgaccttgggtaggtctcatctccccggggttttgtttcaccagttgaacagtatgaggatgagtcacagctaacatttgttccatgatatttacccagcaccatacaagtgttatttctgtcctcccagttaacactgacgtgggtagtattatatgcccattttacagatgaggaaactgaagcctgaagaagttaaatacttatcccagaacacacagctggtaagtggcagacctggaattggaatctagttcagtttgattccccaacccatgctcttgaccactatactgttttttcaagtccagatctgaaatctcattttctgtgtggctgtgtgtttgggacaggggtaaccaattcctgactactctatatgctgcatagaacctggagaggatttttcaaagtaaatgaatctcgaaagctggattgcagagcaaacgagtgcagtcaattcagccaggggcttgcaagagggagaaagagaaaaagactgtggaatggaaagtttcccaacccaagcctttcccaaggggtagccattctctgttctacagtttagggcttgcatgtgctttttctggagtggaaaaatacataagttataaggaatttaacagacagaaaggcgcacagaggaatttaaagtgtgggctggggggcgaggcggtgggcgggaggcgagcgggcgcaggcggaacaccgttttccaagctaagccgccgcaaataaaaaggcgtaaagggagagaagttggtgctcaacgtgagccaggagcagcgtcccggctcctcccctgctcattttaaaagcacttcttgtattgtttttaaggtgagaaataggaaagaaaacgccggcttgtgcgctcgctgcctgcctctctggctgtctgcttttgcagggctgctgggagtttttaagctctgtgagaatcctgggagttggtgatgtcagactagttgggtcatttgaaggttagcagcccgggtagggttcaccgaaagttcactcgcatatattaggcaattcaatctttcattctgtgtgacagaagtagtaggaagtgagctgttcagaggcaggagggtctattctttgccaaaggggggaccagaattcccccatgcgagctgtttgaggactgggatgccgagaacgcgagcgatccgagcagggtttgtctgggcaccgtcggggtaggatccggaacgcattcggaaggctttttgcaagcatttacttggaaggagaacttgggatctttctgggaaccccccgccccggctggattggccgagcaagcctggaaaatggtaaatgatcatttggatcaattacaggcttttagctggcttgtctgtcataattcatgattcggggctgggaaaaagaccaacagcctacgtgccaaaaaaggggcagagtttgatggagttgggtggacttttctatgccatttgcctccacacctagaggataagcacttttgcagacattcagtgcaagggagatcatgtttgactgtatggatgttctgtcagtgagtcctgggcaaatcctggatttctacactgcgagtccgtcttcctgcatgctccaggagaaagctctcaaagcatgcttcagtggattgacccaaaccgaatggcagcatcggcacactgctcaatgtaggtttatttttttcccttcttctaccaagaaaaaaaaaattgtctctcttgcatgcaataaagacgttggaaataaactgcattggtagcaagacaaaggatttaatgatttaatgctgaaggggtgtgatatgctggcatgcatattgattccctttgctgaaaatttcctgttagatgttttcttcccaaataacccctcccgcccccatgctcctctccttaccaaccttatagtctcttgaaaacagtttttaaaatatgcataaaaatgtggggggtggggagtagagggtgaccacaagactttaaaacattcttcaagtagggcaatttgacacattttgcagtttttactaaaatgtatgcagagtggaatttaactttgctgttctttggattagctactagttgtataggtccccccaccccttgtgtattccaacagtccaaagtaattaaaata

SEQ ID NO: 39749 - DNA, 774 bp, Homo sapiens
ttctgtgaagaactcaatgcgagattgatcatagtggtgatgacatgactctgtcagttgttgaagcacatggatggaagtagaagcacacaaatcaaaccactccaaaaggtttgagaggcatctggggaaggggtcacttacgttgatatcagggagtgtaaatctacacaacctttctagaagtcagtttatcaacatgcattaaaaacaaaatatttttaaaataacaacctttgaactgataattacacttcagtaatgtatttgaaggaaataaagatgtggtgagattagctacaaagttgttcatcacaatggaatgttttctgtgaaaaatatttatcgacaaggaaataaattgatgacatcataggttaaacaaagtcctcagcagtgtcagtataattccaccttagtagacaaacccaaaacatttatgtgcatagaaaaaaattctggaaggtcgtacacagtgaatttctctgagtgaaaagattgtgggtgagtgattctgtgtgtatttttccttagatttttaatagacagtgatacattgttttctaattttaacaagcagtgttttcttgttaattcgctttcagtgaagctgattagttccgtgtgaagaatgcttttgcatctactgcttgatagctgataagctttagtgacatctcagataccagcccttctataaaacagttgctgccactgtgccaacttattcaaagcaagggcttcctatctgccagaaataatgtactcaagatt

SEQ ID NO: 39750 - DNA, 858 bp, Homo sapiens
tcatactacaagtcatacagtcttgaaaattctcaactctcatggggaattaaaaaggaaacctcaatctctatcatctcctatccaatcagtatagaaggcaatacacagggatctcggtggtgggaaaagacataagaagtaatggtgctgacccactcatactctaaagggcaagataaaggctgagtatgaaaaggatgacatcaactggaactgtcaagaggtgacatgcatacttttagatttgtaaagctgatgctgacatgaatttactgaccatatttacaagaattaaaaacactgtcatattctactccttttattttaaataaatacaaagataatagtctataaaagccttacctaacataagtcatactacgctacttagatataaatactatttaaatattcaaagcacaaattcaactgaagggtaaaagaaggtacaggaattttttaacactacgcacgcttaggaccaacaacggtggaatcatccttaccagaaaaaattgcttaatacactgcccttccctcaggcagatcacatatttacactgacctgtgtccaagttctaactggaagctctgtaatttctactgtgtttctgtccactacaaatatttcaccactgactgcatactggttttgaccaagttcttgaatcgtgcctttaaagtttttgtagtttggaagctgtagagaaaaaggtaaatagcattgacttctctcttgagtaccagtaccatgagtctatggtctaacattgacagattaacacaactgaaacagaatttctcatcctcaattgtccctttccaactgatcaattaagcttgaattcatagctt

SEQ ID NO: 39751 - DNA, 2464 bp, Homo sapiens
catgtatgtgtccatctcctccttcttcctctcacataccctctactgcaagtccacatggaccactaacttagtatctgacattttctctcctggccctagtcccttcatactttcattctacataatcggagtaatatacaacattcaaagaatttcaacaataagagcatggcaagttattttgcaatgtaccctggcacgcaaacataagtgattaaaatgttttgctgctgtcagtagcaccctttttataagaagcagttgtcaatatagcacaaattgctattcaactcacccaaacctcacccaaacaaagagaaaacgaactaagtaacaaaaatgcctatatgaaagctcccttgaggtatttaaaacagggacgggggaacagaccgtcaaaagtccagaaaaatgtaacactttttacttttctccgaaatacctaggttttctgtataggaaatgaccctggtctgaactctacgctgagcaagtgaaatgccggcgaattatcgatctgtcgtgggaatccagtctcccttcctccttccgctgcagttacttctacttcccagcaagaactgagcgtcgaaatcctttaacttcaggactaagcacttcagtcacctctccaggacatccattcagccctcaccccgttacacctgcgatgctgacgtagacaagcacttcttttaataatctcaccctgacagagggacgacctacagtattaactgctgtgaaagtcatccccaatgcgctctcaattgagcgcattgaatgaggctttccaaattgaagtgcaagttgctgtagaaatcccaatgcattcttctttgagattaaagccccagaaagagctgcatttagaatacacacacacacacaccccttttcccagggttttcttgaactacatttggagaaaatgctgccccacacagacacacttgcattatcgccatccccaccatttcaggttcggctgccccggaagagtctggttaaaaagaaaagagaggaagcgggggctgtatgttacgttcgcggttttgtccccccaaagtttcaagtacacattacgctctggcagtcaggacttccagagacgtacagagaaagaaagaaagaaaaggcgcggggagcgggctggaggattctgcaagcacaggcccctatggagcgcccgttcgggggacgggatttccctccctttcccctcccccgcccgttcggaattccgcccccgccgcgggcccggaacaatgcagccgcccgtcccggggaccagccacttaccacccaggtcagtgccccgttgccgccgcccacgccggctcccgcgccgcagccacccgacttggccatggcgagtgcctccagctcacaggccctgaggccgcagccgccgctcccgcctccctgcgggccgctgggccccgccgctccgcacccaccgctccactcgccgcactcctagccgcgccgacccccgcgccccatcgcgaagatccggagcggacgtccagccgagcccgctgaggaggccgcgccgccggctgccctcaaactcgaggcgcggcgtccgcgtcgcccgggcctagcgcggcggctgaggagaaagcagggagcgaccggcggcggccgagcggcggcgttgccttctcgcccgcccgcgggcgccgctgcaggccgggctgaagcccgggcgtgcgagccgcgagggcggccggggagcccgaggcgctcggacgtggcgaggacgcagaggtgccttgtccttctcacactccgcgaaggccagccactcgagtcgccagagtagtcgtcccggtcgccgccgctgcttcaaaggcagccttagcctcgctgcagccccgatttcctcacacacacacaccgagagggacaataaacagagccgccgccgccgccgccacggtcacctccctcttgtccggcataacaccgcacacacacatttgcacaccggggagagagggagggcgcggcggccgcccccgctgtcagtcagcgccatgctgtccaatccgggccttgtcgccacagcctctcggccaatcccaaaattccaagccccctggaggggcgggacccgaggggggaaacgtcattgcgggtagcaaccgaaaggaagacttggggtttttgtttgtgtgtgtgtctgtgggttttccatttgaagggagagcaggggctgcttcaagggtcaattgagggcggcaaagggaaagggtcgaattggcctcgggtcgattgtaatcctccaagcgtgctgtttactctgagacctaaccgggaatccgaagcgtttgcctggggcctctaaggatgaggatgggggcggggtggggatgggggtggcaggaagaagccgggggccgtcccaaagggaaattattttaaaagagcggttgtaaaccgcaggcaagacgtt

SEQ ID NO: 39752 - DNA, 1988 bp, Homo sapiens
tgtcccttcagatcatttgatctgaagagttgaggtgggtacttattcaaaatgaataatcaaacttgcctcccaattcccaaaatctgcaaggtcccttagacctctagaagtgcaattttgctgacaggagaatgaaggaaattactctcatccaaggcgattacctccacgaattcttaaagggttatgttacatagtagaatccaggtattaatataaaaactgtaacttcaaaatactataatgtttcaatcaacaaaagtgggcagaaaaaaaattaaaaattttaaaacccaccacttcagaagcattatgctttagtactcggatagtctcaacatgggaagaaaacatcactttgtcagtgagtaacttctgataagtatgtggaaatgtaagccactccgctcgaaaaatgcacgcagggggaatgacacgcgcggtgcggttaccgttgtgtcccgatatctgaggccgttaaacgacgagaagagcggcagtgtctgaagcacgccttcctacctctcctccgcccggccccgcttccgggactccagttcacccgcagcaccctgactgcaggtgccaagtcacaactgcaaagaaacttccttttctcgagcgggggtgggacttggccgggtcccgaggcccctggccggcgggctcggacgttaggagcagaaccagctccaggtcccggtctgtccgggcgtcgctgccctctgaagctcaggccggacgccccagtccctggccgaacaaggtgccgcggcccacccaccccggtacccgccgtccgaccccgttgccctgcacctgaggatgttgtcagcataggtgagcagcagcttggaggcctccaaaaaggtctccggggtgttctggcagagctcagccacggccggggacgccgagcctgaggagctgcccaatgccgccgccgccatgcttgagcgccagcgggcgccgccgccgcccctcgctctccgcgtcccacactgagcaggcgcctcagcgcgcagcagctaccgcagccaccggcaggggcggggtcctcggccggcaggggcggggtcctcggccggcaggggcggggtcctcggccggcaggggcggggtcctcggccggcaggggcggggtcttcggccggcaggggcggggtcgggggcctggggcggggtcggggaccggggccaggagcgggggagctcggctgggagctacggctgccccttcgcggggggcaaggggctgttcggaagaaggtggggggcctcggccggcaggggcgaggtgcttcgacccagagttggggcctggtcgtacaggttgggaaggggttccgcagggagaggcggggcctgggctccggggctgaggggtgtgggcctggaggagggggatgtcgagtcctttaggacggaggagctcggctggaggggaggccggctttggtctagaggtatcgggcgaatggtgctggcacgtgcctctcagaaacccggatccctttgcgctccggggccagcctaattgatccagctattaaggtggagaaaccgcatgtacctccctcctttccccacaaataaaaccaccttagagccttctcttcgcagattgtcaggacgttctacatagatgtggatgaaagactacagaaggaaggagcaacaaacgtcaaaaacaaaaccatggctataaactctgctgggtttgttatatggattcttttcagaatttggctaatgactgaaaatctaagttccagctcaactagtatatgattcctctgtaaggaagtgtatttttaaaccataggttgcgacataataatgggttgtggattcggtttaccgcgtggtgaccagcgtaaaacacatgcataataattacgcaatattatagaatgtcgggggcgggaagggaataaaaatttgcatcccacacagtaagggtaagtaatattttgtgacttgtt

SEQ ID NO: 39753 - DNA, 2397 bp, Homo sapiens
gtattttcacactattattttaaagacagcaatgaaaagagatcaagtttaggtacttactcatcaagtgttactttataaccacatgtgtttgttttaattcttcaagaaactctactttgtcactgaatgaggatcaactagaggtgactggttaggcctgggacgaaggtcaaactgagctttgctgaattattttaaacaaaatagatttccaaactcatttaaatccaggaccaacctggaaagctaagcttgactcacattcttctgtaggggtaggaaagaatgcagagcactctacttggaaacaatggcttcaagaggcattgcccagaaaaaaccataaatatgactagaaggtccagatgaagattctatgctcaaccatttttctaaagaagagcaaggacaaaactcacgcctgggatagcatgtgaaaaacagatgttcgatgaataccatcttgtcgacttcttgcttttttacattttcatgttatattttccctttatcggtttgcagtcagctctaagcaaacagttaatgaatttttcacacttagaaacaaatgtctccattgtgacaatggagacaatttttgagcactgtctcaaatctggtgataatttttttttaagtgaaaggaagtttattaggaaagtaaaggaacaaagaatgactactccataggcagaacagcctggtgacaacttttaaaaagtaaaaactttattacaaaaacatttgtttattgtagaaaagctttattaaataaagctaagcaaaaataaggagggaaagatcacaatcagtatacatcttgcagacctttaaagaattatttttgaaaaaacggatatatactgttttgtaactatgtctcctaacaaatagtcgcaacatctcattaataaatattcacctgcagaattattttaaacggctgcatggcatttggatgtaccacaagatacacaacaaatttcctgatgttggccattttggttaattccactttactcacaattactaataacgttgcgagctatagcaataactttgaaactgcagagaatttccttaattctttcttacaattccagtagaatacgatggtgtcccttctccgacaaaagggaatatttgggcattatcactgccaaagaaaaatgcctttttgatgggtgaaaatgctacctcatcgcgttattggcaggtcctcgattatcggcgagtcactgaggttccgagaggggcgtctctgctcacgcaaacagctacccagccgcctcccacggtctgacctcagccaaggtgacgcggcttaaagtcaaccggcggaaagagagtcgaacgggacgcgtgcgtgggaaagcgcatgagcgtacgtgcgagcgcgcatgagcgtacgtgcgtgtgcgcgtgcgctcgagagcgtcatcgcccccgactgtggagaagtgtccggggtagccccgttacaggtatcgctggctaccctcctccttcgcccctcctttcctcctttacattcaaatcaagtcggggttgaatttcgagaggggagtccgaggacctggggcctgatttctttttctctcgccatgcttcttcgggctgtgtacatgtgtggtggtgcctgagaggcgatacagggaatggctacactcttttactcccgcccctggccttcgtagtacccttgaagtgatccactagtcgtaacccctccttccaccaatgattcaattggagaagtttagaggagtggaaagacttgtccccttcccccatcgcaagcttggtcacagagtgtattgccaacccatgtatccagacgctcagtctagggctcttggccctgggtagcgttttgaaaaggctggttatccttaagtactgaagattgataaagcccacttacttacttaaaagaatatgccctgaaatgtgttttctgtgccactgacaccagaaatgctatttagaagaagttatcagtaatcctgacaaaggatgcttcctgcagctcaaatcaggctggaggtgcctttatatttttcattgaattactgttttggtgactcgaatgaatcatcaattcatttatttgtcttcaaatgtctgacggcacttaaggtctaaaaaagaaggtaagtttaaacagatagtttgatgttaaggtataaattgaaagtatgtaacattttccctgtgttcattagcagctcatatcaagcacccaaaggaacaccttggatgtttttccttaggcccttaagctatttaaaagaatacctcctaggtgtgttgtggtcttttacaggaatgtgtttctgatcatctgaatcttaatcatgtccaactgcctgcaaaatttcctgaaaattacaa

SEQ ID NO: 39754 - DNA, 2439 bp, Homo sapiens
agagataaaagaagggaagttgcttcaggtacatatgttgcatatgccatccaaaaacctagtagcataaaaaacccttcattatgctcatgaattctatggatcaggaatttagacaaggctcagcaggagtggtttgactctgctccatatctggggcctaatctggggaaatataaacatttggagtgatgtcacagctagggcttagtatcttctgaaggcatcttgattcgttatattcatcagtgtggaacctatgatttgatgacttaggaatgcttgactcaggaaagcctgctgatgagagcatatgcacatggccttttcatgtgacccgaagttttttagagcatggtagcttcaggggaattggactgttatgtataggttcagggttacaaaagttaatgtccttgcaaacaaggcgtaagctgcattaccttgtatgatctcgcccactggttgtaagaatcacaaggcagcccagaattaagtgggggtgaggacagactccatcttttaatggaaggagtgcctaagattttgtaaacaggcctacaatttccagctccttgaaacgttagctcaaactttgagaaagcaaatcaaggctcctagattaaccacaatttaagaaacctcccccaaggagataatgcaagttattctccattttgataattttttatttctaggcagaaattatcttacacaattcaaacattacagaacaaagaagacaaaattttcccttaatgctgtgaacaagaggaacctaaaactttaagaagcagtttatgatctacgatgggtaagaaaaggaacattttttgctgactcaccttacatctagaaaaacccattttacacaaaggctgaggtgttccagaaggggaaacatagagctgtagctagggaagctggcagattgtcaaggtgagaggatcgcaagaatataaagtgaagcaatctgctgggagcaatattcatatttgtacatatcactggggcaactaacgcacccctacctgaaatcacccagaacttgattcctttttagttactatatttcagtgaaagattcagattgctgggacctgactcttgcagtttctggtagtcaaggtaacatttgttgttgtttttcagaacagcataccactctgaaccataaatctgtaattaatcctccaaaacaactcgtgatgatgaactgtttggcattatcaatttctgttttcctccaggtgccaaatacatagagttcttaaaatgtctcaatcaatcaaaatactactttggaatatttcctttctctttgagttttcttttctcttatcatctttctaaaatggtgaaaaggagatgaatgaaggtaaagaaaacaattctgacatctggggaatataagagaaacacacttaattttcaaaattgagtcttataattgtagcttatgttagtgacggggttttgtatgtaagtgataggcatatggcaagtttgagaagggcaagtccctgatgtcatgtgtccaaaatgagtggaagtaaagaagaaacacttgtcccagattatactattgctcaatatcgaagtcagttaatgattacctggccctattggaatacacagagctggagcaatttcatctgtaggaattatttgggcttctggcttagcagatgtagagggtcttctgagatatgcagattcttaaaagagttgagggtcatttttactggggaaaattaaaagagcaaacaaaaagtaatgagaattgaagaaatcgcctattctcacacctagggtgtaatatgactgcttaatcatcattcaggtggatgttctcattactttacaagaaacaatcaggactgcatgaccaccagcaaggttaggctttaaatagtaaatgtgaaggatgccagaaagtagattgaactgtatttctatgcttcacacaccacacatacacacacacttcctcacttttgttagtctgttaggatctcacaacccagcacatatggcctaccccagtgggtcaagccaacttttatccacctggatcagattacacaaccttcttgtttacattgcaagaacaaacttgtaacacaagtatcgagcccagaaaatatctgtcatcttaatttccagaagttaactatggaaaacatatcggcaatttcttggcggttggtttggattgaggttgggaagaagcagccactgctttaggattttccttagagataataagtgtctgctatgtgccatagtatgtggtgagtgatttaatacacattatctcatttaattgaggcattatagagaaaactgaggctcagagacatgcagcaaattctgaaggtcacacagatcatgcagcaaagctgactctgggtccaaggaattctaactccacctcag

SEQ ID NO: 39755 - DNA, 566 bp, Homo sapiens
ccttttagaggtaaaaataaactgtgtttcaaagaggctaagtagtttgtctgaggccacacaactagtaagtaccaaggctaaggttgaaacgtagatttgattctaactgcaagaccttcctgcatccaggggaaaggggagcctagaatgtgtatttgatcttctcagcgtgcttcacaatttaaggatgtgtgcagcagagcataccaggggccccttaggtgttcaggagggtgtagggtctatttagaggtgagggtgctcacaggcaagagatcttaactgatgactcatggagatcgatgtggggcttcagtagagagccaaagaaaacaagtacagataagacttcccaaatacactggaatcatgggtctggagggaagagggtataggagggtaaataatttttcctgtcttcaaccctttggtgtctatagattttacttcttctctaactcatcctacagcttcaggaatttcccaaagaacttgtggacttgaatgtgtgagccaggtttgggggcagtgagtctgtggttttggaagcttcataaatctca

SEQ ID NO: 39756 - DNA, 972 bp, Homo sapiens
atgtcactgaccatcagcaagtttccttgaggattcaaaaggcatgtaaggctcccacattgtcacagtcatagtaaagaaaatttatgattccaaaaaccctcttgttctttcaagataggatgaggagatcagtttgccttttaaaatagaccccagataacatgctccatgttgagcatgacctggcttcccagtggagagatggagaaaataatcctggtgcaagttgctggagagggagagttgattagcatttgtttccttgagtaacaacataaaccacaagtgatcgagtgcatccctgcttggcaggaggagaatgactgttcataaatgatgcccttctccatttccagagctcttgtcagcttggcttcccaaagtggtatcactcatctgtcaagttgattgggtctgacccagacaaagcaaaccagaggcaatctcaattacgacacatttgtaaatgtcctgtccaactcattccaaagtccaaataggtgaatcagaattcgcaaaaaaaaaaaaaaaaaaaaaaaaaggaagatctgcattcctcatcccacatttgcccacactcatgatatggatggtcccaaatgtgccaaatgacttagtgggctacataccctcagccaggggcactcctcaaggtccaagactttttcatccaactcagggaaattatgctgtagaggccacaaggtgaacatagagtctcatggtttcattggtggatgacagtaaaaaggaaagccactagttttatggctataatctcttcaataggaaaagaaccagaagctagtgaggatcacttaagaaccatgtgtgtgagtgtgtgtgtctgcatgcacattggggtaacatggaattgggttctgaaaacatcaggaaaacagatgctggaaacattgaaaacaaagtgtacctgccaaatttggcctagggatggcctaagtttcaggt

SEQ ID NO: 39757 - DNA, 448 bp, Homo sapiens
ctccctagtagataatactcatcatagttaataattctttacattaaaccttccctgttgaaactatggtatggtttctgactagaccctcactgatacagatacaggttttaggaatgtcccagaagagcccatacagataggatttgggaactggtttgactgtgcccttggaactgagcccagtgctgagttttgtttgttcctttgcttgttgccaataggacatgggatgctagtaatccatggcatgcagttgcatcacaattaatcaggttatcctgatgaagtgccaactgaagcaggtgccttggaagcccaaatagctgctgttcttgactagtaaacagtaatgaagaacacaaggactatggcacagaatgggttcttttgaatgcattggagcacttacagaaagaaaatgacaagcttgggtcctttacagctc

SEQ ID NO: 39758 - DNA, 1267 bp, Homo sapiens
ccttcatgcttgctgtgctcacttgtaggatgtgtcagctaggaaggtaattgctgagtgaataacagacgttttccccataggactgtgagctcagggagcagaaaccatggcttttcatcttatatctatcccagcaatgcctgacctgtgataacatttgaagagccttggagcctttgataaactttacactgaatcaggttttttcttgttgttatcatcagagcaggtgccaaatatcacttgagaaacagaaattcacatagcctgtttgtttgcaagatgaacatgtgaccttctgtgtcatgtactaaagtccatgcctgaaatctattaactataattaaatgagttttgttttttcttttccttttttatttgaaagcagaggaggcaagcggacatggaaggtttacattaaaataagggtttttgaaaaggtcaagaaatctggaatggtgggttcaagggtaagttcagttttaccaaattccctcaagagtcattttgtaatgtgatggcacaatatggaccttatttggcaagtgacagtatttagggcaaatgttgactgtgtctcaccccatgtaccactgaatcggggtctgtttccttggatggtttcaaaggctgcaaataaatggagaacaagacctgaacatgtgtcatggcacatgccatcaaaagatagtctttcaaatggaaatatatttagacttaaaaatatatagcatttgcaaaaccaagcatagcagaatatgtgagtactttctattctgcttcctcatcaaagcaaactcctgccagcatgcttactataaataagtgcaaaccaacctcaatcttaaaacatttaattcacctatattgagaaaaatgagaagatgaaaattttagttttctgaaagcttttttttctgatcacattttcagtacactttgtctcatgcatcttaaacatcatttggcaattctgtgtttcttttctggaagtaaataaaccttctagcgcaagcaaagagaaaaataaaacataacaaggctgcccctctgtggtgacatgctttcacacccacagcagccagcccattctcacaggctctactaattgcagctgcattccacttcctaaaatatggaaattttatacacttacttttaaattaatgctgcagggttttaatttaaccataatccctcttaaagataagagactaatggacatatttacattatatcaatagagatagacactgaaaaatat

SEQ ID NO: 39759 - DNA, 973 bp, Homo sapiens
acaagaataaacctcagagaacatgcagtatcaggacgtctaacaccctccaggcccaagaacagaatgtaaatgaatgaagagaggtgtagagagtggtagagcttcggtcacacatgagaaggcacattctcccaagagggattcaaaagcacataaaaaatgaagcaaaacaagaaaagacacttgcacaaaataacaaaacaaatgtataggtcaccagttgcagaccatgattcagctcccttctactagaggaggaaattaagacccagagaggaaaaatgtgtcaaaggccacactgcatctttaggagtgaaggagaacaaagcgcacttcaccttcaggatctaaatcttcatggaaaactctaaggcagatgggaaaaagagaacttgttgatattggcccttagccaagggcagagggtgatataacaacaactgatgtttgcataacttcacctcctggaccctggggtgcttgcaaacatccattcattcatcctggttcactcatgtgaaatatgtaggtggtgtgttttaatcatcatagagtggtaaacaaagacacggttggtacagaatctccaagggcaggagtgtgtcgtcagctaaggacaagcattattatcatggccttgctcctgagtcagtacatttgccaccttccttgcgcaaatagtcaatactttaagcaattttctattttatatgtaaacaagcacttggggataaaaagaaccaagaattctaatagtattctaaccctctcccacttaatcctcgaaatagttactgaccacctgctatgatgatggacactcctttaagtgctgattttcattttcctctggctaatactggcccatgttggtctgagggctgctccaaaattaactagaatatgtgacaacagataccactataacctccctattttctgatttattctcattccaacttatatcttt

SEQ ID NO: 39760 - DNA, 737 bp, Homo sapiens
gttccagaatttaaagtacatcagatatacctgacacatctaaaggagttttcacttttgtaaaacagaatatactataaccaatgaatactgaaactaagtcatctgggtttacggcttacgctttatgacagagactgctgtcatcgtcacttctctgtaaatacctaaactacaatgttgatgtgacgaaaaatcttaatttgcaatctatttagccatgtgctcactttctggaaaagttaaacaattccgaaatacaaacgatttcccaagcctcaactcatttcttacaaccttagcttggcacaccaagaagattcctcttctttgacctttgtccctaaacttccagaagagtcccttccttgctcaagagataaaaagttaaccagtgtttttcagtgacttccaactacttccacacaagaaaactgagagtaccatttggccctggtggcaaacgcagctgagcattacatacttccaaaggctaaatgtattccacctgtgtatatatatcatcaaaagcatacataacgcacagttttccagaatagtcctagctgccagatatgagggaaaaaagtggaatgatgagaagactctaaggaaaagtaaggatatgccagcaatgagaagaagaaataatgaagaactcaacattgacaaagttagcaggtataacctgaagtcacatggctaacctggtcatcttgaaaacctgtccctttttc

SEQ ID NO: 39761 - DNA, 550 bp, Homo sapiens
aaaagcaattgagttcttgccactgaaagtaatttttgccattgaaagtaaagcaaactttcaacggcgaaaaccgcaattacttttgcaccaacctaacacaatctatcataaagaaaaaaaaacatgcagaagtcaaaataaattataagcattatctacatatgctgcttaagctatgtgctaaaaggcattccaagtgcaagtgactcagaggcagaaagcaccacacatggaggattttggatagttgcctggagttaagtcaacattttcctcattcttctgctcctcgcctttcagcgctgcttctaagtcttcctcaggcggatgaattactactgtgggaatatcatcactggcaggtgaaaccagtagttctggggcctgacgctgactctcttgggaacttctggaggtcaggcggctgatgctagggctagaaggaggactgttttgaggggtgggtactggggttgtacaccttgagcctgcaggggttccagctcttgaagaaggaagaagatgaccaagaagaagagataaaggt

SEQ ID NO: 39762 - DNA, 1039 bp, Homo sapiens
agaggtccttaagagatatattttaataacaattaaatactttataataaatataatatataaataacattttagtaacaattactttataataaatataatgtataaatatttacaaatatttatttactaatttttgagttttgaaaaaaaaatcaataaagaccaaaataaaaataaagtccaaattactgagagctacattaaatgtaaataatccaaataaaggttagaaactgtcagattaaataaaaaagcagtaagtaaagttattgcatgcttttaaactagaaaaagctactgctgatattgcattatcctaactttgcagtataataacaaaatagttatgaaaggcagtctgtttttgaccactagatgaaactgaatcaggaaagctacagagctaggagcactatgtcaaatatcaaatgagtgttgagtgaagagggatgtgaagtacaaggtcaactaatctgcaactatgtacacaatttaaaaagttaataggctgaaatacaaatgattaatgacattcctttcctaaaaattccataaaatgctcagaaaataagtatttcaagaaacttaggactgccatctttatatgtgacttgaaagtacagttgatcctcattattcatgggattccatatttgcgaagttgctgactcactaacatttacttgtaaccacaaaatcaatacttagggagatttcatgccatttttcggacaggcacagagcagcataaaatttgagttgcctgacactcatgttcccaggtaaggcttaaaaatgtgatactctgacatcttatttcagctgccaatatattaacctcataaataatcaccttttaaattaaaagagggacaacttaacaaaacatactgaactatttgtttaaacttctcccagtactcagcctagcacatggtaagtactcgataaatgtctatggaattaaatctcaactactagaaaacaaaaattccaaatgtaaaagctaattatacagggtttatttttggaatta

SEQ ID NO: 39763 - DNA, 1928 bp, Homo sapiens
aaattagaagtaggaaaatttagaatacttccatctcctttgagtcacgaacttggaaaggagaaagagacaactgcggggacgcatgtgctctaaagaaagcaggaagtccgcttcttgagcatgggccgttcacccatcatcacaaatgggaacaccggccttaagtccatccccattctcttctaaccctgaaatcaaagccagtctcagtaggaaacgcgatcttgctagctgagttagagaaggagcaccagacagctcaggacaccctcctccttctacttggcctgcggcaggaggatactccccgggtcccagccagtggagaaggcggacccggcaggcaacagcgaaagagccttggccgggaaggagcgcggccagtccacgcggccggagaactcaccgaacaaagcgcaccgcggagcgggaggggacactcggaaagagggggaaagattcaaccagctcttcaccactgcctggggctagagacaggtggagccgccgtcctccttagaaggagaagaaagataggttttcgagggctaatctgaaactcctgcgccaaggcaaccggaaccgggaccccgcctggggagcgcgctaagaaacaggggaggcgagcgctgagggaagggatggatggtcggggtcacaggcggcctctgcggggatgtcggggtcccgcctgagccgcgcagaggatgcccgcggcgcgccgccggccgccccgactcgggcctcccgagcgcagccgctggccccctcccacccgcgccccaggccgccacacaaaggggatggcgaggcgcgccggccgccgggaggtggaggggcgacgggcctgggacgaggtggccgagccgcgacgcccgccgcgccccccgcctttgtctgcctcgccccgcgccctccccctgcggaggagccccaccgccgcggcgccctcaccctgctcgttacccgggtgagtagcggtctcatctgctcgccggccccatcagcctccatggccggccggccagcccgtgacggccgctacggtactgccccgcgcggtctgcctgcttctgccgctgcccctgccgccgccgccgagcccccggcgcgcgaggacaaacgtgggtgcgtccgtgcgcgaggtgtgcgcgcgtggggagagccgggcgccgggcgcgggagacgcggggcgtgcgtgtgcgcgctgcgactgctgggctggctttagtaggagagcgaggccgcggcgtggaacctgaagctagaactgagcgaaccggcggaccgagcgggaaggaggagagccgcgtaggaggaggggttcgggggcggagccgcaaaccgtgacgagcccggcgccggggccaggcaagacacgcccccccgccccgcctcctcgggtcacgccccctgccagtctggcaccgccagcctcctcagcgcgcccgcgggccgcgccgctaggccaccgggagatggggcgggagggaggcgggacggacatttgtcccagccaatcggcggctggcggacttccgctcgcctcccccgtgccacctcctcaggacgcaccgcccctctttgtataagcttaattgaccgaagctgagcgtctaactagtttttcaagtcggaagctcccctgacgttctcaatggggtggggggtcaccacctcccttggctcctaactacattctttagaggctgcagggaaggaggacgccacctctgtcaaggacgcccaggataaccctccgaagcaactaacgagtcttcacgactcctggaagtttcttttctgtcaatccagtaggcacgaaccccaactcagggaccgtgaaagatggggtacacttgaccaggtgtcctcctgtgcttgctcgcccactgagcaccacgacagctgccactttttttttt

SEQ ID NO: 39764 - DNA, 842 bp, Homo sapiens
gacaggtgtggatcatcctggaagggctatcttagattggagggttaaaagtagtagtttctgaagaagtgacatttgagcagacacctaaatgaagagagggttcaagtcttaaagatttactggaatagagtgtttgaagcagagaaaatagtaagtgcaaagacagacatgtgcttggcctatttccagaacagcaaggattcccatgggactgggtaggaataagcagagggactgcaagtgaggtagccagtgatcacatatatatgattttataggccttttagattttaagccattagaaggttgtgagcaagggaacggcattgttacgttttacactttaaaaacatcactctgggttttgtatagaagataaacagtaggagagcatgcgtggaagttgggagaccgatttggttgacacagccttagttgacctccaatgagtcatgccttgtgtaatattctcccttaagtgctgacagaacctgtgacttgcttccaatgaacagaatatggcaaagatgatggatgtcattctcatgaatatgttacattacataagacttcatcttagccgaccagagtgtgagtgattctgctgaagaagcaaaccaccatggtgtgaactgctgtggagagggccacttgcagggaactatgagacacttctaggacctacagatagctcccagccaagagccagtgagaagctgggtctccagttacacaaccacaaagagttgactttaccaacaatttgaatgagcttggagttaaattcttccctagtcaatccctcagatgagaatatagcaagcctacatcttgattac

SEQ ID NO: 39765 - DNA, 3806 bp, Homo sapiens
aactggtctctcactaccctgacagcctaaaaacgcagctggaattttgcattctcttcccctaaccaattagtatatgcatttcaaatactatgcataatatgcatattagtatatacaagataggctaaacactgtgtgaaactaagaaggtaaaccctctcctagcttacaaacaattggtacaattaaaaatatttgacaatggtgaaggcatgggcaatggctatttacaaatcaaaatataaatattttaatattttagtaataggcgtggtggtaccagtgtgtctcagttaaatagtagtcttgccccaaagcgcttttgaatgctttgccacctatgcatcagtggattcaggaatgtaatgagagttctcaaaagtaatggaagcaaagccaagcaagtctcccactccacacatcttgcttttccctttctgtgttgagctttggatcttccacaaaggggactgggtgcccctgcggaagtccagccagggagtagtcagacctggggggagaggatggattacaagcctgaatttgccttccctaccagacaagctctggcttgaggaatagagaagtgaaagaaaaaagaggtgcttcgactcagttggagacagggagggttatgagtggagtgaagacaaggctcttaattcaagctgcctcaaattacatttgtccacacacgcagcaaaatgctgcttaaaaaataaatgaggttaatttctctttacgggttccctttcatctcagggtttcaaagcactttgccacaaaagatcctttatcttcacaattctttttttatctaaatataaacagagggccctaagtttatatttaaagttcagtaaagccctaaactttggaaagaaaaggtactttaaaaattcttttatcattataagatccaagtagccaatcaaggaccacacagacagaaaatccacattcagatgaaaggccacacctctgctcagatgacctgcgtgctaattaaaatcacaattaaaacaagcagaggggatggagagtggtgacttaacttgcccttatcccagcagatacactcacaactgactcacacaggatacatcggattttctccagcaggcatttggaaaaaagcaaagaagaaattctagttttagctgccctccatctactaacccagtaaactccatccctgggtcggtgacacatccctgactcgcagccacctcagcagagccccattccgtgcaggaagagccagcttggcctcctggtgatgggaatgttgtttgcatatgcattttttcagcaaaagaaagtctcaaaatctccctggttccagggtgtgagtcattagtgggtgtttgttttttgggttctgagtgtgagtcaccacctttcctgctgttggtcttctcaatcctagggtaacaactaaaaagcgatgactagagatgcctgtgatgcttaaaagcggacacctggacattattcatttggcaattgtatcaacaattaattttaaagtttgttcttttctctgtaaacaagtgtataacgtttataaataacagtgggaaagaggaaggtgggggaagggagagaaacaaatctaaaaaggatatgactgaggtaaacggaagtagagtctagtcaaagccaaaatagacaactgcctgtttgtcagctagaggagggccggggctggtgatgttgaccaaactctatacatgaacaagcatctgatgctgctctctaggacttttcctcattagcctgggagtgtgcgtcgggagggcagtcaggagggactgccagtgttaaccatcaactctagaatctgaaagaacaacatggctttgaaatgacatcttccggccgggtgcggtggctcacgcctgtaatcccggcactttgggaggccaaggcaggcagatcacaagttcaggagttcgagaccagcctgaccaacatggtgaaaccccgtctctactaaaaatacaaaaattagccaggtgtagtggcatacgcctgtaatcccagctactcaggaggctgaggcaggaaaatcacttgaacctgggaggtggaggttgcggtgagccgagatagcaccattgcactccagcctgggagacagagtgagactctgtctcagaaaaaaaaaaaagaaaaaaaaaaaggacatcttcctgatgttcctcccattggtgctatgcctggtaccgtttagtactgggaaaggacctcaagaccacccagaattctacaatggagaatgttctataaagtcacggtgtcatgccaggaccaggaaccaaaaaacagcagcttgaaaaccagtgatttgacaatttgggctaccctaacggctagtttttatttcagtgacattgggcaataaatcaagccatttaagatggttgaaagaaatcaagatgaccacacacacacacacacacacacacacacacacacacacacagagcaggttttgagctcatggaggactcaacctggatttgactcagagaaggcatttggccacaggcatttcagtttgctttcagaaagtgaggaattacaaatgaaaaaaagctctgacttttcagctggtttgagtgtggaaatcaaagcttggcttttttctacccagaggagtctaggtactctgtgtcatttctagtatataattacaatatatctgtatgcccacatattgtcactatattaggtattttacaaagcccagaaaaacagagcctctgtcctggtgttccaaatgttagtcaacctatttaaactcttggtaacaatgctgaggtaatgaaaatgaactcagctgccactgttggcacagacacagcggaaggaagaagtattatttgattcaaagcattctcatttaggggagaaaaaattataatgcatatcaccactaagtggaaaataaagattataaacttggagttgtattcctgagaccttgacattttaaaataaaaggcttcagtgtttgcagaatattttttcattaatgtctcagttacttgtttttaaggataattatttgtggatattacaaaagaacttcctgaactacccatttacttgtgggcatatacatttgaaagatgccccaggcccattccaaagcaaaacaacacacacacctaattgtgactttatgcctaactagcctggtattcatgacacatctttaaaaattctctcaaaaaagtgaccagttgtttggctcctgcctttaatcccagctctttggaataccaagacaggaggattacttgaggccaggagcttgagagcagcctgggcgacatagtgagaccctgtctctacaaaaaggttaaaaattagctagatatggtggtgtgcgtctgtagtcccagctactcaggatgatgatgtgggaggatcacttgagcccaggagttcaagcttgccctgagctacaattgcaccacttcactccaccctgggcaacagggcaagaccctgcctgtaaaaaaaaaaaaaaaaaaaattaaaattaaaattctatgaaaaacatgaagacctgggatcagactctggcagactgacttgttaacactttttcagaagaattctgctcttatctcacttaaccttgggtatcttttctcagaaaagtgactgatgagatgttctcaaatcttatgacaacccatcaagttgcttccatgctcattcagctcaagatatccaagaagtcggtacctaggggccatgtctttgctgtcatcctgattctttagctg

SEQ ID NO: 39766 - DNA, 2481 bp, Homo sapiens
caaagtctcacctggttcctctagttggaagggaactctcttacatcttctgaagtctcacagaactatttcagcatcttttgtgtagtgtcaattactttttgtcttgccaaattgtttctggaaaccatttacttttacatctgcaactgcccccaggctaaaaccttaaatggaggtaaatacttaatcatttaaaacagttttttttagagatagggtctcactctgttacccaggctagagtgcagtggtgccatcgtagctcactgtagcctttatctctggaatcaagtgatcctctccgctcagcctccctagtaactgggactacaagcgcatgccaccacaacaggttgtttttatttttatttttttgtagatatgggaatcccactatgttgcccaggcttgtctagtactcctggcctcaagtgatcctcctgcctcagtctttcttagtgttgggattacaggtgtgagccaccttgaccggccttgacattgatttttaatatgaacatttgtgcacttaactttttaagtatttgtttctttaagttcactgaaaaaatgaagttagtcttaaaaagtttctctaggccgggcacagtggatcatgcctatgatcccagaactttgggaggctgaggcaggtggatcacctgaggtcaggagtttgagaccagcctggccaacatggtgaaaccccgtctctactaaaaatacaaaaattagccaggtgtggtggcacatgcctgtagtcccagctactcaggaggctgaggcaggagaatcccttgaacctgggaggcagaggttgcagtcagccgagaacatgccactgtacccccagcctgcgagacagcgtgagactccatctgaaaaaaaaaaaaagtttctctaataagttgttgatgcaactgaattaaaaaaagatattctatttttcaaaggaaatcagattactcattaattactcaacatcagtcactatgaattgtgcaataatgaaagcaaaatttaaaaacaggagactctaaaaagagtcagcaaattagattatgaatggaatgtttaaaagacaaagattgagcaattttaagggtcacagctgtccctaggaacttaaccaactacaatgttcagaacaatagtgtatgtaaaggaatgcatattagatcagatcacataaagccaagtattgaaacactgaaattcaagtaaggaacctacacaatccctactgttaaaacagagagagagagagagagaaagaaaagtaatttattcatctccagtaacatgatcattcactatattgaaatgctaaggcagtaaataatctaagatttgggtttgatgaaattagtacgtttatttctcagacatgcagaaggaggtatttaattaaccagcaagattgccagatgaaataaagtactctcaagtaaatctgaatttcagataaacaacaaataatattttagcataagtgtatctcacatttttaatggatttatatctcagttctgattctctgctactaattattatgactcattaattcaattactgattcaacagtaatttgttgagggccttattctatgtcaagtactgtgggtggaattgaccacatggtgataagcaaaatagtcatgatcttttccccataattcgtacagtttagtaggctgattgaaatgagtaaataggcaattactctaacataatacttgccatgattcacagtttattcattagagggacaattaacccaggcttgggtcagaaaaagatgcctagagaaagtaatttagattaggccaaaggcaaaaaggttgaggaagtagagggagagtctaatgagagtgtacctaccacaaggggaaagcttggaagacaacggatatcacgggacatttgagaaaccgaagactccaataaagtctagttgaactatagaccacaaagctgtgagtggcaagaaatgtgactagagaggtatgccatggtcagatcatgaggggccttgtataaatccaatggaagccttattgaatggtccatgcagcaaagtgacagtcatatttacaaattagaaagctcactctggcagtagaggagaaaatagactggaagtgaggacaccattgttgtgggttcggaatgggtatagaaagaagtaaatagatacaagagctatttagaaggtcactcaaaaactgttttgctctttagataggtgcaaaattggagagagcgtctccctctgtcgcccaggctggagtgcagtggcactgcaggagttcaagaccagcctgggcaacatagtctctacaaaaaataaaattagctgggtacagtggcacatgcctgtggtctcaactgcagtgagccgagatcgtgccactgcactctagcctgcggtgacagagagactctgtctcaaaaaaaaaaaaaaaaaaactaggctgg

SEQ ID NO: 39767 - DNA, 580 bp, Homo sapiens
aaaacaaaattaatggtatgtaccacaaaaggtagatgtcaggaataaatgaaattgtgaatgtaaaacaccttgcatgatgcttggcatgcagtaagttcttaatgggtggtaggctgctggcagaacatggtgtatatggtgaggagaggggtacaaactgggaagtaagagactggaattctcattccaggacagctgctttctgtataactttgggaaaatacctttatccctttgaactttgcttttcttatctacaaagcaatggcattggatggcacctgggatctccacactgtttcctgtaaaaacaattggctttgcaaatttcctcagggaatcccctaggaagaggctgcgtcaaaccaagcagactctggtccctgtctctgtttcaaacagagaagctccaattccatttgttcgacatgttgggctttcagtagagtgctggtttaaagaaaaggtattgctgcggtttaaaaaaaaaaaaattgaatatcagtgtactccaagatttaagtcttccccactctaatactctaagattctgtgaaggtctgagcaatgatgggtt

SEQ ID NO: 39768 - DNA, 723 bp, Homo sapiens
gggggatatctggggatgccacataatccaaagactactcaaggtagggtgttgggcatgtggacttcttcagtcctgtatgtcatgctgaaaaacacaatttctggaaatagtaatgtgtcactatcaagattggctcacaggcagtgacgtggagtcactaccggctgaggaacaaaaaaagttcaaccaaatagccagtcatctagtcaggaaagacaatgacataagctccgtttgcctcctctccaggacccacttgtttgttttgctctaaataaacacacttcaaaagccccaaacagttagaattctcttaatggtgagaggaagttggagttaggatttgtgacaattatctgaaaaatgccccctcaggctggaagtctggtctggactttgggcttcagtggtactccagggaccttggatcaagttcagaacaatttcctgagtaggcctggcccctgaggcctattcctcattctgtcatttttaccaagctgtttgcattgctttcctttttggattggccaagggctactttccttgtcactaagagcagggtgataaagttcagccttcatatttttaaagtgtatctttctcgtaagggctgagggagctgtagggtgtggcttcctcaagagttactagaatgtagaacttaatggcttggacttgtaggtcagaagaccagggtgtaagtccagtgtccctctg

SEQ ID NO: 39769 - DNA, 812 bp, Homo sapiens
ctcagcttccctctggaactccactacaagcagatcgtatcggtgagtgcttaaacacagtggcatgaatagagcagcccactgtctcattactttaagcaccacgcttgagaattccaagccaacagaagaactcgacctgttcccaagccttttgttgccgtctcctaaatcctgcaagtcctcctccttaaactaaagggctggggatttcagaaagggtgaaggaaacagtgctcttgaatcagaaacaagaacaaggcacacaggaactttttcctgaccttcaacttaatcacttgcctaccaaggagctaaaagcattcacattttaattttcaaggaaatgtttggtctcagttttcaggttcttcctgcttgactgggtgtcctcatttctctcagaaaaaaaaaaaaaaaaaaagacagtgatgacacagatctgcctgccctctagtgggcaacgaaaagaatttaaagtatgacgaaagacgagcctccagggaattaagatgactttttaactttgctacatttcccctaactgactagcagattgagtttttgccaacactgctcaaacagaacctgcagaccatgtctacaagaagttgaactttttcttgataaaaacaatgactggtgggagaaaaaagaggtgacatcagaaaacggggaaatcactgggtttggaatgagctgtgcatggcactgaagagtcatgtgactagatctcaccaatcatcagctatctcatatgtcaaactgggataatagtacccattatcataccagtgcggtgagaatcgagg

SEQ ID NO: 39770 - DNA, 1813 bp, Homo sapiens
tcagctcaccctttcgtggctcgagccagttaaacgtgaatttgacaaggaagcacttctgaaggctggtttgtgagtggaaatgaacctaagtgccacctagaaagtttcttctattgagaagaggtgagtagtgggtcttcagcgggacggctattaccttccttcattttactctcacaaaacatacagcttttactgatagaggcaggatttgtaacatcacccaaatcatactgtacgtcctgaggatattatttcacaacatagaggtacttctagagcccatattttaacgtctaggagagccacagtctttgatttgaaggagaaataacgatattgcacacaccatatcacctttatggtagaacaagctgtgaacaactagtgcgtgtggcgtttatcacatttaacagcgtgttgcttttatttgtctcctctgccacactgctccttgagaacagggacgttatttttattgttattttcccctcgtattcagaaccgtggctggaacttggcaggcatgaaatagacatttatgaatgaatgaacgttaacgaagaaaaaaaaaggaactggatgattcatttggttctccgaaggcgggtatgggggacggggctcggactttggcccagtcaccgagtgaggcacagtcccaaagtcctgcaggtccgcctccagtcacggccgacccgggtctgcaactggtgcacaagcctcctgaagcgaggctgcgcgcgtcctgcacggtcccgccccaaaggcacgcagacacgccccctttcctggtcattccccctgcgaagtcagttccactctagttacaggattggggcggggccagaaaggcgcaggcgcaacgggcggcggaagtaggagcctgggaaggaagagggaacgggtcctggcggtgctttgcaaagggcccgtgtttctgttgcgggaagctcccgggggtcgcacgtgcgtccgagcccaagcccctcccctccactccccttcctgcgtgccccggagccgccaagcggctacgttcttctcggcccgccgagatggcgctcgaccccgcaggtaccggggcgggaagcggggtttgccgaggggcctcgccccgggtctcacgccgcgggccatgcgggctggatgccgacctgggaaaggtgcagagctctgggtagcattgcttccaccagcgtctcctcatacccggcggctgcttcgcccggtctgaggtcatcttctcacttgttggggattatggttatctgaggttgcgtttgttgtctaaagtatcatccattgtggtttccaacttaacgcgactagtctcttcattgtcaccctcttttcgccccttaaggtcacagatgcatttaatgtatgctgcagacactctggccccagaaaaatttgtatatttgttctggcgcacagttttacatttctgtttgggagttcatggaccccgagttcatccttgtaacccaacttaaaaacatatttcaaaggatccatcactatggcaggagtcagtttctttggaaaggatcttcaaaatcttgaatgttgttttaatctctttgcttccagccacttccgtttgcagcaatagttaacttaccctcgaattcccgtccttgtggaaggtcacctgcagtatctttgcgttaggctatttttgcaagggaatagataacatttttggagggaatggtagttggtctagtccatttctttcattttatggatacaaaaagtcaaaacattgagaggtaaatggcgtcaaacttgggagattcagaaa

SEQ ID NO: 39771 - DNA, 2371 bp, Homo sapiens
agtatgtattacacccatttcagagataaggaaaatgaagaaaaagtttagcctcttacccattgtcaagtaaatggaaaaatcagcattcagatactggtgttctgacctaatccagtgtcatttcccattatgttatgctgtctctttaatattaaaaccttctacttgcgtaagatgtctggcttacaaacaatatcacattaaaatttggaaatatcctgtaaaggatgcactgttctcaatttacagatgatgaaatgatcacaagattgggcaatgagatatggcgtttttagagaaatgaaattctgccttgagatcttgctcaatccaatttgaaattccaatctaaaaaccaaaatgtcttctacacataaggcgcaagggtcaattttaattctggtacgtctgtctttgatcaccttagcaaatttccatcacctcttggagcaactgatggtttgatttgtactagagttttcgtgggtattttatctcgctttcgagtattggggtttcttttgtgtagagggtgtcagcctaccttgcacgtagtagtagttactcaacaaacagccgaaggctggaatgaataccgtatacaggttagacattggagaaacgacgaatacctgttagccctcgatcaagtgcagggggtcgatattcaccactcagatgccccagggagtaccgtcctagccaatgtccctcttttctttccgataatttgtatcggaaagaagcatttagcagtctcaatgaatgaaaaaaaactgaaggcgccccagtaagagtacgaaaagaaaaggagtaattagagaagtgaatgaccaagaagggcctggacagctgggggtgagggtgacaggggaaagggtgtggacagctgggtgtgggggtgactggggaaagggatgcccaggagtgggccgctccctagtcaaaggagggggcgcgggagggagtgagaaaaaaatgacgtgtctttttggaccggcaacagctacggaggttggccgcggcattgcccgcatccctatcctccacccgtccctggcgagtcactcacccagaagccaggctacgtagggccgcccccaaggccgccgagtttcgattccttagtgtttggaaacggaccgaaaacaaaccgggtcgccaggggtcaccacgggcttccggtttcttcgaagacaccgccgcttccacagcgaagggagctgctccgggcacgtcgcggagggagtcccatttcttctgactcggcaggagcccgggacgttctggaaggagggacgagccgaggcaggaggggccgggccgacgcgagagaaggcccgttacccagcaatacgcgcgcgagacccaggcccgccgtcgggaccagcacgggccggagggaggggaagcactccggaaagtgattggaagtgtggatgagctctcagccggaaaaggggctgccgctgtccgcgggctcggcgccagggacgcgcgaggaaaccggaagtcaggcccgagggagctgggagggcgttagcgaagccaggttcggtcgtgggggtggggaagtgcaggagtggcgcgcggcgtactacatgtcccgtgagcctccgcggcgggacggggcggggccgcgggacgccaggaggcggaggcggagtggagttaggtaagagcgttaccagccgtcttgtctgttgggccgaggtcccccttcaggggcgccctctggtgcgtctttttcactcagtgtccttttggggggtccccgggccgtgtggtgcgtgctggctcggctcagtagcgctgttacaggcttacgagctgacgtggctgggaactgggaagtctgttagaagccgttcctctgtagcctctgttttctaaactacttgcaagccctcaggcgatcacttgaggcacaagctcgacgaattgcgtaggggtctgtaattattcacaaacgacaccacgacttctagcacactgctcaatttatggaatgagagacagggagaagatgccagagtactggagttgcgcccggcttccctggagttgccaccaccttggttatttctagatgatagaccgtccctagctgtggagtcacaagtagttgaattaattagtcattgaaggtcgcagccaggtggaacccctgtaactctaaggtattattggttaaataaacaaataaacaaggaacaataattatagaaaatttaacgtcactaaccgccgattagcaatacggacattactcaccacccccttaaagtagtattttgtcatctgtccgcttaactatcagcccaactgtcagcccaataggatggatttcactcaagggtttatatga

SEQ ID NO: 39772 - DNA, 1027 bp, Homo sapiens
ttctgtttatctctacagacagaaactaaaaacaatggctacaggccgctaaaagcctaaaacaaaacaaaacagaacaacaacaacaaaataagttggcttagacaagcttgcaaaccactatcctttcttatgcctctaggttaaggatgttatcatatacaggtgtcctctacttggtaactttcacagctcatttccataaagccaaatgccagcccagtgtatgtcacctcctactgtggccaacagatggcgctaatggtggtttgaaacttgtcacttggggcttttgagcacatgagctcagacatagcctcttagaactagtctttctctataatggtctgagctgacctgagagccagaaactttaggatcatttctctctcccaccccacctagttaaatcccaaatcccattcatcttaatcagaaataattcctgaatatgtacccctctccattctctccttcctctgtgtgtgctctcctcctgtccctttttttagcactcatcacaggtggctatttatgtatctgcattgccctgctatgctgtgaactcctcagggcagagactgggtcatattcattctgtgtccccggtgtctgacagtgcctggcacaaagaaggtgctcacgttggggactgaataaagttcccctggcagaaacccaaaaggttcaaaatgactgttctttcctgtagtcacagaagctcacagggcatttgacttgccctgtatgctctgaatggtctggtatcgtactctgacctatgggagatcagggcttattatcacacaggcttctggccaacagtgtggcttatttgtacattccatctctcttcttccagaagatgaaagacaggacatgatacaagctacgagatcatttttttaaagaaaaatgggtggttgtcatagcatttctggtgtcagactgcagatatgatcaagctgtccatttaccctggttcaaattgaattgctggtaattaagaatggggaatggggttagg

SEQ ID NO: 39773 - DNA, 645 bp, Homo sapiens
ttttggatattgatgatgatttgactgaaatcactacctctgatgaaagttatgttattcatgtatgcagccttccaattttattttaaatatgttaaaatttaaaaaaattatcccaggatattttaaattataagattggaacatatccactgagagttttaagcatagcttttagtactggaggtttaaatgtattacgtaggtacctttccaaatttctcattctaaatctcagctttatctaaagaatgttgaaatcacaaggagaaaatgaataaaagtgaagtcattgccctttgaccgatcagcctgccaacacctctattttgtctgtggtaactggttgttatacagcctcagttggccccctctggtggcagttccctgatctaccacctaaagcccttctggtgtatggttttggtgtatggttaaagcccttttggtgtatggttaatgacctatgaacaagctgtctagacatagcattaaaagtcataaaatgccatcttcatttgctctgttatcagcagggacattccaaaagtccgtgtgaaaaaaaatccaccaacagaaaaccaacactgaaatttccagatgactagattttaattttcattttctgaaatatagatataaaca

SEQ ID NO: 39774 - DNA, 733 bp, Homo sapiens
acagcaagttggttattctacttggcttctttctcatgacatgtatgggaatgaaagtcatagtggtatggttggtttatctttcacagggcttttacatactgaacatttctccaatgtaagtgacatttcaaattcaagaaggcaagcccagtcataattggcactgtcactgttcgagtttgatgttggcacctcatgtgtttgccctggttgagtaatctgtttacatctgggtaggccacacacagacaaatgtgaactctgtttatattcatttcctccctgggaacttggttcctgtgaatcgcagctttggaaggcctgatagattggaaatttactggtatagacttggaagcaaaaactttacgtgaatccgttttgggagctgacctgagtaaccttctttgggctacagcaaaggggactttcccattgacaggtccagttgattagaacaattgtatgaatgccatgcatgaatataagatgatcaatgtaatcaagacactcagtaatcccatgttacagatgaggcaattgaaacccagaatagagttagctagatgagtgcctattatatatcataaatatgtcttagtaatgagcagaattctctcttatttcctgggtgtctctcccaaacatgtaacaaccagctccactcccagcactcccaaagaaagacagactcacccctgccaaacttcactgtctctgccttcttcat

SEQ ID NO: 39775 - DNA, 825 bp, Homo sapiens
ttttcaggtacaaagagattattagaagactaagtggaacaatgaataaagttgacaatgtattatgttttttagatatgcatataaatgttaattgatttgggttttgcagtttttcttttcagagtttggagttaatgcatttgtttccttgcaccagtgtttttgtaggtctttaagatggtcagagcatctaaaaagctggccatatctttcactattgtggccttttggcactcaaaatatctctgtattttagtaatcccaaatttccggggagggacatgtggtagaacagcacagtgtattggaaaatgtcattaacattctttggctaaaatatttcaaaagcagacacattggattgacctttggcactgagagcaactgggagttccagatctgggtgccaggttcacagaattttttattgcgtaattggtgaaattgtttactagagacagagcttaaatgtaacaggtgtttccctagggcaccctcttaggggagtaggcaagaggcaaatcaatggcacaatacttattctatggcataatttttctcaattcttctgtctcaaaatagggtcataggttttttatatgtattaaaactgacatttcttccttttccccagttcccacggttatttacctaggataataacatctcttggtgtctagaagtctctctcagccctagagaatctacgtgccttttaaagaacacatgtctctacaggtatgcacactgcagctagacccactatcactctcacaagtggttgggcaacctgaagatactgctactccagccataagccaa

SEQ ID NO: 39776 - DNA, 939 bp, Homo sapiens
tttaagaaattcatgcccctctcttgtattccagctttcttctagttgggttctgcatatgattgtgttattagggactatgcctttaaaaatgaaaaaataaaaataaaaaggccatggttagcctgtgagcacatttttttattctggctctggccacaagaaccaagtttgactaggctctgtatcaaaataaaatccagagaggcattcctaaacttggaccttttgtccacactcacttcctgttgaccgagtgacatcccttcagctggccctccatcaagctgtttgcacagaatagggagcagtgttttcaagggcagcaaatcttgcagcttattaaaagtagcatggtatgcaactcagatgccagttctctttcctttttgggtttccttgagtccaaaggtcaataggaacacagaaaagctcagtgtattggtttgtaattccactcccactatggctcaatagtacaatatattcagatccttgtctcattgagttcttcaatcttcaatctttgttccctaaacacaggcttgtgtgaacatgctattagctagcagggttcaatttcagtattaggggttacattcagtttcaagctcctcacagttgtctacactgggtatgaatctggaactgctgccaattttctttgagggcattttagtatcattatctcagtgcttatgctattatctctgaagtgttgttttccagcgattttctgcctctaaaaagacaggatggtttagccattttatcaatgaaatttaagcatgtagtgtcgctgactcttgtgatttccttcacttcttttgttctactacctacctgaggaaatactttaatatttccagtgagaaggcaccttaagggagtctctaaccgctcaaaatgtggtctatagagggacagcctgggcatcat

SEQ ID NO: 39777 - DNA, 4324 bp, Homo sapiens
ctgactagacatcctgatttatgtgtctagatttatatttccagaaacatacactgtaacttattctgtttaatggctaagacacttctgcataatttacattgagactaaagtggttttttactgagatacttttctctatgacaaaccaacattatgatatctgatagaaatacaacactcttctttacattttttccccaaattttagaatgaattaaagacaaatacccatcagaaaacattccttgaaaatgcataattgtgatgtgtgatgctgtacagagcaaattcagactaatacatagacctcaaattcatgactataattttctctggatagttagaaagatattttaaggtgtttcatgcctgaggaataatgtcattattgaatgcatatacatacatggatgcctctgaggatgtcctatatctaataaacagcccaagtcatgggcaaatatatatcttataaacagggggatgggaaaagcatgccaatttatttctattgagctaaaatttagggtccacatttatttattgactatgatcttgggtaaatgactgagttttcttgtgtctcagtttacttatttgtaaaataaatcatgttacttcaaaagattattgcaaagattaactactattagcatataagaaagcttaacatactttattcatacagtcattcttcagtttcataaatgtgcccttctcggtagagaaatgggtaacatcagtgaactaggttgagaccgaagctgtacataatgataatttcaatgatttgatcaataatttcagattgatttttgttcatcctaagacaaaactttgaattctctatcttttctgtttgtcccctcttagctaggttggaaatactactcttgttttgttctttaaaggcaaatagtaaaatgtttatccattatttttcaaacactgattactgtagacagtgtcaacatgatcagtgtttgagttttaaagcaatagttgaatcaagttgcttcacagtggtttcttcaaaataccacaaaatgacaggaacacttacgcagtgaacacttggatttgcttcttgatccttggtatttgaaacatgtatggaatgcatcctctgtgtcagccaagacagcctctggagagtgaggcaggtttgtgtgttgagggaagggggtgtgcaagggggtggccatggctacattagttgcctctgcttctgatatctgtttttcattacattttgatagattatgtcatctttttgtcacatacattttcacccaagtctggaactatatttctctttcatttccaacttacatcctcaaaatcattcatggaagcctttgtctatataacaaatttctctactattttgagggaacatgtcctattgtagaaagataaaccttttacaattgttcgtcataagaggaaatctgctttaaaaatatttcatagggctgtcttactcttattcctaaaaaaagttattactgtagaactagttagcaagagttactctgttctgggttacttgggattcactgttagcaaagactaacaattagtttgtatatccgtatatggatgtaggtggtcacagtaatttcctgcttgattttttttgaattccaattaatataggaagtttctgaatttctaggtatttcaggatttgcatatacttagagttcaattatgttttaaacacattatctgtgcaagtgactgtcctaaatgttgtggctaaagaggaggaagcataaaaaaataaaaaaaattaaaaactgttcttacccatctcccaccccagccccaaattttaaaatctagcaaagtaaaaagctgcatgcaaatttttttttaaaaaaaaaatacaaggcagattgttttatattcatgtaacaattgtcaggcacaggagcctaagcagacacattcctggtgtggttattcataacttagctaagcaatgtctgctatttatcactgcacttataggctggtgagagtctctcattgcccactgctgagtcactcaccttttcattttgaaagcaagtttggccattttttttaaacaacacttttgctcaaataacatgaaaaattccaagtccctttggagttttactcttactactactgtagcagtttgttcatattaggatctcgcagactatctagaagcaatgaattattatctagtcttgcaaagatctagtataagaaaggataaataaaactaacaaattttaaaatggtatgaattcaggttttgtgactttttccttattaataaaaaaggattagtgatactaatgctactggatttgtagaaaggttaaatgtaagaatatggacaattggttggagacatggtaggcattccacaaatgtaagctcactgcgaacttcttagaactctgtgtagagtatgtattcctatgtttgttgaggaggggcattttagttaatatatagatcctacttttaattattattttcactctttaaatgttagttcttcacttctagagttgttattctgttggcttctcattttttcccctttttttcttccaagtgcaaaattttaagtgaaatctcaggcagccctcatttaacaatttcatgtgaaaaaataaccattgtgaactctcagagtagtaattacaggaagttatgaaactttgctaacttttactaacagataaagcattttcttttgattgttaggaaatcgtgtgtggacagcacgggagaacacactctgcctgtacacattgccaactcttgcttcattgagtttcacaaacaatcccaagcttaattttagccaaaaatgtaaaccagttcccacagtaaaagttgtgctaatttccaagttgatttttatttctttttcattcctctgttgtttgaactggtcaaattgagcagtgagatggccaagggacaaagggtaaggccaggggggtcactaaaccaagaccaggctctaggatttcaatgtttctttcttctttcttgccgtcagtaaagatcccctaggcattgacattttaaaaactctccatgtcttctgttaactcccttaggatcctgatctctgtaacaaagatggatggtgacacttaattatggacactcacaggcatccaattcaagcaatcctggcttccaagcccagatctgccccttactagcagtgtgacttcacgtgagttaggctctcagtttttttcatctttaaaatggggattatatttcctgattatagtagctgattataatacagattatggtgccaatctcagaggtaagataaatgcacttagcatacaacatagaacacagtaagtgctgaataaatggtacctgccattattattgcaagctaattaaaaacgatcatttgtactaaattatgttttattcaaggaaggtaatgtcattcctcaccaattaatcatttgttgatgaaaggcccttgagtagcaatgtcacacactgtatgagaactggaaaggatagatcttttgttacatcagccaccctgtctcatagatgactgctggctcctcttttctgcacgaaggccagaacatgaaaagttagatatttataaaattgctcaattcataatatttgagagttgatgataatttctgttttagctcttgctccccaaggagcagatgcttctggggaggttcaggagcacgtgaagaaacaacactgatagatggcgatcgggacaagagcaccttattaattcagctaccactgtgggtgactgcaggtcaataccctagggcaactccaagagccagtgtagggtacacatcttagagtcatcatacacaaggggtgagggagctaggttatttatacaccaacccctgattgactagtaaaatgtctcccctggtcgtttgggttttttttaatttttaatttttgtaggtacccctagtagttgtgatttctccaaaacttctaacttgctacaaaggaggacaacagagattatccagccagagaagttcttacataaagaaatgcagggcctgtgtgctcagcatggtaaggacaaggtaatataaacaggcacaaaaagcatttgtttttatttcttatacagtaatatggatctaagtttgggaaaattttaatggaatcttcctgaacatatattcttaatgatacaattggtttatattaaaatttgctattgaaacaaatgtagttttggtaaagaaaagctatcatatacctatggaattttagacaacttcctcca

SEQ ID NO: 39778 - DNA, 4099 bp, Homo sapiens
tgtgcaggggaactatcctttataaaaccatcagatctcatcagacttactcactatcatgagaacagcacagaaaaaaaacccacccccatgattcgattacctgccaccaggtccctcccatggcacatgagaattgtaggagctacaattcaagatgagatttggttggggacacagcaaaaccatatcaccaagctacccacatttcttcccagcaactacaaaatgtgggagtacccacaactccccaattcaggtttagtaactcactaaaatgactctcaaagcactttatgtttatcagtttattataaaggatacaactcaaatgaaagaaatgcatatggccaagcatcagggaaggagtgtgtagcttctgtagcctctctgggctcactaccctcctggcatatatcagtgtcttcaccaaactgaaaatttcctgaaccttgttgtttagggatttttatataggtttcattaggtaaaacctctgggtttgattaattaaatcattagcccttggtgtttgagctcaatctctggcccctctccagttcttggaagtcagagagggtggggatgaaagttccaacccactaatcaagtcttagtctttctggtgaccagtccccatcctgaagctacctgagtgacctcattagcataaactcagatgtggttaaaaatagtctgttctgaataacaaaacatacccctatcactcaggaaattccaagggttttagaagctgtgtgtcagcaacctgagaaaaagactaaatatattttttattatgtcatagttgccatgcagaaagcatgggttaaactgtcccatctattaaaaggaatcacagatttcaattttcatgtgaaatctcccaagtttcaaatgttgacaaccatttcaaaatttccaaaatctctttgcagtccaaataaaacatacctgtagactgggtttggcccatggtttctagtctctcatacctgacacagaacttcggaacaggagttttcaaccctggctgcacactgaaatcacctgggtagctttgaaatctttgtgcctgggcctcatgccaaaacaattaagtcagaatctcctgggctgggccccagagattggtatttttaaaagtagttttctgataattttaatgtacagtgattttaaaagcttcttattttgcaataagtttaccttcacatagaagccataatgataatatagattttctatatattgcacacccagtttcccccattaacaacaccttaaattaccatggcacatttgtcaaaattaagaaactgacattggtatattactattaactaaactccagactctatttggattttgccaacttttttattaacattttctttctgttccaggatccaatccagttactatattgtgtttagctgtcctgtctcatcagcctgctctgatctgcgataatttcttagactttgtttgttggagtagtactggccaggtattctgaatgtctctagatctgagtttgtcagctgtttttctcatgataagacccctagttttcatgggttttgggagagaataccacagaggtgaaacacccttgacatctcatatcaggttatattccatttttgaaaacaacttcttgaagtaatagtggctgggtagagtggagctagcaggacccatcctactcttgaacagattgaagtacatcagtcagtagagaaaatcaggagggatgacatgaggccagcaatggagctgcatctcttgcaaataaatagtctcaattcaaagtcatgagacaacagttctattccaggctcatccactaactagtttttagggaagccaatcacagtcttctagtgttactttcttcatctgtacaatatagaagttgatatctgagtcttgaaattatgtgactctcaaactctggaatgtgttttcattagtcaaatattgtcatccacagtttcatttcctaagaggaatgtgttgtaatgctgagcaagataccctcaaaatttctggtttctacaaaagggcatgtaagggaggcctctctgcttcactgtttggtacttaagacacttgtatcctaagaatgtcaggtgcctggcaggaagaaaacaaattgcaaaaactgagaagaaaattcatcgcattcattcatctttgtttctggaactcactattttattccttccgttacaatggattaagaaggaaatgacataatttgtttttgaaatgtcagaagcagtgcagagtttagtactttaaaaaatagtttaatgttgaccctgtgcatacgtaaatcttaccagaaatgaggatgactggcttacaacgttagatactctaagttgccaataatttgtacagagcctgtgattgcaaaaccacaaacatttcacaatactggaaacctctaattaaccataataaatgacaggatgggtttgttttaaatacatggttaataatgcttactgctttaagaccataaactgtgtgattctctatggaggtgacagaggtaggctgcaaatggttttgcaaagtacgtttctacctctgcatgttaagtctgacccagaacattctactaatattggatcagcctctcatctgacgtaatttgcctgtgggaattgtatcggctgttaaactagctcctcttagtagctgtttgaaaaaaaaaaggaagaagaagcacaattctgtggtgtgtttcaaataactgaagccagtgtcctaggtactgagacaagaaagaatgtcaaacaggacctttaatgtgtatttatatttaaacatcagacctaacagaaaaccctgaagctttatacaatgattagagccttgtaagatcctaattaatgtattgtcaggtgaatggttggcctggcactcaagctgttctgagggacgcaaggggtttcaggtaccgcctaggaagaatagatgcagttgtagtgattcagtggcccatctgaaagggacatataaaggcagctgtgtctggtgtgctgtcttttcagactcacttgataatgctagtgtcagtttcaactgaagcgtgtgccagattccagacagcttgagctggcatttcagagaggttaattgtgaaacttgagaagaaaatgggcacattcttcctaagatggctattcaaatatagtctctttcctccccccccagagctttctgggtctcagtctcacttttgttctgcttccacgtaaaatgcatgaggaacactgagccttttccccttggcagctcctatattgccatctttgctgggactgctttgccttgttaaaatgtgccccgtgtattaaaatggaattgtcactgctgggtggtgcagcgtaacatggtttgacactaagcgccggcagctacagaaaacagacttttattgcatttattctttcagagacgggagtctctaaaggctcacagcagacattcacttagttaaatctgaatgaacccaaagtgaacaatctactctgctgtctttgtgttcatagaaacagcccccatccagcttgatatggctgtaaaacagtgttaagaaaagatgatcacacttagaatgcagaagggaggacttgaggctttcaaacagaacaaaaatattttaagtgggtggagtgggttagccacttgattttcttttttagcttcctctctattccctaaaatgtattatgtagaataaacacacacacacacacatacacacacacacccctacacacacacacacacccctagtattagtcttcatttataattccatgccattttaagacaaaggatttgatttgtaggactcttgcaagcaagctttagattcttaactgccttttatccagatgagtacccagagagagattgaacagggagggggctctgaggcataaactttgcattttgtagctctcctggaataaaaattccataaagtaacatctgtagtaattaagggcttacatttcctctcccattcatgtctctgctaggagagaaggttattttcccaaagagacaatagtgg

SEQ ID NO: 39779 - DNA, 1305 bp, Homo sapiens
aatcttgggtttaatttgggatcttcattctgctttcaccaactacctaaaaccatcaagcaggaagacctgtcataaaattttttcccaccttttgtcattgaggacatattttatcaattcaggctaaagataatattactttgccctcaaacttcagagtgttttactccaaatgataataaactctagagacatacttaattcaatgcttaaaaacctaagtgtcctaaagtgacccaagggttggcctaaatccatcacactgcaggacaaaaggaaattcttgttatttgatcttttgtgaaaacagagcagctgatctaccattcctctctaacttagcatcactttttgagcaaatgaaaagttatctatcaaacttctgtttttcttcagagtttaaaattctagagactggaaccattttctaccttcatcattttaactttccaagaagtctgtttagtgacttttctttgaaatgtcttcatgcccttacatgcctcctgatcagataaagggactccacttgctttgatctttctttgtaagtcctactttcttctgcttttatagtcatcattgtcctcttcctgcaccttctctagtatttctgttctgagtataactgattgcgaaaatcttatgtttatcttcctcatgaagggtcagccaatgccaataaaagcaaaaattatcttcatgaggaaatgactaagcaataacttagtagcttctcatatctttcgaccagacaacatttcaactctcagaagaaaacttggtggggatatgcatgcaggaaccattcttaaaaaaaaaaaatctattgtgtaacaaaattaactctggactcatataggttcaaagccctaagaaaaaaattaaagcaaaaaatctctagggcattttcaaaatcactcacagagcaaactctccttagaatagttgtctttatggccaggattgggtctataatcccagtactgtgggaggccgaggcaggcagataggttgagcctaggagtttgacaccagcctgggcaacataggaagaccccatcactaccaaaaaaaaaaaaaaaaaaaaaaattatctgagcatggtggtgtgtgcctttagtaccagtaactcaggaggctgaggtgtgagaatcgcttgagcccgggaggcagaggttgcagtgagttgagatcacaccactgctctccagcctgggaaacagagtgagacctagtctcagataaataaataaataaataaatagttgatgttttataacatatttctcttgctgtaca

SEQ ID NO: 39780 - DNA, 1060 bp, Homo sapiens
ttatttacttagaatttttaaaatctcattttcattttgattttgtattccaaaccaattaatggtcttggttgaacaacaaaaacagactaaaattaaaattatcataaacaagcagtacaataacagcctcatgaaaaaggtaaagcaagctgatggtgggacaaacatttcaccttctcagttgattaattttagataaataaggcaaaataaacaaacaaatatagagcttggcatgtggtatgcatgcaataaatatttgatgaatgaatcaagatatcagaaagaaaaatatttgaaaggtctttctctaacagccactactcattttagctacacataattgactggaaatattcccattttaggaaggaattctttagagtaagtgcgctgaatttaacatttattcatgtttctttaagttgtaagacttgataattttagtataaacgggtgaaccctggggtcaggaattatctgatgtgatgttcaggaagtagctttggcactgtcaagcagaagataatttaaaaccaccaaagcattctcattgttaatatttaaagacttctgggaaatgtgctcatttatttcacaatttaaaataaacaagtcttaatagcaacctttgaatatctcttaacaaaattatcaccaagcaccattagaaatagctttttattgtttgtgatctatgaactcactccataatactaatgcttcaatcagttgtgactgagagttatattcatgacagatgccagaaatggatcaaaagcagatagaagaagcaagctgctaccaccttgtcctcataacatgtgttcaaataaaattttaaaagttcaaggctatataacttttgtttcattgaagatattataaaagtagactgttctgaagtaatttttacttttttcttccccgttgatctgaagcatgcaaccaggattcatggagttcttttctgaaattaataaggtttttgtttactaagaagcttgagtctaaaaatcctttcttaaatccatttttgaaaacatctagtgtgacc

SEQ ID NO: 39781 - DNA, 760 bp, Homo sapiens
tgtcttgttagtgaagaagtattatcaggacactcagaatcaagtatggtcccatttttattagttgtatggattctttacagctgttattgtgaaatcattcccattccattaatataggacagattataaattggagtggtcttactgcttttatttagtggatagaagggaggaggcaagggagataaagagggctatagtgtaacagataaatctatcccttccattacctgcgctggaagcttaaaatgctccaggaaggtcatttgtgatgtaaacagggacagtgtgcacagagagctttttacaaatctgctgtttacctaagagaggcaccctgtgggttatcccaatggaattcactttcctgtttggtttaccatggaagggaaaggaggcctaacaaacagcccttcggtttgctcagctgtgagatatccattaaccaagcagaagtttgcctgcacacactgtatgtttgcacagcttgcagtaccatcttttcaagacccaccattgtctggaaagcactccaaagtcctaagtctataataaagcaaatagcttgcacagttattactgtcaggttcactttttacactgtagcctatgaatgtcatcagttaaattaaacctcaagaagaccaaacacagtgcatgaaggttaaatatgctcttgtgtttgtcggcacattagccaccaagccactttctcttcaaagtgtccttcaagacactttctttccaaaaatctatt

SEQ ID NO: 39782 - DNA, 1063 bp, Homo sapiens
aattaggaacatactaaaaatctggcaaaagagaatgtgtgttttacttcatggcatcatttttattttgtttagtttttacttgccaaagctgccaaagtggaacatacaggagttgacataaatactgcaaactgacaggcaatccaaatatttctttctgtggtacaggcttttttgttaatagtaaatttgggaagaatctttaaatcagcttctaagaaattggttgagccaaatgtacgggtagcattcagtacaggttgatttctgctgctacttttactggcaaacaatggccaactgccaagccatggtcaacccacacagctgttttcaatgattcatttcccttgatttcccagctgacccattcagaaggagaatagcagttttcacaccccagttgctagccttgttgctgcaaggagccctccccttcaattgtgggagtattttgaaggctaaagtaagatacagttgtcctcagaagcaaagttgattctatgcctagaatataagcaggcaaaaaaggctgagaaaagtctgggaaatgttgatttcatggtgaggtgcttaccatggctctgattcataatatgcctacctctccagctttctctcataccacaccctgaccttagcctggcattccaaccaccctggcagtttccaaagtacagaaggttcttttacccattggtaccagtgctattcctaatggttagaatacacttctctcttgtttgtttggaaaaatcctgctacctccaaggtgcaatccaagtattaaagtctctggaagctttttcctgaacccccaaaggtgggttagatcatgcattattaatggagcaatgttgcccaaaaggggtgaaaattggcactggaaggcaaaaaaaatcttactttttaatgcataaagcatggatatacatataatatgtaaacagatgtgtaatttatctgaggcatttcaatttcaattagaaggagtgagattaaaagaatgtctaaataggctttttaaggtggtattgaacttttgttgagtcgagaaacc

SEQ ID NO: 39783 - DNA, 504 bp, Homo sapiens
acaagcctgagccaccacacccgaccgagaatgccattcttatacacatttattgcatacagtacattactgtggttaaatacatccttccctcctatttccttccgcccacctctttcttcattctttccaccagcaaatattgaagaatggctaaatgacaagcttcctcacttcaagtctagtctcttctttgctatctcagattgtgtaatacatcctattgcaacatttcgggaatgtggaatgagacagcaccaagaaagatccaggccgaggtctgcaagagcagtatctgagagcttcagcacaaatgcactacaaaataataggtaaaatcattggaaaccaaagtcaaaggaggcagtaatatgattcataaagtaaaaatcttcaaacatttatttcaatctttcttcatttacaaacaattcttctccctctcgttctctgtctctctctgcctctgtgtgtgtctctctctccctctctctccttcttgct

SEQ ID NO: 39784 - DNA, 1328 bp, Homo sapiens
ttttatgccaaccattaagatttatatatccaaatgcctttatttaatacctcaagaaaacatcttgcctattggacaattacctacagtagttaattttgatggaaggaaattagagtagaactgtttattataatcatgtccaattaggactcagatttggaattgctcactaagactcaagagtgtttgagctgattcattgattacaatgctatgaagaaattacaaaaggaatctaaatgcccttgagaacctaagggacatttgttaatgccagtacatgtcacagagcctggagctttatatttccacagggtttcttggaaaccctattttgccaaataccttgaattcacgcccaagcattcttcctgttcacagccacatggtggacccagtgctgaagggagattaacactgcagttttcttgcacaaggctcagactacacaatactaaaaaataaaaagataaacatgattctaggcacattccgtgcctcatctccatggcccagttcctgttatccataagtagttttaaaatagtccacgttgttcagtcctgcaaaatcaacagcactggaaagttggcaggtatacttgtttaaacaaagctcccaagttttctgctggcaggtgtttccagagttcttggagcacaattctttggataggatatttgccaatatacatagcaacaggaaagaaaaagtgttttcctttaccacattggagacactgaaatgccttagatgcaaagctggatattcagttcagagggtttttttggctgcaggtcaagaataaataataatgagatccagcatctctctgctcagaactctgatgggcttcagagtggaatgagatcacttatcaaattggcaacaggtcctctctggccatctccgtatagtttgacccaatgagtttggttctcccttctttgtcaattcccctgtctcctgaatgtctcattctcaaactaattttgcttgaaattgtggctggagatggtatgtttgaaacttaatatgatgaacatagaacaggtaagacattattcttcccccattcattcctagtcattgattttagttacatttttaagtccagctttccaaaactgaaacatgggactgctttaaaagcacatgactaatttcataatctgttcctttgcagttggattggttcatagttgcttccctcagattcattctctgagccattcaattaagatcagccttggtgctggaaccccacaagagagaagtaataccttgtctcttaccctgaactgcaaaaaactaaatagaagatt

SEQ ID NO: 39785 - DNA, 506 bp, Homo sapiens
tcttatatgtgttgcttaaaattatgtccaaactgttgaggccttgacgttcctggagcttgaatgacccatcaccttggaaggttctgaagttctgatcatctcactggtcatcctaaaacctgaaactgaagagggtgaggcaaaaatatactgtcatcttttcctttctgtgaaaaacagaaagaaaaacacagtaaacctgccatttccctcaggtcaagtgacagacactgacccttgaattttccattcagagagctccaaagtaaacacagaatcacgtaagtctgaagaaaagaagccaaattaggaacatcacacttcctctcgcctagaaaagaacagcttttcctattactctaagtaggacactggaagagaaaacaattataaattaaaattataaattaaaaatcagttataaaattaaagaatttggaatgtaatatgctttgcaggtactcagatgatggcacgcaattgaaaaatctgtttaagtgtta

SEQ ID NO: 39786 - DNA, 1349 bp, Homo sapiens
catctgggagtcatgggctcacagctcttcacattagcctcagtagctctttttttatttaattgcactttggtgagatgccagcagccaatactgaggtgtattatataaacttcactgaataacttgtgtctgtgtttactgttgagattatgtgtatgacaatatatggtatcctgtctgtaaagacttgggagaaaattctgatctcataatcagatagaattgttcatctcttcagcaactagatagatttaacactataagtagtgtgactcactcacctctagtgtttccttcttctcattggctagcagaaacttacaagtttttggcatacctctagaaaatatgcgtgacttcattgtgtgatttttgtgtcctgactcacttttactttcactgaaatttcctgagtctttttttaaatcatttatttgctatttcatatgtattttattaaatgattttttaaatcccttctggaacaagcctgggtataaatagtcaactgtattctaattattaacacgtaccagacattcaacaagttcagtccatcagtgaaataccttaaaagcaaagacgtagcccccgccagtgtattatagatgcttttgcagggaactgtgtgaagaaattctagcaatgttgtaagcaattaattggataggatttcaacttttgacaccaataaccggtctaacaacattctgtgacttggcatatcagtgaacataggagaaaataatagggcttgtgcatttccaaagaactattgaggaaggaattcagaaaatatcccacaattttaattatcctttcttttcattaatcttcctcgcttatgcatgcataagcatacaaataatataaaaattatagaacccccggatttcatttaaatctttctggcccttcggacatttacacagtgcaaattccctcttttcacccagtcatgcattatactttgctataggatgaggaaattcttaataaatgtcatcatgatttagttcactttgggcaagtaaggttaaatttaaaatatttagaagtttgaagttattacattacagatgagtttgtatttcttactatttattaactgtaagagtatactagaataagtgttagatgttgcctatgactatataaagtatctgagtcaaccagaaatgagctcacacttctaataacttaggcatgaatgagtgaatcataaaaaagccccccgttccttttattgaaataatcctgggaaagatggaaacagcacaggcctctgcttctgataacagatatgggaaggaaatatggtacagccctggaaaatctttgggctg

SEQ ID NO: 39787 - DNA, 2022 bp, Homo sapiens
ccctcctcctctttcacccaggtggcactgacttgctcttatttattcttcacttgttgggggacttgcactctcagagagaaagtaagttaaaaatgagcagaaatcaatagctggaatcttaacagtggacaggaattttagtttacttttttttttcatagggagaagagtgcttagagttttgattgtatggtagaggcctctaaagcacttaattaagatgtctgaagcagataataacaaattcagagggctccttggatgatcatccagcagacatcctggagacaaacatacaccaaagcaaaaatacatttctccttctgcctcttcatcctgtggactcagcaggctggccaagcatgtcccccagaggttggccccactgtggttagaagaacatagattctgccttaaggcagacattagttactatcctggatctaccattatcaatagtaagactgaaagttacttcagctctctcactctcagtttccatctataaaaattgagataagaaataaaaataagatcccccaccccccaacccactgaactgactccctcttggccaaggcaactccatacaccaaagcaaaaacatgtttctccttctgcctcttcatcctgtggactcagcaggcggaccatgcatgttccccagaggtcagtcccactgtggttagaaaaacatagattctgccttaaggcagacctgagttactatcctggatctaccattatcaatagtaagactaaaagttacttaagctctctcactcccagtttccatctataaaaattgagatgagaaataaaaataagatcccccaccccccaacccactatacagactccctcttggccaaggcaactcaagaaaccttcaaaactgtgttcctggctataacaggaccataggttggaaacgcctcagtgtgccccttccttgttaaactttaaccagaattctttcctaagaagtaagcagaaacaaactctggaaaactagcaataaaggattcattcctttattgcctttagctagtcatctgaggctgcaactggactccccctccctctttgtggtttgaacatgacagctcaccagtttcacaatgcatcccttcctaaaaactgaccaccatctccagactggttttggctggctcacagaggatggacagtgatggtgttcgtgtcctctgcttcaccttttgatgtcagagggccaaccccaccacaccctggcctgcggatcatgctaaggctgccgttttttgaacatgcaacccatgaagaggcacgaagctcagttgtgcatgcccttgtttctgctttcatgaaatatttatgactcctcctgttattgactgtgtaaattcagccactatgctcagcataaattcctgttccctttacccctccctcaaagtgcttgctctcaccttttgccagaagtgaggcttccctgtaagatggccagcctgcagattgcaacgctttataataaataatgctctcctttccaaatttatgaacatcatcattcttcagttgacagagatgatgcagagttttatggtttactaatcaaaacacttcactgataaactgttttgattatttattattgcataacaaaccactccagaacttggtgtaacaatgagtatattacgctcatgaatttttttgtgtcaggagttccgatgacatagccaacatggcttgactatactccacaatgtctggaaccgcagcttggaagactcaaatggctgaggttgagttgaatggctggaggctagaattctctggagacttcttcactttcaggtctgatacctgggccagaatgactcatggctaaagctgattggcatctctctcaatgtagtctcagggcttctctttgtgatttctcctccaggcctctccatcatggagacatcagggtggtcagacttcttatatagagctcagaatgcctacaatgagtgtttcagcaaagaa

SEQ ID NO: 39788 - DNA, 755 bp, Homo sapiens
aatttttgtattttcactttttttgaactgataaaggcatacaaccaaaaatctttggagatccctggcctgtgagaaagcatggagcacccatgcttggtggtaaggactggatacaggaaagagtgagtaaactaggccacatgggaataaggagaagtttagggaggaagagaaatctcttttaggactgcaccaagctgcaataagggaataattaaacctaaaaaccaaggagctctcctttgcttaggttccttcagaggcacactagaactttcttgatagaataaacttctttattatcagccttagctaccactctattctcatttcctaccactccccttcctctcttttgccccaccattccttttgaagacttgttcaaacattaattctttatcaaaagggcaaagtccagcggaagaatcacagatgaaagtagataggcagcattaaactacaacttatgaacaagaccaagtagtcatattattgcctgatggttaagttttgattgtaaaaggttgtaaaactctcttaagaatcaaggcaagtttttataaagacaaatagaagagtccatttgtttcaaagcattgtgatgctcacttcagtagcagtctcatggctattgaactcactttcaacaccatagtcaaagaatgagtttttgcacttttctctctattctttgcctgttaacttgatacatggcatgtggatttcaatttttgaaccagaatatttaa

SEQ ID NO: 39789 - DNA, 1840 bp, Homo sapiens
gccttggataagtcactaatgtctttgaatatcaatgtcttcacctgtaaaatgttgataataatataaataataattatagattaataatttcacatcatatagtttttacatgtagtgaagaagatcatacatgcagagactctttgtgaattggaaaacactataccaatattattttctaggtctagctagagattatatacttcatccaggagtagaattttacgtacataattgttaccttttgtaagatatttatgtaaaggattgatgtgaaaacgtataacaattctatggtaaaaccatgatctagttttctctacttagagaaaaatgtcctagggaacatgggtactccccatagagaaaaaatatgtttcattagagcagatggctgaggagaaaaaaagtagagcataataaaaggtatctataaaattagtcaaaacactgagtgttacaaaaatagttcagtgttttaactgtcttttaggggtttgttttacacgtggaggcaaaatgatcataaaaaatatcaaaggcaacctctctgaactatttttttctggaattctaaagaactggcagcattctgagagcctttaggtgaggaatgactaagtgagaaacagacagttcagttttttataacttagagacaagcatttaccattctaaacaattctaaacaataaccaatgagtctattgtcaggttcaggaaggaggcaaccctttgaaatgcctgaaggtaaaagtggcacagagtgttcaaatgattctgttggttaataattaatatcctctggagacttgcgcaaatgattatgcaagagcacatatcacactgtgcattcctaacctctgatacactaaagcataagtgttttgttaccaagtattctttgcaatctttcttagccattaatctaaagtttctgcatttagagagctgttgtgaattgaccaaagtcaatttgtcattgacaaatatttagttaggtttggtagatgggaggagttagaaatggataagaactcaaggtctccccacatccttgctatccaggtaacatttaacaataaaaataaatctcagattgaattcctcaacatgtacaaatttttattagcaaacctgcatggacctcttctgtaaactaagtgaagactttactcttgatccttcagcatgctgtgatagtattttgcaggaaatcaccactttagaaaaatgtgaaaatttttgagcagtaggatacagttaatctgagatcaaatgtcagaatattacaaaaatggcttaagacaggactggatacttagggctatggctctactggaaaggatgtaagattttatgccctattcatgtcacaggaggcatacctgtacaatcctgtaagccagtctttatattttgagcacaaataatggccaaaatgaaaatgtatttctcacctccattatgcaaattaacaaagcttctggagttgaaagaagaataggattggctgaagcaattccagaagctttccaggggtacagccttttgagaagacctttccaaatgctacaatatgtttgaaatatttatttttgattaaggtacaaagtttttccagtaaatatcaagtatttattgaatataattaatgcatatacattgtatatgttttaagatgtgtaataccattaatttgaagtacatgcccattaaacagaactcttaaaagtgctagtatcatcttttttctgatagcaaccaaataaatccaccttaaggtaaatatttttaagtcaattaacccttattggtaagtggctttgtacttttg

SEQ ID NO: 39790 - DNA, 2821 bp, Homo sapiens
cagtggcatgggctggtggcagaagagggaatagggagaagatttggaactcaatcttcctccattgacaaagtcactccagctttggcaaggcaattaattggtgggaaagaagatgcctagccctcctgatttcactgcactttctgcatcttcaacatgagtactgggaagtggcaaaacatccagaggcagcttgggtgctaggtggagcatgagttaaaattccaggatgaagcaaatgaacacttagaatgacaggaaagatttgggagttgggtttgggggagggctatttacctttattccctggagaccctggcacaaacccttgcctctgcaatcttcctctcaggtaaaggaattcattaaatgaattgctagaagatctactgaccagagggctgtacagaatcatatctttgagagtgggaagtaggttgatcacatagtttattatccaatcaggacatatctgaaagagaaagggggttctattaatatttaaactacaaaacatgtacaccaggaatgtcttgggcaaatctggttgccctagcaagaaaggaaatttgaaagtttatactgttctgctcccatgttaccccgtttgcacatgagagggtaagtattctctttcttcacctgcattaagggaataaaagcacaagcattcaggtgactcccaacccacttttaattttacagtttctgctatactctatacattctgaaaattacatttcccaccactatcacttcgtgataggtgatcatttacaattactcactgactcagtcccgggaagaggcggtgcaaaatgggacgctctatccaggtgctcattagaaatgcagaatctctgcctgcctcctagacctactgaattagaatctgcatttttaaataagatttccaggtgatcaatatgtacattaaaacttgagaaaaacctctagacttcgacctaaagaaaaacattttacaacttgacagtgtatgcacatacatacatgcatatagacacaactgaagcacaaatttaatgaagtagaatttaccgttactattttatttgggaaagaaatgtgctcgcgactcaatagattggagtattcactcctggatctcaacttgcaatttgaaaacgcatctctaaagcacctaggagcaatctgaagaaagctgaggggaggcggcagatgttctgatctactagggaaaacgtggacgttttctgttgttactttgtgaactgtgtgcacttagtcattcttgagtaaatacttggagcgaggaactcctgagtggtgtgggagggcggtgaggggcagctgaaagtcggccaaagctctcggaggggctggtctaggaaacatgattggcagctacgagagagctaggggctggacgtcgaggagagggagaaggctctcgggcggagagaggtcctgcccagctgttggcgaggagtttcctgtttcccccgcagcgctgagttgaagttgagtgagtcactcgcgcgcacggagcgacgacacccccgcgcgtgcacccgctcgggacaggagccggactcctgtgcagcttccctcggccgccgggggcctccccgcgcctcgccggcctccaggccccctcctggctggcgagcgggcgccacatctggcccgcacatctgcgctgccggcccggcgcggggtccggagagggcgcggcgcggaggcgcagccaggggtccgggaaggcgccgtccgctgcgctgggggctcggtctatgacgagcagcggggtctgccatgggtcgggggctgctcaggggcctgtggccgctgcacatcgtcctgtggacgcgtatcgccagcacgatcccaccgcacgttcagaagtcgggtgagtggtccccagcccgggctcggcggggcgccgggggtcttcctggggtccccgcctctccgctgcgcttgacagtcgggcccggcaacccggcccccgggcggaaacgaggaaagtttcccccgcgacactcacgcagcccgactcccgtagctgcagggattgtgagtttttcttgaaaaagagaaggaaagttcagttgcaaggggcgcggggcacgtttggtcccctttgtgcgagcaggaaaggcgttgtgttggccgcgttcgaggcgagcccccacccccggaaagggaagtttgagaagttggttatctgaaggcggccggggagcagcggcccggagcggcagcctgagctgccaaagcagccagcgcacctgggccactccgcccatggcgatgccgcgtgcccacccagctctttctgagccacccgttcaaaaggccagctcctcagtccttagctcctggagacggccacgctttccctcaggccggcttcttggcccggagtttttggaaacaagtttcaagaaaataatcgatttccaaaagaaagttagctggctccactgacgccttggcatggatggatagggagtggagatgctcaggtgaaaccgagaatccctcactgaatgcctactgggtgctagaggctgtagattttgcctggaacaagatagtcctgtcttcagggagttgatggttctatgcaattatcgtttgttggaaaccgaagggttaaaatcctaactaggctacccacctgatcgctgtctctgaaggtttttaaggaaaaaataaaaataaaaaaatatatatatatattatatatatataaatatatatataattatatatataaatatatataatattaatatatatatgcatgcaggaatgggggttcttaactatt

SEQ ID NO: 39791 - DNA, 2688 bp, Homo sapiens
cctgttaaggcagatgttattgtatcaagaaaagactcaaattttgaacatattaaaaatagtgtttcttcagatctggtggataggtgatgctcaatatatatttgtttaatggaataaaaaaagaaaaatattaaagatcctaggaagagaaattaagttgcagggatatattgcttgtgtaacgtctgtttagcattgcaattttctgaagggaaggctatccacaactgttaattctgatctaaggaactatttcccttcttaacttctttgctaggttatctaaagggagatatgctttctcacatttgtttccttgaacttacttttaatgttgccttgtagggtcaaaactttagaaatacagctttctcaggaaacttggtcctcagatctttcagacattatcttcctttaagcttattgtcctcttgggaattggcaaaggattcccaccctttaaaaagataggaaattgtaaaatccacacttaaaaattaatctaaaattatttttcaggaagaatttatacaatggcaactaaatgccctgcagccaattatgtttatgattcctgcctcatctccaaatggtactagagtttgagtcatatgagaaaattaattgggttgggcttgattgtacatgtatatgtatataataatgttctggttataatgcagtttgcagtttttctagttacagctcaaggcaaagatgagaagcaacacctatgggcctgactgcctctgtccagtactaccatgccccatctctaactactacattttttcctattgaattctccagtccatgtagcataagtcccttcctgaactcagtttatttttctaaccctggctgcacgttaggatcacctgcgaacttctaaaagaattccaaagcctgagccaagcacctagaagttctgactcattgccctggggtaggactttggcatcattattgttttaaaagatccccagatgattccgatgtggaaccatgttgagaaacactaatctagcctaacccagtgaggttacaaatgaagaatttcaccagagaggtcaaagtacttgatttcccacagcaaagaaattccatttactgggttgaaaactcccatctgttgactttaaatccagcataacaaatatgagcaaggttttagaaggttttggaaactcatctgcagaacagagcaaatacaggcctatctaaaagcatacctcacagtaaagatggttaaaaaccaaaaccggaggaggcagagtactcttggtggggctggtagtggggggaatggatgattttccaaaagagaaaacacttgacctgggtctgaaaggctgggtatgatttaaggcaggcactattgttcacttgttagccccagggccatgctactccacttccttcaaggaaacagagggaagccggcaagtggctgcctggggtgtgtgtccacacaccatatagaggcagttcttcagctctgtcagccatggccaaagcaggcagtatttgaaccaccttggaccactcctgaggggcagcatcagacaccaggcatcctttcagacaccattcttggagtctcttccctccatcacgtaaacctcacagccaacagtgaaggcactgaactccttccaggggctgagcaggctgccttgggcatgctcttcttgaccttaaaatccacctgatagatctggtagggaggtagaaattttggtggtaggaaagccagcaattatcaggtcaaagggtttctgataaaaggagttattcagcagaaaggtaatcagattatgggagccttaagtgccagtttgggctaaattctctgagtcactggcagattgtaagtaggggaatgacgtaataaaaccactgcaaagccaggagtttgtgatgggaagataggaaatccctttctttttttcccacatgggaaataaaaatctaaagatgtgtggggaagctccttagagtgccaggactttcagtatcccccaatttatcattaggttctgtccagacctcgttccgcacacagtagcctagagacacctctggaataaggtgtgacaaaaaacaaggaaataaatttattaattttggaaaatgccttctttttcctaggcctccctcatagacattttcctgacaagtccccacttcaggtttcagaaagagatgcaccatcgtttggaattctgaagaaactcaagtttcaattgagctgagtctcagtggcatgtattttattacatctaatgccattttaatgtacttgaaactggggagatgagggcaattggtacacatgtgtaaaccactacaaaaagttcacctgagtgtagaaggtagccagtagcctaaaaaccctgtattttggaggctgttacttcataatctctattatgaaattgggaaaaattatgtaattatctctctaagatggtcttagatccactgttcaatagaactttctgcagagatgaaaatatcttatacctgggctgtgttaaggtttaaggacagcactggtataagatattttcacctttgcaggaagttctattgaacagtgggtctgagaccatcttagatgatacatgtggcttgaaacgtagcaggtgcaaataaggaactgaatttcaaatatagatatat

SEQ ID NO: 39792 - DNA, 441 bp, Homo sapiens
caaaagcaaatggctactcaaccaccccaacccctcaccacccctcaccacggtacaatggattttattacaaattgcatacaccagataattctaatctgatgtgaaggaattattttgcctttcttcagattcattctcatgacatcaagttcatttgaaattgcataacatcttcaggaattcattggcaggctgcctggcagttggataatcatttaatatatctttctctctcctcagttaataacgacatgatagtcactgacaacaacggtgcagtcaagtttccacaactgtgtaaattttgtgatgtgagattttccacctgtgacaaccagaaatcctgcatgagcaactgcagcatcacctccatctgtgagaagccacaggaagtctgtgtggctgtatggtaagcaagccttttaagaagttattctt

SEQ ID NO: 39793 - DNA, 2255 bp, Homo sapiens
ctaactaccagaaaagcttagagtcaaatctgaatcatgcttctagcaaatatgtacctacacatttagcatactaatatcactcttgcttaccagtttttaccctgttttctcacatttatattccatttgtcataattatagctcctgtcttgactgtatcttctttcactgtgttttttgttgttgtcgttgttgttgtttttgggaatgggataggactgtaagtaaataaatcaattatatcttgctagcttagaaaccaggacttgagtaaccacttctgactcaaagttcaatctatgtggttaaatagggaagcagaccataagatgtatgcccagtggtgcacgttgctgactcgcaagctatgtgcaggctttagcatttagtgtggtgatgtgtgccctctaacctgagatgttgagagaggggcagagaagaagacttcttgtagccacaaagtttcattccttcctctctcattgttgtagcatttcttttaagtgaaaacagcctttttggtttgctagcctatctctggcaggaagacaaattatttttttacagtatcagacacgcggtttcctgtctatgtttaacttgctagcagaacatctcagccagctggttccctctggacccattgtgtccttaatgtcgttgctttacaccatccagcaaacccactctgtgtactgatcgcatgcattgagcattttgttgacttccgttgttttccgagtaagggaagtcttagaaatgctgccctctttctcccaaatctcattttatgtttgttcagctccaacaccagggagctggcttcttggggaaatgattagttcttgcatgtaagaaatgaaaagagtaaatggtgttttggtagctctgggggattttaggtatgctgccttggaactgtgcactcacgcctcaaaatagctggctttccagctgtgcatttttgtttcaaaagaaacaaaccagatttactttctggtctaaatgcagaagaaaaaataagtgtggaaatatggttgagaaaagttgttagaagaggaagaaaattatggattaaagttgctagtctcattcctgagaagagaaatcagttatttgaggtgatgactcagagctgaagcagctttttgttgtgaaccagccttggttagaaagcacacttggaattcatcaatatggccctatgtctggccaaggaaataataaagattttgcatgatagaggacactgtgactcagttgaaggaagcttagaatgtatttgaactgaattaaggcaaaagcaactcgcttttcaagatttttttttttcctaagtagcaaagtaaacaaagctgcactgaggccagatgtgctttctggttgtgaatatttgtactctagaacctcattctggtatgaatcagcagagtggaatctagtatggacacaggctgtctcaaattccatccactggatatgagtggccaagaaagcagtcggacccatactgctggtgctgtagcaaggttcgggtggttcctctgcagcctcaggtctctcccactgcggcctccatgtgttccataaactccacacccatgagtaatggcaagaagggtccactgagaccttttgctgctttgcgagtgtctcagtgtcccaccaggggaaaaaaaaggctcagggaggtggctaaccactgtgaaattgacttttatttccacccacgtatactccagaggctgtattcaccaccatttggacatctggatgacttgcctttggaaagtccttttgtattctaaatcgctcctgcatgttacctgttgtggaaaatatcaattttgccattacaaattatgcttttttttaaaaacatgttaacttttagagaaataatttatatttgcttatctacttttaaaaatatacatatatatgccttttgttgcctaattagaggatatagttggttccaatgtcaagaacaatttctctgaaatgtagtcattaaaattattcccatgtctttcattttccaggccccatcctattcgaaatacctgtttcttccaccaggctgatgtagttatgcttaggcttggctgcacattggaaacacctgagtagctttaaaaactactcattaactgggtcttactcctgcagtttctgacttaattggtctggggcctggtatcaggaattattttttaattcttcaagatattttaatatgcagcccacat

SEQ ID NO: 39794 - DNA, 2657 bp, Homo sapiens
aaatgtgagtctatatggtgtcagtgaggtgttaaccgacccatctatgatttgcgaagtcttaagatggatgaactcttgtcatactctatcgtgaggaaatatttacaactcaaaatcatgcttaagaagaaaaattttctgagataagtcaagtctagccaggtgcagtggctcacgcctgtaatctcagcactttgggaggacaaggcaggtggatcacaaggtcaggagatcgagaccatcctggctaacacggtgaaaccccatctctactaaaaatacaaaaaaattagccgggtgtggtggcgggtgcctgtagtcctagctacatgggaggctgaggcaggagaatggtgtgaacctgggaggcggagcttgcagtgagccaatattgcgccactgcacctcagcctgggtgacagataagtcaagtctaaatttatttttaagaagaaacttttctcttttcctgtaggggcacatttactaaccagaacacattatgtctcaatttgtagcatgtgttttaaaattagaggtgactttagcactttctctaaggcaattggttagttgttttacatttatgatatgccgctcaaattaaaaagtcatctccaaatacaaaagcacccatctgccaatcttccttacttccctaattatatattgagcaattaattaccatgtgtcaagccctctataaatattatagtttaattttttaaaatgcacagagatatgtaattacaaatagtcacacctatattttagggaaagtacagcagcttatattggtgcgatgccatttgcgtgggtagagggtaggcagagaagccatccttaaagaactgagaatcaagctgagatctgaactgtaagcacaaatttagttaggcgtagagagagaagaaggaaatcgcacttgaggcaaagggagtacatgcaacatccaaaggttttgacattcaggggaaagaagaggggaggctgaaagaagactgaattttctggaccccagcatgagaaaggcaccaaaacataaagctgaaacttcatggaacctggaggcatgcagagctttggcagccacttgcagaattagatccttatgagaattcaaatcacttccttccatatagcttaactatcaggaatgagaatgaggatcacttacaccaacaagatttaactgtttattcttaactggagattcttgctcagaaagttaaggctgtaagtcaatgaataactttattgtttactttaggaaattcctgctaaccgatttatccaaacaaacacttgactcatctctcccatcaggacaaaagaatgttcacctgcagaaacagcttgcttatcaaacagcagtttatttgtcaagactcacatcaagactttcactttgctgtgctcaccagtcctaaacaattacatgataaattgtattccagtcagtttgtcttctaagctactcgtgttcaagaccaaagcctataaacatcctcctcttccccctttctgggacaccactaaaactcattcaaggccataggataaatagacttaggtttttttcactaacaagttttctggtagtctttggcagagttggtagttgtcaatcctgggagcaaacaaaaagcgattgaggatttttaagaaaagtggaagataggaccagcattttaatttggttgcagtttggtgagcagattggacaaagcacagaatcaatgtacagatgtggcagtaaggaggctattgctatagtccaggagaaacgtgacagaagcttggaatttgaacatgacaattgagataggataaatggatggattagagatgtgttttgaaggtagatccaacaagccctgctaatagtggaggacagggggagttagaggtgttaagcattaatttatgaatttttggtttgccgaactagatagaaaatggtgccacttattgagatggaaaacatagaaaaggagcaggtttggagaggaatgtgaggttgggggtaggaaatcatgagtcagttttggacatgctgagtttgagttgtctttgagatactcaagtggcaatgtcaagtaagcatttggacgtgtggtcatggagatcagaaaaggtctgagaaacaaagcaatggccaaatactcagaaaataattatttcatctccactgtgtttcccgtttaaatttcgtagtatatgcactcaaagggccctttatactgctatcctccaacttcagtggcaaaaagcagaaaggaaaattcttgtattcaggcttgagaaagatggcagggtggtatgatgtaattattgccttctaagagcaacttggttcttaatggccttttctttccatatagctatactaacaagaagttaagagcctgggctctggggtgaagcggacttagatttgactcttgaatctataacttactagatcgataatcttaagagattttcttaaactgagcctcaggttcctcaattataagttgaggataataataactaccacctcatagggtattatgagaagcaaataagtccatgtagtgtggctggcatagtacttggtgtgtagtatggactcaataaatgttagtttttgctataattatccttggatt

SEQ ID NO: 39795 - DNA, 526 bp, Homo sapiens
gataaacttggctcatgtgcaaatgttacacagaaagccagtggcactccgtacagagaatagtatactcatgcctcatgtatgtgtgcagaacaatagatgttcatgaaatgcagatttagctgtgttccttggcctcatctcccatgactgtcatcgagggtgcccagtggatcagtaggtcacaagtgaacaagtgtttactgttagctgtgggtggccactcccacaaaaattcctgagaactggtctcatcctaacctcaggcccatgagctcagagaactggtctcatcctgacctcaggcccgtgagctcagcctcagcctgcagaaatgccagcttcattctttattttaattttcaagagataggctaaactcagaacttatgccacaataaattagaacaatccaacagaaacaagagaagagaggctgttaagctcaaggaaagaaaaaaaaatttataatgaggacatctgtacttatctggcttttctggagagttcaagttactatccacaa

SEQ ID NO: 39796 - DNA, 1261 bp, Homo sapiens
ggacaaaattagggtttatgtacaaatttatctataaaattattaaattcagagtagtacaggattggttaaataactaacttctgtccatacaatagaataatacacagctactaaaaattttgaagaagaatgcatgtaacatggaaatatgtttgcaatgatctgttaagtaaacaagtagattataaaataaaatgtgtaggtacatatatgggaaatgtttaaatgttatttaaatatagtgataaatataagcataatatagatctagttacagataaagacacacacacagacaaagggacaggcacaaatgtaggccaagatacaaagatgcatacagatgcagatacagaccaaatgtgaagaagtgttatttctgtgttatgggattataagtagttccggtttttctcttttttcctatctgtatgttctaccagaaatgttgattattttttgcaataagaaaaaaaaagttaaagaattaattgttgcccatgcaggttgccatggagctctgcacagtcttggaggaaagcacttccccttgtacctttggttgtttactttgccagctcccactggatgtggtcccaggaggtagaatcacctggcaaacacagcatcccaacactgaacagtctccaatgacacatttgcagaactaaactgaatgtgttgaattgcccgaagacaaacactgaacagtcaggcatccatgccatttcccaggaaaccaaaaattgaattgatcaaaatgaccagggcagctggactcatgaaacatgagtctttagtactcacctgtctggatgaagtgtgagttgaacttggtcaagggaaacgtgaaaaaaccctattggaagtgcccgttaaccttaatggacactgcattaagcagccctccccagctgtgtttgtggaagaagcctgggctgtgatgactcatccagtgggtattgattcttttcaggtagttcagagggaaagtttttcgtgaaactgcctgggaaatggggcaagtccccagaatgagcatattagcagatatgatttttcacttagtttctgtgtgtttgtgtctctgtataataataatgctctctgaaacgtatagactggctttcccctgaagaggatacagttctttcacacatattgagcccaattttcccatttctcaagtttctctcaaagagtgtgagtacttcaagacacattagctctgcaaagcgtctggacttttatttactga

SEQ ID NO: 39797 - DNA, 959 bp, Homo sapiens
ccattcattcatatatcccaagagtatagaacatttttagaatactttaagaacattttcacaaaagagcagcctaccccaaatgcccttagttaccaaaaacttcattatctttttcaataacatattgccaactagtatacagtgactaaatttatcaaaagttctggatcacagccaccagttgcataattccacttttcaccttgtagcctgttgtactgaaaaagagcactatttacataaacaacaagaatggtgccgtctgtcgttgagcaatgcagtggccctgcatataggttcagcctctgtctactaagatttgtatatttatttttatatttgtatgttgctacttttgttgatttatgaatctgtgctcttaacttattctaaaaatgatttaaggaggcttacaaagacagagcaaatagaacaagataacagaaagaaaacaaaaattcaagggaagagggaaataaaagggaaaacaagggtagggccttacaaatgattcaggaatgaggttattacgtaaatgcattcctggtgttttgtacacttggctttaacttttccagcagtcaatattgctgggatttgaggggactaattaatcagatccctcctcagaaggttcagaaccaattgagtaatagagccaagaagaaaattaaaatgctctttatgttctagcactggaaaaactggattggagaactggacttggatctaagacataaaatatctttcctccatgaagtgcattgatttacccccagccacaggcagaacgtgtagactgcactctccaaaaagcagatctgctggtcagtccacacatcacctgtgggagacaaaatcgagaatactaacatccttgccctgagggttagtagtcccaaggtaggacacactgacagacagtggctattgttccaacatcatcatccgttagg

SEQ ID NO: 39798 - DNA, 457 bp, Homo sapiens
aggcatattggcaggttgaaatgaattaatacacatcaagtatttagaacggtatctgcctcatgggaagtgctcagttacatattaggcattagtatcacatgtgacataactccaccaggtagtagagtacacaacaggatcaaagaactaagctttggttctagggctggcagttaagaaacgcaagaccttgttctctcaagtggtggcagggaaggtaaacaggtttctgtgagcagcctttgaagtttgccatggattgactcatgaggtattaatttttttgagccgtgactcatggttagctcagttggttcactgtacttatatagcctgggctctggtctgatcttcttatgagttttctcccccaccacttctctggggtcacagactgtatccaattcctgataagctactgtgcacatagctatacttagtctaaggaaattga

SEQ ID NO: 39799 - DNA, 575 bp, Homo sapiens
tttattaatgttagctagatgaagaaattgtctggtattatcttgtgtgtgacttttcactattctaccatataatgaatgctagtgagttattatgggggagaaaatttcctaaaacaacataatgaaaaaattattcatttcactgaataggataagtcaaagaataaaggtcaaattttcggaacttacctaaagtaaaataatgcacataaattctgtttcattattgttttctccattggactttatgctgttcaatgttcacacatagagttcattgaactctatgctgttatgtttgagttggtctctttccaataaggtctataaaggtctctagccagttctaaattgtgagactaagctgtgcatgcaaacctatatacacccctgatgtgcatttagccaaattgtgttgctgtctaatggaaccacacagaggtgccgtgatcgcttcacttaaaagcctgatatgagtagaggaatataaaaaatcgaccagacacctgagaagaaattcagtttgcattgcacccaattgtataaacttatcatcccctaacagtgctcat

SEQ ID NO: 39800 - DNA, 2998 bp, Homo sapiens
acgtaaccacttagcaggttaaaagggtagctggagttgccttactttcaaggagctacctcaaaataactagggttcatttatctaatattttaagacttctattaatattgaaacacaatttgtagttaaagagaaaaatttaaatcacctaagaaaataattcagggcctttatagttttacattaatatgccctttaatatccagatgttacttacctaataaaatgtacaattagctgtgaattgacatgaacaagtatttactgagcaccgattacgccgaaagctccgtactttctatggggtttatataagagcaattcgagtctccccactacctcacttagtttaagctcattttgccctgagtttatctggtagcactttattttagcggacaaggagggaagtggggaaaggaaaggaattataaaaatacaaggtagacgtgcacaagaaccttcgttctattattatttagtaaagtgagaactggaaacagcttaacgtccagggtaagttagtttcactcactcgacggaatgtatgcagccgttaatgtatttctgcattttcccatatttccagtgaacatacagtactttcgcaattcggagtacaaacgaaaaagggcgagagaaggtcgcattttgcctgccggagctaggggcgcgcttgccggttccaacgagttttcggtgtcggaaaacttgtctttgctcacattctcggattcccgcggccgcagaagccggaggcgggacgtgaagggcaatgagcaaggtaggctgtgtcactgccgccgcgggctcactcgcagcgccagccgaggagcgccacgggctgctgaacccctcggcccgacccacgcgccgagggctaggataatgcgcctgcgcggccgtcacgtggtgagggctccgcgcaaagcgggttaaaagtcacgaccgcggagagcccgcgagcgtcctgctggtcggtgcggcgctttccgcgtcctttaagacgagtttgaccgaggccgctccgcagttcccgcccctcggcccagctcagctccatgaacctagcggagccgcctagtaccctttctcgccgaccgcacaggcgcgcgaaaccgcgtctttcaactgacaatgaagccgtagccgcgcagctcggccactccgggcgaatcggcgcgaggccgggatggtgggggggagggggagacggttgggtcaagctccgccccagctcgcgcccctattggtgggcgcagcggttctgggcccgccccctaacggacctgtcgctttgtgacaggcggaggggccagttcctgtcgggccggaggcggagtcagaggttgcttgagctccgcccggactccagggggctcctccccctgctcctttcggctgggcgggcggcgggctagagagggaatgtcattgcttctcagagccgtggtgccgcctccgtctgctgcttctttcctggcgccctcgtcccgtcggctttcgccgccgccgccgcagctgcactggggatacggatggctagtggggcgccggggccatctgggttgagagagcggcgattgcggccgctgctgaggcggagactccccgccgccgcttcctccacccccagtccgccggcctcgcggcgctgagggcgggagcgcgcagagctcttccctcctcctttttcttcctcctcctcctcctcctccgggtccccgcccagcacccctcgcaccaggcggcggcggcggaggaggagagctagacccgccgccggggcacaacatggcggagccctcggccccggagagcaagcacaagtcgtccctcaactcgtccccgtggagtggcctcatggccctgggaaacagccggcacggccaccacgggcccggggcccagtgcgcgcacaaggcggcgggcggcgcggcgccgccgaagccggccccggcggggctgtccggggggctgtcgcagccggctgggtggcagtcgcttctctccttcaccatcctcttcctggcctggcttgccggcttcagctcgcgcctcttcgccgtcatccgcttcgaaagcatcatccacgagttcgacccgtggtaagtgcctcgccgcccctcccccgcccgtggcccgcggggaaccgggacccgctcctccgcccgccgcagctctcctcgacttggccccgcgccgccgcggagccccgctcgcgtcctggctgaggccggcgcggatcccggagctccgggcgcgccccctgcccgtgggcgaagtttgccccgtgcagcctgaggcggggcgtcggggtccaggagcgaaaccttgattctcggccgggctagtgtgaagactgccaggagtgtggatgcagccgccgggagtgtgggtgcagccgccgggagtgtgggtgcagtccctcgcagcccgctttggtcgctgagtccggacccgccacgccaggaggcggcaggtagctcctccgcggactgtcggtcgattccccgccctcctcgcccgctgctttcgcgttctttcatatttgcgggcgcgtttttgctagttcagacggaatcggccaggggggctgccctgttgccgctggaggtgggtccagatgtgccggaaccccggctgctcacccttgcagttttacgcttttactgtttctttttatgctctcatgatacgagaagggaaaaggagagtgaatggcgtgttggagggaaggaaataatacccctgaaagtgatctgaaagctagctactcttatttatttatcattaggtattttaaagagtggctttttttcagagctcttaagtgcactcagcaccttactgtttcactatcgtcttgggttgctttttagaacaagatccttaccctgttagccactgtcacccttagtgtgttatgcacagtatctgaaagcattgcattagttcctttattggtctgcaggaaggtttgtggataagagca

SEQ ID NO: 39801 - DNA, 1326 bp, Homo sapiens
tccatgttgtagcatgtcaggattttcttcctttttaaggtggaataatattccgttgtatgtacatgccatatttggcttattgattcatctgcagctggacacttttatggtctagctactttgaaagtggttatacaaatctctctccaagaccttgctttcaattattgtgagtatataccttgaagtggaattgttgggtcatatgtcaattctatttttaaattttggggaaatgccaaactgttttccacaacagcagtatcattttacattcccaccgacactgcacaaaggtttaatttttccctgtccttgtcaacacatgttattttctggttcttttgatagtagtcatcctaatgggtgtgaggtggcatcttggagttttatttgtagttccctaatgagtagtaatgttgagcatattttcatgtgcttattgcccatttgtaaaggcctacaccttctccagggtattcacggtgactttctaatttcccgtcatatatttctttgtatatgtggttgattttgaatgtcatagtctttagtatttggtttccaaagtggggaaaagcagaaaaatgaaggggaaaaaagtgccagccctttaaatcccctgtcagtcacttcagccagaggaggagggacttgcaacattggggccaaagtgcaaaggtgatcacttctgtctgctcttctatgacaaaaagcagcaatcagtgagcagagtgcagaacctcagtacttggaggacaagcttcctcacatcagattgattctgcccgtgcaattattgtctaggtggggagctgatttctgttgcttcttctttcagtatcttcccagaatcctcacctgccttcctttttgaaggatagttatgtaagaatatattaggttggtgcaaaagtaattgcggttattcccattacttttaatgatactttgctctttcattgaacacttgataattttctctttcatttaacgctgtgagtatgtcattccactgccttctgtcaaaatttttttttctgatgcaaagtcaatcatatcgttacttccttgtgggtttttttttctttctcttttcaacttttcctctttgtctttatctgccagtactttgactacagtttgtctaggtgtagttctctgtatttattgtatttggtggcttcttgggtttcatggatctgtagattagtgcttaccttagaatttgggaagttgtaattgtttctttaaatgtttttatctgtctgtctttgtagcctctccttttttgaactttgtttttctctgttctttgggttg

SEQ ID NO: 39802 - DNA, 1228 bp, Homo sapiens
ttctcaaccttatttgaaatagtaattcaatgcagcctctacttaaaatttgcagagaagggaacttgatttttgagggcaaactaggcctaactcaaaatgaatgctctactttgaaagattccagaaaaaatcaattgtgtcttcctattaaaattaatttgcagtgtgagataacttacagcatttaattttgcttaacccacattttttgttgttggaagttttcaaaatagaagaggccttgccttttaagatggcatagtgggtggggccatgagctagtgtgaatgagaaacagtctggatggagcatagattgcttttccaaaggcaattcagggtatggctcccatctggtgcaggcattctaccaggaagcattccaagtccctttgcttgtagcttctactgggtttctcacaaatgcaagaaaacacttttgagccactaggagctagattacactaatgtctgttgtgaaagtaaattttaacagcagctgttacggtgattatgataagactaaactaataatagagtatatgctaacagatcagtttacaaaaagacagccaagactgttgggcaagaggctgggagagggcataaaaggtgaaagctttgtgtacacggtgaaaagtcaccaggaaatgagacagggtcgataatagaatgaccgtaagcttggctttccacctaaaggggttccaaactgacagctctagcctgtagtcagaattaacagacatttttaaaggaggcatccaacttggaaactatgccagcctctcaaggcttcccacatctgcctagaagtaagctgtgggggagggggtggctcacaaagtgaagctaagcttcctcccttctctctcatccaacggggctgactcagcagcattaaacaaaaagctaggaagggatttgtatgggtgtgtaccaggtgtgagcagatgaagcctaagaatcagtgtgtgtgattactcaatgtttttaaagaacagaatctctgcctgtttgaagatagtgagttatctcaaatgattgctcagttacaggttgaactccttgttccactctttcctgacttcttaatactgcacttgaccagtcaacaaacaacaaacaaacaccagaatctcggttccgttgtttgtcctgaatctactttcctgtgggttcttatttcttacttattatacagaatattttggcattgcaaaaat

SEQ ID NO: 39803 - DNA, 2928 bp, Homo sapiens
aaatatttgcagtgtatgtgtactacccaaggacatgacttcattattcaatttgacaaatgcgttctgttacacaaatacagaaaggattaataaagctttactagtccatctttcccattatccctgcatgtatccttgcattagtgcaaataattgagaacaaaccattggtgaggggatggaaagactgctctgactcaccagctccctttaagtatttccttaagtaaatatcataagtaacacaaataaatatttcatacaatgtagagaaaaaagcaaaaataacagttctctgagcatcaaactaataggcttagtattactatcatttttttgaaacggagtgtcgctcttgtcgcccaggcaagatctcggctcactgcaacctccgcctcccaggttcaagagattctcctgtctcagcctcctgagtagctgggattacaggcatctgccaccatgcctggctaattttttgtattttcagtagagacggggttttgccaagttgggcagactagtctccatctcctgacctcaggtgaactgcctgcctcgacctcctgaagtgctggggttataggcgtgagccacggcacccggcctaggcttagttttttgtaggtactagagtatttgtttctttagccagaatccactgatattttagtcttctggttctcaatcttggcttgcttttgcaactacctcttgaactttaaaaaattctgctccagcctgggcaacagaaggagactgtctcaaaaaatatatgtcaataagtaaatatcctgatgcctggatcccaccatgggacattctgatgtaactggcctgcaatggtgtctgggcatggggatttttaaaagccccagtgactaatatgcagcagagtttgagaaccactggtttaaaggactttgtcctactctgacagcgtctagcacagtgcctggcagagactgatgctcagaatgaacaaactaagattctatttgtcaaggaggagagcattgtgttactcacaaatgcaaacaaaccacaagcaagggataagtcaggccctgggcaaagacaatggtaaagcaattcctgccaagtaagcgtgtgagggtgacacccactgaatgcaagctgttgttacctttttccctttatttttatgtatttattttttgttgagacagggtctcactgtccttcagtctggagtgcagtggccctatcctggctcactgaagcctcgacctcctgggcacatgcaattctcccgcctcagcctcctgagtagctaggactataggtgcgtgccaccatgcttggctaattttttaaatttttgtacagaggggtggggggtcctaattatgttgctcaggctggtctcgaactcctgggctcaagtgatcttcctgactcggcctccaaaagtgctgggattacaggtgtgagccactgcaccaggtcaagtttctatcttgactctaactagaaaaggtgtcatccttgaaatgcaggtactgttcagccaaattccaaagtcctctgaagatccaagttctctaagaagttcagaggtgccaggctgtgtcttgtttgtgcaaatgaaacagaggatgacaaggtcgggtgggcatttcgagctctgccccaagtctggtcggcttgagagtcaacctaggagcctctctcggctccaaatggcaatgtggcagcccttcccgagtagggaaaaaggagcgtgtagggggcaccacggcaagctggttgggtctgctccacccatgaggatggagtgcagcctccaccgggaaccaggggcgcgagtcgctgctcagtggcctgggcctgcatgtggcgcggcgggagctgctgcctagggccgcgcagcgacggggggtgaggactacatgtcccgacgtgcctcgggcagggcggggcggtgccggagccgggcctggaggccggccggggccaggcgtgcgcagtggttcttgggagtggcgaagcgggtcctgccccgctgtcagctgcggcccccggcgccgggcgggggtggccgcgaccattggcggagaggcgaaaggggcggggccgccgccagccgctgcgggcaaggctgaacaggcggaggtgggcagccggccagggaagcacggtccaggcggctacattcggcccggccatggcagcggcgcccctgaaagtgtgcatcgtgggctcggggaactggtgagcggcggcgggctggaggccggggctccgcttccaggaagcgcctctcccgggcggtgagggctgcgcgccccatgctgcggcgtgggcaccgggcactgcgcgcagggaggcggggtgggcgacctcgttgctgggctgggcaccgtgcgcccgaggaggccgcaccggggcactcgctcgggaggcgctgggctcgcgtgcgtgcgggggacagcgcggagagagggcaccccgagcacgcgggcacctgtctgcgcccccgttactgagcgcacagaagccacctgcttgccacgcctgggtgttttgcacaatatcctaagggcgtattccgttctccacggcggatctcctgggtcaaggacttggtggaggctcgagcattcttactgcagtttcggtgttgaggaaaccgaggcggagagggctaaagggctcttgctgcccaggtcacgggcggggcatgctctgcccttcaaggtgcccgtctcgcccccgcttctgataggtccactatcttaggcgcgtcgtatcaggaagaaaatccaagtttcaacaggccgctctccctgaggcgttgagaattctcccttgccgagatgtttgcgaagctttgcgtctctttggggccttatttgactttaacattttatagagcacattagaaatgtcagttcttctagt

SEQ ID NO: 39804 - DNA, 1360 bp, Homo sapiens
cccagagagaaaatgacaaatccatatttggatggaattgcttgggacctttgtggggagatgtgcaggaagcaagaggacactctggacaacagatcaaaaggggatgaggagcagagatgttgggtgaggccagtgtccaggcagttactgaagccagagttgggtgaaggaagtatctgtgtggcaggaaggaagaagcgggagtctaagcccagcacagtgtccagggtgaggcctgaacttcagaagttcacatttcatttcttgcgggtaatttatgaatcttgcatcccattgctcaggacttactcattcaggactctgttctcattgatcctgccgtcctaagtgtgacaaccgtttgaaattaattattgcaatacccaggataatcacttgagggcagcactgcgcaagggttattcaaccaacaacgttcatttaacagatacttattgaggacatgtcgtgtgctaagcaaagttgtaactagggtcaaggaaagctttcctgaggaagtgaccctcgacccatgtagcaggatggggtggaattaaatagggaaggaagaggtgttccaggtaaaggtagcagcatgtgctaaggctctgtgatggcagaaagcctgggagtgggggaagaagggacagtgccgtggtagctggaaaagtgagtgggatgtggatgcagatcgggattacagctcagtttctggagcctattaacattttctgagcggttactatgtgtcgggccctttcctataacttatttcagggaaggtggtaatagtcccattttacaaaggcacagaggtatggctaccaccagtctttcttcaaggcacctctccttcccagagcatccttgtctccactggacacttagtcctacctttccttcaacacatgggtcaattgtggcttcaagttgaatatcttactgatcattttgtgcatacaacgtgttctggtgactgggcagttctccctaagccagaggttctactgatactgtgtgtcctcagtatctagcccacagatgaccactaggggatgctctgttccagttggttcctgtctggaaataggcacatgacatggcgatttggcagaacaaatgacatagtgatgtagtagatcttggctccacttcatccctccctgaatccatgcattttgccacaagactttacaggctttacagacacggtatatctcccaggccctcaaatctggctttgctcttgtgacttgctttgccaatgcagtgtggcaggagtgatggtgtgccagatgcaagcaatatatatatttatcaactcgactttctcctatacttttgctctatttagtct

SEQ ID NO: 39805 - DNA, 673 bp, Homo sapiens
catgatttttttgacctacccttggaagacacatagtgttacatccactgcattctgttgactatagtaatgtcagctcagattcaaggggaaaggaatcataggtcccctcctgatgggggagtggcaaggtcacactgaggagagcatgtgggatggagatagtgttgtagccatctttgaaaaatggaatctcctccactgctaagaaaaagaggatttattataaaaatacaaaagactagaattaggaaaaccctggaatggaccagttgctctgtctctgacctctgcatgtctgctttgcactctctctactcagtttctcttggtcttgtttgatttccctcagcctctgctcctccccagcacactggcctttgacctgctatggcctctccagcctttgtcaagcttccccgaatgtgttagttcaaattccagagagaggctctgactggctcatctcatatgtctcacaacacttggtccaatcaaatggaggggctgacacaggctgggactaaagggaatgaggagctgggcggctctcagatcaccctgcactgattctcacacctggctgcatattcggatcacctgcgcagctttaaaaacatacccacggcctgggtcccaccctcagagattctgattcaattgatctggggtt

SEQ ID NO: 39806 - DNA, 1285 bp, Homo sapiens
tttaaaaataatgtgcaattaaattatttaacttgtgaagagcctttattcaaatggccatgtataaaaggcactattaaaagcaaggttgcccagtgtaatttttgaaagttgtatggaaatttgggtacacagagaaggttaaagataatttattcccagaacaagtctgtcatagatatattcatttaatatcaaaagttaataaaccggttctaacggagtatttatttgaaagctcccatccgaagctttccttttttacccattgccattcccagcactgtttaaaacttcaatccgagccactgcagataatatatgtgcttgtctggcgtaaggaataaattaattttgcatgtaattccccacaatgacctatatgatgggcaattctattttatacttttttcccccagaatggcaataaatagcactagatatatatgaaatgataccttgctatggtttaaaatgtctaattatttttagcttactcacgtaagtatttctagtccacaaaagcacaggtttttctagagggacttataaccatgtaaaataaattttctgtgtgtgtctttaatgtctgtccctgttgacaaatttgtttgttttcccgagtcagctgcctagggtcagatgggctgcacacattctgtgtacagaggctttcagagggagcaaagtcttatttgccatccaaacagcccattccaccggggctggctggaaatgacatttgcgtgtgtgcagcagatacctgaacagtcggtacattgtgaaaaaacatctggacacccattacgtggtatttggacaaatatggatcattgcttgtctgtagggaaaggagttgctgggcttaggtcctaactttgagcactcatctatccaggtttttcttgtatctgtgaatcgaaggtctggggttccacgctctctaagcctcctccctaccaaaagtatcctagcccagtccatagccttgagataatgcatcagagggagcagctgatgcaaaccattttgtttcatataagctttcaggcttaacaagatgggacaaccatgatgacaatgtgtcaaaggggaagcaggaggtgaaaaaggaggaaatgctgtcatccccgtttgaatacacagggctctgccgctggcctctgagtctaccacggctggctttctttgggatatttaaatgcataaagattcagggtaataaaataagacctcgtaagtcacctataacaacacctaattttccaacaaataattatgattt

SEQ ID NO: 39807 - DNA, 3158 bp, Homo sapiens
cgatttatagccaaagattatttccttttcttttggtggcttccagataaaatgtttcttgctaccctttcacaaaatagaaggagggaccaagcggaagataatctttttgttcagaggtccatctgtcaaagcctgcattttagagatggcattactgaggtccaaaaactagagccactcgctctgggtcatacagccgataaacgcacgcagccgagctcagttcttccctgaccctgttacaaactgcctcactaaatgaggacccccatccccttcccatgccaggaaagcacagctcatttgtcctaaagttaacattacacaaatcacacccttcaagccttcttgaaacattttttttccccgagggtgacgggacggttacgctgattcatcctggccagggaccccaaacatctcccctcctccggcccaggcgccgtcacccaggctccaccggtccgcgggacagagccgcggagagcgcctggaagcgtcgcgccctcaaagccaagcgattaagttggttcctcaaattgttcccgacaggaggggcaggaaataacaccgggctctggcggcggccgcagcaggagggggagaagagcgggccgtctcccgggcagtgctggcggcctctcatcgatctcgggtctaaggtccggccgggtcatcattcctgccatttccacagcattcgaggtaccacatcaccccctgcctcggtcgtcgctcagtcattccctccgcgccgagtcctggagcggcggagtccctggaggcctgggtttccttaaggggccccaatgcccgcagcccccgacccgcccaggtggaaggaaacaggctgcgggcctgggccaggcggggcctgacagaagtaaaggccgggagggggagcggaagacggccagaaggacccctgcgccctctcctccgcgccgcccgccaggctgccaacccagccaccctgggtgcgacgcggcgccttctccgccgctgggagtcgggcaacaggtgaagagggcgggcgtccgcggcgcctccgcggggcggtccctctcctgcccgcctcccgcccgcccctctccccgccccctcccctcctccgggcctccaccgccttccccggctgcccggcagcctcccctcgctcgctctcctcttcctctagggccccagcgcagctcgggagcccgcgcaccgaggcgctaggggcaccgcgcactagagggacacccgccgcgcctggacagcccccggcgggcgcccccctcgcacctcctgccccgcgcgggccgcgctcccctcccccgcgcctgtgtccccagggcgcagggccgcgcgtccagccccagacccgccggggtccctggggacgcgccagcccggcagtggctcgacgatggaggagccgcagcgcgcccgctcgcacacagtcaccaccaccgccagctccttcgcagagaacttctccaccagcagcagcagcttcgcctacgaccgggagttcctccgcaccctgcccggcttcctcatcgtggccgagatcgtgagtgccgacgggccgggggtggcggggggctcagctggaccccggcgcgtgcttccgccgtgcttctcgggatggagcctgctcagatcttcccgcgggctttagggaaccgtttttgctcagcctcgccttcttcccaaagtgaaagactctaaacaaggtccaggaaactcgggctgtcctgggaagaaagggttgtgatcctcaggatgtcttgctgtgggagaaattcagcttgttgggtcctctcggtggcggcggcagatcctgggagcaggaagcttggcttagtggctattgagtttgtgttgagtgtcagagacacctggtgcctttctcacctgatctccacgtggatggcctcctccctgaaaataaagcttcctaagatcaggggaagaggaaagggcttctttcttttcctaattatctccctggtagtaacattgaggtgagtcaggaaaattttactgaataaaatctgagtgccataacctattttaggaccaaagaggtcttttgcatggtgctgtgcacatcctggtttaggctcagaacattcctgggaaggaggcagggcatgggcgttcttctcttcattggagggcatagaggctgaaaactcacgtgatcttcccagaagtcccagccagtccttcatagctgagaaaggactggagtcctgtcagcagttagaggtggtcactgtttgagtcttcttcgtgtaccaggatcttgtcaagccctttagatgtcctcataccctcgtgtaatccaacgaccaccctcccctgtgaaggcctagagaggggacgtaaatcacaccggtggatggtgaagcatggattcaaacccaggcctgcctttctgcagggccgtgctcataactgcaagcagttgagacagcttccagctgccccagcagtgcccctctgtcatctctcacagacttttgttaaatatttgggaattgaaaatgagcctatgtgggagttagagaatgggcacaccatcatggtgcagaagtgactgaagacctgggcggttcctttgagaaacctgaagtaaatcttgtgtacctcaagtagcttgcttgctcccccagtctcagataccacccggacctgctctatgaagcccctggtggtcataatgcacataaggtatgagaagtgttggcttagctcctctcccagctggttccctcagcgagtattgaggacttcaggagactcaaaagctgaaggtattggaatcgccttgcagggcctagcttttaggagttcaacaaatatttgctgtgcaaatgaaggagttggcaggctcctctgcttcagcagcgcaaacaaaagctaaaatgacagagatgggccttctaccttggggtggatttgggccaggcatgaagtataacgcctttgggtttttttctgatttattatcgatatgctctgtgtactgcgctttttcaggaaatacaaaagtgaaagaaatgtaagtggcccacaatcccattactagaaataatcactgttgacatgttagcatgtatccttttagatttcattaagcgttttgaaaaagatgggaaaacatg

SEQ ID NO: 39808 - DNA, 1804 bp, Homo sapiens
tgctgggattacaggcatgagccaccacacctggcccatgtttttttttttttaattaaaagtgtttttttttagagacatgatctcactctgttgccagcctgtagtgcagtggcatcatcataactcattgtaaccacaaactcctgggcttgagcccaggcctccaagtagctaggactacaggtgtgggccactatgcctggctaattgtttaattttttgtagagacagggtcttgaattcctggcctaaagtgatcctcccaccttggcctctcacagtactggattacagtcatggcccactctgcccagcccatgtatgagcttttatgtgtacatgtgttttcagtcctcttgagcatttagcaaagaatggagttactgggtaatgtggaatcttttttttttttttttttttttttttttgatacggagtctcacgctttcgcccaggccgcactgcaggcctggactcccaaaggtaatgtggaatctttatgtttaatattgaagtggctcagtgtcgtggctcacgcctgtaatcccaccactttgggaggtcaaggcaggcagatcgcttgagcccaggagttcaagactagcctaggcaacatggtggaaccccatttctacaaaaaatagaaaaaattagctgggcacggtggtgtgtgcctgtagtcccagctactcaggaggctgaagtggggggatcacttgagccagggaagttgaagctgcagtgagctgagattgtgccactgcactccagcctgggtgacaaagtaagatcctacctcaaaaaatgaaaaaaaaaaaaaaaaattgaagcactgctagactgtttccaaagggaccgtactgctttacaatccctgctgcaacatgagagttctaattcttcacatcctcatcaagacttattttctttgattctgaccatcctagtgaatgtgagatcgtatctcattgtggtttgggtttgcattttcatcatgactaatgatattgagcaatcttcatgtgcttagtggtcatttgtacattttcttcagagagctgactattcaaatcctttgcctattttaaaaatgggttaatttgtcttttattgttgagttgtacaagttctttatacattctgggataaatcccttatcagatatatgatttgaaagtatttttctcccattctgtctgttatcttttcacttttctagactatgtccttagaagtacaaaggttcttaattttgaaaaagtccaatttttatagtttttcttttgtcatttgtgcttttgatgtcatatctgagaaggctttgactaatccagggtcacaaagatatactctctattttcttctaaaagttgtaggtcttatatttaggtctatgattcgttttgagttcatttttgtatatgatgtgagggaagggtttaacctcaatctttcacatatggatatcaattgtcccagcaccatttattaaaagactgtttttctcccattgaattatcttggcactcttgttgaaaatcaaatgatcataaatataatggtttatttctggattctcagttatatttgattgatgcacatctctactcttatgccagtaccatgctgtattgattactgtaactttgtagtaagttttgaaattcaaaatgcgagtcctccaacttggttcttttttaaagttgttttggctattctgggccccttgcatttccaaataaattttaggatcagcttgtcatatagtaccaaaacaaactaccaaaaacctggcagctgg

SEQ ID NO: 39809 - DNA, 1121 bp, Homo sapiens
ctgtgattacagacatgagccacctcttctggcccctggaacctactaatcagatgtttgaccttctgaacccatcctctaacttttttactttatctcacctgtttttttcttttcgttgtttttatcttttctaggttttctcgattttatcatgcagcatttctattgatttttaatttctactattccatttttaatttaaaaaactatttttgttttgaaggactatttttatgtccttcttgcaacctcctgtttctttatcacttttgtaatatcttttctctctaagatactgatgattttggggtgggaaatgttttcttctaccccttcaaagttactttcttccagtttgttttttggtttttgctctctgccctgttatataggctttgctttcttcatagatccaataatcttggttatctgcctatgctttaagagtgcaaagctctctggatgctctgagcatgtggatggggcttatgaaccttgaacttcattgaagattgacctggctgggctgtgtgttggggaatccccaaagtcagtatctttgtcttttttcttatgctaatgaagacctggctgccagtattcttagaaccaagcagagggaaaggttagggattggacagatgaggaagtcttcatactgaatacttagtcatttaaggcctttgtttccactataatgttcagaccttcaactgtgcgcctcaatccagagactgtttcgttttaccttatttacagtgtttctcaatcagaagtaattttgcctcccagagaacaattggcaatatccagagacatttttgattgccattaagagtggggaggtggagcacagctgctggcatcaagtacgtagaggacagggaagctgctatacacatcctacagtgtacagtgcacagggcagcactccagatcaataattttattggccaggccaggcccggtggctcacacctgtaatcccagcactttaggaggccaaggcaggcagatcactggaggtcaggagttcgagaccagcctggccaacatggtgaaaccccatctctactaaaaatacaaaaattagctgggtgtggtggcgcacgcttgta

SEQ ID NO: 39810 - DNA, 1485 bp, Homo sapiens
aactttctggggtgatgggcacgttctatttgttgatctgggcgacggttacacaggtgtacacatatataaaaattagtggagctgaacacgtaaggtctgggcatcacactttatgtaagttaaacttcagtaaagtgctctcagcacacatccgcagccgcacccacacaaaatcccaggaggctcagtaccagctgtggtccgggccttgcccacctcggagaggccacgacccaaggcatccggtttcctctcgctccagtctaacttccgcgcatctacgagggccgggactgccgctacctttctggaaggcgccggccggccagtcaccggagggatcccgccagaggcggctccgcgtctccagcagcggggcagggacccgggcgccccgccctcgccagcgcccgcccccgcccgcccccggcccgccctctgtatctggcccctgggcagctgcccggggaggcggccagcgagctggggccgcgcaatgtcgcacggagccgggctcgtccgcaccacgtgcagcagcggcagcgcgctcggacccggggccggcgcggcccagcccagcgcgagccccttggaggggctgctggacctcagctacccccgcacccacgcggccctgctgaaagtggcgcaaatggtaagtgagcgcggggcgcgaggccgaggttctacagggcgtcccgggaaagcaggggtccgggagcggacgcgccgggcgtctggacccggccggagcccagggagcatcgcgcagcgggcggggcaccgcgtcgctaaagttcgcggcaggcttcctccgggaaagttgctgccgcagcccccgcgctggagctcagtccccagagccgccccggcccttgctcccgcggacccaggtcgccagggtcgcaagtttctccggccacccccctgcgaagcctgacccgcctactgactgaaaccacgggcaaagttccttttcgtctttcttcctcttctctgggccgcgccgcttcgaacccgagccgggggtggaagagtcgcccaggcggcggcgctgagggagcgaaacccgacctcttccccgtccacggcctcctctttcctccgaacccagcgcggcagggcttccctgctctgtgtgcagtttcgctcgaaggaggaggtcagagggtcttgtgttccatagtggggaaaaagaactgggaccgttgagacggccgtcctggtcccctgcgccctcaagttccgagggagggcccgggtctcagggggctctggagggcagggggtcagttgggaaaggcctgttgtcaggggctggtactcatgtaggggagccagactgttgaatgggagtcacccgtggagccaggcaggatgagtgtctgggcttggattgtgaccaactcagcacaagggcctcctaccagggcagacgttgcctggccgattctcttgttccccactcttttcttttctccc

SEQ ID NO: 39811 - DNA, 1172 bp, Homo sapiens
atagtaatagtatttaagctgtaatcatatttttggtgtctgatgatttagaaaaggaacagtgacagacagactagaaaattcaaaaatgcttttaaatgctcttgtatttaagtgatggccacagtatctgcatatatttgaagaatggaagttccactcttgcggaaggccttacctattcaggctgcagagcttaaggcttttgtaatcaccggcaagaattcccatccaggacacctcaaataaccacttacagcccgactgggaatcactggcccgagtgaggcgatagggatggaaataccagcccaaagtcctccaggctgcaggcagccagggcgtaagtgggtagaggaggggttcggggtcggtgtgagccccataggttttctggcactgcaggggccctagagaccccggccccgcaagcacgccaggaccctggaatcctaggggattccctgtgtgggccggtgtatttatttaaattcccgttgcagcgaaggccgcccttctgtcttcctgccagccctggcgcttcctgtgcagcgccactggacagccatctgtttcctcccctctgccatctgcctcgcgccgggcccagcgtgcggccctggaagcctggctcggccgccgcccgcgcacgctggccttctttgttactactttggctcagtggtttcctgggctcgctgctcattccctggcagggctcgcggcgtccgcggcgactcctgggatcggcaggggcctggcttccagcccagcgccggcagcagcccgggggctgcggagcggaaagggggctgggacgcggtcactgctccagccacccggcgctcctgggcggaaatcgcgagcagagcccttctcagcctcctgcagaaaacgcgcctcacctgacttgtgtttaaatcagcaagggcagtgacgcggctcttccttttcctggggcagtcactctcctccctctgctgagcccgctctctttagtttactttaagcaaaggttttgtttgtttatttgtttgtttggttttggtttttttgagacggagtctaaaaagtcttcagtctgtggcccagactggagtgcagtggtgcaatcttggctcactgcagcctcctcctcccgggttaaaatgattctcctacctcagcctccc

SEQ ID NO: 39812 - DNA, 618 bp, Homo sapiens
tggatggaatgaaagggacaggcagagctggactagctagggggctgtaagggtgctcagaacagcagatgacctgatacaaaacctggagtggatgtcacagttcctgtggagcaaagatctaagtctcagctgatacaactcagtctggggcaaacgacagcagagggacaagacttagatgtggggttgcatccccagattcattcctacccaggaggaagtcccaaatattcctaaacttactacatacttgctgtggttttgtgaggtggtgtgttgtgtgtgtgtgtgtgtctgtgtgtgtgtgtgtttgcctggattgtgcttctcttttgcaagaacctgttcactggatacatttattgtgacccctgttggtgactcatatcaggagcagtcagatgcatgcccaagaatggtgtttactcataaagcttgccaagcataacatttgaaacaatgcctctttctgggagaagaaaaagtatttggtcttctcacacaggttttataccaacagaggtgctatacagcgctttctttttttgagatggagttccgcttttattgcccagctggagtgcaatggcgtgatctcagctcaccacaacctcc

SEQ ID NO: 39813 - DNA, 951 bp, Homo sapiens
agtatttacacacacatgcacaaacacacaagtaatcaagagtgctaaatgctacttaaaggtcaagtaagaacaacactgaaacacctaccttagactgagctataagaaggttgccagtgacattagcaagaaaagttccagggtagtcagggagagaagctcgattacaatactgtatattgggaagtaaggggagggtaaggcagtgaaggagagacagcataggcaataagtgtggctgggaaagaatggccagatagggcagtagtggatgaggtcaaagagaagggaatttcaacatgggagaactgagcatgtttaaatacttaggcagaaaccagtaagatgggtgggtctaaagacataggtagaaaaatggctctctaaagataggattcagggctcaggtttggggctaactcttctctagaaatagaagggaagagagtgaagaagagtattttgcttgggcagtttgtgtgggttttgtggaagctgagggaatttcctgctgagggccgaaaccatcaaaatgactgatgacctaagtcagaggctaaagggaattcccttctcactccagtcaggccagtagaagcaaccagacaggttaatggcaacaagattgctaccaaaatcaacagatacatttcatagtaatagtaaatatcttatcctacaaaacattttcattaaaaagggacaaacaacagttcagcggtttctttaaaaactaagcatatatctaccatatgacccagaaatagaactcttgggcaactatctcagagaaatgaaaacttaacatttgtacaaaaaccggtacgtgaatgtttataacaattttattcatagtagccccaaactagaaacattccagatgtccaatggttaaaacaaactgtggtacatccataccatggaatattagcaataaaaaggagcaaa

SEQ ID NO: 39814 - DNA, 1344 bp, Homo sapiens
atcataagcattcggatttttcctaaactggttctattgcagaaatagaacctaaactgtttctatttttcctaaactggttcaaccatcagtggttggaacagtacataggagccaacacgactgtaaagtgaataatttaaatctcaaagatgctttgatgttttcacgaacaggtttatggtacttcaactgcttaaaataaactcaataaaatggaaagatgcataccatgtcctagttcagctatccgcacatacttacaaaaagctgtccttttgactttccacttagaacccatattgctcaattttgaaataattcttttccagtcaatataaaacttttagaagacaatttaccggacacacatacacacacatctcaatgccacgcgtggtatcgcaggactttgtccagcaagttaaactgcccccatgggctcgcagcaggaaaaccgcaagagccagagaaagataaacagcgcttcacagtctaaatacaggcactgtgggcgataatgcagggtagcagcagagagaagagaggaaagtcgccatagaggatgagtgaaagatgttgaagtggctgacttgggtctccgacgcatttcctgagcccgcctaacaggctgggtggccccagttcgtgggatcccgatggggagagccttgggactgaggggccgcccggcggaagggcggagggtaacgcccccttccccaggctgagagggaaggaactagaggtgtggaaacctccttttactgaacaaccaagctgaaacgaaggagctcggcggcctcccaagcccgggccagaccccgctccccagcccgggctcgccctccctgaccgcggactcaccagctgcaagcccttgagaacgcgccggagcaatgggagccggcccatgaaaaagtaggcagcgaggccgctccgggggcctctggcggggcccgggtcctcctccgtagtggggctgtacaccgctccgttctccatcgcctcgggccggggagcgcggcggccgcagcaaccgcgccgttgacttctcggactccagaagtccccggtagccgggaggcggccgtcacttcctgggccttctccccggcttccgcctgactccgccccttcccgcccccgcccttggcccgccccgccccctctcagcaaatttgcttgttagctgttgggattcttccgactttcatccaagaattgagttctttctgtgagcctttgatggatttctcacctccctccatctttcatcctcctgacattcattcacttagtatttttgcgtactttcggtgtgcagtgaaccccgttctaggt

SEQ ID NO: 39815 - DNA, 2324 bp, Homo sapiens
aaatgattcaggagctaagcctagaaaaatgcgaatctgcgaactattctccctcagtcctctatccccacccccagagtcactaaagaaacagaatacacaacttccagagagccgaggagatacagaacaatcaggagaactgacactggaccgtttctccttattacatccatttggctgaaaagacttaactagaaagttgtgttctactgccctttacaaatttcagaattatatgtgacagttaaggtagctgcaacacgagcacattgtaccagagaacgctgaatcaagaacatttatcgccaggtcttagttctagcttctgtcaattatacaaagagtcagctattaaatattaatggcatgccatttgcgctgcagctctcgcaaagagcctcctgctaccaatttttgtgatgaaagaaaacctgtcattttctagataaaccccaggccacgagaatccctcagatgagcgatcgaattctgtccttcccaggggaagctgtcagggccacccccatataccggggaggaggaggaggaacctgagggagggcgggtccccgcaggtcctgggtcaagggtctcgtgttccccttctctcccagccatccgcgacaggtcgggaggcgaggcggggcggggctgggccggctgtccgcacaaagagagccagcgagctagcccgcggaccaggtaccccgggccgctgggggccgggcggggcggggcgaggcagggaacacttacccagcagtagcacgttcttccccgcagggagcttggagcgcgagcgggtggagacctcgctgaggatgcaggacctaacgggaagcaaggcgtacggtgaggccggaggccggagccgcagcgcgggagggacggacccggcctcggcgcgccggggatggggctgccgggaacgcagtggccgggcccggcgccgagctccagcgggcacgggatcccgaggcgtccgcgcaaggccgggggagccagcgggggctgagggagaggtggagtcgttaccaaaggttctgcccgtcctcgtcgtcgcctgccgcggcgccaccgttgcccgacgctatctcgttgcccaaggggccgccagtgtaagtcgaggataatcccggcggagaagaaccgaaggagccgactcgccccacggccgccatcttggtcgggaatcacaccactcccggcaagactaaatgtgcgaggcggctgaggcggtggcggtggaggcggcgggaacccggatatggggcgttcagcgcacgggagcggggcggggcctgcgggggcggggccccgggccgggccaggactgatggagcgagcgagaacggactgcgcgtgcgtggctgcctggccggcgctgaggggctgagcgtacgcgggcggcggggtgggccgctatgctgcaactgaagcccagtgatctgacagtatggaagtgctttccttccgctcatccgcggccctgggctgcggcaggggggttgggtgtgtcaggtgaaaagtgctccctcccacccttcagacaggtccccaaaccctgcggcctgcgcggaattcctgcattgtcattgccggcccacccactgttcaggctgagagcggtcccccgcccaaaccggcgcttcgccggcgccaagatagaaatgggtcgcccggctggtaaagaggctgccctgcaaccctgggctggagtattgctgtggtcctggatttctggactttatttgcgttctcaagtggcgaagtgttcctcaacctggacccacatcagaagcaggttctccgagcccctaagcagcggcgtgacaaagtaattgtttaccctggaaatagactgttattttttaaaaattattgtcagggcttgctttaatgttcttaatgtttttgtatgagatcctccatgtgagatttgaaaagatccactatgcgggtcatctaaccggtcactagacattgattccacacttactacgtcgagcacagttgacactgggaatacatggatggacttatactagccctaaaataactccttttctattagaactttactaggtaaaggtatttgaatgtctgaactccatgtttagaaggagtcattggttttaaggctctgtcctagtacacctgtaagagcatttgcttaaaattgcctggcctttgtatgttatctctgtcacttcatatttgaaaatcacttgctagaatatggcctgatcaatgctgttatgctagtgagaaaatccacaactaaagactatttgctatatattagcattacggttagaagt

SEQ ID NO: 39816 - DNA, 606 bp, Homo sapiens
atatgagtttgtgaaatttggcatgacctcctgcatttctgccttttgctttgaggagagaatgccccaagtagccattgcccatttagcctgggtcctggaatgagaaacacataggaaagacccaaacctaagcccaagtgagcctggacaacccacatgcagtgcacagaccagtgagtgaaaaataaatatttgttcttatgaatcactgacatttgggagttacctgttgtgcaacactattgcattaaatcttgactaatacaatcattgagaaactaattgttctcatcagtgcctattgtgaacaatcaaacagactagaatgtgcgcaatgggtttcaatcaggtgttcccattttcccaggcatcagtcagatggagcaaagtctatgtaagagaccaactggcttgtcttgaggatgctgagggtgttcttaaaagggaaatttgtgggggtttttaaaagtctgtgtttatatactagacacaaatattccagaaatattattggtgggaaaatcaaattacagaacataatgagagtgacttgtatggacactctcattcagaaaaacatgcaatctagcagcttcagaattt

SEQ ID NO: 39817 - DNA, 1241 bp, Homo sapiens
tctttgcaacttttctgcacaactacaactattctaaaataaaaggcgtttctttttaaacgggaatcctcaacagcgcctctctcatggggttgcaagaaatcaatgagatagtacagaccaagtgcagggctcagtgcttagcacataaatgtcagatgtggttattgtaatattatgtaacattgagggacaaaagctctgacacctcggtgttttaattagagtaagcaaaggacagacgcgcgtacgtcccaccgcgtcagccctgtgaacatccagaggttccagccagagtacgtccggccggaggcggggcgcggaggggacgtcggcgtggggcggggccagtagcagttcccacgccggcgctccaggcgcggcaggctgccgcccccggaagtagtgggtaccgggacgccgtgaggcggaagctgtgtatggcgggaggctgtggcggtcccttggtggggaagctgttgctgttgctagacgacgggaactagctctcgtcacttcctcagcccgccgtctgcccactcctctagccggaacctgggggcccggagccggggtaggcacagagttgtcctcggaggtccaggacagcggccagcccggcggcgggagtcagggccacgccacctgcagggaagaacccgagtcgaagcgggaagatggctgcagacaagcctgcaggtagggcgccaatgtcccgagcgacgagacggcgggacgtgcggggccgggcggaccctgaactcggaggcggcggggcccggggtggggactccagggcgacttgaatttgggcgtgcatttctttaccccatcctctgtctcggctgtcgctaacatgagtcttcgggccccgggtccaatagttgttttactcaagtgcagtatttgaagtcgccactggccgcctttgccctgctcttcagaataactccggcccaaaaagcttaaatgtattttgccgcttcgcagaattttccgcttcttcgtgggaaaagcagacaagagaaagtcaccctggagcacacatctgcctataatatcgcgtggctgaggctgggattcacctgggctgttttgaccacatgtggcttcctctggtcattgactcctgtgaaattaactttgtaaaaaccacttttttttttcttgatagagacgggcgggggtctcgctatggtgcccaggctgatctcgaacttctgggcccaagcgatccttcc

SEQ ID NO: 39818 - DNA, 1116 bp, Homo sapiens
tctacatttcgtatgcatcgctcggatgaaaagaaaagctgaaacgaacctcggagcttttggcgcgagaggcgctctgtgtggtcccgagtgtgaatgggaagaggggggcggcgccccgggggcctccccgcccaggaatgcaggcctttcacatgtagaaaatgctaatgctttgttcctgcctcggcctcccggaggcgcagaggcgcccggccggattgtcccggcgcatttgcatgtgagcggccccagatccccgtccccaccctcggccctcccccaccccagcacggctggccggggacttctgtcctcgggccggggccgccttcaaacgtcctctgccgtcatttatttcatcccggttaaagccacaaatagctactttctgaatggatagcctttcccctggggagccgggcaggtgaacattttttactccatacttgagacacttgacaaagagagttgtatctggaacaacctctgttccagcgaggaagggcacggcgttggctgagccatgccccactacagcgtcacatttatgtcctgtggcgaacacgctgtgtttggcgtgacactaggggctccaaactacccattacgtggttcgtcttcagtggcatccaagcgaccgcaggtggcggggccgaaggggtaagggtatttcatgcacgttttacggaagaagacacaacccagagttgaggggccaccggggtccctctcttgagcacaggcgcccggagcgcaaatgcgcggactgacccagcggccggcgcggcggcgccgggcggacttaatcgcgggcgcagcgcgaggctcgggacccagagcaccacctaccggcggcacggtcggcgcagcaggccccagaagggcggggaacgctgtcaagcccaggggcacttcggcgaggagccccacccgccctccagctgaccctcagctgtggcccacatccggggcccagagcgccgcggaaacgccgaagcccggccggcaggtacccgcacgtctccttctgccaccgcggagcttgcttcattaactccgtttcatgtgacttattttatttcttttatttttatttatttcattttattttat

SEQ ID NO: 39819 - DNA, 832 bp, Homo sapiens
tggcaagtcagaggttgctgggctggaattgggtaagggcattgaaggtggggtgctgcccggggaagagggtagaagagccacttgcagtggtcccagaagaaagacctgagtgcttttgaggagctgggtgtttgaaaaactgggaagcactttgctgaggactctactggcgattagaactgtatctacaaagcaaatgttcaactaatgtttacagagttaattcaaacgctccagtttaaaaacttgccacctctgcccttcagagcaagagagaaccttgctgctttgtaagtctgcctcaaaatgtctttcccaaggcctctgcaagcctcctccaaaacaggagttgttcatctcctgctcatctgaagatgtacccactgtattgtcagtggaagagtgcaccagcacagggagggagaaaagtttgcattcaccaattccttttccccaccccccttcccttccaaaggtcctttttgctggggatctctgattggaatctccctagaatcatctcatgttgatgtaggcactcttttaaataggccaacaaaccccgcattctgtgctttgaaggacagtaaaatgtttgcactggttacagtaaaagccagtacataacatgaatacaaagaccctcgagataaagttaatgattaaattcagaggttttggcctatttcctatagagattgctctctcctgaactttactccattatgtttagagacaaagccccgaaattgccttctgtgtttataaggtccaattgtaatctgtgctggagactttcccttgagttttctccattcctccgacaggg

SEQ ID NO: 39820 - DNA, 613 bp, Homo sapiens
gtaattaaggatacaattagaagtcagtgctctgcaatgtggaagaggaccctcgccagaacctaaccatgccggcattttcaccctcagaaccataagtaccacccagtctatggtactttgttattgtagctcaaactgactaagacacttggaatttgtaatgatttcttgattcattctaactacacattcctttttgttgcctcatccaatagccattttgaaatgcatagccgattatatcattttcttctttaaactacttcaaaggcaccattacctataattcaagctccttaacttggtgtattcaatagcatttattttcttggtgaagtaggagacagtgtcacctgtacattaggataaagtgtaagggtgatggtttataccatacagtgagaagaaggaatgacaaagggcaaaaagagaactagagatcatgaaagatccaaatcagattggaagtaagatcccttcctggccagtcaatactgaagtttaaaattcttctgcctggctctggttccagagtgtgacagtcagaatggtcccagcagtggttcatagagcagggcctcttaaacagctgcatacagaaggattgagg

SEQ ID NO: 39821 - DNA, 2227 bp, Homo sapiens
aaacattttcagcagctgttttccaaatacttaagatgttcaatcttggttgtagataaatgtaccacttttctctgccctaggcacgttattgaaagcgttattaaagggtgtaacttacaagtcaacggtgtcaaatgctaccagctcttacttaaagcatactgcaggctcagcccacctacaccctggaggaaccaaagttggtccgcggaacgtgcagaggagcagcttgcaactacccactctcctttccgcaggtgtgatgcaaacctccccaggcagcgctttggagcccctcagccagtcgcctcagctcggacgcagcgagtgaagctgtccttcctctcccaccaactgtgcacgccccgcacctcacctattcgcctcgccagccctgccccgatcaacgatggcatcccccggcagcctgcctattccccccctcaacctggacccccaaacgccgaaggaaaacggtcccacaaatacaaagaaaaacccaagccaaagggcaggcgacggggagtggtgagaaaggaacaagatgcacgaagagggagagcacccagaggggaaataacccaatgttcccactgcaagggcctctcctgaccccatttttctccttccggagcgctccgcagagcaccaactgggaaagcgagggcgccccaaaccagagccggaggcaccctctaacccgcgcaacttggaatcccctcccggaaagccaacttaggaaatgtttacacgcacctcgtctcaacacctcgttacagatggggaagtggatccaagcgcaaagggcggccggagcggaacgcacaagcgaccgagctgcctggaaggacgcgcgccccgcccggcccgcccccgacgggaaggccggtccactgcctgcgttccgccggccgcgagcctgctggggggcacttcggggctcaggctccccgccctgcgggaccgcgggtggctgcgaccccagcccggttccccgccagcctgtcccctagcaatgcctccccgtacccgggtcccgcagacttacgcgcaagccgcgcgtagggcccagaagcagcagaaccagcaacagagggaggatgcgaaccaggaaccccggcatgaccaccagcctcccggctctgcagtcggcgcccaggccggccgcttcgcgtcacttgactaaggacccacggcctggcaccgcccctcgtcggcccagcagccagccctcgcgcctgctcagccccgcgccccgccccgctgtggccgagccgggcgggtgggggcggctaggaggctgcgcgccgccgcgtgactccaggatagtactatctgggttttgcaggcgtcttccctgggaagggaccctttggaactgcagtccggagggcctgctttcagcagcttgataacgcgcctcggggattggacatgaatcatggtctccctgttccctggctgccttgagagagcagaagagggaaattgttaatcattaaacctaaacgccctagatggaatccgcgtctcatatacgggctctttgaataactctaagccgggggttagcaaaatgtggtcggtccctggagccactgtatcaactcacctggaacttgttagaatgaaaatcctgctcacgcctgtaatcccagcactttgggaggccgaggcgggcggatcgcctgaggtcaggagttccagaccagcctgaccagtatgatgaaaccccgtctctactaaaaatacaaaaattagccgggcgtggtggcaggcgcctgtaatcccagctactgaggaggctgagacaggagaatcgcttgaacccgggaggtggaggttgcagtaaaccgagatcgagccattgcgctccagcctgggcaataagagcgaaattccgtatcaaaaaaaaattttcttttttaaaataaccttagtttatgccttggtgttccaaaaagcctttttacattgtataacaaagtagccaaaattctatttgttcactcctttctcctttcctaccggacatgtccttgagagattgagaaagtatcagaaaggacatttcattgagagattgagaaagtatcagttactggcttttcttaggtttttgttttttggtttggggggttgtttttttgttttgtttttgtgttttttgagacagggtctcactctgtcacccaggctggagtggggcgcaatcacggcttac

SEQ ID NO: 39822 - DNA, 1046 bp, Homo sapiens
ggaatcttcgttttcacaaacctccaaacgaatataaagatcgtagattatatagaccgtagggccgatgtatataatctattagggccgcgtcggccttgcaggcgggtctccaagtgaatgagcggcagagtcccatcatgcgcatcagcctgcgtgaaccagtgcgcagcgcgcctttcccgggcaccctctaggtgctggcagctggcgcccagatcccccggctgggtggggaggggcggccggacggggcgggccggaggctggcgtccccgccccgaaagcactgggcccgccgcgtcgcaccgtcctctttcctttccttctccctccccttttcccttccttcgtcccttccttccttcctttcgccgggcgcgatggagccggggcgccggggggccgcggcgctgctagcgctgctgtgcgtggcctgcgcgctgcgcgccgggcgcgcccaatacgaacgctacagcttccgcagcttcccacgggacgagctgatgccgctcgagtcggcctaccggcacgcgctggacaagtacagcggcgagcactgggccgagagcgtgggctacctggagatcagcctgcggctgcaccgcttgctgcgcgacagcgaggccttctgccaccgcaactgcagcgccgcgccgcagcccgagcccgccgccggcctcgccagctatcccgagctgcgcctcttcgggggcctgctgcgccgcgcgcactgcctcaagcgctgcaagcagggcctgccagccttccgccagtcccagcccagccgcgaggtgctggcggacttccagcgccgcgagccctacaagttcctgcagttcgcttacttcaaggcaagtccgcctcgccccgtcccaggccccggccccgcccctgacccagcctccaggccctagccccgcccctgcgcccggggccgcgttgcccctccagttctagacctggctccctcccatccagccctgccaaaggtctcctccaagtcctgtctccttcttcatctcaactagagatgaaaatgcctt

SEQ ID NO: 39823 - DNA, 535 bp, Homo sapiens
aatttagtgtagtctaagtgtacagtgtttataaagtctgcagtagtatacagtaacgtcctaggccttcacattcactgaacattcattcactgactcaaccatggcaacgtccagtgctgcaagcgccatgcatggtaaatgccctatacagatgtatcattttcatctttttttttttttttttgcatttgtttggtttttgttttgggggtggggagatttgagataaaatctcactctgttgcccaggctggaatgctgtgacatgatcgtggctcactgacctcttggactctcaagcaatcctcctgtgtagctgagaccaagagcacgtgccaccctgcctagatatttttttccccctttggagagacagggtttccatatgttgcccaggctggtctcaaactcttgggctcaaatgatcctcccttctcagcttcccaaagtgctgggatcacaggcatgagttactgtgcctggtccattttttgtttgttttaccttttatactgtatttttactgtacctt

SEQ ID NO: 39824 - DNA, 491 bp, Homo sapiens
gagtgacacattttgaccaaaactaccttgactctctgagtcaaggagcctaggagatcaagtgcttatttcacctatatggcaattcgggacaagcagttatctgaaacccttgccacaaattcagatgcatcctccgcagggtgagtaggggagaatcatgtaggtgaagaatgaaccaaagtcatccacctcagttatgtcaggctggaccaaattccagctggtatctcaaaggcaaaaggcctggactttccacctttctcagctgcccatgactcatgctggatgccccactgttttcttccaccaggatctactggaaggctgttcagcaaacactatgaaaggactgattaatactttcagtctcacataaatctatctaaggaacacagggaaactgttttggaagtagagaaggaggaacttcaggctaaactcagatcccaccagactcataagatcttcttcagaattaattttcaaaa

SEQ ID NO: 39825 - DNA, 3475 bp, Homo sapiens
aaaaccctcaagaggaaacagcctgagagggtagtctccaaaatgagaaacttcactttgagacaatcaaaagaacaaaacgaagtcacagtgctactcccaccgctgctctttcaattataatttactaacatcaagtgattaaaatctgcagccagaaaagatcataatgtaggacaacaaagtaggaactgatcccaaaacgctagacagtattctcccaatataagtgctgccttttcgtacagtgtattctagctccaatgggacttgtaaatcacttataaggaaaagaagccccttcccccaccaacccaagccatcctaatagctgggcgtgttttacagcaaatatgaagcactcaggagcggtccgaggccgacgcttgcggggccatcctcccccacccgcccgtcaccagggcgagcagaggcctttggggttccatggcccccgaccgccacgcggcaggactccgaccccgcagcccaggaggcccgcgcacctctgggagcagccgcatctggcagagactcagggctgcgcaggccttccccaaggagacagaggcttctccccgcccagggagcccagtacctcatgctgtaagcgccggcgcccagttcctgcccgatgcccgagaggctggcgtcgaagtcgtgcaccagcccggactcgatcacctcgtccatcttgagcacccaggccatcttccggcctcgccgtcgccccgcacaccgcggcctccgcgtccagggcgaaggagccggagctccgctggcgcgtcctgggggagggcgcgggtgaagcctccggaggggcggcgagtggtcaccagcggcggccgggacgagagctgcgggggccccactggcagggcacgacgagcccagcgagcaattgcagcgggagcggccgggccgccggcagcgccaccctcccgcggacaccggccctgcgcctcatgccggcgccgccgcccagcccccgcgccgctagcgctgcagccgccgccgaccgccccgcccggggccccccggtcgcatcctcctccgggaccgctgggaggctggacctcgggccgctccgaggaccacacgggggcaagccctccgcccgcccgtcacccgcccccaagccttgactccttgcccccggcccgcccaggctctagcgccacaccgccccggccaaccccgccgacgccgctctgccggccggacgctggcttcaacgcgactccgacttaggttcacgcgccgcttccgcctcccccggccccgccccgaccccgccccggcgttcgccccacgcctcggccctccccgtacagccccgcgcttagggccactccccgcgcctcgcggcccaggaactgtccagagagtgcaatgcggccccgcccacgcggctgttcccagccggggtggcctcgctgcgtccccgcacagcagcccaggaagaggcggtgccaaaagggctgccagtttccgccccttctagcgagcgagatgattgacaggccaactgagcaatacctgcaagggcttggacgaagctcccgtgagtctctgtgtcccccgactaaacaaccaatcaaaatgttcttcaccttgggcgggctcgaagacggaatttgttgccaaaagaaagagttcattggactgcatggtagaaagcgacccaaaacgccacttccggaggtgatttgctcctctgtggtatttcccggtcgtctctgctttatgccctctctaccgagggagtgagcggtttgcaccccatctggtgacagaaaagccagttgtgcagaaaaccttgattggcgtgagaataagccaatcaacgctcctgagaaagagctctggaaagacttcccctattggttgcattgccgagagcagcttggctatcctgagttgaactagctgttggtcatcctaagggcaggcggtctcctgaagttggaccgaaccattaggacgtgccacagtaacagctacgctgctcagaaggcccgaagggtcttcctcagcgacctagcgtgggcacgcgccactgcggccaaaagacagaaatctttttaccggaagagatgaaatagaaagcaggagccagaggctgacttacagagccagtgtgcggatcagagttccttaggagcggctgctggcgcttgacgggcggaatccttgctgaagagaacgtcaaggcccgggcttcgccctgcatcgaacttactgcctaagaataagacccaaatgctgagcgccccgccccaacttgccagtttaagtgcaaaaatacatagattaaaatgtcagcctaataaagcagtggcactgagccagaaaaaaatagtctcaacgcctgtgtgatttagatactaacttacaggctcacgcctgtaatcccagcacttcgggaggccgaggcgggtgaattagttgaggtcaggagaccatcccggccaacatggtgaaaccccgtctctaccaaaaataacaaaaattagctggatgtggtggcgcgcccatgtaatcccagctactcaggaggctgaggcgggagtaaggcttgaacccgggagaagacagagcaacactcggtctccaaaaaaaaaaaccacaaattaacttggagaatgtttttctctttacacaacatttttgcaaacatttcatttgataaagccatactttagagatgaggtaattcaggtgaaaatgtgtaaagattacacagtgcaaggtcacacagtaagcaggtaaaccggggctatttgactaatccagatttctctgattccaggcgaaaacattagattggccatcagttcaggaagctccattccactattacaaataaatctgcacaaacaattggatagtcaagggaaacattggtctcattgggggtctcagatatgtcttcattccatgatctcacctcacttgcataacctagtctataaccagattagccaggcctactattagttgttggaaaatttggagaaatggaattgggggaagataattctctggtttttggagagagtgtaaaagtacaagctaccatcaatttttcaatcaggctgtgccctaaggaagtactgggtcaaatatttagaaattgagcctcaggctgggcagtgtctcaggcctatgatcccagcgctttgggagaccaagacttaaagcttgggaggatggcttaaggccagcaattgggagactagcctgggcaacatggcaagatcccgcttctacaagaaaaaaaaaattagttgagcatgatggcacgctcctgtagtcctagctacttgagagagactgaggcaggaggatcacttgagcctgggagtttgaggctacagtaagctatgattgtgccactgcaccctagcccggatgacaagatgagaccctgtccttagaaaaacaaacaacaacaacgaaaaacaaaaaacaa

SEQ ID NO: 39826 - DNA, 753 bp, Homo sapiens
atctggcatactttaatgtttgagaatcccattttatttcttaataatctcttgagagcaatgaaaatcttataaatcttgccagggaatgtcaggagtttaaactggtgttttagatggtggcaactgcactagtggcttttaattatccatcctgcgcctgccatttagaatgtttatttttgctcttgggcaattttcagaaataagcaagggaaaagagccaaaccaaataacaaaaatcagataagagtaatcacaaaaattttaagcacaggcatgcagatcaaacaaaatattaaactaggtgcacagaccaaacagaaagtaaattcaccagaaaagacatgcctcacaaatggaatgtgaattctgtagaaatcactgttctcagtccagaaagacataggtctttacaccagaaaggacttattagaaaagctaaaaggccttgtatcatcccaggaggtaggcacagtcctttatttagatggcttaatccaaatcagatcccaaataatatcaaaaagcctctaccaaaaaagagaaaggctcagcctgagagaaaactcaccagggaataaaaggtgaaccgtgtaacacatgccagttccaaatatcactgattctttccaagaatgatctttttcaggtcccttttcagacaccatatatttcaacctaaattccaaacagagaggctctctaaaagaaagggtatttattttgggaatagagcattgcaatgaaaat

SEQ ID NO: 39827 - DNA, 2156 bp, Homo sapiens
aaacgttttaaaaataataatcaagagatggtatgtaatgaagcatcgacgtgggtaactctcaaactttattgtccttgtaaaaagtctaacctttccaaaactcatctgggctttaccattaaatctgcgtcataattctagagtttgtctttcttctctttttgaataaaaggtttcaaagtacagcctattcgctggatcatgagaatatgttactaagaagaatcacttcatccatgggaagctgcagtcagcattttaaagcaacactgccaccagaagacaagaaagaaaagtaactactaacgactacggggcaagttaaatacaaaatatttacctggcctcccaacgcggctacattacaccctgcctaccaccaactcttcagaaaggctcattctttctcgcacctcatctttgtaactttttcccccccagcattagcctatctactaagacacatcaacctaaaatcgtatcctaatgtcctatctgttggtctgggtagtgtttacacaggtgaacacaaatgtcgaagtctttcactgatttttttttcaaaataagtgatcaacattgtgtcctagtaactccgcaacgtgtcacggaatcgctgaatttgtcattgtccacaagtgtagaaaaatgtggtcacaagtcagtcctcggctcgcgtacgaagaggcggtctgcccagtggggacgcgggacccccctgtttcccctatttttatttattttttactttttttgagacagagtctcactctgtcgcccaggctggagtgcagtggctcgatctcggctcactgcaacctctgcctgctagattcaagcgattctcctgcctcagcctcctgggtagctgggattacaggcgcccgccaccacgcccggctaatttttgtatttttagtagagacggggttgcaccatgttggtcaggctggtctcgaactcctgacctcgtgatccgcccgcctgtgcttcccaaagtgtgtttcccctcttaagcagtggttcggacgggagctttcccggcccggcgctcgcgtccgggattaaagggctgccgcggagggcgtgaccagcccagcctcgccgccgtcgcttacccggtagttgctcgaacccacccagccggtgagcgcgtcgactgtcttgcctaggcggcccaggtcctcctccaggtccgagatggcgccgggggcgccaaggtagagcaggagctcctggccgacctgcagccggccgccgacgtccttctgctgcacctgggcgcagaagtactccatgctgcggggctccatggctgcggccgcccgcccgcctgccagtctgtgagcggccaactttcgccgagagccgcccagcctccagtgcgggtccccgcgggagcgggcgggactcacttagcccgccaggggcgcggcttgcggggcgcagcgggcggcgggaggaacgccaagcgcccagccgcccccaaactagtcaaactcggcgccccccgatccccagcccgcttcagaggccgcggccgcgggcgacgtcagcacgcgcgtgacgtcagcacgacgccggcgagggccctccagtccggctagcgttttgctgcggaggtggtggaggtggctgcggaaaccgctgggagcgataggacctctagggagacttggggtccgagttgggccgagccccctgggaggcgggccgttctttgctagccgctgtcagggcaccctgccctcgccctgtgaaatgtggaacgtttccaagtttgcctccacttgtattcaacacttaggaaagtacttggcatccccctttcccgcccccactgccggtttaaaaaaaaaaaaaaaaaagaatacactcctgacttctgcttccagccaccaccacagtcactgtgtaatacttaaaaaaacaaaacaaaacaaaacttaggtttgcctaaagtaaaacgcacagattttcagcgtacacttcatgagtttcggcaaatgtattcacccgtggaaccgccaccccagtgagggtacagcacgtttccaacaccccaggaagtcccaggacacttcccaattatctgctcttccctaggcaattctaatttgatttctagcatggtaacatagttttccctgttc

SEQ ID NO: 39828 - DNA, 1364 bp, Homo sapiens
ctttttaaaattcccttagctactcacagagttggccaaagataagaaattattacttggaaatgtaatcccatagtttcttttttatgatggtggttgctgtgttacttggtacacagatattttgggttagctgatacaaaagtttgatatttcaaactcttatctttattgtggcttttagctacatttttttttctggataattttagcctttagcattatgaaatgtccttaattacatttaagcctttttggtctgaattgtctgatatcaaaagaacgaccctgcactcctattgtttccatttgtctggtgttttagttagttcaagctgttatagattgggtggcttcaacaacatttatttcttacggttatggaggatgtgaagtctaagagcagggtaccagcatgattgggttttggtgagtgccctcttactgctttgcatatagacacctttttactgtatcctcacatagcagagtgagagaggaagcaagtgctgttgcgtctcttcttagaagggcactaatcctattcatgagggctctgtgctcacaatctaattaccttccaaaggtcccacctccaaataccatcgcatttggaactgaatttcaagaagtgactgttgggggtacacattcagtccacagcacctagtatgtctgtctattcctttctatttagcctttctgaatcattttgttttaggtatgttgcttgcatgtaccataatgatagtgtatcagttagcttctgttgcataacaaaccatgccaaaacttaaaaaccagccatttatttagctcataattctgtaggttggcttaacagttctggtctagattggctcagttgatctctcaggtgcttgcttctgtgtctgaggtcatctagggtgttgcctggttgttggatgatctaagatagccttgttcatatgtctgacaattagcagactgttggttagggctaggagagtgactcaaccacgtctctcataatccagcaggcaagacggtacacatggaggtcacggggttgcaagtgcagtaagagaggacaaaccctgatgactgaagtgtctgcttgcatcacaactgctaatgccccattggccaaagcagctcacatcaacgacctagacttaaagggtgcagaaaaagactccacttcctggtgggaagatctgcaatgtcacactgcaaaatcatgataaagggagaggaagagtttgtggccaattttataatctatcacattgggttttcttttgtgagtcattttaaaagtctttttctttacttccttttttctttacctccttctgctattcgattttttaactttaagt

SEQ ID NO: 39829 - DNA, 2084 bp, Homo sapiens
atacaatactaaacaaattcttcaacttggacaacaagtttctgaatgatttgatgcctgcttactcatccaactttattccatcccattctatttgtttttaaaggtcttgtcacatgtttcgtttctagtcctgaaacatggttaagtgcttgcctcctagggcctctgccgcaggcttttggtttggaggctctcctttgccactccacccctctccactcttctcctcttctgatatcaagcatcttctcaaattacaggtgtcgtttttaatttatttaaaattttgttctttctacaaaacagcaaccagagacacaggttcattttcagttaacctactcggagaaaacctactttatcttatttaaattagggtcctccaagcgatcttaacatctcctaagtcccaagcaccctgtttttttcctgatactttttccgtttaccttaaggtctgtgtcaacctgacagtaagctgcacgatggcaggggtcttgcctactaggttccctgtgcacagcagcccgtcaacagtagttgaataaacatcataggtcacaataaccctgggactgcctcttggggaggtagccgcaaactctcgcaggtggcagtgacaccagtacttctccggggggttgttcgagtggaggaatactcttacgtgaaagtgctcagtacaccactgcggcaggaaggaggaagggaagaattccagatggggagaaagtaatattttgcagcacagtacagggtaaactgggtccaggtgggcgtagccgccgcgacaccttcacgtgaccgcggacagcttaaggaccccgcatccagtgcgcctgcgctggagctcccggaagttgccggacccggaacgcaggcggagcgcaagtctgtcagccagtcagtccgccagtccgccagcccagtacctctctctcctcggccctcgtaagctgtccgcggtctgtttggcccgaacggcggcggaggcgctgatcatggcgacattcatctcggtgcagctgaaaaagacctcagaggtggacctggccaagccgctggtgaagttcatccagcagacttacccaagcggcggggaagagcaggcccagtactgccgcgcggcggaggagctcagcaagctgcgccgcgccgcagtcggtcgtccgctggacaagcacgagggcgcgctcgagacgctcctgaggtgggcgcggggctgggagtgggtaggttgtctgccagccgtcgctcgccgctcctcttcccgtctccccccttccttcaatcctgtaacctgggcggagccgccccgtcccggcctgaccaggcgcgtaggtgtggtctgcattctttgctggtgagcaggacccgccctgcaggcccgctgtgactgcccgcttgtcctgcctgcacgtctgctctagcccttggtcggcgagggctccgtggatcagatacctgggagcagcagtctgccctgtactgatctcttttgccacatttacttagaactagtcttcacttttttgggtctctaactgaagcttcccctttcgccccatttttccatcactgtctttcttgggccacattttgatttcataatagtagttgcttgaaggcagtgggggaagtgggggaattgggacactggaccaaatgtctgatcagctcatcacattgtccacatgaaatggaccgtcttcctcagttcaaaataatcaaatgatagatggagaattctgaaagttaggagctacaactatttgaaataaaactctagttacatagttgaaccgttcaaggtaggttgtttaaaagcagtttgttcacaaacagatatatacacagtagagtaaatttgttattttagcaaacgcttatttagctcatgctgatttaatgagggttcctttcatgatacttaatagttataagaacattttttacgattttatagttaaacatttcttttgcataccttgttaatctcgttttctccgtatagtatattctacttgtttcacaggagaatcacaattgtattccaatccaagtagcagaaacccaggcta

SEQ ID NO: 39830 - DNA, 1697 bp, Homo sapiens
tataaggcctcctaaagatgcggggaggccacaatgagccagtccattgaaagtgctttgtagcattgtttggtcctaagtatgctgtcaggcatatgttgtcaatcaaaagaacccactgaagctctgtgagacacctgctggtcagttccacatccctggtgaggctagttccctttggcatttgtgtttgatacattctgggtctacttttgagatgggacagggcaaagcctgcgtgggactgcatagtgtggaggcttcagctacagctcaggagtgctgagtacttagtgcatgtgccaggcctgtctgtaatttctagactacttctttaatagcaaactcttaatacttctatttcacagatgagaaaactgagactcagagaagctgatgtggctatactagtaatgacagaaccaggacaagaagtcagattcctagtcaccaagtccagtaagatttggggcaatcacttagaatttttgacttcagcataaggtaaagaagataagaaagtatccaagaggcatacaattttaatctgaaagcattgcaatatgatgactccttaaacaacataagaaatttggagttcctttaaagctgcaaacaccagaagtttactccttccaactcatcattcttggcaaagtaggcataaatggcaccttattccttccatttccagttggaggttcttctgttttgagcatgtgtattcctcttttctggaagtttttcttgacagaagcagagaggtttttgacaaacaactttaatattctttgtgtctgtgtggctggctctaataatcctgcaagcttacagggtcactgttaagattaaatctgagtcatcggaggcagatgttgacacatcattatttaaatcctgagctgctgaaggactctcatccccatgagctatgattcactgtccaaacaaacaccccaaattccacatagcttgctgagcagggactctggactccattaggggaaaaagtttgccttgctttgtgtggtgagaaagcactactttctgttgcagaggaagcgtggcctacagggagaaagagtgtttcagaagacctaggctcctgtctcatctcttgctctgggctttcttttattacctgctcttcataaactttcccgtaatttacacttgcatgtttacttatatgttattgttttttattttttattgaagtataatttttaaagtaaaatgtgttaagtgtccagcttgatgaaattttacaaatgtatactctaagtcagcaccatgcatatgacaacatggaacattttcaccaccccagaagattcccttgtgcaccttcccgatcaataacccttcaaggtaactgctgttctgacttgtgatgccatggatcagtttcctcagttctagaatttcatgtagaagtcaaatggcacatactcttttgtatctggctcttttgctcagaaaaatacctgtgacatttatatgtggtgttgtggatatcagtgatttgttcctttttattgctgagtattatcccattgtatgactagaccaaaatttgtttattcattctcctgtcaatggatacctggtttgttttcaaactttggctattatgaataaagctgctgtacctattcttgtatacatattttgtagacatatgttttcatttcttt

SEQ ID NO: 39831 - DNA, 1084 bp, Homo sapiens
acagatttcctatttttataaaagcaccagtcatattggacttggactcaccataataatttcattttaatttaaagaccaaacactctccaaatatacaatttatacatggaagtcctaacctttcataattacgtggtatgtggtatgaggggttaggacttccatgtacaaattttgaaaaaacacaatttgatcgataaaactaccacagctttcactaacaagcttgcagttaatggtttgtcactactattttttccaatatctgcacatcttttcccattgccttactatcacagtgactgggaaaatcctaactgatgaatccaactttccaccttttgctggactgcatctaagtagctcagtgacttgaaagaatttgataaagatgcagattgataccatgatgaattatcagattataatttttgcagccctctaatataaaacttataagcttactagattctatacccattctctttttatgttgttatcatgaaagaattacctcttcatgtctaaagctaatagttttgtgttcttgatgtttaacaatctcactcttattttaatattttaattcaactttcctttatctagcatcctgttttcatgaggagtttcacaattaaacatgtgtaatcccttcttacgtaaaaatacttatcaatatttaacaaatattgatttagccctgtgtgccaggcagtcttccaggcatggcaatgcaatgcaccagtgtgcaagacacaatgaccactcccaaataatttagattccattagaaggaaacagctaacaaaaccaagtcatatataagaaaatgtatgacaaagcattaaatagtgtatggaggaaaataagagtgtgtaagggaaagaaataaagtacactattagggaggatggttgaagatgttctccaaggaggtgactttttaggaaagatttggattagttgaaggagtgagcccttcactcctttagaaaattccaaacaaaggaaatagaaacttccctcaggaaatactcttggaatgtttaaagaacagcaatcaactgcaacaatgaatgtg

SEQ ID NO: 39832 - DNA, 1016 bp, Homo sapiens
ttaaccaagttcatggatttaggaaaagaagcaaaaattctgtaaattcattattagatgagtagggccactcctatatcaaccctgaataggtggattcatatattcttactatatggaatttatgatatatttgtcactcttttcaagaatattccacattatttaaatagaatcccagtcttacatggtggtatctctcagctggtactagaacttttccttcagtaggccatttcaccattgcagaaagccaattgcctttggatgatgggacacatggtagatcaataaatgccaaaggtcttaagcttcttgcctacttccattgtaaaatgatgttgtccaacattgtgaaatagtggagggtactactgagcatcattttgtgacagagatgaaatcattctgtcagggtgagatggggctgatggaaaaatcatgcacaaggaagaaaaatttgcattcagaatacatatctatttctataaggacagattgctattctctgcagtatggaaaaggtccaatgtaatcaacctatcactaggtggctggctgattcctcctcttccctcaccattcctgggaacaatgccatatcagtgcttgaagttgacctgtgttattggcaatttggatactcagcaggtgcagcagtcagatcggctatggtggagggggatttcatgttgttgaacctacatgaagcctccatggctgccaaaatggacactttgttcataagtccattaagtaaacattgagctgactgaaaaaagaagtttactgacaaccccaggataaagtcctcttgttcatctggttatttatagcccgagccacagtgaatgtgacctgtgagcctttttatggtgcacaaatatatacttattctatttccattctaagaggaacatgtacgtacttcttccttagacttcccaggcactgattttccaatcttattcagtaactatggagattcaaatcaggtttaactctacagatctagg

SEQ ID NO: 39833 - DNA, 490 bp, Homo sapiens
gttctggatagtccggaggcactgttggtttggcttgtcttgaagctttttaaataagcacttttgttttttgcaggtgcatttaacataatactactaatttggagatatttttaataaattctagatccacttgacatagtgcttggtaactgagttgaccagcagtgaccatacattctttttgcctggaatgatagggtttgaaataaagccaagcagtgtcataagtttcctgacgtcagaattcaacattgcgtaagctgcacagtataaagaactgattgcaaaatgtgctactgagtatgaagccttttaaaaaattaaataatatgtagcagaaattgaggaatagacttcaaataagctagagaataatttttaaaaattatgattcagttttcctatgttctagccacaaccagacagtcaactgtagcctgtgtactgtatttgtggttccatgtaatattcttgctttctcttctcc

SEQ ID NO: 39834 - DNA, 578 bp, Homo sapiens
agaagttccatatccaagataattatatttttaaaccattggcaaaggaaataagttcagcttaacagatgtttcatctatttattgctattaaacaaacattccacctaacaacaactttattaggtcacatggttttatgggtcaggactttgggcagggcttctgtgagcaattcttctgctccatgcaaaccccactggggtcacacagtactctttagccattggggttgcctggagggtacacgatggctacaaccataaggctgtcatctccaaggctcacttcaggtggtttcctccctttcaatggaattttagggattttccatggtatctctgcagcagggtaatgggacatttttcatgttgactcaggtgagtcagatctccaagacctgactcaggtaactcaagtctccaagaaacagaaaccaagacaaaagctgtcagtcctcttaaaagctagatccagagttggcacagagtcactttgcagtaatcagtggaaaggagatattcttcatgttgcctatgccttacataagagagaattttgtagaagaggcatcttgc

SEQ ID NO: 39835 - DNA, 1153 bp, Homo sapiens
ttgacagtcaacaaggaaattgaattgctcttgaacaagtaaatgggttcccactcttttcctacttgaaagaaaatacttatttgtagcacaaataaacaccatacatgttcatttccacaatacaaaaattctttgaagaattcactgaactggaaaatatagtgggggtaagaaactgtacacaagcctggaaaatgaattaggataaaaaatctgacaccgtctgtacctatttttctccttgtgtaagaaacagctttggcaccaaaagttccagttattttatatagctctttaccagaagaccggatctggtgaacttgctgggaatctattctagaagtgctagaatttttttcattgaatgttctttgatattgtttctactttaattaattttaagagaaaatcagaaaatactattagttaatacaggcaaaattctgggtatatgtaattccacagattactacagtttatctccaaaagccataatcaaatgtcacctcaagcctttagaaacctaatttcacgtgactgtttcatcggtctttgtcatggagtctgcaccatggcctcctgctgtgtggttggctcataggactcttcccctgaagagaccatagagataactctgtgatgtactccctctgtgctatagtcactctgctctctgtgcctagcagggtcagctgtgttttcttttcctgagagttctgtattttaaatgagattccagttgtctatggtgtacttctattaacctaagagttgccctcctggtgtaatcattaactactgctcttctgtggcagttattttgagaatgaggtgtccatttaggaattccaacttcagaattctatttatgttctcaaaatggtaactgctttaaatcatcatcacattaatgtatactctttaaattgttaaaatacagcactgtattaagcaaaaaggaaaactgtgtctccccagctgcatcatcctatatgttcaattcttcaaaattagctactgttaacagttcaatgtgtatacttccagccattttaagtgtgtatatgtttgtgtctctgtatatgtgtgtatgtgtatacatgggtatataaaggacacacacatatataatttatattcatattactac

SEQ ID NO: 39836 - DNA, 1531 bp, Homo sapiens
ataagtgaagataaataatatcttttataatttctttaaacctcatgaaccaacaacctctgctggatatttttatttttcttattcttaattgatataacagataagagtttgtccaaaataataatagcaaccaggtatttaaatatatatatgcttatatacaagtgatatgaatgacagaaatgatatagggaggagagaaaggaattcagattattttattattataaggtacttatagttcctctcaagcaatgtaaaattatttgaaaatatacttggattagttataaatatatattgaaaactctaggacagccgctaaaaaatgtaaaagaagaaagcataattaatatactagaaaacagaaaatgtaataatataatgcttaattaaaaccacagcagaaaaattgtggaagacaaaatgagaacaaagaacaagggcaacaaatggaaaacggtaacaaaattggtacatattaatccaactatatcaatatatgttggctacaaaaaaacccactttaattattgacacatgtaaattaaaagaaaaggaatggactttcggtttctggtctggcatgtaagaagagtacaagtaaaaagtgaaacaaactgaaaagtcaacaatgttttgtagattcagcaaagacgcgaggtcacagggcaaaccactgccacaaaaattaaagagaaaggttgatacaaagaactaaaacttactagagcagaaactcagacaacttgcaacctcctccggaaccagtgctgggtaggaaaacctgaactgtaattgacaaattgcttgaagctcagtgtaggcaattcttgagagttaaaatcttccggtggacccagtcacagtgaccccactttttttgtaagtttcacctccaggagctttatctcacagtgaatatcagagttaaaaaacccatcttgcttctagtcaaaggggacatggggtaggaggagagaagaaccatcttgaaatataccagagcattccgttcttgttaacaagatctgtccttaggagaaattattcaggcagaatctcacctctgaagttttaccggagcctaatctacctgaggaaagggaaatacccatctccacaccctccaggcatctggtcacacctgaaggggtggaaaaaaaaaagtggggaggcacaggtgaagatcatctttccaaagcacaaggtcacccaaagatagagacctaatcgtggtcaccgaaagagggagacctagttgtggaagtacagaataccttccttcacaccttaccaccacattactaaaagcctatttacaaggttgctttatctagtacatcaagtctggctttcagcaaacaattacaaggcataccaaaaggcaaaaaacggagtttgaggagaccgaagaagcgtcagaatcagaataatgtgactgtgacagaagtgttggaattatcaaaccagaaattttgaaaaactaagcttaagctgttaaggtcttttagtggaaaacacagga

SEQ ID NO: 39837 - DNA, 786 bp, Homo sapiens
agcaataaaacagacactttgcaatacactgaacatttttcaatatattaaaaaaaaccactgaattcacacccagaggaaagatttgacatgttaatttgtcttttctcttacctatgtgtttccactgttcaaattctgcttgtattctgaagtgatcttcatcttcatatttagcagtgcaaaacatgttcatgctattgaaacacagttgtcttttatttctaggccatagggcaaaagtcctagagaagggttgtccccatgggttctggaatgttgttggttatgacagtgaacgtttggagttatgactcagactctacccgtgctaagtccttgatcctgaataacatgagggcacatatatcctttaataagtatatgtttatggtgtgtggatgtgtgttcttacaaaatcctgaactctctaacacctgggccccagagtagacatttgttatgcccgtgtgaagacactaagaccaataaaatagactagagatatagttctctccaaatatccatgctccaacatgttttccagtcccccttgtagttttccttttgtccttgcaatgagttctggccaatggactgtgaacagaagtgctgtgtggcatatcctgcctcaaagcatttcagatatggttgacaaccttcaactgttgcttgcccccgagatgttgagatgacagcactgcaagatggtagagcctccatttgtgaccaagaggagaagaaaccctcaccaactcacactagacatgtagcaaagaggaattt

SEQ ID NO: 39838 - DNA, 1692 bp, Homo sapiens
aagagcgctgaggctacggattcattcgggtggggcgaggtgttattattgtgggattgtctctgcagagttggcctggagagtgagcggtggagggagtggaacaaggcttcgtcaagagtccccaggagtccaggggcgcccccgagacgggtacgctggagggcctgggcacgggggacaagagagaatacatgcctgctcgctgggagcagggaggcggtgtggcggggcagggggcaacgtgccagttttctttctgattaatgatgctcacgctgctgcgcgtggctcatgcgctttgtctccagccttagggctggcggagaacggcccagggaatgagtggtaccgcgggcgcccggcgcacccagcaggtgccatcactctggatgggccagttctggatgctcccagtggcgcagaggcggcgacactggcaggcgtccggctgccgccacctcccgggtgtggcgggtctggggcccggggtctccggccagagcagctgtggagccacgtgcaacacgcgcgttgccctcagcccgggcggggaccggacgcatccggagctgcggggaggagccgggcgccgcccccggcggcagtgccagccgcgtgggagggcacggaccggcggaggggcagacgacggaggcggccaagctggaggaacgggaccgagggatcgaccgaggctggctggctaggggtgggactggcagagctacggacaggtgggagcagtcagacagcctgagagagggagaccagaacgcaaagagagcgagagcattaagtaggcagggagaggcacacagaaagatagacagcaacactcgcgtgctccctccctccacacgccctcctcttaccgagcgaagcggccaggggcacagagtgggagaggactgtgggcacagaagaccggaagagggacgctgcattgctggtgggacggagggattcggacggacggacagaccagcgcacagactggcagcctgcgagagtggcagctttgagagcagagcgcagcaaagcgagaatcccgcgccgagctgctagtcggacccacagacggtcggactgacagacgtgcagacggacagaagagcagacaggaggcgggggcgcgttcactcccggcggccagccggccagagaaggcggcggtggcaccttctgagcgcgtccggagcagagaccagcagcagcaggggcagcggggacacaagccgcgaccgagccgccgccgcagccctggctgccacagctgtgtgggatcccagccgacactgcagaaagctccttttactagcagttaaataaatcgaccaaaaacaaaacaaacaaacaaacccaacaacaacaacaacaacaaaagccaagccaaaagccaaaacaaacaaatccagccaaatcaatcattgagaaacaataatattaataaaatccaaaactaaatcaaaccaatcaaggcaccaagacgcaggggggatatccacagttcgatcaaggtaataatcaaggtcttccgacgtgaacattgcacgccttttgtggatttttagaattccttctttctttctgccatatatctgtctgtttcttttgaattttttcttgtctgtatttcttcttcgtgtttgtagaaagctgatgttgttatacatgtattgtgttttttat

SEQ ID NO: 39839 - DNA, 1153 bp, Homo sapiens
tttaaagcagtaattcatcacatgttgtaagatgagtttctcaaaaggagaaaacctttagagaataaaggtggctggtgtgttgttctgactgatggaggggcttcctgttttataccaaaagcactgtattgttcaggagcagctcagtcaaaagacattggtccacaatgacacctgggtgtgtaaagagtcacataagttcttgtaataaaaacatcagagagctgttttatgacaagagtcacaggtgtgcattgcaccatctgctggcatagggagagcatgagaggctttgccaagggacagatcaatgttctagccctgacaagccttcctggcatccttctcagggattctcagcttttggaccttgacttctttcccctttttgacatagagcaaagcaagaggtggtttaataaataatcatgaggtatcacttctaaattactgaaaaatcttttaaatatctgcatttacatggttctttccatttcctccaggagaacacagggggctggtctattcccaattctgaataaaacacaagatggtatctataaatgatcggcccagccaccagaggacctcttgctctcctgcatttctttgaatttgttcttagcctcagcttctgcctctgggccccatccttccagatgtgagcaggccaaactcttactctgcttccacccccttatccgcacatacaccataaaagtgcacctcactttttgccccttcaaactatccttgctattggctatagtctttgccctcgaaatctcttctgtgccatccttggagaaaggtctggaaaaggagagcaatacttgaactctcaaggaaagacagaggaaagttgcttctaactctcaagtgtgtgtaacaagaggttaagataatgactaacttcattctcaaagttcacttcttgggggataattatcagattcttgatgggtatttatcagtaaggagaatgactaacttttgactgaggattttgagtaaatgcttctattcttttttgtggggtactactctctttatcttactggatgggagatagttgtgggtttttttccctaaataatgaattagtctaatttaaccctttatcttgaaaattagtgaacaatcctataat

SEQ ID NO: 39840 - DNA, 847 bp, Homo sapiens
aaaattgtgtattgctgctagggagaaaaggcttcactggatttgggtcagttttttcaaaaaagctgtgatctatacggtttttaaacccctaacattctccttggaaataacaatcaatcacctacaaatcagagtctctcccacctggactgaagcccagtctgggcgcatagttcttgcatctgacaatgatttaatccccagacaaatttttatactttgaactttttattatggaaattttttaaatgtgcacaaaatggagataattgtgtaacaaacccccatgtatgcatcatgaagcatcagcattttgcccttcttgttccagagaaatttttaatagcacaaagcacagcctcccgtgttgatcggagacagatctggagggatgtgtcctcggagcggggtgagatttcacaatgtttgaaggtaggaacatctcttaatagcactgacgtgagtgcagttgaagctgtcagagccacggttctgggaagtggcacgctcacccccacagtcctccggagtaatgctgggccatatactcgcatttccactgtcccagcttgcctgctgggccgtgggaattggatttggacctggaatgtgtgctgatgcctgaggctatcttaatgcttcatggcacccaagaaggccatacttggcatctcaaaaaaggtgcagggcatttaacatgtttgctttagttttgtaattatgctgtgtaaccgagggtcctcttggaaattgttgcaaatgaaagtgaactgtccagtcgtccgtgttcttggcaaattttcagcccactataaagcgaaaatcaaaatttctgtttaagaaa

SEQ ID NO: 39841 - DNA, 517 bp, Homo sapiens
tacagcaggcaggggatatgaggaggttgacatcatcgggtcatatcaggctttttaggtagagcatgctcctgtgatcgtaattctcacattgaatgatgataggtcggccaaactcaaactgcagcccttctcttacagatgaccaaccacatgatctctttcagttattttcaaagcagggcatctggagtccgatcagcattgccacagatggacccagagcctgagtgctgcctgccacaaacaaacacacgccaattcagatggtttaagtgggaaagtaccttctggctaagctgtggacacattgaaaaaaaagaaaaacacgcagattctgctccatcaatgtgttgtgaggctcctgaaaatgttttcctcccaggaatgtattcatttatcctttcaacaagctggtatcgatagtgctcctgctctgcactaaacaacagttggaagatacactggcctgcgggccctctctgtccaaggaacttagagtctagtgctggcattc

SEQ ID NO: 39842 - DNA, 1602 bp, Homo sapiens
caatatggattgtaattaattgttccacattaaaaaattatgatgcctacctacaaaacctgggtatactttatctgggaataatgcaggcatgtgattttctatgtggcttttggaaagatgggcactatgagttataggtgtggaaggaggaaattgggcagctagatctcagacaactttatggcattctgatagctatgaaaaatgggccttaaggattttcaaaaggagaagctgagcataatatttagaaacccaaatgtgtccatgtgatttgggggataaaaccaagaaagagacacacatgccatcatcagatgatatgctcaggacatttctgtgcagtatttgtaggctcgttcacaaggagaaaagatagcggtcctgtgaaaaacaatgtgtgggtctctcttgcgacatactgggaattaattgcacagattaggtaaacttgccctatatttctaatagaaccatcactagagaaacacaggttattgaaaagagctctgacacccagtcaaaacgattatgtttcctgaaccatctctgcttgtagataagtctggttctagatcttgtccaaatcattgaatttaatgtcagttaggctaactaatttcaagctcctttgcagctctgtggttttctgggaatttgcattttttttttaaagtttgcatcatgctggaggttgatgacaccacctttcatgtgggtaaattatgccagactcttaatagaatgatgttggaaatgtaaggtggtgatttgcctgtatgggttatggaagtttaggccatttaaaaatctttggactggtctcaatggtcacacactcaaactgaaactaaccttgatgctgtcggattcttggcttattttctagcatgggagcagagcctttggcttctttctctgtgacattgattttggtcaaaaaaaccctccttatctgtagcagaaatatgcacaaactgggccagtcttgtgacaaggctgcccatcagctattgcattccatccagctctctcattcagattattgacatcctgatgtttgtattgttccaggaccatatccagggtaagctttgggaaaaaaattatagagttgtctttttcagtgaaatatgatgtctgttaccctttgttggtgaaagcacattggctgtacatgcattgattctggtggaggtgcaggtgttctctgaacattgcattttctctatctaacctttttattcttgccgtgtccacattggatagataaatagcaatgtatgtcaccaggtactgctaagatgaagatgatgatgatgatgatgatgatgatgatgatgatgatagcatttagtaggtactggtgtgagtcaagtactaaccatggaatgttacatccacagaactagtctgtatacatatgtgtcatcaatatgtcagaggaaattttgtaaagcagaattccaatttcccctcttatagtatcattttctgcctttgatctgtaggtgtgtatattaatttgcttattttttaatttgtattcaggaagaaaaaaagattttgaaatgtgagattgtgttagttcctctgaat

SEQ ID NO: 39843 - DNA, 1361 bp, Homo sapiens
gtgttgaccatagcctccagttccagccagctgaaaagataagcacatttgtatttgtgtggacaagtctgcagacttcttattgttgtctcaagccagacaatacaacccttttaaataacagttcctcataaggtgagattaaagatatttcttcttgctgttaccaaggaaaatcatgatctagttgattatgtacatgaaaagaaagtatctcttggctattgcttggggttgtgacatcatctggtgtccactatctttactttgggtaaatcattgctgtaatattgatgaaattacaaaataatggagaatcagaggtcatgttccccaactctaactataatgaaaactttaaaaatgtttagtcccaaattctccttggaaaacattggttacaggtaaaatacataaatttatatcaaacttagttgtgttgttgttgttttcaatgagctatacattagataacctagaactaatcaattgctgttgagctgtaatgaaatgtaaacaagtggaccttgtattttttatggcattctgaaatttaaatctaactgattgtagctaactgaaccttaaggaaaaatcagaggaaacttgatcctgaaaacattagcacttagcattttgtacgtacatatgctcaaatatgtatccatggtatggcaaaaaaatatcttactgaagcctgtttcagtttcttcatggaaatttcagttgattgtccattttagtaaataatatagagcatgttattcctatcaaccgatcctgtcaattaatttagtttgcagtggagagtttgtgggaccatggacttctccttgatctttaaccaagtcttccctgggttattgcaattccatgtggatcaaacaacactaatcatgttcataaaataaataagcacatatttccttcaggttcttctcagaagttatcttgggtagcttctgttgtcttcccagaatgatgtgacagcatttggttgtaactcctaataagctctctgacctgtcttgtatcctcaagaggaaaaaccccaggacactttgctgctggatcaaataaagtaaatagtagtagtaggtgacatggagagctactagatgattcagagggaaagttaaactctctgtcacccaaatcccagccttcttggttgtatgcaaccgttgatgttgaatgtgctatgaattatgacaggtttatagattttcttactctttcccaggtttttcattattttaatctctccttttaaaatatactaattcttacatttataccatgttaaaacagcaagaaaaacaaaactataaaatcccatcaaccctatgcctccctctggc

SEQ ID NO: 39844 - DNA, 1347 bp, Homo sapiens
tttgttatttggtttgttttgttttaatgctttattccattttaccctcagtgttggaatgggagagagaagaggtcagatacagcaaacagaaggagatataaatctgagtaggaatgaggctcaatctgaatttgatggatagtcaatgaacaaattcagcaagtattcatgaagatgtgtgggcagatgacccacaggcccagtccaatttgtctagatagcatcctactggggaagagctcaactttttaaatactccaggcttctcacctttagcgtctggcgtatatagatgagagggcacgtagggattagggatggggaggagaccagggaggaagaaggtaaggcatatatgtataaaggttctggaattaaaagtagggaagtttattgtgaagcactgaatcatgtttctagctaaaagatccagagcctccatcagaatagcctaataaaatagatctgatggttaaatgtaggtgatacttatggccatatcactcaccctgtattcccaaggtttttattgcactaatagtttgaaaccaccaacgtttgtgttatcatgatgctaccataagactctctacccccttgcagttctattttttaacatgatatttgcagttgtttctcccatgttattgagaaagtcagtcagtaggcatctctgtgtctgcaaatgtgtctctcccctttgtgtaaaaggttagtgaacctcaactagtacaaggttcacattttttgaagaaatatcagtgtgtttgcctttccattagagggtcacttagagaaactctatgtacatagtgcattcttggtcacttgcctcagtcccattaattatttctaagctagtggtgtcatgggatccctacagtgtagctcctccagctggaagtttctgtggctgttgccacctttgcccaagttttgcttgggcctgctgggcttattctgcccactcagcctgtcaggctgcacttggctcatgctaccagcccagatgccacactgccaagggtgtggagtggcaaggggtgtgtgaatgagagagcatgggatccagccattgtgcacacggtggcacaccagttgctgtggaagggtaggcagctccaggcaccagcataggcatcagctctgtgcaaggctgtggtttgaccaggtgtaacacaagcagcttccactgcgggcagtggggaatgcaatggtgcctggaagcttggagacaccaggaaccacagagccccaaagggggtgtcacaccctggctcaaggagcccttaagtctggcctccctgaaaggccagagctcttctctccttgtcacttgcaatg

SEQ ID NO: 39845 - DNA, 1881 bp, Homo sapiens
agaatatttcttgaataagtcttgggaatttcctcccagccttaaaactctacaagttactgggacccaatcttgtgaagagattgaagagctcactgaacctctgcagctattacgtgataaaaatgattgaagccacttgccaacataaaagtgccttgtgcatggttattaataatactgagcagtgcccattatagaaaacctgcagcttttatgcttccataattttagtcatgctatcatcctctcaaaaagaagaatcgcccccaacacaaattctaccagctctctattttccaataaagagaaccttgcaaatggtgaaaacaatggcaggtccttttcacctagacccactcagaagttaggaagggatgtggatgagaaacatttaccttgcccgacacaaatcaccacatgcttggctgtttccaagctgatggcaaaatcttccattaacagaaaggggaagggatgctcctcgttcagcaaagagccacttctgaaaaggcactcttttataaaacaaaatagcatgaaaaatatttagagaaaataaccaaaatggacttccaaaagcaagctgaatattcttttacatgacatttacaaccatcacttgtttcagagattactcacacaaaatctttaacattccagaagcctatcctttccatttagatgagactttttataatgactctacttcctgttcaaagggcagaaaattattgtttaacattctggattgctgtgtgtaaacatttgaaattagaatgtaatttgttgggttcatagcaaatatataacatttatagtgtacataaagcacaagtcatcctctataaactgcctaaaatggtgatagaaaagttactgtaataaacattttagtgatgtttagtgcgctgagagattgcctgtgagaaaatgatatgtaatattaagaaaaaacacttgaatacaatgatccagaaagtagaaaaaaatgcatggggaaagccgggtcaagagttggtggtgacagctgattttttccactgtgggattcataggtcagagaacccaaacctgagggaatgaagtcactccaaagagaagactttgactcatcacttcatcactcatcccaggaggtgaatgttcagactgctttgctcacctacctaggtgtgccagaaagcagtgtggccttgtcattccacctctgaggtctctgtcctgccagataaaaactacaggaaaaaataattggagtttgattttgaaaaggagggtggggagggaaaaataactaacttttaagaagaacagcttctgtttttcctcgtggtcactaaattgtctttgggcttaactgttttggccaaagactttaattgaattttttgaaataggactccagtaaactaatgcttcctcctttgatggggccagtattatagtttgattccactgtattaaagttttcattctttaaagaagtatcagccatttacataatagtgtaaaaatgggcagacagtgaggttttacatgttatgcatctttacccaagattatatttcaaataggctgctaacatgttaaatatggaactttcttctagatgggcctcttatcccttcttgcatgttttctgagaattttctgagttcaatattcaagtatcagtcaaaaggctccaggacttaatagtgaaagcatgttccattccacatttcatatccagcaataacatgcttccactgcctcgaattatttctctctcagtcaatgtacaagtaagattaatataatttaaatatttggcgctatagatgttgcatttggaagatgagaaacaggaagctcctgcaggcaaatatctttgagatg

SEQ ID NO: 39846 - DNA, 639 bp, Homo sapiens
tttcacttcctaaagttattttattcatagagttgcttacttgtttattgcctgtcctccagagctagaagagaagccaggggactttgaatgattactatcaaatgcctgaagcctagaacactctctagcacacatcaggtgctcaagtatttgttgcttcagagcccagttgtaactcatttattacatcacaaggaagataaattattgactattcttttaacatcactgagtaatttttaaattaatcattaacaaattctatgtgatactgcaaaaaaccagtataccgcactcgtcaaacgttagctcctagagtgaagcactctagagttctgcttcaggatgttccaactccaaactgcaattgctgatgctgatggaaatattgacatttacaatgacctcatctgaaggggaaatcaggttttgcctgaatttttttccaccagttttttagggcttttaattagtcataccttcccataattgttgagggaggaaccatatattcatgggcttcttttgggggaacttattttgagattaatctaagctccactttcatttgatttttgctgatgccatctcatctcctttgctattacaaaagcctgcaaaaatagccctgcacat

SEQ ID NO: 39847 - DNA, 653 bp, Homo sapiens
ttctgtttctctatttacttctgtctgtccctccttcctcttgacaccctccatccacataaaagaacctacaaaaatttctaatagcctgggatcctttaaggaaaacagaaaagataccacagaatcctctttcggaaggattctctgctttccctcttggaatcccaagagttagaagcaaagagattcctctcaggtctaaaactctgctttcttttgttttgcattactaatctctttggcttttggaggtattagaggttactttgtaccctgagaggacttgaccttggtgtgtgagtaatgactgatgagtcaccggagagaactgcagtgttagaggcggctgatggcagttgtttacagtaaatagttattactacaggggggctgctcatttatttgcacatttagataagaaaagtatggtttgggcatccagaggctatggaaacatgtcccactgagggataggagtccatgggggatgggctgatcacagagtgagctgattgctgtcaggctgcccaccagcctcaggtgaatgccattgcagtgaggatgccatggaagcattgcactgtcaagtctcttggcattttccttttggagaatcaagattcagtgtaaaaatgggctccttgattgag

SEQ ID NO: 39848 - DNA, 761 bp, Homo sapiens
accttacctcaaagagacttttcagtgataactctgggacatgaatatttcttggtaatcggtctttttttgctgacagaagcagaaatgactggtgggagaagacagaaaaggctggaataataatgttctccacataggttattaaagcaaaaaagttattttaagctttaaaacaagcaaataaaaaaaaaccactctctagccttgtctttttttaaagtgcttgccaagtttttcagctatttgctgtgacaattaaagtctctgtctagccaacttcctgttcctgctgaggactaaggcccctccacacttcctcaaagcctgctgaggacaggagcagatgatgtcatgtagcatttcacagcatagttgcaatgagattacaaaaaaaaaagagtaattccctgccaagttcttaaggcttagcaagtggaagactcaaatcctttagaaatatcccatcccaatcaattattcctcacatcagcgttttaaaagccccaagtacttggagcccattagaccctgtcaatggtgtgctgcagccggctcctatcagctactgagttgatgatgcacatctcctcctaactccaagtcttgtatgtcatattagtagctggaaattggccatggtgagagtatttatactaccaaagttagcaaatgctacaaatcgggaccttttcttttcagagacccagttgttaaactactgaccctatctaaagttgctgaagagactaaatcccaga

SEQ ID NO: 39849 - DNA, 2092 bp, Homo sapiens
ggcgtaatctcggctcactgcaagctccacctcccgggttcacgctattctcctgcctcaccctccggagtagctgggactacaggtgcccaccaccacacccggctaatctgttgtatttttaatagagatggggtttcaccctgttagccaggatggtctcgatctcctgacctcgtgatctgcccacctcggcctcccaaagtgctgggattacaggcatgagccaccgcacccggccaatatttttaaataaatacatattttatttttttatcagttttaagttctaccatactgtattgacagctacagcctacataaacagaagaagctctttagggtcctcagcaatgtttaagcatgttgtgatactacaatgtttgagaacaggtctgtaagaagctgaaggggcaaggaaagagaaagtgaaccttagtgcccggcggggtgtgcgctgtggccacggagtaaatggcatagataataaagaagatgaaatgaatgacaacgaagaggtttgttcgaagacttcagccatcccattaaatctgacccctagccagccagaacgggaagttttgttatgtttatcaacagtcctctatgtttcactttctatttcccttcttacacaatccctgttcacttctaagctgacaatgcagagaagataaataggaagtgagcaataaagaaaacagaaacagggtggaatgataagaaatgaaaagaaatcataaggaacagagtcccatgtactgaaaaagaaaagatgaggtgaaaatgcaaacacttacccccactggtataactgcaggagaatctggatggcttcatcgtactttctgatggccaaagagaagttcccattcttaagaacctggttgccggattctttcagcagctcagcgtaagctgtcaggtccatcctgtgaggagacgggggagacgcttgctgccagacccgtgcagggcatgttcaccttccggtctgcattgctgaaatctggagaaggagttcgctcactatggccccacccaccttcaaagggcacatcttggcaacacctctcaccaccaggaaaccaggcagagtgtctgacaagactatttctttgtcagttcttttctgttctcaagggtggccagaccaattccatttattcagcattaatgatctggaggaggctgcttccatgcatgagacaacataaacctggcaggtagtgagtgctatccctgtaactggcattattattaatctcatttacccatcatcacagcccacaggaaggcattgtccccactgttcagatgaggaaactgaggctcagaggttcaagtcacttgcctaaaaatctgctgatggcatttcccatttctgaccccagatctgaccaatttctagtttctgctcttgaccactgtaccacatcacgtattggtaaaaactcagctgatagtacttccactctcttagcagatggaacagggagggcaggtgaaggcctcagtatgcaagtggctaggacacagagacacaaccactgtctctcctgtccccctcctttcttaaaacactataaaataagccttgaaatatttgtccctgagacagccattgcctgcctacttgtctgtgtcccccaagggtatttgcctctttcaggtcaaacccctattttgttaagttttgtagccgtatggccttgaacataaggggtacttaaatatctgtggtgtaacaattgaatgccagacccagagaagacgcacattactgattttctccagtgtggcctgggtggttggagagaactgcctggcagccctgaccacatggggggccttggtaagtgtgctgaacaaaggcaggagaggagagcacccaggaagatcttaagaagcagctgccaaggagacagggaaaaggtgggggtcagagaagaggtcctttagtattgcttcctctcaagatggcagagggaaaggcaaattggtagggtagggtaggtcttaaatatgtggacagtttcaggtgttcacagatgacatgtacctatggggtcataaaatttcttaggtgtct

SEQ ID NO: 39850 - DNA, 542 bp, Homo sapiens
aactacactctgaagggccaagacagaggctaaaagatcagcacccagtaaaatcactagggtatcttatattttggctggcactgagcactctaccctgcactttcagtttcgttaatggtgtaaaagctacaaaatacttaaggacaattgcacagctgcctggctggctttcagaaattttcactatgtctctatgagaattcaaactctagttgttggaagctgtcacaggctgctgagctacatatgaggaagaagatgcaagaaaaatgcaaatgcactgagtagattttgaaacaagcaagtctgaaacagagcagatccaggtggttgtgggttttatgactcattgtgtatacgtatacacatgaagttctgtaactgacatacaggattacagcaaagactggcaacacagatggcctatggaggggttattactgaaatgggcagagaggatggctttcccttcatacattatctgggtactgcttgaattcttgacaacaaatttgtttacttttttattttattttttt

SEQ ID NO: 39851 - DNA, 1495 bp, Homo sapiens
actcctttctcttattgctgtgtagtgtttgattttattaatataccacaatttacttatccattctgttgatgggcatttgaattgtttccagtttgagacaactgtgaataaagctgttataaatgatcctgtatatgtctttcagtgagttatttgtctgcctttcttcccaggagtggatctgctgagtgacagggaagatgtgctatttacttttagtagagactgccagttttccaagtggttgaaccaatttatactcccaaaagcagtgttttgtgtatataaactgccaacatttgtcaattctgcgcactatcagtctttttaattttagccactgtggtatcttattgtggttttaattagcattttcctgatgactaataatgttgtgtgccttttattggccatatgagtgtcctcttttgtgaagctccaaatagaaccaatcctagaagagttgtttgttttgtttttaataattaaccactagatgacaatatgccaggcccattgtagctcacgttcttgcaatattgctaatagcagaggaaagaatggactctgacctgcacactggacagccatcattctcctatgcggtacacaaactataataagttcaggaaataaattctcttaaaatgctttaccaataaatggctaaggatatttcattagattatagtgacagcgtggtgccaggaaatattcttctaaaaaactaaaaacaggttaaacttttatgtcagatacttgaaagttgacccttagtaacagttaatgatatttataatttaggaagttctgacactctacccatttggctacagtgaaccattcttgggacctttgaagtggccactccttcctcactgagtcccagatttgtttctgttatgtgcctctcttccccaagctccttagacttaagggaagctgactccacccttacttcctaagggtctgatgagcaaatttatctccctgacagaaactggttcagtattgagtgtagggcacaattctggcccctgaaacttaaaaagatgtttattggaggattccaagacagtgttttatcatcattctggataagcttctagaagagaatctctctattacacagagcactgtccagtgtggaagtgaagctgtgaatcctgacactgagatgtgtaaatgtgtggccctacgtttcagctgcattttgcttccggcgtaaggatgaaatcaacactcacaggatgaaaccaacagtgacagaaaaggacagggcccaagaaaataaaggaaaatagtggggagccatcaatttggggagaatcctgaggcctgccctatctctggacttctacttatatggtgcatcagttaggatgactttggcagcaaacgaggagttgggggttgtgtaattttcttattggatacaatgagttctaaatttctcttcaaagaatcagtatgtcagcatgttcagttcttt

SEQ ID NO: 39852 - DNA, 2836 bp, Homo sapiens
tcattctaatgataccaaaagcagaaatcataaaaaaagtaacagacatgaatccatgaaaattacaaactcctatatatcgaaaggcactgaaaatactttaaatcaacatggttatgcgtagagattcactgacatactgccatggcggataaagcagtacagcatctgtctatagaaatgttaaatgcacagcagagtgcagtggctcacgcctgtaatcccagcactttgggaggtggaggtgagtggatcacttgagatcaggagttcgagaccagcctggccaatgtggtgaaaccccgtctctactaaaaatgcaaaactagccaggtgtggtgcctgtaatcccagctactcgggagcctaaggcaggagaatcgcttgaacctgggaggtggaggtcgcagtgagccgagatcgcaccactgcactccagcctaggcaacagagcgaaactccaactcaaacaaacaaacacgcacacacaaaaagtatgagttagagctatcagagtgtcaaaatatgcaattaaagtgaataaagcaaactggagagcaatttggagagcaacttagagaacgagttgaagagcttaaggatgtatgtgtgtgtgtacatttcatctatagagagatttctgacttaacaaactaataagagcagtgatctttggggagcagatctgggaatgggaagattgctactgaactatgagagagtacatttttctgttgttttaggtcagctaatttgtggtagtttgtttttgcagccctaagaaactaatacaccaccactgaatatattcacagaatcatataaatagaaaaaatgcaataaagtgtgggatatgatgaggtttctcttcaaatagcttgatcaatcctttattctttaattcatagtacccccaaacccctttttctctttttttcttcctttctgtctttgttacatgtccagacatgccacagtaccaggcgttatcagtactagctcacattcctttccttatttggaaatgctctctagctcattgcagacaccccttcccctttcccctctctcccttatgtgcccaccttatctttaaaaagttcaaatgtttagccaaccgggattagtttagaatttacggcctgaacccagccaatggggaaagggtacaggcgcacttgcttcaggaataaaggctctcgtgcccctttgttcaggtgtgctgtcatggcgactggccaaggaggcacccctctgcgcaaagtaaaattgctttgctaagaatcctctgtttgagtgttcaatctccttaggattttgaatgttattcccaacaaaagtgagatgattggactacaatttctagagcaaggaacccaaagctcagagattagggggccttgagccaggccacacagcagtgagcaccagaggtgaaacccaggcttatctcctagcatccaccccagcaccctggtccacactacctgtcacctgccatttctgggtgggcaggaaagacaggcctagatcccagggcttgcttctggttcatgatgtttcaggttaatgggatatgggccatggtgatccctgcatgttatttgagtgtaatccctgcaacatttacagaacctttgctttgtttacccagtgaggagaaaatatttggtaaaaacatagccctagtatttgtctgtttttcaaaggggttccctgaaattactaatcaattaagcagctacagctgagaaagtctgtgggactcaagaccttgccccacttcccaagctaagataggctgtgaggatgaggcatgggacaggtcagcactgtgatgtctggaaatagccccaactctttccactgtgattgttcctttaggaaacagggcacttgctcaggggccctaagaaacccttttcagctggagggcaatgtcaccatggtaggcatgctctagatggctgctcagctcactgcaaaggccttccaggggagagccaaggtacacagaggcaggccagggccttgtgtgtgctccatgggccagacctgccaggacaaggccctttcctgggagtttcttaactagaactttgggaagagtccccttgtgttggaaactgagataggaggctccagagggttgcagccttacttcctaccctgagaagaagccaatttctggggtaaaagaatataatgcctgtgcccagagaaaagaaaggcagaaagcggggctcctacagcccccaaattccacatcccattgccctgaggcccagctgctgcctaccccttccttggttactaagcacccttcaggaactttcctccttctgtctaaatcgtttgagttgttttttctctcattcattaaaaacgagggaagcaaggaaaagtgacctgcctgtttcatccttctctacagctgcacattagacaagggtctataataccaggggtgtcctaccctcaccccgccctgggtatctctggtcacagtattccttcctgtagtacctgacaaggcctcggaatcctttgtgaaacattcattccaggtggccacaagttcacgccccagatgaatcctatgtgccattcccagtttacatgacaacaaagacttgagccaaaaatcaacttgtgcatttaagcacaagcatccagaatgtcctaactagaaaacaacaagccaaagacacacagtcagctgttctcgagctcattcccagcttgcctcccttaggaggcatgcaggccccagaatagctatccctgagttgggttcacacacaccctccagaggtatcttccttgccaggctgga

SEQ ID NO: 39853 - DNA, 1923 bp, Homo sapiens
catacataggccagtggcagtgggatgcgactctgggagtgaatgccacacacacctatcccacctctacccacccccccaccccccgcagaggatgcaaaagccaacaaagagcatatgaactcaagcacctatcctgcaatcctacaaaacagacctgcctggaaaacagttgaaacaaactcctgaccaccgtccccgccctccaacacacacacaccgtagtactttttttttttttctataaaggaccaaacaggatgccatccggataacagccttatatcaaaaaggatcctggaacccaaaacgctcagcacgagggagcaggagcgcatacctacgctgggaacacaaggctttaatcccagctattccttcccgcataaggactaactgagccagcagcaactgggttggagcagataggggaactagagacctcagagccccattctctttctgcttcttaaatttttttttcttttattttccaaattgcacacttccataaaaattttcctaggaagcaccaaagctttcaactgcccagaaacaccccgatctgggagaaaaggtggcttgagctgcacctcaaagatgggctctatctcagccgggttgcaagtgcacagggctccccgcgggacggagacagggagttgggaggaaacgcaacgcgcctcccaggcaacagactccgagctccggttcggaaacgctccgaggcagaagcaagggcttctaagggctccgcttcccagccttgggtccctactactaccttccccctagactcggtgagcccaggctgatggaccgtgcagtccagtttgagccagcccagcagccctcaatcgggcgggcagggaagaaggcctcctactgccgggaagaggccagcgcgctccaagttccccgcaaattccgcccttcccgcctggcacggttcccttgcaccgctgtgctccgctcccaggtttctgcccgccaagaatgcttgccccgggggcgcgctcgctggtcaggaacctgtcggcagcccccgggaacccctgaggatgcggaggtgggcccgagagctgcggcttcgatgccggggtgggagctaggcaggccgcgcgccgccgcagtcctgtcgcagcgcgtgccctggtccctccggaccgaaaaggccgaagccgtcccccgcgaccgaccccgcgcaactggctcgggtctgcacctagatggctgtgggccccacagggatggccgggcgggcccgttcggccgctacctcagggtcgccagtccccgcgcgcggccgcctcccgccaggaagggtggcgggcccggaaggccagagatgccccagtgcttcccgcgccgctacgcacctagctgcccgcgggtcccacatggctgcggccggagggtccgcaccaggaccgccgccgcctggggaagcgcttccctgtgggcagggcgcggcgggcagtgcggaagcccgaaagctaccggagcccggggcaggggcggcgcgatgcagaggcggcgttcgggggcccccagctgcctgcggctcggctacccagccgcgatcagagggggcgggggacgcaggaaccccggcgtccgggcggtgtgcagccgcagacctattccaagtttccacgtagttgcgagagcccaaaaactgtcacgtgcacgtcgctgctgagtgggaggaggtgtttgtcatcgcgttcaaaaggggcgtttcggtgtctcccgtcatgcaagcaaatggtatggctctcggccgcctttgaataaacgagtgcttcgaaccctttaccaggagggactaggcgcacaaccacctccgacactcctcgggcatgcgagaattcggctttccttagtggggcccatcaatgttgtccgggaggtaaagaaagt

SEQ ID NO: 39854 - DNA, 900 bp, Homo sapiens
actgggagcattatctattacatatgcttacagacagacaggtttatacagcaacaacaacaataacaacaacaacaacaaaaaacactgcagcagaagttgttttccatttcaccttcagtggaactgattcttaccttgtctaagggtaagaatctgagaatgccaatgaggtgtgtcatatatgacactaatctatcctgataacataggaggggcagcatggactatttacagtccaaccttggatacacacatatatatatgccctcacacagatacctttgcccacacagggaattgcacattctcaaaaatgtatacatacacaaagagtaaaccaataaatatgctcactcaagtccatgcagctgcaacacacacacacacacacacacacacactactctgtcttgatttccccattttgaatgagcacagccattcatctatgaacccatcaatgctctatctgacccttgcccttagcagaagctacttctctcagtctctgagtcagccctgagagggtagatatataatcagtagccttcacattcacagtcctgactacctactacacccacatggatgggctaattctggtatctcccatacccttagaacagtggttctcaaccaagggtgatttttcccctagggaatatttagcaaagtctataaacatttttgattgtcacaattctgcaggaagggaaaagggtttttctggcatctgttaggtggtggccagggatgctgctaaacagtctagaacggacaggtctgtaccccacaacaatgagttattcagcccaaaatgtcagtaatgccaaggttgggaaaccttgtcttggggggagcaatgggcaactgtcctgcccttagccacctgctaat

SEQ ID NO: 39855 - DNA, 2822 bp, Homo sapiens
gttgccagctgtcgccagaagccaggagagaggtgtggaatagattctccctcagagccctcagaaagaatgaatcctgacaacaccttaattttggacgtctagcctccagaactgtgagagaataagtatctgttgtttgaagccacccatttgtggtactctgttacagtaggcctagcacactaatgcagaccccattacccatagtaacccaagtgcatccctgttcctgacaatatttcagcccttgccctcgaatttataaggctctaggactctggctctcttctgactatgcccctccataggggatgaggagtctaccagcccaaggggatgtgcccatctagagtccacacctagcttctagaacacatttggggtacctagaccccaaaatttcctgccaaaacagctctgagacttgtttaagagtctggtcaggcctggttcttgtgtctatctttctgagagtgggccacgtagcagtgcacatacccccaggttcaacgattgaccaagggccagctatttgccagcaactagggaagctgtggacagaacttggatttatggcctcgggtgtccacacacatgtgtactttattctatgggacagaggtgaggatatgaagagaaagggagcaggctatgggctctggatctccatttgaactcttgccccagctcccaggacagtcaggggtggacctatcactcttacccccacaggtcaggattaatgtccaaggaataggtcctgggcatcttcatgcatcactctgttcctcctgtaggccccagccacagggactactgcctgtttctctttttgtgctctgacccatccccctctgggtggcgctctacacaaccaacctcagcagctgggtcaactcctgctcccccttccttcttccccttcattatcacctccacaaaggggatctgcaccagatttcttaagaatcctgacttatggggggagggaggagggaaagcattaggagatatacttaatgtaaatgacaagttaatgggtgcagcacaccaacatggcacttgtatacatatgtaacaaacctgcacattgtgcacatgcaccctacaacttaaagtataataagaaaaaaaaaagaatcctggcttactcctgtaactggggcccccagatgtctcaaaacagaggtcacattcagctgtctacagaggtcaggcaaatatcacaactaaatgtgtctggccaggtaggtataagtgcccgggagaggtaaggtctacagcaaactgggacagccagactccttctaaagtggctccagctaattgttgccatggagatggtgggcttgatgtcaaaaaacttttgattttctgatagaaactggaaaacttgatttaattatgtgaaagttcctgttcaactaattcaaaatttcgacacagtgtctaccaaataaaactcagccacagacaagccagagagtttggcaagtttattaccacaaataaaaccaactacctctatcagatctagttggcaagctgaggaagcctgaagctatcctacacctggtttgccctgaacttactgaactccagtttgaagaactagtggtattttcatgaattgttatttttgtggcctgatatgacattcccacctccttctatctggcaaactccaaaacttgtgatgagaccttcatgactcatctttatcatcacctcccatgtgtaaacctggactttcccagatagacagcccagcctccccattttcaccactccctgctcaatactccttattcatgcctctattacagcccttatcacatcattttataactgtctgtcatctgtcactagagggtgagcacctcaaagtctaggattttatcttgttcattctgtgttcccagctccctggcactttactgacacaatgcttgtggaatgaatgaataaacagcacagatcagtaattaaaccaatgtcaggaagctactagatataattacaaattagtattcatgacaataagtttatcatcataagagcttaggagtggaggaaaacaattttcagcaggatggctaaggaatttgcatttgaactgggaaactaattctcataggtaaggggaggaaaaaggaagaacagtctggaaatgaaactaaagtcccaaaggtcagaaagcctgcggtggtctctgacagcgagaacggtaggggtggcaagtaagacaacaaatgaaataaaataattataataaagtattcttaaaggggaactgtgaggagacagttgtgtagggacaactgaggtggtgggataagaataagaaagtgcttcgaggactctgctgacagccatcttgaaccactgccacacttgtaaaggtgtttgtttcctatggtgatatcactgttgcttcttttccctagcttcagtcctgcagagactttacactaggagctgctccttccatttaggtatgccgccaccgtgcggtgggagtgtgcagctacatgacttactggcaggctcacattttaccttaacataagtggatggaaattgttctcaagctcagcacgtttacagatccaactttaatgacatctaaatatcatacagagatttatctttacattagctggggtcaagcaaagaagaccatacgcaactcagttcacaatcaaccaggccctccctccttcatgtgtattccttctgtgttttcctcctctttaggaacagaggtttattcaactttgcttcctccatagggccttacatactgcaggtgctttaaa

SEQ ID NO: 39856 - DNA, 2442 bp, Homo sapiens
agctcaacagttccaagtgaagaaatcctgaataatgaatgacattccaacagttggggcttacggccttttctctcatgtatgagacgagtcctgagttctcaccaatcatcctcaaagtatgggtcgtggtcagtccaaccattctctgcaagctaagccctgctgtctgcagggactctaggattgccgacatgagcgcaccaacactgaaatgatgagtcaggttgattatggtcagaagatcttcttgcacctccaactcagggcctacaccgcggataaagaccaggaggtagttctcataggccacaaaagcctggtcgtccaaggcaagagaataggctttaaagtccctggctcggttaaaaagctggttgcgtagattcctgtcaatgctcaggatcctctgccttgtgatatctggagataagtcaacgccttgcaggacgcttacatgctcgggcagtacctctctcagcaacacctccatgcactggtatacaaagtccccctcaccccagccgcgacccttcaaggccaagaggcggcagagcccgaggcctgcacgagcagctctctcttcaggagtgaaggaggccacgggcaagtcgccctgacgcagacgctccaccagggccgcgcgctcgccgtccgccacataccgctcgtagtattcgtgctcagcctcgtagtggcgcctgacgtcgcgttcgcgggtagctacgatgaggcggcgacagaccaggcacagggccccatcgccctccggaggctccaccaccaaataacgctgggtccactcgggccggaaaactagagcctcgtcgacttccatcttgcttcttttgggcgtcatccacattctgcgggaggccacaagagcagggccaacgttagaaaggccgcaaggggagaggaggagcctgagaagcgccaagcacctcctccgctctgcgccagatcacctcagcagaggcacacaagcccggttccggcatctctgctcctattggctggatatttcgtattccccgagctcctaaaaacgaaccaataggaagagcggacagcgatctctaacgcgcaagcgcatatccttctaggtagcgggcagtagccgcttcagggagggacgaagagacccagcaacccacagagttgagaaatttgactggcattcaagctgtccaatcaatagctgccgctgaagggtggggctggatggcgtaagctacagctgaaggaagaacgtgagcacgaggcactgaggtgattggctgaaggcacttccgttgagcatctagacgtttccttggctcttctggcgccaaaatgtcgttcgtggcaggggttattcggcggctggacgagacagtggtgaaccgcatcgcggcgggggaagttatccagcggccagctaatgctatcaaagagatgattgagaactggtacggagggagtcgagccgggctcacttaagggctacgacttaacgggccgcgtcactcaatggcgcggacacgcctctttgcccgggcagaggcatgtacagcgcatgcccacaacggcggaggccgccgggttccctgacgtgccagtcaggccttctccttttccgcagaccgtgtgtttctttaccgctctcccccgagaccttttaagggttgtttggagtgtaagtggaggaatatacgtagtgttgtcttaatggtaccgttaactaagtaaggaagccacttaatttaaaattatgtatgcagaacatgcgaagttaaaagatgtataaaagcttaagatggggagaaaaaccttttttcagagggtactgtgttactgttttcttgcttttcattcattccagaaatcatctgttcacatccaaaggcacaattcattttgagtttctttcaaaacaaatcgtttgtagttttaggacaggctgatgcactttgggcttgacttctgattaccctattgttaaattagtgacccctcttagtgttttcctgtcctttatttcggaggacgcacttcgaagataccagattttatgggtcatccttggattttgaagcttataactgtgacaaaaaatgtgaagggaagagatttgaaacatgtggaaggaaaagtgagtgcagactataaacttccaaaaagacaagcccaaaatacacctaaacgttatgtcagattattttgttaaaatcagttgttagtgacgtccgtacgttaatagaaaaaagaatgcttcagtttggagtggtaggtttctagagggatttattgtgaaagtataaactattcagggcaatgggactgagagaacagtgggtagaaaggaccactgaaggaaaggaagagaattggaaggtagatgaaagaaggagcaagaacctggggatgttttttccttttcacttgtaatagtagtaacag

SEQ ID NO: 39857 - DNA, 400 bp, Homo sapiens
aacatggagaaacctcatggcaaagtttggttttattgggaagcatgtataatttttgtcctaagtctgtgctcagccctcccacatgtgctcattgctggttgactgttggagtctggttcttacctctaagaggaagcccaggagagggcataaagccagcacactgtcctcacctgatggtgtcagagtccttacgagtaagccctagccagaacattgctggaagagatcaagggccactgtttgaaattgcacagcaggatacggaaaaggggtaccttaggtataggcattgtcattaaagaaattgctaagatacttgagattttcctgtttaaggaatgagctttatgatacaaagagcagttctaaaaattagggagggaattaactaaat

SEQ ID NO: 39858 - DNA, 463 bp, Homo sapiens
cagtcatgttgtcagagtggccactacagttttgctgggcaagctcctcttcctttactaacccacaatagcatcagcttaaagacaatttttgattgggagaaaagggagaaaaataatctctgtttattttaattagcattaattggtattcttgttaaaccataggagtcagagtaaatcagccatttcaccaattttcagtttgtttctgtcttagctaacagcagtgtaatggtcagcaaaattcttatcttgtgtactgaatggcatgtcctgttgctgaaagtgcacaggcttgggaggtagccatgagctcaaatcctggcactaccacctctcttgtgtgaccttagactcctgacctttctatgcctcagttctttcttacctataaaatgaaattaattttacccttaaagatcatcgtgctgattagagataaaatataaataataacact

SEQ ID NO: 39859 - DNA, 539 bp, Homo sapiens
ataagagtaattttcagaggaaatgaaaagaattacttgggtcatctttcaatgaagaccatgtggacttatttttttaaaaaaaaaggggagagagaaggggggaagaaaagaacaaacccataaaaagaaaacacacattcattttctcactctttcttgatcaggagcattcatgagatgaaggtgaggatactgactacaacataaaatggcaggactccaagtatacctctggtccactatagacagaatagacactctgacctttaggttcacacaggccaaacactcctactttgcaaactattagttaatgttttacttcaagactgcattatttcagcaattgatcacaacatgcaggacaggcaatactggcctaccagccacttctgaatctgtccccacttccgatcaaaggaatgaagagagtactagaaatgcaaaaatttcataaaccaaatagtttctaacatattgcattctccaaaaaccttaaattaatcatacacattttccctaaaaaacaatgatag

SEQ ID NO: 39860 - DNA, 361 bp, Homo sapiens
tcctacttagctcaagacttttgtgagaatcaagatgtgaaactgctttcaaagtcatgaaaagttactgaaaaacaaaaaataagctattaatggtggaattagagaagactgattgagaaacaatctggcatagtaagaggttaaatgcacagactctggagccaagcttcagagtctgaatcctggctctactatttcctagctacgtaaccttggggaagttacttaacttttctgtgcaatggtttccgcatctgcaaaatgcagataaaaaaactgactgcagattttataaggattaaatgaattaatgcatgtaaaatgcttagaatagtgtttgctacacagcactcagcaa

SEQ ID NO: 39861 - DNA, 4023 bp, Homo sapiens
catcaactctgttgcttctcacactaggaacagggtaaacaatccacaaagagttcttcaagaaattgctccctccctcttgctaaattcatttctaataaagatttgtttttgttttgagagacagagatactttgccaaatatattctccatattaccttttcctttcgttaacggagatacttaaatcctgacctaggaaggtttcccttgcatatttacctatcaagactgtcagttacggtgatttccaaaagggattttccaaaagggaatctgtgttcacagggaactgaaactcttaagtcactatttaaattagctggacaaaaatcaaaagcaacattagggaacactctgaatataatggatatccaaagtaaaaaaaagatgccaaaatttagtgaaagaagtaaaggaatttagtaagctagaccaacaggatagacttgccattattttttaactaaagttctttataaatgaaaatcaaggtaaaaatcagctgaactctaacagaaggaaaagaaaaacaagggtaagggtattaagaactctgtgatttcaaccttattttacttaacatttttaaagtcaaaaatgagcaaattacatttcagcaataaaaagctatttctagtttaaagtgaatccattccaatcacaacttcaatacacactttcttctagaacagaacttaataactcatgtagtttcattctacatttttaaagacagaatcacaaaaatgggtgatgctttccactcaaaagactattttgtatagtgcaaattctttcagtgaacattttcataccttagtgatggtagctctcctttccactgacatttacatctagaccccttcatttatcttcccacatctggcaaaaaaaaaagggggggaaggagtaaaatcaaagcaatcacttataaaccaacaaactattctaaattccagcattctgcaaatacttcaacttttatttcattaccattcttcacgatgataaatatccagcaacagacctaacaaaacataatacaacacttcctataaaatgagtaaagaatgccatctcattaggcagatacgaacttaggtttcctctatttcaattttcagattcatagcaatgattcacaaagtgagtgatctaccttcgaaatgaatcacactttctgaaattcttattctacatattataatactaggtcattatctctgcatctgttaaacagagcatgacgttggttaaacagggttagtgctgcaagatattcaaaccacaacaaccgtggagtccctgccaactaattctatttgcaacactgcattctccaataactgcactttttcatatagatttatcctcaaaataaaatgttatcttgaaaaaatattattttaaacactgattaagaacttatacatccataccccgctctccttctctcttgtttcattactacatccacattctcttcccattatgacaacataaaaaaattaagtcacctttatccttacatatcatttttagtcaatcaatccactctacaatttttctgtttatagtagaaacgctgagtcactaaatggaaactcaaagaaaaccagctactaacagttaaggtttaggatacaatatttatctagccatgtctcagcagcctgtatttgtatctcccacggtgaaaaaagtaaagcaaacacttgaacttttttccctctaagaaagaaaaagaagtgggtttccttaggtcctcctgcatgctgctggttactcacaggcagggctgactggagttctgtaacttaacaatctgggtgtcaataacgcctcgtattagtcaagtattaacccagctagcgcctgttaaacccgcgcgatccagctcaggtcaaggaggaagaagtaaaattcccaaaaaatgctacgccctacaccgtcctgacaccgttccctgggggtgctcgtcctgggacagaaccgtagtgtggcgtctaaggaggaagagaaggcgcctagggcacccgaaacggagggacagctgcccaatttaatttctcccacagtgggaataacacgtaccttttccccagcgcggtggaagggtgagcgttagaaatcagacgggatgtctgagaacgccgcaggcagggggcgaccccagcccgggagcccgccgcgggccggccagtccccagggaagcccggccccctagccgaggtcggaggcggcgcggatcccacgggactgcggaggccgggaaaaaggttcccaactccccgctccctgctcccaccgggctggcgggaggagcggcccttacctgtgttagggcgcgcgctgcgactgcgtcgctgtccgggaagggccgaagagctgctcgcccgcccggcgcccgctggggctatgggcgaggggcgcagctggacgactcagtcctgggtccccggccaggcgggcggggatggacgcggcggctcccggcactggcagccggctagtcggtcaggccgatgtgccctctgcgccgcggctgagacagcgggaaccggccccgggaggagccgcagcctgagcggccgactgaggaggcgaaggatgggcggggccacagggtcgacgacccactcacccggaagcagttgtggccgcgactgcccgggagtggcgcttgccgcggtccgggcttgcaccccgctgggcaaagtacccggggctgtcacacggcgagctgagccctgggccggcgggtgaggttccccaagcggcgatgcccctggctccctgttccgccattgcgagccgttagggccaagctggagggagggcggcgaggcgcggctgccggtagggcggggccctgggctgctggcggggcggaggccggaggcggccttgggcgggtggcttctctgggtcccacggttcctgcccaggctcttcgaaccaggaccagtgcgggtaatgtgaattgacacttgttccggttcagggctgccccacccctggttgccccaaaccctgcggcctggtgggcttgggcaagtgggctggagtagcgctctgttaggaaacgagtatgcgagggagggagggtgggtgtggtcgaaatgcccaagcctcgtttcaaaaatgaagacgcatgaccttaaaattatttctggagaagaatgcttgcgcgagaggtgtgggggggggggcggggagcgggatggagggaggagtatagagtctgttaaaaatctgatagacacggacttgttatttattccggaaatatctaacgaggcccaccaggttcaaggcactggggaaggaccagggtcgtgcatttgaaaagcttaccttagtggaatagactggctgaagcaaacaaacaaggtaatgacaggtgtagtatggctttgcaggaaacacacagagtgatgaaaaagattttgtagacgaagcctctggctggataggatggctaaaaaagacctctaggaggaagtgatagttgaggagcctcctgacaaaaaaggcacgaaatacacctaaccacgactttacatacagggactgcagattccagaaccccctgaataagcccactaattccatgttgagcacctgtctctaaagccttctaagggctgtttctgtgctgcccacttcccctgcaatttcagaaggcttgatcacccttacagtttatgggggctggcactgtggcactaatgggggaggttcgagagacagggagaattatacccatcagctttgagagacaaattctttaccttttcactgtttctatgtcactatatttctcagagtcatgagtaaacattaaaactatgatttttacgttggcatgttgtgatctgaataaaatgattaatgacatcttttgccaaatttgttgaagacaaagtgagaggatctattcagatgcagtacctgaataataccaaaaacccaacacgtattaaatattaacgacataattaatagattgtctgga

SEQ ID NO: 39862 - DNA, 614 bp, Homo sapiens
cggggcatggtcgtgggcgcctgtaatcccagccactcgggaggctgaggcaggagaatcgcttgaacccaggaggtggaggttgcagtgagccgaggctgtgccactgcactccagcctgggcaacagagtgagactctgtctcaaaaaaaaaaaaaaaaaaaaaattctggaaactagaattttctacttaatcacctgtgggacgttctctgctgctgccatcttgtggccacttggagtaataacattcacagtgtgcctttggtcagtccagtgactcaccagatgatgtaggaaggtcctctggattctgtgtaaatatttccgatgacaggtttccaattattctacaagacaggctatacctatggtgtaaagctttgcttattagaaagttctttctgaaactgagtcaaattctgcttttattccatttctatacaattctttttctactttctaattttttttgggggggggtggggacaggatcttggtctgttgcctaggctggagtgcaatggcgtgatcatagttcactgcagcttcaaactcctgggctagctcctagctagcctctcaagtagttaggaccatgggtgtgtgccacc

SEQ ID NO: 39863 - DNA, 560 bp, Homo sapiens
agtgactacagaagctcataggtaaagtcgttagccacatcagtcatagcagccccaaactcaccatcaggtaaaggtatctggagagagtaccaattgtgactactacccatggtatgtaagtagacatgagctgcatgcaatgctattggcagagaggttagataacactccttttttgctaatccacgttgggaatttagaatctcctgagattgctcctaaggagcacctttatttcttaacaatccctagagttcagacacataccaactatataaacatatctgataggtgagtcactccagtgatgctcagattgcagacaatggaggctcagagagcaggctcaaagggagaaagggacttggtgcaatgagtaagaactagaaaaaagtgcctgaatgtcaaagagaactggtggggacagaggtctgactctggacagaacttgaagctgccactggaactgtctcatccagccactgtgtcatacaaaaaagaaagaagagggtttatattttcactttttcactacgttcatctcacttttttttttt

SEQ ID NO: 39864 - DNA, 760 bp, Homo sapiens
gagagataaagagggaagagaaagaaagaaggaaagaaagaaagaaaaaaaagaaagagtattgtaaaaatccttagtgttgaaaataaagttccatggttaggaaaatgtcagtaaaaggactttattttttaagatttaattttcttaaattttaagtgctaccctttaaaaattattgatgacagaaaaaaaaaattccttccttcttcctcaggaggcaattcctagttagtaataagaggatttttttttcctttttttctaagtgcaaaatcttccttgtaacttcctcataacaattgcctttcctgaacatgaggacagggttcagtgataagtgcaggaacgcaggagaggtagggcggagaaaactctgcttcaggaagggagagataaagatggccaaagtccctgtactgggtagagaaagctgagccaaacaaggccaaagtctgcatggggaagattaagacagcaacccagagggcagcagggagagttgttcggggagaaaagatacttttaataagattatttgcagtaaatactgtgcactatacaatgtagactatgccctttgttccttatagaaaacctagactgtagaaattctacattcaagagtaaaatatctattttttaatagtgtgtggaagagtctgttttcttttggagatttcattcgaagattgcgacaagaagggtatagctcctgcccttggggctcagctacatgttggctacacaaaagtattaa

SEQ ID NO: 39865 - DNA, 2972 bp, Homo sapiens
ttgctcctattattgctggtaaacaaaatttgctagaacgtggagatcagcatatactgttagattctgataccggagacaatgtaagcagtttcagatgatatcaaaggtacagcatgcaaaagtgggttgctgaaatggacctgaggattcacaggcagccaaagttcagggttttagataaatgaggcacataaacattaagatcttgtaggatgattgcaggtgttaggagtaaatttggactaattaggaatctgtgtcttccactaggctgtaaattcttttaacatctccaaggcctgataaaggtttttgaatgaattcgtgaaatacacgatttcggtgaagaaaagaataaagcaggtgtccaaacacttgaggttttacagtattggcataaaacatttggacccctggcgcctggtatcagggacttcccgacgctggaagagttcagggaagggaagcgggcccctctggcaccgaagacacagaatcctagctacagctactaaagaaaagaacactatcaattagggcccgcgtcaggttctctggatctccccttctcccatccttgacgctcatccctgtgttctttgcggtgggcccgtcggccctgctgccatcgatagaagcagcactctccccgtctgatttcgcagggccaaagcccaggtgagagtcagggtagtgttcagactagcccacgctccggttctgagccgcgacggcggtctccgcacgcaacgaaatcaggcaggaccgaaccttgcgtcctccagtgcagcgagttcggaagcgaccggccgagcgcgcatgtgcgggacccgacattgtgcttgtcccatccggtgctccgtagttagcctctgtgagctccacgtaggccgcgcaagcgcccttggcgcacagttcacctgctgccgttgtcgtcgccgccgcggctcccggggctggatggggggccgaggccagccagtggcacccggaagaaagagacgcggcggcggcgacgccgacaccctcaggacgagtgtccggacttgcccacagcctcaaggaggagacggcgaggcccggcccccgctgtccctggtgtaaagaagtcgccgtagccgtcgcggccgggactccccgggctctcgcccttcaggtttcgttgacactcaggaccgtacgtacgctgcgccatgttcaagaaactgaagcaaaagatcagcgaggagcagcagcagctccagcaggcgctggctcctgctcaggtacgatggccgccgctctcctcccctggttccgaatacctcttgaaccggcccgcggacgaaagaggcggggggagtggggaagttcttccgtgacctttaacccctaacccgcacttttcccaaactccggacccagaaggagctccgggcggtgcaggtcgtccgtaactcctgacctggattttcccatcgcaaaacttcatccagtcaatgagtggatgggggtggctggatccctcgtgacattccatctccgttaagagttttctcctaaggccagagtccgaacttgcatgatttctgatccatatttgaggttttcccactcatctgagaccccacgctgggaatgagggcggggtggaaaaacccgggtcccttgtgatatctgacctctgctcgaggggtccccctctcttttgccagtcgtgagattttgtatggaatggccaggatcccgcacaattgaccctcgacggaagtctcctaattccaaacccaggtccagggattgaaggctggggagtagagccatcctgggtcaggctgctggtaggagcggtgggacctgaaagacgtggcggcgtggccggcgtccagcgcccgaggctgtcacgagttagtcacttcgcataacttggttaatccgggactggcgggcggaggggcagacactctgcctgtccggagctctgctctgctttttaagtcttgctgctctgcggacagggttatgcttgtttttcaggaatgctgttgctttaggaaatgcgtttccagggaaaaggaggcgtgttaagtagtattaatttaaagaaacaatttcctaagcgttcactggagatgtttcgatgctggcagcacagggtcttaacagcgaagacgtcggtttctgcttaatttcttcccagcctttttgaatttcaacagactgagcagatctgtcccttaattttagggtttttggtctttgcttgcggttgcaagaaaagctgagttttgactaacttggaggcatttctaaattcttaacatacaacgattgcattaggtttattctgaaactataaattgaagttgttctttttaaatgtaaagctcatgtgtagtaaaacagtgcttgagaaaaacatcagaacacaacactgaagggttgcttcttttctcaagtgcaaatggtaattaaaatttaaatggtaaagattgtccttttcataccatctattgcagtcatttacaattttacaaaacactgttaattaagaaacaaagataaactttaaaagtgaggtagagatgaggaatgtgaggaaatgggcatgttagtgaatgtaaggcacttccacttgggaatgtataaaatgtaattgagccaggattccatttctagaaatttattctaagaaaatttaggttgtattaaagatttagctctatggattttcacgtcaatgttgttttaataggttaaaaactagccaaaaatgtccaacaatagagaattggttaaattttatcaggcaattagttatgcttcataggttattatgcagccataaaaagtcaacatttactgtgtcattagtatgtaccagacattttgcttagtatttacacagattatttaatctcacataaacctgtgaggtagataatactataattcctcttttatagatgaaggagtgaggctcgaagagg

SEQ ID NO: 39866 - DNA, 610 bp, Homo sapiens
gctctagaccaaggggaaatgcaagatgtaactactgaaacatagtggttggcatttggtggaatatttttgtttaaaacatggaagttattttatcatgagttacttctatagttctaactaattttagttagacaatgtattataaatgcagtgtagaattttgaacctcaaagaatctcatctagtatcatgaaatctatgccagtatgatgtaatcagtagaatgttgcttaactgggagcctttggcataccaacagaacagaacaaaacaaaaatctttcgcgtgtggaagaagaggtttttaagttcttctgaaaattatcatttcatttagattgctaacttcaaatgaatgagacattaccgtttcttgctatcaagatatttttcagagcttagcccaaataattttgagtattattttattgtaggaaaaaattgaaattacttccttttctggatagttttctgtttgagtgagatttgtgcattgattccctgatgttgatttttgttatgggggaaaaactggggacataatgggaagaggtatgtgactagcttgaaataggtttttctacatactaatctttgctattgagttc

SEQ ID NO: 39867 - DNA, 520 bp, Homo sapiens
tgatggatgggtatatgagcattaattgtactatattttcttggaatatgtttgaaatttttcataatatttctaaaatttcataaagataggtcccaatgtgactttatttttttgtttcactagtgatttagcttttcccatctattctcaagattactgctttaaaattcttaagatcaaatcttgaaaactgccctagcataacagtttttgtattagttatttttactgtgggaatatacacattaaaagttaacattttaatcattttagagtacacagttcattgacatttagttcatttacagtgttgtgaaaccatcactgttacccagttccagaatatttcatcaccccaagaggaaactccatacccattaagcagtcactccccattacctcctccccgtaacacctagcaaccactaatctgcttcctgtctctatggatttgcctattctgggtatttcatataaatggaataataacaatacttgaccttttatgttaggcttt

SEQ ID NO: 39868 - DNA, 1069 bp, Homo sapiens
ttcttttcagtattattgaatttattccccgaaggagagcggctaagagtattgcccagccacaggctctcaaccaccaacccgagcctcagattctcctcacacagccacagctgtaccacatggcccacgtggtatggtgctaattcctctgacatctaattttcactttttggcaatatttggtctcatcaagctttacacataaatattttcagcaaagtgctccaaatgcctttttcagaaatctgaatccacatgaaaacaatggcaacaagaaaaaggtgtaaactttccagaacaggcccagaatttgaaaatgtgataaagaggttattgtgcgcccgaacttttcacacaagaattggaggagatttaacacatggaataataaacagaggaaggcgggctaatgcagagcagatgggcctgcagggcagtgctcagcatttcaacatctttcccctggacctttggacccaaggtgattgcatgctggtgtctttagctaaaaataaagttaatgtctttggggcaatcataaatatggctgcttcagtttctggggtgattggtggtctaaagttttcaagaacctactatgtgaaaggcatttgacattcactaatttaatcccaactactactccattttgaaggaaaaaaatgaaggctctgaaagtgtaaatcgcttactgaagggcacacggccaggatgacagcggagccaggatcaccccaggtctgtctcattgcatatgtcatggctctgcaaactggggcaataggtgagcagggagaagagtcatggccaaataaaattgagacataccgatacacacacacacacacacacacacacacacacatttacacggtaacagccttattaaggtacaactaatgtacaataaggtgtacatatttaaaggatactatttgataagttttgacatatgtctgtacctgggaaaccatcactacaatcatgatggtgagcatatctaatactctcaaaagtttcctcttgccttttgtaattccattctgccatcccacctgtccctccc

SEQ ID NO: 39869 - DNA, 3247 bp, Homo sapiens
ctgagtaactggatctatacacatgtgcccccgtacctggctaatgtggcttcctttatgttcagcaaggaactctcagtgtttgtccatttccttaggaacatgagtgtttttggaaggcctttgatgagtggcagttgggtggatggatgagctaatacatccatcatcctatctcaggaggatgcttggatttgtgtttagaaattgggtaactcagttgttcatggaggaaaaagttgaacattactcaagtgcagatagggaaacagtgtaagaacaaaaaactttttttctatctacaagtgaggaaaaaaatattgacagtgtgcccaagcttcatggtaggatgggtgttaattgggaatggcatgtaattctcttctggaatccagtgtctgggcaagtcctgcctctcagattaaggcaccagcattcagcataagagggtcctgcctctcagattaaggcaccagcattcagcataagagggagtaattgacattctacatggcaaaagacccttgaaagataacagatgaatgtctcatggccagtagcttggtttttttgcatggtgtagatttagaatataacttttacagggaagaaaggggttaaaatgtctggtgccatctgtcacagtaatgagttgtgcaaagcccaatgaaccttgtagaaacaacatcgtgcccagaaatagcctagacctcagagtgacatcagggggcggggacctgatagatgtggtcctgcaaaaggaccgaaggttcttctttaacaattcaaattgaataggaaccatttttaatttgggggtaactccgtcttcaccattaatggccattcttcaaagctactttcattcctgtgagggatggccagacacgagaaagccaagcagggattttcagttacaggtgagcatccgatctgcagccagggctttttctaccgggcacatctttgtgcgcagcctggtttgagctgatctgcacataaacaggcactctgggtgtggatgggggcatctgtgtactctttatggctatatttccagaatatgcttttaaagactgtggtcacatttaccttggttagggaagatagtgacttataaaaacctcaaacatttatgtttccctttccaatataaaaagtgttaataatttacccacttaaaaggttaagatcaaagagatcataaacacacatgaatactatttcaggaacataaaattcagctatttctactaacagaaagtgagtttatgggataccaatgcaaacaaacatagatttagtggaaaatgactcaaccaagtaagatttacaaaacaaacaaacaaaactgttttcatcatctttggttgtagttttataaagaatgctggttcatggactccagacacttcactgaaactgtgtgaatcattttaaacaggtttgtccttgggccccagatagtacattggcatttgtgaatcattttagatgagtttgtcctcagtacaaatcgtgctgtgtttaaagttcttggagacacttctctcttccaataaaaggcttttactagatgtttcagtgacataaagttgaagacataaatactgttttatattgtaagcaggaccaactcttttatggtgtgttttatacgtctagaggatttttgttgttgttgtttctttgaggttttctctgaaacttcagattaaggtagtccttgaagtggaggctattaagacctagtgttatctgtctcagggaggtgggggactaggtggactgatggaccccagaactccagattccttgcactggaagctggtgttttgtgtttggaagagcctctgccctctgtgtcatgctgcagtaaagtatgggtcaacatccccaaaatgtgtgactcgcccaaattaagtggtgtcatactctgatccttcttccactgaacatcacattcttcatgagaatcacaccattgtcctctgtctgccctgcctgtgagacgggccatgctctatgcttgcccgcctcttccatcaggaacactcacacagtcattctcctcacataccccactctcatctgctgcccctcacacctgcccttctatagaatgttctaccctttaatagggaagggtttcttcttcctatgaatttttacctcactttgtgtctttttaggtttgtattggaactatttgcaaacaggtcttggcttatctaaagaaaaattgtaagctccccatgacgcaagacagtatcttatttacctttgaaaacctcatcacactctgccctgctcagagtacaatctaaataaaagtctattgaatgactgaagtagagtttcttttttaacacttatatgcacattcttgtgacaggcacagtgaaagatttatcaaggaatgacatggtccccacccatgacactgttaaatccataatttgtgatgcattgtttttagttatctagtgctgctgaacaaaccactccaaacttaatgatgtaaaacaacagcaattttatcatgctcacagacattgtgggcaaggaattcgggacagggcacattggggatggctggtctctgctccatgatgcctaggacctcagctgggagagacttgaacagttgggggctggtgaatccatgtctaagcttcttcattcacatgcctgtcaccttggcagcatggcctagaagcctgggcttagctgggcctgagacccccagcattctcttcaaggttggggaattggaccctacatttgatgggagaattagccagttcatgttgcagaagagcatgtggagtcggagatactttacaagcatctatggaaaatacagtctgaagtgaatgcccaaatgagtggcaccaacactgattattactgggtgacagaggcacatggagaaaatgtcatgagggaggaaatgctgggatttgccttgacctctggctgggggacggggagggatgagaggtccaaggcaagatggataagtaggaataagcagccttgttttggggaaaaagagggacagacctagaatggctggctgggtgaaatggcttgttgtgtctcctaaattagattttacatttttgagggcagagctacttaatattgtatttaccccagaggaagattatttttttcattctctaaattgtttaattaaaactcatagttcatgttaaatttgttcaaagtttccatctaatgg

SEQ ID NO: 39870 - DNA, 615 bp, Homo sapiens
accttgtagaaaacctctagattttatgagcttgtttccctgactgcattccagagccacgtgtgagacttgggtttaacgtgacctgtccgtaaatcattttgctgaaattgcagtgagagggaaggtaccaggtagagaacctctagattttatgagcttgcttccctgactccattccaggtgatcttgatccaaaaatgacgaggctgggtggttgccattggtgtcacacccacatcccttgctgtgcaggtgcactgctcccagctgctgtgctggctgcaagctgctcacagtggcccgtcctttggtctggaaagtcacccttgccctgcctgggagggtgacttgttagccaatggctggctgatttggggtgtggattaactccctggtgcagtttatgctgcacagctccccttggtgtctggttgaggctagattccccctgtgcccacagccttggtccactcctgccctgtccctgccccagcctggttccctggctcgccaacagatccctggatctctgccacaagctctggcttccagggaagggagcctatcctgagatgcggtagaacctcatgttttatttatctgctcttagat

SEQ ID NO: 39871 - DNA, 1142 bp, Homo sapiens
acacagcgagactctgtctcaaaagaaaaaaagaaaagatagtttgttactcacagatccaagagaaggggacacaccaagtcatgcaggaacacacgcagaagcaccagcttggtcaggaacctgagggagaaaggaaaactatggcaaaggcatttagtgtggtttctacaaaaaggaacagggtaagcaggttcaggattagctagtttaaataattttggtgggctctgaggtgtaggggctggccccagtagtctggtacttggcccctgggtgactagggcaggaaaataggggcctgtaattgctggataaagggggtggttgggaatgtgggcactggattgactggcttgcatatgaaagacaccctcacaggtcagttatttgctatctctaggaatctgctatcaaaggggcagtccctccaaggtcagcaaggccccaagatgccaaaaacaagaccccaatatgtcaaaacatcagagtacagaaaataaaagacatggtcaatagcatttgtaggttttccagccaacagcccaaagcatcagccaacagccggcatcaactgtgacatgcgagaaagtaagcctccagatcagtccagctcccactatcaagcagcccaggtgaccccacagaaagcaaagatgagctaggcccaccaagccctgcctaaactgcagattcataagcatataagtattttttgattctgtaaaagtcactaaaattgggggtaattttttacataagtatagtaacttgaaaaatcggaatgaactaaggcaaacagactgtctcccagatttaaactgggacttatgaaaattagtgagttgttaacaagaggacaaatggttagacccaaactgaagcagtgatgaaagatgcagctgagtcacattcatgacaaatgacttgtctggagtaacaggagtttagtctggagtggccttgctcctgaaagacccagtttcctgaggtcatccctgaggcctgccaggtgatataatagctttctttatggtttgagctgagttcctgtgaggccttggatgggcagagactctcactccaggaccctcatgctgatctttccctgacatggtctccatttcctgcacccaagggag

SEQ ID NO: 39872 - DNA, 2079 bp, Homo sapiens
atctaccccatgaggtgattcactggggtcccaaaggtgcccttggaaaagcagctactcacacgtgagcacgccccaagggcaactggcacctggtcccgcccacacacacagagccagaatgccagtggaggtcctggatttggagcagaacgcccacctcttgcctaccaactaccttttacagcagctcccctggagtgcctttccacctgcctcggccgcagaagccctgtcccaggactgtctcccacacctggaccctcatggggctcctacaggtacagagaccaccgatgtctgcgggctgaccacaggccaaaggctcttccggaagtgtcctttaatactttggagaggctcgccggttcccccggtgagcacgggacctgactgcatcagctccaggatccaggagatgtggggaagtgagaaagatcctgtttggcctcgcctgctggaagccacagaagagctggacatgcccgcaaggcctgaagtgcgcgcgcaacctagcaggcggaggcaagcagctcttcgcctcaggccgcccactgaaccctgcccaccgacgtcgcgccctgtaggccctcccaggccctcctgattcgtggagagcgcgcgcgagcgctcctgccccacccccgagcccgccctcctgcggcactaccccgcccccccggcttacggggctgcagagtgtggcctgcaagttggaagcgcaggacgcgggcgtccaaaggccccgacgctcccaggctgaggaggcactttgtcgtctctcccacgctctggccgtcgtcctaggcctgacagtggccagctgccttgcacaagcacagtccctgccagacttggtctgccaccagcgccttccgctcttctgccctcgacggactcccccggtccccttgctgcacagcacccgaaaatgcccactgcccaggcccctctcagtcacgacaccctcacgtgcaggaggttggtccttcaggacccgccgcccctcacgcgggctctggggccgaatgctgacgcgagtcccgccagcatccgaacaacctgagcctctggcccggtccgcagactccctctctgcacagatcactcccgatcccgctcactcctgggacccctcaagctggggagcgcagccctgggcctctccgaaccttccccacgctccccggtctccatcacagcagcgccgcgcccgggcccctctgcgggccgtctgggtgtcactaccgctcctgggcagcccccacttctgcacaccgcttccctccgcactcacgtcccaggcccctcggttccctcgcctggacgcccctcgcccagcaccttcccgagacaccctcacagcacctccgccagcacttcccgcgcctcctcgcggtaaatatccctcctcgggcccccttcctcgctcctgcctccatgccatgccccctcggcccccgggctcccacactgcacccttccgaatccttccagtgccccccacgggcccccgcgaatccccccgctcccctcaccccacccatctgcctcagactcctccccacatctctcacaccccaggcctctcacctcactcattctgccaggcccccctgacacccctcacttctaaccccccgagcccctctgccgtccgctacaccccgagcccctcaccccactcaactgccccgggcccccgcgcgcgcggccgccccctcccgccctccactcaccctgtgtcggccccgctcccctctcccccaccaggcgagcaggcgagcgggcagagcccgcggcggaggccggtccccgggccgggacacacccacccgcccgcccttcttctttccctcccttcctttctccttccctccctctctcccgccctcccgccctcccgccctcgctcgctccttccccctcgcccgcccgctcccgcttccagcggcgccgggcctcccgctccgcctccccgtgcgcggctctcccgggcgcggctccggggttcatggtgacgaggcggcggccgctcgagcccagcggcggcggcggcgggagctggggcgcgggccc

SEQ ID NO: 39873 - DNA, 994 bp, Homo sapiens
ttctcagctcagagtgtctttttattaaagcagctagcaggcttccttacattagatgccagataagtctttactaaacagaccaccattctttttccttgcaaatgtggctctgttgaggtatggattaaatcagcccttatgggctagcatgggcactttgtcactccttattacatgatatttgtgggaaatagcattccaggttccaaacaagggattggcaagggaagcttgggaacacagctgagtcaccaacaagggccttgccactcctggtctgaagcactaagtgtgtttctgtgtgagggctaccttcaaggctgcagtccagcacaggctcagagcccacaggcttggcattctggcctgtggatgtttgacaagcagggcagtgtttccactggggacagtaaggggtgagttcaccaagcttccttcactaccctgtgttaccttatcttgtgtaacatgacaagaacccagtctgagccatgtagagctaccgaggggctgtaagcaggaagggggcctaaccacatctgcatttcagaaaagatcgttctaggggaggagaaacctgtaatcagactgttgcaaaggttctgtggagggagggacagtggcgtgggacaggatgactgctgagcatatggggagaagagcctgggcctggcagctggctggctgtaggagatgcaggaggaaaagctgagggtggtatccacatttctggtgttcttggagtgacattgaagtagtcagctggagagaggagccttgagctcttcttttgggaaaccctgaaaatgctgtgaagacttccacagaactgccatcccaactgatagttcaaatgcgttcttaaaatatctgatcttggcagagtggaactctgtgtaggaagaatcacatggtacttcttattccatgttcagtccccagcgtgtggtgtctattttgaaatatgtggtttatgcaattttatcaagag

SEQ ID NO: 39874 - DNA, 533 bp, Homo sapiens
agtgggaaaatgagctttcaaaggtacgtttcttttatagagtgtccggtaggaattccctggggacatttatctcatggaaataggagaaggactgactgggtatctcaaaaggtgactcttagtgactgagtctcttttctagaagaaaaggatgtttggattctcagcagccacatctgcttttgaactctgtgcggtttgtgccctggcctcttaccactcccaacactcccccttttattcaaacagaggacagttgtgtttgttgaccactctttcagggtgggaaaggaatgtaatgtatgcatagactgcccagaatttcctgttagacacccattccaaaccacggccctgggatgcattccagagattacggcccaattctcaaagagaagaaatggcgcattcatttaaatgtccctggccttcagaaagagttcctcctctccccagttaaaaaaaaaaaaaaaaaaaaaaaaggtgtttagcttattccgtaataatgtagttgtgaattcaactctatg

SEQ ID NO: 39875 - DNA, 510 bp, Homo sapiens
acccccaaaacattcagcaaaggttttgtgatctcttgggaggaactaggtgttacacaaatcactcgtaagtgcacaaaaagaggaattgtgccagaattgctttttgggagaagagataagctccaacagttatcatgtggacttaaatcatttcctgctctggcaattttcccattaatcctaagcatggtcccttgcctgcggcctcttctcagtgcaccactgatccgcccaggcatggcatgtggtgggacagtcccggctgcattcccaggcaaatactcctgcccctcaaagttgtcagtcctcccctgaggggtgtttttcatctatactaattttcaccttttattcctgacttgtggcagcttgtcgtgagccttggataaacagaaaggatgtgtcactccctccagtgccttagttcagagcaggccagggcacagtattgccctggatctcgtgaagatgggctttgccctggctggccctacttgggcaggaaca

SEQ ID NO: 39876 - DNA, 3297 bp, Homo sapiens
cgtggtcccttcctcctccacccaccccccggcaatgctctttgtgtacatttgagcaagtcattttgtataagaaagacctttcttgatgtgactggtatttctcttgttcttcagctttatgaagacttcagagaaaacttggtgcaggacatttcttagttaatgattcaagcatcacctgaacagatcaattgaagtaacaaagcactgtgtattgtcattatatagcatccttacatttccaaggatgcagctgtcccaaagaattcttacccatgggctgaagaatttgcattaatctaaagccaagctctcagggaagctgtgtgcatttaggaaacagcagaggattaatggaacctcctagcctgttgcctcccaacttggccttgttccctgcagcacaaattaaaatcaattgcttgcttaatatgagtctcacccttctccatcttttctctcttagatcgtaccatgaggggttttacttactgttaacttttctctcttagattgcaccatgaggggttttacttactgttaaagaatgcttgtaaagtgtgggttaactgtgctaagaaagtaatctttattcttgggtttggaaaatgaaccacttttggcagatctttgatgttttcagagatgctagggttagaatttctagatccttattttccaggctaacaattaaattaataagttaaaacattttagtagtttataaacgcataggaaaaggactggatagacactaatgtcaaaagggagacatagaaaagagaatgattgtgttttactctcataggtctataatctttacaatgagaatgtgttttatattaaatagttgtgtaataaaaattcaaacaaattttattctggtcacaagcatgctttctgctctgtcccagacaacaaaaatgacccacattctctctactatgttcacttagctcatcacactctgcctttttaaaaacaccttttgatagaaaactttttgcaaatttaattttttaaaaataacctgctgactcactggtttgtaatggaggacagagtcctttctagatcctcgaatttcgtgcctgtctccaaggcacatccccacatcccgtcacagtgctgcaggattagggaggattgcttccagctgaaagagatgggaggccataaaggctctttcttctggatgacgttggaaaggaagaaacatggagttagaaatgcttatgtctccacacgtagcctcttcctgggcaaccctggacagtctctgtctgccaaggtgatcattgtacttgcaaatttacctaacctgttgactgcctgtgttacatttactattgaaccagctagagttcaaaattaacttttgatcactgactttcagtttgaaccaaaaaaataaaaagaggaaagagccacgtaaaaggaaatacagcttgatttcatttttttcttgttttatttgatgaactaaattgtccattcttcaggggctcagaatagatatttccttttgttttgtatcaaatattaaagagagtttgaccttctttgcaggtcagaaaattaattagttaactctggatattgaatatgccacaaagtagactaaaatacttcagatcatttctagaatgaggcaaggcctaaagaaataaatcctctaaatcgagtgaggttggccagagatacctagcattttatggttggctgaagatacccagcattttattaactctttatgacttctttatcacgagatttgagtcacctgctactaagacacataaatagattgtttggtcaacacacaacatgtggattaaagtataactttcagaggcagagaatccaaggggtaaaaataccacatttgctcagtattctaccacagtgcggtggcacaaggtggcactgtacctggattggtcttatttctgtttcctagtgttgggggtaactctggactgcattatgctggtgggcctatagtttgtcttcaagttttttaaaaatctcagtcactaaaaaaaaaaaaaaaaaaaaaaaaaaaaaaaaaaaaatctgtagttccaacatagctctaatatctacttatgtgccacagtgaatttcaggcaaaatatgaccccacgaaacagacctccattgtgacagtacctattataattaaatactcattcttgtgtaatccattttaataataactgtagccaccaatatatgtgtgaggcaaaatgctgggcattttattgccattataactgataacaacaacctttcatggtaggtattactatcccaatttacaaccaagaaagtgacagagctgatgattgaaaccaggtttgtctggttccaaagcctaggacttcatagcagtcattcagatcgtggcaccgtatttgataaaactttagttgcaaactacttattcctattgttcttaataaaagcccattatacgcttgaccaggcatttaaatgtttgaaagtagtataatgcaatactgattggtttgtcttttacataaatgtaatactgatttatttttcccctttagccaccagctaagtaccttcttccagaggtgacggtgcttgactatggaaagaaatgtgtggtcattgatttagatgaaacattggtgcacagttcgtttaaggtaaatcaacataaaaaaaaaatccatgatctttgtgatttgataacaattgtattggaaaagggaaaacaaaaaggatgaaagcttatggtggttagtgtgtgacttcactcttcatgtagaaatcccaggagctgcttattaacccaggtgaacattaactaaagtagttgaatattaacataattagtttggaaagaaaacactaagctaccaacatcactgggacctcattcttaggaggtttgcattttccaatgctgtaaccgctgcagaaatacttttcaggtggcacaaggcactcagtgcccccaggatactgtttatatttgtcaagatgaccagagtgctatgtgttttattgggagggggaggggagtctctgttggaaactgtcaaatgacctggtatcatggagattttcccagattgatttttgaaagatgtccaactctgaagaagacttccagacttcagggcatctgaacagattcagccatttaatttgagcatcttcatgacaagaagtggctggggttttttgcaagcttcacagctaaatgagtacccaccttcaggacttccctcctgaagggtgtggaggtcagacactctt

SEQ ID NO: 39877 - DNA, 2015 bp, Homo sapiens
acttttgagccactcatatcccaaaaccccagcgatccatgcagccgagggggaggatccccagggtcccttcttcaggtggcctcccaaggggctgtctgggcaaggtccctatgcagacccaccccctaactcttgggacccagaaaaccccctttataggttgcccagagacccctcccaccacagaccctgggagggtccctagatcctgttgcccaccacccctttggagagtcccttgggaaaactgggctcttggtgtcagagagcccccagagggcctcccaggaagccacccaggcctcctgggctgataaggccaatgtgagagtcaggcaaagctagttggaccagctctgcggggagggggctgggctcaccccaatccctcctcttctgggccctaggtggccttgaataagggatgtgaaacagctgaaggacagtcttctggttctgggggttaaaagtggatcaggacttctgggctttggagagccccctgctctgcatgccccctctccacagacggggcttcaccccttacctggcactcagctccaatcctgtcctgcagtgcgaacacccctgccctgggcaggcctgtcagttccttccttggtttcccttctgcccagggccacactccatgtttgctgagggatgagcaaattcatactggcaggcatcactctggacctccatacaggggatgagtggggaagaagggtccccttctctgccctctggaggcctcctcaggccttggagcctaccacttgcacctctgatactcctggagcctgcaagcccctgtactcagcaaatcaggcctcctcaagcccccctcctcttcctaggcagcgtcacagtgaaactctgacaccaggagtggacatggcttcatctcagtcatcattcctatgtattcacatcatctcccaactctgagccccaggccccaagccaggacattacctgggagcctctcctttccctttgtctatgtaccatggtggggatgcagccaggctcttcctttgcatgctccaaacccacctcacagaatccctcctctggcccctggcacagacataggagctgcagcctcctccctagcccagggttcttgggcaggatgggcactgctgactcagagctggcacatgcaaccaggttctgccagacatgagggctgggccccgccctgctcatagagaaacccggcggctgctcagagccgtgggtgagccctcactccagtcctctcctctcttcccctggctatcggcccctcctggctctcacaggctgggaggtgctctgctggttcctgctaggggtaagcctgtgtggtatgagtgaacttgtgtggaggggctggagctcagaggaggcaaagaggctttgtaccaagtcacgaagttgctggattccattccctttgccttcactccctctgccctcaactcccagggccgtctgtgggcccagccctggccaggtgcctaaattaccctcctcaaaacccagctctcagttgcctgtgcaagatgccctgagatcccggtgactcagagggctatttggcaggcttagtttgggtacacagagggcccacacatgccccaaagactagttctttaatgggggagtttctggcatctcactctcctgaccatgcccagtcttctatgtctgtgtgaggatggatggggtgatggagcttctgggatcactggagacagggaagagagacctagtgttggcaccagtgcctgcctcaagccacttcacttggtctctccaccactactttctctggaggcctgaggagggggtattatcacccaagaatgccaacgttcaggatggtcaggctccaagcgtgcttcagggctggccctttccagtccctcccccatgaaatgcaaacctagcccagcttgggtaggtgaggtgaatggggtttattctgccccctccctgtctttagagcctctgctccagga

SEQ ID NO: 39878 - DNA, 430 bp, Homo sapiens
aaacacacagaacgcagagtgttgtaaactctctatgcaactgccacaacccgaatgagaatggatgtataagggtccagtgttgtagttctggttatgtcactaatacctgtaccatgctgggcaagcggtatcacctctcttatccttcaagccctggctcaaatgtgactgcattcactcattcagtccttctttattgtagcaaatgactgaatagttcagaggttacaaattggctgccctttggccaaattctgctggtatttgtttggcacagcacttaacattttctgagccaacatttaaaaataaggagatttggccaggcgcagtggctcacacatgtaatcccagcactttgggaggctgaggcaggcagattacctgaggtcaggggtttgagaccagcctggccaatatgatgaaa

SEQ ID NO: 39879 - DNA, 1112 bp, Homo sapiens
accaggcactggtggagccaggcagggttctcagagcaaaaggacgggcatgggtggagaagtcagcagaggagcccagggaaaggctggcccgaggctggatgagcagagtgggggcagccagaaggccccaggcgcccggcttgccccaacaatgcctattgctgggcaggctaagtgtggagctggactacggcggcagtatggaattccagtgccaggccagtgacctcattcccgagcagccctgctctggggtgagtgtgctgccaccctctggccctgccagcttacctggacctcagatgtctctgtgtgcccttgtgggactcaggccttatagtctgagcccaaatcccctcccccagccctcccagccctaccctagagccatggggttgaagagagagacaagatgcattccctgcctcctacctctgtggctgcccaggtgctgagtgagctggtgaccacccaccacctgaagctgaccaacactacagagatcccacactacttccggcttatggtctccaggcccttctccgtttctcaagatggggcgagccaggaccacagagctcctggccctggccagaagcaggagtgtgaggaggagacagcctcagcggacaagcagctggtgctccaagcacaggagaacatgctggtcagtgggggagtctgcagcccttgcctcgatggcacaccctcacatgtgtacagacagcacccctgcacgccaccctcaggtgcttgtacccagacgcaaactgcatgcctgaccctgccataccctgcatgaacactcgggggtgcactcccaccagagacaccacattcagcacctctgcacaagtggctcacatgggcatggccacaccagacgttgtgttcacatacatgcatgcacgtgctccataaatgtccccagacttccctttccctcttagtccccactgctgagatgctggtggaggctgatgcattcctgtgagcacctccccttcccacacacacagactccgtcctcctgtgcaagctcagggtttgtgtcccagctcaggtgagcccatggggttgccataattgtaagacactccaggttctaa

SEQ ID NO: 39880 - DNA, 1205 bp, Homo sapiens
tgttctctccagggccccaggcaattagctgatgcctgccaacactgagggcggatcttccccacctggtccactcagatgcacacactaacctcctctgcaaacaccgtcacagacacacccaaagcaatgctttgtcaggtttctaggtattcccaaaattaagtccattccttgtcaacttagcacccattcacatctccttaaaccatacttaattcaaataaagacaataacaaggtaatggttgcatcatattagttacatggtataactaatatgatgcactatcctgcatacagcggaaaatgcactaatcccttccctagaattcataacatgaattcaacattaggatttcaacattcaggattttaatcttttgagattgtgatttttgggattttagacagtaaggatttttctccttgactagtcaagtgtagaagtaagaagggggtaaagagtagaacatggagtttgatctgtaactgaacaatcaagataactcactacctctggaccagccaagaccttagggactttgatcttttgggatttcaacatttgggattatggtgctcaggactgtgtctgtcgagattatgatccaaagcccacctacctctatcccctgcccttcaggtgccctaacttggatatccccctatgaccccaccgccaggagcaaagccttacctcttcccacggcgcttcagctcattgagcagcgtgatgacctgtcgtgccccagtgcagcccagtgggtgccctaaggccactgcaccccccagggggttcaccttctcaggggggagtcgtagcttctccacacagtaggcagcctggaaggaggcagatcatcacctatagccctcttacccctcccctgcaccacctgcccgctcactccacctcggctgtccagggcaaaggcaacattgagaaacaagggctcacctggcttgcaaaggcctcattgatctcgaagatgtccacgtcactcactgtcagccctgcagacaaggtaaagacctgagctgacacactggccctctgcctcccctggggcccaccccatccatgggcctacaggctgcctggtgtgtgtctcttccagaagggtgagccaatcccagctgtggggtcaggaagggcttgaagtatgggacactagcctgccccacctccactctgcagcaccc

SEQ ID NO: 39881 - DNA, 605 bp, Homo sapiens
ccaacctgggtggcacaaggcctggaaagcactcactgcccagcagtaaccacgaaatggtgccacttcagaccacttagatagactcaaaacctcactctccagccctttaaacattcctccccaatcagcactcacttctgctgggaagccagggcaaaggtatcctgcttctcccgtgaaatgccaaaccgctcagccacattctcagaggttatcctagaacacaaacagcagatagtgtgggcattggtctgacagcctagaggaagggaccaggctgtagagctgtgcttggaactttgggttcccaaggctgtaggcaggacaggatgtaagggccagtccatgccacagacagtagtgatgactcaggatatggtacagcctgccctgaaagtggatataaaggcacagatagggaagtcagcaatgctggccagatcctgagaagctcatacaccaaagagactttcttcaagagagggcagcctgcatgggggcagttgcagaaaggagtttgttccctgggtgagctgcctcagcgcagggtagaaaaggagcaggggagggcctgggtgggggcactagttggctactcctgg

SEQ ID NO: 39882 - DNA, 2258 bp, Homo sapiens
tctgtttcccccaaaaaacagagaaaaggaactgctgctgggacagagcaccagagcaaaagaaatgcctaaagtctgaggccagggaccactcggccttaccagtaatcatatagctaaccctgcatgttcccatggactcttgaaagcctgatcccacctagacgaagcactctgatgggcatcatatattctaacatccattgctctggtaggttccccaagactctcatactggtcttagccctggaagctagtagggcttcccctcctgatgtaacctgccttggccaacagtacaaagccctagggaaatttccagacctcctcagacccacagactcagaatctgagggagtggaagcatcctggtgattctggtgtgtagccagagttgggaacctctgaactagtgcccaggccaggctctgcagagactctctcagggggatagcctcctgtgcagcctgtttgacccttccagggtcccttaactccctagcaggtagttaccattccttcactcaatccaccaagtgttcactaaatacctacttaccacaaggcatcacctgagggatgctgcgatgcttataacactgtgccctagaggatgcccaaccaacacacagaaaatgaatcaactatcagagactgaaataatagggcaagagggcaaaccacatcacaaggaagtatatggctactgctggagaggaaggggctctcaatttcagcctgagagcctggataactcatgccaaaatggtgagactgtgtttaggcagggtttgtctttctgtctagggcagaaagaggaggtagggctagcacttcaaggagacagaatgaccatatcagggaagacagtaggcccacagccggctgaacgaagaaaagtcaaggtgagtaagcagctaggagatgaggctggaaggtaagtctggagccagattgtagggggccttgaactacaggctgggcagtctaaacctctcccagttcctagagggttgttttcctgttccttcactagctaatgttcctatttatttatttatgcatctagaagtacaaagccaagcagttcttaaatctacacatgaaaataatttaagcactctttaccctgcaggcgcttaaaggaaagttgaccaggtctcctcctgagggtcctccttccccatggttctgccctatcccaaagtctctgctagtgggatatgactggagttctcagctcaactagtaaaaaggctgaaagtcacttttcagcattcttacttgattactcacctgacaaatgaggacagagtccacactcacaaaaggcaaatgacaacctggctttggctaaaaatcaagctacagagaacttctgctccagtcccaaaggttttgtgtatcgtggctcagcacttcaaagtaggggagaggttgagtccacaagagcagggagccaaggactctcgttgcctcattctggtgtccaaccttatcctccccaacctgcacactgagtttcctggggcctgggcccagtaaagtgtcaaaatggccaacccatggctagaactagaaaagtttacctcagaaactgggcgattcgggccatgattgccccggccccaggctgcagcacatttcctgtggacaacaaactttcattcagtgccaggcggtggtgttctgggcactaaagtatagctgtgaaaaccagagatgaggcattccagatctttcttcgggacactagcccttggcaggctcacttgcaactctggaacatcagggtttggggcagggagagccagccatacaacagcttgtcctggtcatccaccagctcctgtccctgagggtcccacgctcacttgcccatgcacccagcttttccaaatcagcacagatgggcaggttgtctgcccttaaaagtgaaatgggagtttctgaaaatgcacatctccccaggtatcctcctgtgagccctgctgtcaccccagagaggtggaacagtgattgccgacctaggggtggcatccgctggataagactcttgccatatcatattgctgtatttcaaggtgaggggtggaatagagggctggactgaagattgtggggaaaagaaagatcagattgttaccgtgtgtatgtagaaaaggaagacataagaaactccatgttgatctgtacaaagaaaaattgtttctgctttgagatgctgttaatctgtaactttagccccaactctgtgc

SEQ ID NO: 39883 - DNA, 3407 bp, Homo sapiens
cacagggttggggctaaggctacagattaacagcatctcaaggcagaaaaatttttcttagtacagatcaaaatggagtttcttctgtcttccttttctacacagacacagtaacagtctgatctctcttcctttcccccacactgccgcactccccttgccgagatagtgaaaatagtaatcaataaatactgagggaactcggagaccgatgccggtcacctgggcccactctacactttgtctctgcgtcttatttcttttctcagtctctcctcccatctgacgagaaatacccacaggtgtgaaggggcaggaccccttcaaaggtcaaggccatggaggttcccccagtgaaaattcggggcggggaggtgaggagagctctggacgaacggaagaacggggaaggcccagcgcagggcctgagtggttcgctcaccgacacagatgtcccccagctgttccggcctcagattcacgtccttgagaaccgcggtcatgactgccgagagaagctcgtcgggggtggtgtcctgcagcagaaagagcagccgcagtgacccccactcccccatgcccaccccagggagacaaagcgaccacagctgggtgcggagctgcctccggcgtccaggataaccaaacatacgaaccggaccccagcccgcgccggcgtcttcccacactcggcgcccagaccctcgggcctcaccttgaagccgccgcggcccgcccggcagatggccgtgcgccgcccgtgcaccaccaccacgtccgcggccgaggcctgcggggcaccgctcaggcaaggcgcggcctgcggcatccagccggaatcggccggacccctcaggtggcccagcactacctgcagcctctgcattgcgcaggtcaaccctgcagaccagccaccagtccgggaactgaccgcggagttaacagacagccgtccgcacacgcgcagaaccacatctcagcctccaaggcctcaactccgcccacagctctgcgaacagacgcgagcgaccctccaaaagtcccgtccacctccagcctcagccaaccacaaggagagtcggcctgggaacccgcccctccccgccaccgcctaccaagccctctataggagggcccacaggcaccgcccagccgagctttccactcaatgccccgcctaccttggcctaccgcagccaaccagaaggtgtatctttacgaatccccgcccagaaatgcagaccggaagtctttccaccttttgtagccaaacccgagacctgacccccaaatccctgtctcctgcccgcagccaaacggaaggctgggcagccaggaccgcttactgcttgggggctggagatggaagccgaggctctaattcctctacccacttcctaggaggctctgctatccctccggtcccagtacccgagctgggggacctaaatacttccgagacgcccgagtcctgctccgacgtggttgggctttcccattctttcgagaagacagggaatttgggcttccgggctggccgggagaacagattttacagacatgcggggtgtgacaagctctctaactggagaatgaacatttcacacttttaccagttttacacccaattggaatgattttattagtgcccatttcccgtgctaggctggggtctccaccaaggcagagaggtaccatgtatccggggagcctgcgacacccttgacacttagtagatgatcaataagtacttgtcgaatgagtaaatgaatgaaccagggctccccaggtcaggactgtgtccctaaacctaaagggcaaggccacgtgcccccttgactcccaatagcagggccatgtcttcacctgagaccctggagagtagtgctgggctttccacagacaccaaaggacagggtgccttgtgctccccaacctagtgtcatgacgtccccaaccatttcgagggcagggccacggcatgcctcaggctccagaaggcagctgtccgtttcccactcccacctcggggagcacagcaggggtcttcccatacccctactggcaggattgcgtgttccccagagacagtggagggcagagctggtgccttcccacttgtcccctcctcgccatcctcgagggcaggaccgtatgaacccctcagattcctccgtggaagaactgtggctccaccagatcccaaaaagcaaggcccgtttcctacaacccccgaaggagggtcgtcctcactccgccgccaacctactagcaccatcaccagaccctcgagggcggtgccgtggacctctccagatctcaaaaggcagattcctacttcttacgccccccacatcacccgcctcgagacctcaagggtagaggtgggcacccccgcctccgcacttttgctcggggctccagattgtagggcagggcggcgcttctcggaaagcgaaagccggcggggcggggcgggtgccgcaggagaaagaggaagcgctggcagacaatgcgacccgaccgcgctgaggctccaggaccgcccgccatggctgcaggaggtcccggcgcggggtctgcggccccggtctcctccacatcctcccttcccctggctgctctcaacatgcgagtgcggcgccgcctgtctctgttcttgaacgtgcggacacaggtggcggccgactggaccgcgctggcggaggagatggactttgagtacttggagatccggcaactggagacacaagcggaccccactggcaggctgctggacgcctggcagggacgccctggcgcctctgtaggccgactgctcgagctgcttaccaagctgggccgcgacgacgtgctgctggagctgggacccagcattggtgaggacgtccccttcctggcctcgtacctggggggtgaggaggctgactttccgcggcctcagcatcctgtctcccatggagagaccccatttcctgcctcgggggcccgaagaagcctgcagagggagaaccatgcgggtcccgttccttcttaataaccggtcgcggttattaagaaggactggagaaaggtccggataggcggagatgggaaggaagcagcttaggcagaggctttcaggtagggccaggagtcagaatcaggcttctgtgggggcatctgggctgtttcaagtagagcaacaggacaggtggggcgattgacagtggactgtcttagaaacctcaagtcctggggaaatgcagcccttctttctactcactggcacttacataatatacatgcataggcgttggatacagccgcccacagacaggcacaccttgctgagttggaatcactgcaccataaccagtgggtctcctgagcctttctggcatgcccagccccttgctcacatctgc

SEQ ID NO: 39884 - DNA, 2360 bp, Homo sapiens
agtggcatgctctcgggtcactgcaaccttcgcctcctgcttcagcctccctagtagctgggattacaggcgccagccaccacgcccagcgatttttctgtattttagtagagagggagtttcaccatgttggtcaggatggtctcgaactcctgacctcaggtggtccgcccgcctccgcctcccaaagtgttgggattacaggcgtgagccaccgcacccggcctaaggtctcttccttaaagactgccgttggactgaaaggtgtccaacctagaacagtttcgcacctagccctatccctgttggatgctcattattttttaaaatccaatttaccaagcgtgttcagtcttcagctcgctaatttctctaacggccgtacgtagtcaaactgagaaaactgttcagtgggggcgacaaaagccaacgcccgtgagacaacccccaaatccgtgggtcgatctcacttgtttaataccccaagccctgtccggggggaagaaagacaacctcccgagtccctcaaggcaggtgcttatttgagcttcagatctaaagctgcgaatggacagaacccgcccagtgcagggtggacccgcgagagacagcgccgcgacaagcgttagagagaacgtccgccttgaaaaaaatgtcaccaggcaaacttccagtttcactccgaccagtggcccaaggccttttatcctagttggcagtggtccacacccaaaggctaccccacccagccgctccctcagggtttctccacaccctgtagagcctttcgcacgtctcgagggtgtgacggttacgccgtgacgtcactccagaggaagtggtaagacgagcgcggtaacggagctcttgaagggctgcagccctaacacggagaagcgcgctaagagcctggaggcgggaccaatttatgactgacgtctacccacacccattgcttttctgattccttctcaaacaaaccaatgaatgcgacgacggagacagcagcgtgccccaggcgctagaagtggctctgccccttctactttgctgccctttggtcgccatgcttagtgtggctactgcctctgtgctacttgaggctctcctacggcttttcgatgccttcgatgaacctctacctaagcacttcttccctttcaccgcgaactcctaccttctcgggtttctagcttgctcactttacatccagccacactggagatggcggccggaggcgggcccgaggtggggcgtgaccagcgcagtgacgtcagcgcgctgcgtgtcggcaggtggaggaagaggggaaagtttggcccgtgcgtggggctggggtggagggcgggacagaggggctgggcccaggcaaagcttctgtcgctgctgctgcggaggccgaggacaggacgtgggctgggccgggcagtgccggactcggaggagcaggaggcgaggtccgccggagctctgagcccccgctgctctgccgcgcggtgaccccgcgccccggcgccgtccgacccgtggctgttccgagacgattggtgggggcgcggcggcggcggcggcggctgttgggggtggggagacgcgcggcgaggagacgagcgaggtcagcgagtttgagggaggaccgcgagccgctgccgccgtcatgtccgaggactcgagcgccctgccctggtccatcaacagggacgattacgagctgcaggaggtgatcggtgagagcaggcgctgcggaggggggaggcgcggcgctgggaggcgggggacacgggaacgtggggagccgcgggagctcggggagcgcagccctcataggaattcgtggggcgcttgtggggctgggggcttgtaggacgcttgtgtcgaggagcgcgtgtgagacgggaagggggttttgaggcgcgcgcctgtgaggtggcgtggggtggggtgaggcttgagggggctcaggagagatttgtgtacaggattctcaaatgtgtggacaggagcggcccatgtgtcttgtagagaaagaaagtgcaggtgtgggacaggcctttccgaggctgtgtgagaaatgggatcttgaagtgggcacagccatcgatttctgggattgtgggatagatagggagctttaagtttttcctccatccgtgctggggcgaactggggatcctccaggtgaagctgcaggaaccgcgctgagcaaccgagacccaacttacgactccttccaactgactttccagtcggggaggtagacattaaataagaagacaaaaagaagtaagaagggctgggcgtggtggctcacgcctgtaatcccaccactttgggaggccgaggcgggcggatcacgaggt

SEQ ID NO: 39885 - DNA, 518 bp, Homo sapiens
gtctaccttttgtactgccatatggtgcactggcagattttttaaaaatgagaaacctagctttgtgtttttcagtcttgtagaggggaacaggggtctcagaaatataaaatgtaaatgtggctatatgtgaaatttcatctgggcttgagagttttctttctcattgtgttggacttaaactgacattcagcttttgttgctgccttggagtgcatgtcctcctccagcagggaatgtcctggggattagtatgacctcagctggagatgaagaaaattgctgccaagtaaatgattcctctgccagtgaccattagtcacctccccacttaatgtttcaggcaatgactgtatacctttcaatgctttttaggctttgtcttcaggatcaggttcacaagaaaccaagatcccaatcagtctagtactaagattaaggtaagtagacattttttgttttgttttcttttgttttctgaatattctgcatgtgctgtaatagtctgtgcctgagag

SEQ ID NO: 39886 - DNA, 2151 bp, Homo sapiens
gactctggttctcattcccctttaccatgcctggcacacattagaccatcaataccaattgactccaggaaggagtgtctccccgtgggggcatcaggagccgctgagtttaaatacacaggtgggatgtgacacactgggaaccattcagatttgctggatctggatagggcttgtcaggactcagtgcttccaaccccagggcccatttccctgtggcccctgagtcaccaccatgggtggacagctgctccagtgccaagatacagccacagaggacggcaggcccagggcctccagaaggacaggcaggctccctctgaaagacaagccggcttatagctgaaacctctggcccaggcgtcctctaagggaagccaggcggtgtcagggcacggcccatgaagacataagatgaagatggggagaaccagagggggtgcgcttcgaaggaaagcgggctgcgtgggggcaccgtcgattgcacaggacgcggtcccggctcgcgtagccccgcaggcggcgccagagcgcaagcccgcctcgtgactccggtccacagtccggccgggcggagctaggggcgggcccctgcgtctctgggcgctggagcgcggcgactatcacgccgcgtggcggacggacggactgacggacgcgcagccttacccgaaaggccatggcggagcacgcccctcgccgctgctgcctgggctgggacttcagcacgcagcaggtacagtcgcctggccgcagggccacggggccgcctcctccgcttcggtgggggtagggggcgggctgtcacccggacgcgggaaaacatgggcccggccgcgggcgcgcctacctctcgggcttcccggggcccccgcgcccctgccctgcgcgcggccgtggggcgccggtgccctcgcccggagatgccctgccaatgccacccgctcgcaagatgcggcctcgaccccgcctggacccagctaccccaggaaactgcaggcgctcctcggcaggacccccggtgcccagaggggccggaggactcggcgggttcctgcgctgttctgggcacccagtgacggggatccgaaggaagtcagctactgtaaggcaggggaacagacaggcgggtagccctgcgcacatgcacaaccagtgacctggaagcagattatagcccaaaacctttttttaaaaattgaaatggcccaggcctggtggctcttgccggtaatcccagcactttgggaggccgaggcgagtggatcgcttgagcccaggagttcgagaccagcctgggcaatatggagaaaccccggtctctaccagaaaatacaaaaattagccgggcatggtggagcacacctgtagtcccagtttttctggaggctgaagcggatcgcttgagcccaggaggtggagattgcagtgagctaagatggcgtcaccggtctccagcctgggcgacagaacgggaccctgtctcaaaaaaaaaaaaagaaaaaagtgaaatgcatagtgtacaagtggactttaccctgtgaccgcccttcgttgacaccagcttgcctggtctgtgcacccaggactgctggccagaggagcagtgtgctgctgccaacgccctgcagacaggcaagcaaatcaaaatttgccttcaaagagggcatggggtgaccgggggcaccttttcctttaaagtacttgggaaatatacacagttgcagtcaaacccctcttctcgaatgggtcaagggaggcaggcctctggccagtccttgggggaacgtcctgtgggactctggatgactcgagttgccttgctggacctcagttttcccatctgtccaggaaaggagttatactcccaagcttggagattgcttcagtgggacattaatgtctctggaccacaatcatggcctgtgagaatagcccatggccttgcctggtctcaggcctctgcagacatggatccccagagatgcctccaaaccttgcttcccattccttcctctctggcactttctcccgcctccttgtcaggtgcacgaaccaactcatctgtgaacatcttcctctagagggtcttggctttggctatttggggaacaaagattccttgagacatgtgggtgttcctacttagcc

SEQ ID NO: 39887 - DNA, 2825 bp, Homo sapiens
agaagacaagataggattagggagggccagcaggttgccagaggcccttttccacctgctgggcttagaggggcgggactctgcccgctccctcacttggttgggtttaaatgaccactccccgccctagctgtgcctttgagtgtgtggcaagggattgcagacgggagactgcttgtcaattcagggaagtcagcctctttctgccacttaattcgcccatcagtagagatccgactttcccacggttcactgtcacccccattgcacaggtggggaatccaaggcacagaggcgtctgggccagagtcccgggactatccactcattccggggttgtagggcagcatgtgtcaggagcttgggctcgagcgtgcggggcactaattgcgagtgcagtggccacaggctcccgggcaaagtggtcaggagcccattcccgccacctccgtccgcgcgccccgccctgtcctccagcaagttggtgcacgcgcgtcctcccacagggcgcgggatgggggcggggcctccgtgttgttgtttctctggggccccgcccctcaggggggcgcggaccacgcggccggagggcccgcctcccctccccctccccgcccagcccgcccgcctctttgtatccaacatccgggtttccccgctggctcggctccgtggccgccgctcaggagccattttggactcggttcagctcccctcccccccacccctccccccgttcatggcccctccggactcggcccctgcgcccggggcccgggcccagccccgccgcgctatgcctgagtcgggcgcgccccggcccgtgccccgccgccgccccccggcccccgcgtcgccccggagcccgggccgcagcctgcgccgcccgcagcggccctgagcccggccccgccgaccggcccttggagcccgaacgctgctcggggacgaaggcgcaggaagcgcgcagggaacgagaccgaaggaaggagcgggaaggagagcgcagccgccgcctggccctgcgcgccccgggagcgccgtgcggccctgcccgcgggctccgggtgtgcgcggggcggcgccgcggaacatgacggcgccctgggtggccctcgccctcctctggggatcgctgtgcgccggtaagaactgggcgcggcgcggggacgccgagagggcgcgcggggctggcctctggcgccgcgcggtgtttaccaacaaagggcgggcccggggcctcgtcgccgcaccacctgtattcagccctcacctccgggggcgtgggctgggggcgcggtgggcgcccggctcgccgaacttgggggcacgatcttgtctgtgcagtcatctgcgggattctggttcctagaggcgcccctgcgatgggggccgggacgcggagcctcagggtcggagttcgggctacgcgggcgcgtggaacccagggaaagagtgaggaaaacctgagcgtggggaaggcggccaagaggggtgggcagatctcattgggggtggcaggattgtaggtgcagcagcagcagcagcatgcggggagggttgcatgtccctcagagtcactaagtgtagcgaagcgaagggggcggcttcacgcagcccaaagtcccctgcatctcttgccaccagtctgcgtcgcgttaccggcccggcgggctgttggtgctggctcccacctgctccctctttccctgccgttggccccgggatgcggagtgtggtcgcttcgcgggaccgctttgtttgggcacttgggaggggagggggtgggtaagatggaaaacccaacaggtccctcttccttcgggcctccaggaggcacgtggcggggtgggtgaccagcgctcagctcgcccgcggctgcgggcgtgtggctggaggtgttcggccagcgcatgtgtgtttgggggtatgtgggcgcgggcgtaaacaagcggagttccgcctggaaagcttgtttctcctacggtccaagcaccgatttccctctctcagtggtgccggggtgcgcctaaccccggcgggcgcgccgggacgtcccctggccagtcctgggaaacgtggggagctgggcattgaagctctggcgagaaggtcggggcggctggtacccggccgccgggtcctgcgcgtctttgttcccagcccccattacacatgcagcgcgggtcccccgccgccctcggtggcagccgcctggagtctgggaaaccctcgaggggcggggccgggcgtgcaggggcggggccggagtccccacgctgctgcgggggtggggatttgggatctgcgtcccattcccaccctggttctaccttctcctgtgcgtcgtcgtgaggcttagtttacaccgaaagcgagtgagttctgtagggtagtagcgcgcgcgcgcgcagcctgagtccggaaaccgaagggcaaagaccagctggcacctgagtaccgtatggaagagggcgttgcagctctcctggagccgcttcttggaggcgaagtggtggtcgtgttggactttctgctcttttttgccccgctcccttgggatgccttttccccaagaaggagtgctcgaaagtgaaaggggaggcattggtctgctagagggagggcggcagcaagctgacttgataggcagaccgcagcccacctgactgcctccagacccgctgggtgcctgatccctggaagtgctggggctcttccaagcccaggcctttaggagagcttcctcccaagacaggacagcttgagacctgggatctggggatcacaccagtctcacacctccctccttaggcagggcaggg

SEQ ID NO: 39888 - DNA, 693 bp, Homo sapiens
tcctgagttttgaagggttctgtgggggaagtcacattgcttttctactttatccagagccaacttaggagtctgtgtgatcagttaccatgtgtgtaagtgctttccagccttgaaatgtcatttctgtagttctctcctgttctctttgttcttacaggtttatgcattaaactactttattgcagttttagtgggactacaagagggagcaaaaaggaaatgtttgtgtataatccttgacctttacctggaagctctccttccagtgttttccaggaatgatggggcctggaaaaaggcatgtatttcagagctgtgggaggatggtgccagggccttgtttacaaagtccaagttggaagtgacttgaggtcacctggcttggttccttgtttctaggcgggacttctgaaggcagatggagctcctcctgtcaccttggaaggtgctcctgtatttacatttctggcatttgtagtgaacaaaacagtggaaaatcctcatgcaaaatacatagaaatgctggaaaaagtataataaacacccttttaaaatgcatatacattgctgcatgtataagaagtaagggaaaaacaagaaggagctggaaactagagctgtatgccttcactgactgaaactgctgattccttggggactttgcctgtctttataatttagagatgtggg

SEQ ID NO: 39889 - DNA, 928 bp, Homo sapiens
tttttgtttaagttagaaaaggtaattttctctaatactaacacacgaaatgtcatatagctatgttaacatcagataaaatggactttttggcaaagagcattcattacaaatgaagagggttactatatagtaagaaaaattttattaccaagaatatataaaataatttctgtaactcaaaggaaaagtaatccagtagaaaaatgagaaaagatacaaacaaacagttctcagaaggaaatgttagtaatcacaagaagatgatcagtctcacaagtaatcagggaaatgcagatccaaattgtgtaccatttcacactcaccaggtgaaccccaggtgggggctgtcatctgttgggaacttggattggcacatccactttggagaacagtttaacagtatttagtcagttgatctttagactctatgacctagccaagaaacgcccacacatgagtgcacacacacacgcacacacacaaatgtaaaaaagaagtcatgatggcattgctgagatcaacaaacataaataacctgagtccagtaggtgagtggatacttaaagttatgtgaggttataagcttctgaaataaatgcacttcagggctgcaggagaggcagcagtatataaagaacatgcactctagagacaggctgcctggggtttgaagcctgattttgacacttaataagtaacttgggtaggttacttaatctctttgtgcctcagtttttataaaatgaggacctgcacaggtttatcgtgaggattaaataagttactctttgcagaatgcttagaataggacctgggatgtagtgtgagctgtataagtgttaaattaatgcatatcaacctggatggcttacaaatatatggatgaaggacaaaaagcatatgtattagagattgtatttggttg

SEQ ID NO: 39890 - DNA, 1025 bp, Homo sapiens
ctaaataaataaatagacctgagttggaatatcggctctggagaccttagtgtaaccatgcgcaagtgtttactcacctattaaatgagactaaaggtattttcttctcatgactatatatagcataccactaagccctctagacatcatattccccatccatcgccccgtccagtggaccagggatgaagcggggatgcgctaggcatcccggtttgtcaccagggggcgtgcgaggccctcagcttggcgggcggtgaggcgtggggtgacggggggatggcgggggccggcatgcgcgcgcatgcgccgtggtaaaaggccggtacctcgggcaagatggctatcaagagtatcgcttcccgcctccggggttcccgtcgttttctgagcggcttcgtggctggggctgtagtgggcgctgcgggagctgggctcgcggccctgcagttcttccggagtcagggcgctgagggagcgttgacagggaagcagccggatggtaagtctgtgggcccgtcctcccttcgctggcccagatttcgggctccgactcctacctggagtgtgaatggcagtccttgacggacagccttcaccgtttgctgggcccctagcctggcccttggtttctgacctttattctcccggctcggcctcccttccccacctcgcgtctcgccagcttccctcatgtccttccttcccccgggcatcttcgttttctgcacagaaccacccccgccgcccgactttcttccccccagttactcatcgcgatatctatgttttaatgtctgtgttctctactaagattgttagctccataagacttgagactatgtctgttttggtctccatcatctaaccagcacagtacctggtacataattggcattcagtaagtatgaatgaaggaataaattaatacataattttagtagatgagttaactgcccttctttcgtcattgttcagttgaagaatacctgctatccctccaaagtgtataaaaactcatgttg

SEQ ID NO: 39891 - DNA, 1760 bp, Homo sapiens
ttaagttcaggggtacaagtgcaggtttgttatataggtaaacttgtgtcacgggtgtttgttgtacaggctattttgtcacccaggtattaagcctagtacccattagttatttttcctgatcctcgccctcctcccaccctccaccctccgaaaggccccagtgtgtgttgtccccctcttttgtgtccatgtgttctcatcatttagctcccacttataagtgagaacgtgcggtatttggttttctgttcctttgttagtttgcttaaggataagggcctccagctccatcatgtccctacaaaggacatgatctcgttcttttatggccccactttttatccttttaatttaaacggattctttgctccccctgaagatggaggccacctcctttgcaaggacttctatctctccccctttgaggccacgacataattctccgcatttttaggtacttaacagtaaatcacttggttcacttggttctcctgcctgcctaggaaaggtcaggagatggtccagcgccatgtctagcactgttaattctttcagtgctttcgttttgcttgggcctctcggggagggcgcggaaaagagcgcaagccagggtctaggaccacacaagtgaattcgtgttgctccctcagccctgaaaagtggctctctccccatcagcattatacttgcacagtggttttgtttttaggtgcatctacctcatcacatggctaccggccacacagcaactaacagcaccgaggaaacacaacagcctgtttaccttcagccccgccactaacccttggccaaagggaaaggggcaggacatcctcccgctctgagccacctccggaagtgacgtcggagtgtcaacatgcaagatggcggcccatcaccggcagaacacagcagggcggaggaaagtgcaggtatggaagcccggttcctcggtcttccggacgcggccggcagctccgggcccactccagctagaaggtgcccggcgccacgaccagctggggtagcggcatggggcgaacggggcggggcgcggccggccacgaggggtggggccgcggcgctaacggcttgaggaaggggcgggggtcggcttgcttggcccttggggcccaggcccgggaccctcgtgggcggcattctgagcccgggattgcttgtcgccgctcttctgtaggagtggacttgcggggtcgggataggctcgttccccgcccacttgcctcccccttgccctgtctttcttcgaagcgctctgccctcgctgcgtcggagccgaggcctccaggggtttcccaggggggtgggcgttggaggagtgagcggcttgtgcgggggcgtggcgaggcggcggagcgccaacggccctgcggggtttctgctgaggattccgcacttgggagcccccagccctctcttatgtgggagctgtcccctgggtaggtttaagtgacataagaatgtgcgtggggaaattataattttaattgttttggtatttaagttcctcttcaccatttcttcatcttaagtgtgcatcgctgaatctgtctttattgtttgtgtaatttattgtccatgtggtaaagagttgtctaatcttaccgtgtgtgtcttgtgccttatgcctttgtgaattcacttttgtttgcggttacgcttaagagttactgccacttcggggaacatcacacaccggggcctgtcgggggctgggggcgctaggggagggatag

SEQ ID NO: 39892 - DNA, 1902 bp, Homo sapiens
cctgagttcctttgcctttaatcaaacctgttggaagacgctcctggctggatgcattccactgtccacgcttgctgtttggtgtctcaccataagaaagcccattcccaagcacaaatcctgtcaactctgggttctccaagccagcctggttttcacgttaagaaacttttagccctctcatgtggttagctggcaacagaccctaccttcaaaacacacaaaccgacaagcttgcctgtctccactcatctctgcatccagctgcctttcactagggaaagggggggtgcagggacgcctcttccccgcagcgctccggggtcagagacccccagcccctctcacctacattatagcccttccctcaccgcaggcacaaatctccatccggctgcgggaccctctcctcaccctcacagcacactccgttctaggaaccccactccgtctccactctccggaagcctgctcgcccagacctccatgtagcggcatctaaaggctgggaccctccccagctgcaaacgctctcctcgaggattctgcagcactctcccggccctcccgctccccactatcccgtggctggtttgcaccggtcctctaccctcggaagcccttacgaccctacgactggcaggacgcgcgccgacgggctcccccgcagctgcgtccactcggttaaccccggcccccgggactgtcctcggcgtggctgactctcttcccaggcccagcacggagagcggcccgcggcaggcgagcgtaaatgtgtgctaagtgcacgagtgcgtcccgactggtagtggtgcattcttcacccgggaggagcgccattcccggcggccggaccaggaaaacgctccgcttccggcactgctggcacttggggcgggcgctgggcccgaccgcggccgcggactagccagggtccgggagtcccgcgaggccgcctctcccaggaggctcccaccgggcagggggcacctcccgccacccaggcggaaacactcgggccgggaccccgccgcagtcgccagccagccggcgaccggacgcccgggcgcggggttgcgggcgcctcgccaaggtcaccggcgccgcggcggcaactcaccccgtggaggtggaagccctcggcgccgcctgcgggctgctcagcgctgacgcccaggcccatggcagcggctccgctcggcacccaggtccagtcccgctgcgcctacccggaccgacccgacgccagtagcaccgactcgctctctcggcgctcgattcctgcgccttgtgacgtgaggcgttttgttcctcccactccagacactggacgctcctagcaaccggctagcagctcggtttccaaggactgtaacgccttcaaccgcccgccgcgatagagtgcccacgaccctgcctcgggaatcccgctctgcaccgccccaccagacccggactcggagccgcgagcggcccgagatgagcagcaatgactcctcccttatggtgcgtggcccgggcgctgtccgagggctccctcgtgactccccgcccctgacccagagaccgtctgccctgctactctcctgccacccttcgctgtcctcagttatatcaggcggtcctgccttttcttgccccactccccctggcaagggcgtcttctccggtggcttctgcgcaccctgagccccaaattagcatccccgtttcttgagctaccccaaaccagctcatccaatcactatcattatcccttcttgtcatcatcccttcttccacccagctcactctcgcctgcgcctcccaccccagttgatggcttcaccatttaatctcctagccttaactcatacctcttccctatactcatcttctaatcctgtctacaagaaatgccag

SEQ ID NO: 39893 - DNA, 743 bp, Homo sapiens
ggccccagcccttttcgtctctgggtaggaataagagaataggactatcctcagctccctgtgactccagatccctaagcaggccttcctggggcctggcctgaaagttaatcccaggggcagacttagcatttagctaactgagatttagcattagccccttttttactcccacttcaaaccttgggacctccccaccgaccccgggctggctacccagttctaattttgttcatacttactgaacagagtggacccataccatccttggttttgcttttggcacttctctgcagctgggaactaagaattccttactcctgggtggggagtgggaaagaacctaagctttggaatctgtcagtgacctaggtggctgggtgacctcagaccaattgcctaacctttctaacctttcatgtgttggacaggaaggtttggaaagttcgaatagttatactgacttacatttgattcatgtcaaaatggagcagaggcttctgggccagcactagttagtttgctgctggcctggcaggctgcactgtggacacagtgagggctagctcctggctctgcctgggtgggtctgaaaaggcaacttctcttcacaaactcaggaacagggctactctatgggttagccctgctccataaggagcagtcaaaaaaaaaaaagaaaaaaaagaaaaaaaaaaaacaaattcaagaacagaggggcagtgccagctctgggtgaataa

SEQ ID NO: 39894 - DNA, 514 bp, Homo sapiens
aaccctgcatctctaacaggctcccaagtgatatggatgctgcttgtctagggaccacacttggaagaacagggcaccggcccatggccctgcctttatccgagatgagaatttggcttccttttccgcagaagccccctaagaagtatgttagtctttacttgtttgtcctgctcttccagccagtcaggattctttgtgaccaaggatcatatttttatacaccttaatatccccccagtgccttgtaatgagtcattcagcaaatatttattgagtgcattactacatgccagataccattctcggtactggggacacaacagtgaacaaaacaaagttccatagcctggagctcgtgctctaagcactaggtgatacagaggataataaataagtgtggaatgaagcaaaattccttcactgagagcattttctgagagctccaggagtctctcttagaatagggcaaacctactcccacctccaccgccgtgttcccacagcccaggtt

SEQ ID NO: 39895 - DNA, 2862 bp, Homo sapiens
agaaaatgtctaaataggcttcctggggaacaataatgaaaaataaggtccagaaacactgctctagggccatgttcatcagtctggaatcacaactatacaagcttgaaaataaccaggaaaaaccccttttcactatgttcaggcaaaatggacagcattttgacaggagagggaccggcttgacaggccccgtggcagagaagcatggggcgggcggggaactccagcagttccatttgtaggacggtagggtgctcattggagaaacgaaactggaacagaagggaggggccagaccgggaaggccctgagagcactctgcagagctgcatcccggatgtcatcactcccaaggtcaaaggtgaattagctgggctcaggtgcccctggacagtggacactgagtgaccactatattatagctcatgagagctaccgccatggggacctaaccaccagaggccaaaggcatttggtcagggacttctaaatttcatctttcaggaaggcaggcaggtgatggagttcccaggggagggagtactcacgggtgaaacttctggggccgcagaagtcacggtcaggcaggggcatctgatcccaggggccttcctcctctgagtcccaggcacgggagacagaagagcttggggagcaggagcgagactggcacccagaggaagaggaggaggaggagaccgaggagttgtcctcatccagctggtcaaatttcctcttcaacagcccagtcatggtggtgccggacgtgctctggggtctggggacagacagcctggaataggaatgagaaggctctaagtggcaggcaggcagcagcaggtggacttccagccaggatcatcatccctcccacttaccctccaaggcatcccagaccctggcctctgccctccagccctgcctgtggagctctgtgtgggggagggcacagtctccaggaggatctctgcacaagacacagcacctccctccctccaaactaatgtgcaaatccacagcctgatgcttcaaactcccacctctgcccaaagccttcccaggcaccaggcaccttccccactacctcctacaacacacacttacatacatacacaaaacacacacacacacacacacacatgcatccacaccagcaggggaaggaggcagacagaccaacagatggactgacagacctcagcctggtctcactcattccccgacaggaatcctggcgctgactcacaggctgggtgattcacacagcttgcatctgtgtgcctgtgtgtgtgtgtgtgtgtgtgtgtatgtgtgtgtgtgtacgccctacagcccgcacagcccgcacggccctggtatggtggctctgcttcctcctcctcctcctccagcacatccaaacaggcacgccactctgcacacaggcagggctgcgggcccttgctccaggctagccaggcactctggggaacaggctggctttgacgttggcctccattcctagacggagtagtttctgagcccttcccctcccggtgtgggagcttctcagactttcccttagaaacccccgctccactgtcaagaagtctcctgcctccaggcctgtgtgaccacagccactaaggctgtctctttaacatctcatttgatcctaatgtccaaagtctctcctgtctgtggcttcgtgacatggagcaccccacaacacaacactgtctcccaagtgagagtctcagccctcagcagaagcataaccagagactcccacagctggctggccttatccaagcagaagagacttggggctcattccctggaatgcttcagcaaataagggtccttcccaaggtttggcaagccccagaggactcaatcccaaaggctgagtacagctaccttgtgtctgttgctccagctgggccttcggggaggtcaccagggggaaagggaaaggaagttgaagctgaggccgaggccccagtgctggggaacccttcccccactgccatcacaggaaatgagagagaacaggaaaaaccaaccagaaggctgtcttggtctcctctactcaggtgtcctttccaaacactcctttgccctcttcccagccgcctacaaagtccccgaatcctgtagagtttgctgtcaaccttactaactggataatgtttaccccagggacagcctcccctaggcaagcgtgagagaagcaagaaaatctccctccccagccaatcccccaccctgggcctgggggaagactcacagatgtttccgggggcttctccgtgggtagtttctcaggcttggcacccccctcccagggtcaaaccacaaacaaaaacaacccagctcccagctgaccagcaggttctcccaggaggtgggggattcatgacccagaggcaggcatactcacatgtacacacatgctcagacaacacggaaacacacatatggacaaacaacacccacacatcctgtccccatcgcatcctgccaagagaccccatcctttccccagttccagatgccatctacagggccctgaatgcctccttcaccacacatccagcctgagatcccccaggacccactgcccacttgttatctccgcccaaccatcccctagaaacataaaattctgcaggccccaaatcgaaccccttgtgtctgttccccaccccccatgccatctgttcctcttcctgtgttccctatcttagtaacagccccaccacccacccagtcactcaagccagaaacctgcagtcatcctcaactccttcctctctcttcctccatctatatccaggcacgccatgcctgggagttcatgtaaatccgtttaatcca

SEQ ID NO: 39896 - DNA, 5246 bp, Homo sapiens
agaagctgaagctgacctggccactgcttccctctccccaccttgctctctttactccagctgaactggcagttcccgtaatggccatgtccctgctcacctcctggcctctgcaaagctggaacaacccagccttattccctttcagaaagtcatctttcaaggggcttcctgaatcccccactccttcctcctgcctttctgtgctcctgctatggactgaatatttgtatcctaccaaaattcttatgttgagactgaatccccagtgtgacggtatttggaggtgggccttggggtaatcaggagatgaatgacaccttattagcacctttataagaagtgacacaaaagagatggtctccctctccaacatgtgagctcagacccagcaagaaggtgtccatctgcaagccaagaaggcagacttcatcaggctgactagagccttgatcttggacttcacaacctcccaaagtgtgaaaaataaatcttttgtttaagcaacccagtctatggactttccattatagcagcccaaaggaaaacagctcccaaaaaccctggtatttccctatcacagactatatctgatcagactgcaagggcctcattgctcatctgcctcacactgagggcatttctctctggctgcccatgtgcccatgtctaggacagagtctggcatagagaaggcacctgataataccagaggtaagcagaccagccctgcatatcgggtatagacccaactgcacaggcaatcttacccacatgaggctgctgagggcgactggtcagtgtgaccttctcctgctcctgtcacagttaatttaagaggggcaggaggagagtcacatgtctatcccccagctgtgccagagggtacaagcaagaatggtgctcaaaaagggtggctctggtggcaggagagggaagctcaggctgcaggcaggtgccaatgtaggcaatcccaggaggctccctggtcccccaagaggaaacagatggagagagatgtcaggaaagcaggctcagatacgcactgcggctctgcctaagggatcgccacagaaagagaacttaaggtgaggaggttatgacctccaagcctacagacagggaaacagagacacagggaagctacggtcatgctgcaggttctagtgatgaacaatcccctccaaatctgcagagcgggaatgaaatgagaaattacctcctccctgatactcctctggagaggcgggggaagtgcccctggttctcatgttcctctgttccacctcggaatccagaggctaagaggcagaggcaggagatgaaacaaaaagactgagccagagacaaggagaggccaagagggaatgaaacatagtgagaatctaagaaaagtgtcagacagtgagtcagaggtggggggaggggccctcagcagctacccaggaatcaagatcctgaccatggcagtgttcccagggtgagcacagccccctccctagggtcctggaggaaggaaaagcagttcccaggagctggctcagacagaaataccacaccgccgaggaaccccagagacaggccctgaatctgagagccaggcttcttctgggatctgagccctgacaatcaggcagccctcctgccaccacacacaggcactgacaaccccccactcaactggccacagttatccacacgctcaggtcacactgtgcaaatccaggaaaggccacctcacccctgggcaccaagtaaccaaaggctgtttttgagaagtgggggcggggcttgaaaacgtcacagcaactcctctgtccacctcagcagtcctaccagtgccccaggcctcaacccaagccagtcttagggagggggcacctttagctgcctccatcccccttcaggaatctgaagaatgtgtcctttaacctcagagccccaggccttggccagtccccccaaaacacttggggtcacatgacccctgtccctcaggaacttcctgggagaaggggagggcacctcccagcacctctagcccccactgaaaaaccagcctgggtggccctgagagggcagaccgaaagccttggcacctcctccccaaccatccctctgaaggagagctgggggaggggacggctcctcggctttggcctccaggacctggcactggataggtgccaaatgtttgctggctacatgaggcacttgttcctgcagaagggaaactgcacctgacaatgactgcttcctccacctaagtggggccttcttccctctctcattcattcattcaacaaatacacactaagctcacatatgtgccaaacactgtggcaggcactcgcgcatgcagggagcaagacttatacaactgctgccctcttgaagctctgaattgagcagggaggacaaatagagtggggtgctgggatggagggtctgaagggtgggacagggtacggctggggtgaaggtaggtctctccgaggaaggaatgtaggcagagttccagataggggctccgcatgggtaaggaacaggaggagggaccagcacagtgtgatcggaggaggggcagcccgcgaggctgagcctgggctccagggcaggctttacctcgagggcacggcaagccacagaaggcttaagtagggagtgacaatgccagatttgcattttaaaaacgtggctcagcaccgggagtggagggggtgtgaccggttggaggtgctgccagggccaggagagatgacaggtcaagggcataggagaaaggcagataccaagatgtggagaaggaagagggcagggctgtcaaggatttggatcgggggaggtgacgagctactctccaaaaggcttgagacttctgggtggaggtgctgggtgggcagcaggagacggggaggaaccctctggtgtcaggagtgtgggctacggctgtgtgtgtttgtgccgggagcgggagtgactaagtgtgtgactatggctgtggtgtgggcatctccacagtgcgtgcctgtgaatgggccccggggaggagaaactgaggaaggggaggaagtacgtgctgcggaaggaggagaagtgcgtgggagagagtctacgtgtgcctgcgggtggccggtgtagctgagcccgtgactcacagcagtggcctctgagagtgacggcgactgacaaacaggtgagcctacgacacaatccctccctcccggggtccgtgactcaccgcgcctccctctacgctcatccctccactccctccctgacccccgccggccgggggcgcccggcacacgccgcagctcccgcagcctccccgaggggggagcccgaggaggaaggcgacaaatgtcacctgctccggccacgcgaggaacttctgaaaagttctcaggcaactgggtcaaaaggaaactcacccgcggacgcacgcccccgtcgcctcgccgctcgcgcgcaagcccggctctgtccccactcgcgccgagctcggggagccgtgacttctctcggggttaccgcggcgggcgggggaggggagcagaaaacctgcgactcccgccggccgggcccccggcccccgactccggccgcggcacgccgtcagagccgggcagctccagcccccgcgcccgctcagggtgccggggagtgaacggcaggaggcaggagcggcagtgccactcgcgctgaatgccccctccccaaagtcccgtcctgccgggcccgaggcccctcggcgctcacctgcaatccggacgctcgcggaggacaacgacgcgacccgcgtcccggccggggacgccccctgcgccgcgactctgtgcgctcggcccggcagccgtcggtccagccgcccctcgctctgcgcgtccggcagcggcggcggcggcgggagactgcctgcgcccagccccgcccgccgctccgccctcctcgtcagtggaaaactccggggctcactgcgctgacgcacgccgggcctccagccaggccgcccggcagccccgccccggaggcgccgcctcctcccccgcctggagcctggcgcagcggcctgggggcctccctgcggactgtgacccggcgactgcgcctccgccgctctccgcccccagccctctcccgccagcgccctccccgccccgcttccagcacggtccctaaaggcgcggacgactcaagccggcagagccgagcgtagagatccccacctcgccccaccgccccagtttacagatgggtagaccgaggccgggagcacctcgtaactccgcaaggccacgggctagacagtggcagagccgacgtctcctgtacgctctccacccccacccctctagagggagtttattttattccaatctaaaagttcccccctccgcccccaacctaccacccacccccagatccgccggaaaagtaaactgtggctggagaggaatctggggtgtgtggggagcggggaggcagggagcgggaaggatggatgtaatcagtgggcctgaacttcattcctgcccacgggccaagagacccttccctgcagaagttccaaactaggggttcttagaactagcttccccactcccacctcaaccttcccttaaaaaaataaaaaggctggtttcttccgggccagatcttggccacttaaaatggtccactgccttctctgctcccgccaaggcctttcctgactcggggccaaccctcccggtacgacatgccccggcaaccaagtcctggcctgggagcccaccctcagccccacttcccaaccgcaggtacgagtctactcatcacctcgagcgtttccaccctcacgcttttactgcagccggtcttctcgactggaatgctctcctgccctctctctgcttaccagaatcccaatgcctttaagggctcagcttgcactgcctcctccagggagccttcgtgggagcctgaccctccccctcccagtcctgctcccgctgcattctgggttcttctgactgtcctagatgaatgctgtcagccactagcccagccctcaggattccattctaccttcctccaggttgggggtgggggtgacctcctggccttcttggatggcatctgcggtggagttgatggtgagagcccctcttcagccacagatgtgcatgtagaatggcaggggtctgctccactttacctttcctgcaagaacaacaggaggaaagcaggttgggggaagataa

SEQ ID NO: 39897 - DNA, 1173 bp, Homo sapiens
catttccctcatgtgtcttgaaaatatgtgaagagctgactcacactccacacaccagtggtgcacccattagcaatgtctgcaactatcagtgatggaaaacaagttacagtggctttaaacatagagaggttgacttctatactatagcaggcagtcttgaagtagtcaaccactgacattcagtggctcaataatggcagtgcggatgtgcctacaattatttcagcttttaccttgtactggttgcttcatatttgcaagatggctgcccagccccaggcatggtcaacttaggaagaaggagggaaagaggtaccagcatgtatgcctaattattaagaaaacaaaaattttcaagaagtaccctcagcagacttcccatcacatttcattgatcagaatggggcttcgtggtctcctatagtagcaaggaagactggaaaggtggaaaatgggttgatcatgcctgatttagatgacttgtaattaattgcttgagactggagactttggtgcatggatcaaaatcagggatttgtcatcaagaaggcagggatgggatgaattcttgacaatgaatgaggcttaccacaagtagttttattcaacaatgaagccaattgtgtgctagcactcactcaggacagcaattgctctttcacagaatgtgccattgattttctgtgacagccaaaagtgttgtttgatccagtaatttcatcaagagcttgctctgctttttctgtaatcatcatattccctggtagcctatgactcagtttataagccatgatgtgaattgtgttgattttcactgtaagttggacaagtttaatgatgcctttgtggtttcaatcttttctctgtctttagtgagaaagtgcatccctatcacagtagactttatttactcacattcaggagaagcttgattggttttctaactagcttacaaggtctgatgcaaacaaatatgatgcaaaggcctcactgggcatcatgccactatctgacaagtttcacaatagatgatgcctcaagaggaaatgcattacaagctaacaaaatcctatttttggatattcattcccatacccttatttctgattcgtactttttttcctacttgtataaaatcatctgattcaaccactcatcagccctaatata

SEQ ID NO: 39898 - DNA, 1900 bp, Homo sapiens
gctcaaaacatgtctgttgaatgaatatatacctttaagaaatgaccagaccaggtgtggtgactcacgcctgtaatcccagcactttgggaggctgaggggggtggatctcttgagcccaggagtttaagacctgcttgggcaacatagtgagacccccatctctacaaaaaattgaaaaatattatccagccatggtggcgtgcaccggtggtcccagctacttggcaggctgaggtgggaggatcacttaagtgagccatgactgcaccactgcactgcagcccaggagacagaataagaccctgtcacacacatacacaaaaaagaccgtaatggggaacacagagctggctcataaacagctgcctcattctttttcacagcacatagtattccagagtacggatgtaccatggcattttttagactagtttcctatgatggacatctaggtgggttctaaccttcagtatttcaaatgatgctgctgaaaactctcttaagcatttatccttgtatttctcagtaggataagttcctagatgtgcgattgttaggtcaaaaggtatgctcatttaaaattctgatcatatttccaagttgttctccaaactggcagacccggccagttctctctccctgacaacagtggataaacactgctgtttccccatctgctccaacaccatgcagtatcagactttttgatcttggtcaataaggatcggtatttctgtgttcagtcggcatttctctaatatggtagtgaagcctagtttcctttggaacttttccaggggtcacaccggccaaggcctgattggagacgcctgggaccctgccgatctagcgggggcgggggggggagggggcggaggggggagggggcggggcccttcccgcctcccgcctcccgcccctggccgcgacagcacccacaactccgatcactgctccttctttttctgcgctttcctttctcccccacaagcttctgattcttggaaccaggctcggtgacctcacgcgagtgacttcatatccgggactttctgggaattctcagcagcactttttcgtaagaaacgtaactggggaggcgcggggtgggaagggggtgggaagggggtggtgggcggagcttttgaggaagaagagagagaacagctcagggccagcttcctttttccgattaggtcgggtggagctggcagggcgggcgggcgagctgcagccagcgagacccgagtaccgcccccttggcccgcagcagggcacccccgtgcctgccttccgggacgcaggtgggggttggggacacggacctcagtcctcatagctcctgatttgggaccagggagtggttcctgagggttcccaggcaaagcctctgctagagttttcttcggaagttagctgggcatctaactaggcagctctgccacaggctggggggaaggacagcataaccaaaaccagaaccccattatgatttttgtgggccctaagtacctttgccttaatgggctccttttccataaaaaaatatttaaaagtatattttacgactgtggtggtataaagccgaatatgttaatgttatatattcaaacaatttcttcggcctgaaagtttgtttttcccttctgatagtaaaatgagttaaacattttcatgagcttctaaaaggattgtggaccctaggcagtgttgccccctgtgccggatgggtgagttggccctgggtaaaatcagagcgatgtgacacagcctggaaagaacatgaaaggacctagaggatagaattctcccctcctggaggaggccataaacacaggaacagctgcacaggaagggccttgaatgacctaagaagtgtggattttaaggcgacaga

SEQ ID NO: 39899 - DNA, 1126 bp, Homo sapiens
aatactatctagaacactaagaaacaagtgaataagtgagcaagataatttcatattgtgagagggaaatatgggaaaacataaaacagcatgaaaataagggcctctttagatgggggaaggggggaggactgatcaggaaaggcctttctggagagacattggaactgagacctgagtgagaaggagctcaaccgctaaccctctgggagaagagactttcagccagagggttcatcaagtacaaaggtctggaggcagaaatcagcttggtatgttctgagaagagcaagaaagacagtgtgactagggtgatgtgggtgaggaggagagtggggccaacgaaggtggagaagaaggcagagaggcaagtcattctggtcctacaggtcactgagaggagtttggatttaagactgagtgagctggggagccggtggagggtattatgcaggagtgactggatctggtcaattcttagtaagagttctggctgcctggtggaggacagagcgtaaggacacacagggcaaagggaggaggaccattggggaggctatggcagtgcctaatcccccagggaagggaggatggacggtggcctgagacatggtgatggcggtgaagatggggactggtggacaaattccggacacagaggcaatgacagagagcaccagggagggaggaggcgcccagtcctgcaggtcccgggcaggatctagacgtgggtgaggacaggaaccctgtatccgtctggaatccgaagggagcctcagcgagagggctggccaggacggcgcgtcctggcgcccggcgtctgcagtgcagagccagtccctggctgcacgcctgccgggcgtctcccagcaacagccgccgccgcccgaacgttctgaactcggcggccccttagtcctcatcgtcaccttggcgacggccggtgggaacacgccctgcgggctccgggggcggggtctggtcgccacgcgctccgcctcccgcggggtgcgccttcagccccgcccgcccccgcccctcctcggcggcacgcgtggccgcaggtgtgcagggcaccgggaggggcctcgccgagaagccgcttctctcctctgtgcacgccgcc

SEQ ID NO: 39900 - DNA, 1697 bp, Homo sapiens
tattcttttataacaacaacaaaatggctgtgctaagtaaaacaatctgtattttattcagagccagcttctaatctccttgactctaaaacaaaatatcaatatttatttctgcttgatctagctgccaaaagactcttgtctatataaatcacactcacagttttatctatgtttaaggtaatgaagacctaatctatatgtggctgtagaaggtatttattttgctgtttactgtcgtgcagatgtagttggtagagcaggtggtaggtcctcaagtgaccgtttggccaggagggagtgtttggtgtccagcaagcagtgctgagtcatttcactcggtcaatacacttggtgatggaacctgcagtaacatttcaatttagaaagagccaaatggagatgccatgctcactccaaagtttctgacactctgcttggtaaacggacttcagattgttttagtgccttcagcacatttattttcgacaaatttggaatatccttgaaactgaattgggcacaaggaggtatatatttcaataatttgaatgggtcaaatggaaggttcacgtattctcctttcaaaagtgttttagatcaatgatcaagattttgtaaatctacaatgttgagttaattttacccacatgcaaaagaggctgagaggtatatttccttgaagccagtacatattctatagcttaagtgtatgtctgggtcccaggaagaagctgatgtttgttgaaatcacacattcggcaacatggctataattcctggatggtgacatttcaccaaaggaagcaacttaggatgtgaattaagcaacagttgtcatattcaaaagctcacgtatgtgtgtgtgtgagagagatgatttaatgtgtgtgtgtgtgtgtgtgtgtgttttaaataagtgaaatccatctgtgattcatatgtgaaaatgtgtctgtcattctctgggaacctagcttgggttgaattatttttaaacctcagtatgttgaggcagaagtcctaaaaggctcattgcagactaaaacaaaagtgcctctttattcccaaatgaaccatcacttgccccatatactgcttaatagttattggtaattgccgctattatgtgtcacacttttgtacacaagcaatgcatctccaacctgacccttgctcactcacttgccaggtatttagaaagcacatgttgcctgcctaccttctgctcagggctgtttgttaaggatacaaagatgaatagggcagggtctctaccctttcccttaatggtctcgctttggcttccactcttccaggtagctcaggaaacttaaggtaatctacagtcatcagatacaggagtgagctgccttgcctctatcccctgagctctgtctccccctcctggtgtctctggctctcaccagcaacccccaggtccaggagcagcaggcggagcagccaatcagcagagatggccccacctggtgggcagccctttggcttcagagctcccctctggttcattggttttactcaaaacacttggctttgctgacagtcatctgtggtagctgcatttccccagaggaagtggtgtgtgcaggcaaatctggcaagcctttgggttacagttttgtgatgagccagccggcccacaattacctggaatcccactctcctggttcaaatcc

SEQ ID NO: 39901 - DNA, 1827 bp, Homo sapiens
ggaggcacatccttaaccttggcaaactaagtctctaaatttattgagacctgtctcagatactttttggtttataggaacaatgaaaaggacagttatgaaacacatgtgcagctcactccatggtttacaaagcactcccacaggcaccaagagtgattatttccaactcttcctttcaggtgaggaaactgaggcccaagaaagttagagaagtaacttgaagacactcagctgataggttggtgggagggccaccacaggtcacaaatttacctacatgcagtgtttggccttggaaagcagggctgtttctctaagagtcactgaacctacagcagatgccttcggggtctgcagagctcctttctaaagggctttctcctggctctaggatagcagtagggatgtggaaggaagggctgaatgacaggttcaatgaaatggttccagtgaatggaaagcttaggggcgcccccttgtggtaatcacatgaagtgctgctccaggtctgggctgagacgggtgtgggcagcaaggtcccctctaaggcaacaagagcaagtgccagggattgagcacctgccttgggtcaggccctgtgcacgtgatggtcagggactcatttgaccctcagcccggcagcctgagagctgggtgttctcagcctgtgtgagagatgagaaaacagagatgaaggcagagtttacccatgagaagagtggtggagctaggctggaagacccggtccagtggcagagctgctgttgtcaggtggaagccccttcccatttctaagttccttgtgacttcctaaagtcagaccctcaactagactgtagcaccgaggagctgcttctgactttgtaaagggcctcctggttttacaaggtgttttcatactcctcatctctcataagccacacagaatcctgcaaagcagggttttttagggatgattgtctccacttgaaaaccaagaaaacagaggcacagagataataacagttaaaacatagtaatagacactgtttattaaatgtttaccatgtgccaggacctgtgctaagtaagtgccttctatttattattttgtttaatcctccagcaatgctagtaattgtcctcattttacggatgaggataaggaggctcagaaaagctgagtgtctctcccaaattacacagttcaggaactggagctgcagtctgactctggaacctgaattcttacttaccacactgtacttaacaagtgtgactcactgtaggcaccagtctggtaaaggatgagcacaaactggcatctgtctgctttgacaccctagacaatcttctttctacaacatcacacaggttcagatgtcctctttcaatatctggaggtaatgatatagctagaaacaaaacaaaacaaaagaccagttacagtcagttctttggggtaaaaatgttggaaagactaatgagggcatactcagggcccccgagagggggtatgcacttgctgtactatgagagtgaactaaggtctaggtcaagctctaggccaagcctatgacctaacctggctgtaattcacgtaaagctgctgtgtgtgctagctgcttcctggaatattgttctaaagcacttctggcaggtgtctgaagcctgtgccagtgaaccagtctttcctgggagtagtggttgcaatattatgatgtccggagctgtgctgtccaatacgatggtcactggccacatgtggctattgagcccttgagatatggctagtctcagttgaaatgtgatataaatgtaaaatatttgccagattcttaaaga

SEQ ID NO: 39902 - DNA, 2451 bp, Homo sapiens
aatcagttatgtttcacatttttcttattttttgtaataaaaaattaaaaattgaattaaaaaaagactggtaaagcagattctttgtaacaagaagataccaacataacagcaggctttgacatattttgaaatgtccctgcaaagctctcttgtggggaaaatctacattctgtagagaatccccttccctttcctgggtcttcttcctgatccaggagagaattaactaaaagtttgacacttttttagaataagaaacatttacaatcaattttctagaaagcctggtacctgaagatttcatctgcataataaaaactttggtctccacaacctctcatcttaattaacccagacactccgttctagtgattccaggtctttaggtaaactctttcaaccaattgccaatcagaacatctttgactccacctttgacctggaagcccccacttcaagttgcctcctttctggactgaaccaatgtacatcttacatgtattgattgatgtcttatgtctccctataacatataaaactaagctgtagcccaaccaccttgggcacatgttctcaggatctcctggagctatgtcacaggccatggccactcatatttgactcagaataaatctcttcaaatattttacagtttgactctttgtcaacataggggactagggaatggggaatgctgcttggttgtggatgccattattggcatgtggaaaatggtccttgtgcactgagtccacctctaggtggaaggacacaggactggttgagtcatgagtcattatttcaaaagaccagtcttaggttatacaatagtgatgttatctacaggagcaattggggaagttacaaatcttttgacctctggaacaatggctggttactgtttaactatgcctacatcttagcagaattcagactcctttcataatcctaaccttattgacttccattagttttacaaaggcaatttatttttaggaagggccattatcatttttgctttaaggttaaactataaactaaatttctgccaaagttcacttggtctatgcccaggaatgaccaaggacagcttggaggttaaaagcaaggtggggtcaaatatgtcagatttcttactgtcaaaatttcgcaaaggtgatttcaaaaccaaacatttttataaactttggtgcctcggcagctggatttgagctgatcctgccatttattaacttccttgacctaacttaactgatctaagcttctatattctcatttagaaataataacctctctttatttaagttttggtgaggactaaatggaacaatatatgtgataatatatgtagcatatttatctggagtggtcaataaattagctatgatcagtattattttaagaacaatgttgaccttatacaaatcacttatacatatagttagcataagtggtactgaaaataatgtagtacagtaaaaaaaaaaatcatggagttggtatcagacagattgaagttcagatctgggctcagttacgtgccttttatatgattcaagtgaatgatcaaacaaaggtgaggtagtcagtgcatcacactgggagtcatggcatgtcagtgagctcacacagctgtgtctaggataactaaaccaaaactcaattgctaagtttttaaagttttgatgaatagaatttgaaaatcagccatcatcttagagccatacaaataacatattcaatatagtaatatccatatatataaagagttcttacatatcaataagaaaaaggcgactaaatggaaaagtgggcaaaagatatgtcagaagaaatagaccagaattatagctatatacacagttttccaatatgtaatattcaaataaatagaaaataaaacaatgatataactggttgtttctggtatataggaaccaaattgatgttggtgaatttgcttatttttattttattttgagataatcatacattcacatggagttacaagtaataattcaaagaaatcccatgtattctttacctaatttccaccaatagaaatcttctataaagctgtagtacaatatcacaaccaggatgttgacactgatatagtcaagatacagaacagttcaatcaccacaatgatctcgcatgttgtctttttatagccacatccaagaatattatataaatgaaatatgagactttgaaatatgaacttttgagactgaatttttttcactccgtctaattccctagaaatttatctcacttgctcaagttgaatgatgaggagctcctctgcaaaaaaaaaaaaaaaaaaagaaagaaaaaaagtaaaaagagaaagaaagaaaaagaaaaagaaaaagaaattcatcccagttgtgatctgtctcaaaagtttgttcctttttatctcttgattactgtataatgttg

SEQ ID NO: 39903 - DNA, 874 bp, Homo sapiens
ctggccaacatggtgaaactccatctctactaaaaaaacaaaaattagctgggcgtggtgatgtgcgcctgtaatcccagctactcaggaggctgaggcaggagaatcacttgagcccgggaggcggcggttgcagtgagctgagattacaccattgcactccagcctgggcaatagcacaagacttatctcaaaataacaaacaagaaagttgaggtgaatacacagctagcaggtgacaaatccaggatcaaatacagaatcaatgcctgattccaaagtccactttctttttacagcattactctgcctcagtggtctctcaaagacacacagaaaaaagcaggagatagcctctaccctttaaggaagggaaacaaggtgtatttgtcagggaaatatgtgtcctgattttctttcatccagattatgaaagataatctcctttacttaaagtcaactgattacagaggttaaccacatctacaaaataccttcacagcaacacctggattagtgtttaattgaaaactgggtattatagcctagccaagttgacacataaaactgactgttacacaagatgctgcttataaatgaagtcattctgtccaagataaagaaaagctggcctggcatggtggctcatgcctggaatcccagcactttgggaggccaaagtgggcggatcacctgaggtcgggagtttgagaccagcctgaccaacattttgctaattttgctaaatgcaaaattagccaggcgtggtggcgcatgcctataatcccagctactcaggaggctaaagcaggagaattgcatgaacccaggaggcggaggttgtggtgagccgggatcgcagcattgcactcca

SEQ ID NO: 39904 - DNA, 1998 bp, Homo sapiens
aatgggagccacatgttaaagtttaaatgttttactagccacatttaaaaagaaacacatgaagttattattatttgttttagagacggggtcttgctttgtcgtccacgctggtctccaactccttggctccctcaagcaatcctccagactaggcctcacaaagtgctgagattacaggcctgggccactgcccccggcctgaagttaattttaatatttcacctaacccaatatatccaaaatatcatttcaacatataaaaattattgagattttacctcaccagtcttagacatccagcgtgtggtttatgcatacagtacatatcaattccacactaaattttcagcatttaaagggaaatatggtcctgaaaaaaaaacaacaaaacaaaaaaacgcctgtttaaggagaaagcattccacactgcttgttttaatataattaaaattaatgtatcaattaataaatcaatagcccacgttggctagtggctgccttactgggcagaccaggtctggattgtaaatacgttcagacgttccacgcaaaagcaaagttccctgcagacgctccattaagttctgggtgcaaggaagcgcggatccttcagttctgggcgttttcaccaggtggcactcagaacaccctcacgtgacaagcgtcccacccggaagcgaaatctccccttctacagagttcctccggcgcttcctccaccccgggatacacagaacctcatctcctacggtgctgaagcctgcagcagggcaggatgggcaggagagcagagccgcggagtctgcggcgcgggtgaagagcggcgcgtaattcccgcagcaagattgttccgcgcccgcagcccctggactagcaggatccgaaccccggcggctgcgtgcttataggcgcagacgtcagagagcccgcggcttaaagcgcgtcgcctggctagcgccaccccctagccttcttcaaggcctccagggctgggcccaagcgcccgtcgacggcaccctgggcccagaggactcgcgggcctcatctccaatgattcagaactcacgtccgtcgctgctgcaaccccaagatgtcggagacacggtggaaacgcttatggtgagggcactgcggggaaggaagggcaggggtccgaaccgcgggctcgggccggagaattcggggcgttgctaaggctcggctacccttttccgcgccccagggtgcgctcaggatttaggatgcggcgggagaggagtctgactaagggaattgagaagggggcagggagtgaggagaggccaggagctgcaggccagccctgggggcaggcgctgtagggccgatgtcccggtaaagggcggaattgccggggcctggactggacgcgtgccggggagtgtgcccgcgcggcccccacaaggtgcgagtaggctgccaggtggaagggcacccgggcagatttgggacggtcacaaggcctgataatagcgctgacgctgagaagccgttgatgccgcagcgagctggccgggtagcgctgtgcgcccgcgggcggcggcctacctggaggggccagtcgtggcggcacccttccagcctgttgggacggcgcgtggtcccccagcgacgccacgcctcctccggcgttcgattggtcatcgtgcccgggccgccgggccgctattggtggaggcggaggcggggctggcggcgtggttgcccggtaggtggagtcggggtgcaaccagtctttagacgctaaaggcctgaggccactgcagctgccgcagctctccctctgaggtcttgcgcccgaggtaggggcggcttttatttttttttttaatccttaaaggcggagacggcggcggtggcgactttacgttgacgtctttgaaaacctgcttacctttttcagggctctccagccctcgcctccagatgtgaattggacttaggatagttttttcagggcagtaggaattgcttgtg

SEQ ID NO: 39905 - DNA, 1844 bp, Homo sapiens
caggcaatccacccacctcggcctcccaaagtgctgggattacaggcacaagccaccgcgcccggcaaacttatctcctactgatggatattgcaaaatttttcttctaccaaaaaaaaaaaaaaaaaaaagatagatataatccataccatctgttcaatcttgtcctttttaactttttcagggaaacttcccccaggtgatagatggatagatacatgagatagacataacgcatacgatcagttcaatcttatcttttttaactttttcagagaaaacttcccttaagtgaacatttaaatctgaattacgtcctgttaaactgttctccaggaaaataaaataaaataaatcttcaagtttttgtttacctaacaatttgttgtgtcgaacaaaccttcctacttttcaggtaacaaaatggcagcttaggctagaaagccgctcatattcgcaggtacaagggctgggtaagaacgccccgcctggctgactaacttgagttccgcgctctggacaggaattatgcacagggcgtcgctgtggcactagaaaccccaaagtcacaagcgccccagatccgaccaggatgccgctaccggctacagcccagaggcccgctcctgcggcgcaagcccgccttcctgaagaaaaagcccagtcccggcagcgttcttctccggctccgcccttcttccgctcgactttctttgccattggctgacaacggagtacataaggacgtcatttcctgccgcctgtcttttccgtgctacctgcagaggggtccatacggcgttgttctgggtgagttccgtgtagcgtccctggcgccttccagggctagaaaaatgagcttttcctgctcaaatgaagggtgagaagactagtgatgaaagccggtcagactggatctgtctcccgcccggcgcgccccaccttaggcctgcggcccgcacgtggccaggctcgggctggcgggttcccagagtgccccgggagcgggtggaggccgccctccagcggaggctccgagctggggttcggaccaggccgcgggtgggcgggagtgcagaaagcgggctaacatcctgtgttgctatcccttcggagtcccacacggcggtgagtctaggcccaggcgctgatttacaccagctacttgggctggtcgggttttcccttcgcgccgtgcgggtcaggagttaaggttctcgggtttttagacaaacaagtggtgacagcacagcgaagtaattccaaagcatccgcctacaatctgcttgaaaatgtctgaaaacaattcatgccttttttgcctttagtttgcatattccaaacatggctgctcttttgtatctagttgttaacttggcgcatccacaacttttccttaattcctatcttgagaagtgttgaatttccattcgctaatttcgtgtagttttattactcggttactctgccgtccacactatttcctcagtaagatgtgcgctgttccgtaatacacgacatgtatgggttaactttctgtttacccttcactacactgtaagctcaatgcctgacactatagcagatggagtttttggttgcttttaagggtgtgccctacttaactcaatggaatgaaaagaaataggttgctctcttatttcagattcccgtcgtaacttaaagggaaattttcacaatgtccggagcccttgatgtcctgcaaatgaaggaggaggatgtccttaagttccttgcagcaggaacccacttaggtggcaccaatcttgacttccagatggaacagtacatctataaaaggaaaagtgatggttagtcattgc

SEQ ID NO: 39906 - DNA, 858 bp, Homo sapiens
atgtgccagacactgaagcccttcagatgtttaattttgacaacattttcagatatatagctttattatctaaattttgtagaagaaataaatcagctccaagccattaataagtggcccaagatttcaaaattagtacgaaatgtggcagggatttgaaccagcagcccgagtcactggctttcttgacttgcgtattgacctgctgtcccctggggttcttgattttgccaccttgtctgactccagacattgagcacacctcttcttccttgtgtcaacttaatgactcacaggcattgtgggttactcaatttccagctacagttttgtgttttttgaactgatgatatcattcagccagacatttcctgacttggaagtttcctgatcccattggcaacaccacccaaatgttctgagcttaatcctttggaaaataaatggactccttgttcccactgagacctactcctatgttgaaacataggtttcaactcctatgttgaaaaccagggctaactaatttctaaagccagacagggcctaaattgctattttttgggtcaatgtctatctatactatttcctacctgttaaaagacctgtagaaatgcacctatataaaatataggtttattgttctttgtgtcaatggcatgtattattttggctattctagaaaagaaattacgttggaattccaatgtaaacatgtttgtgtgaatcagtaaccttctctttcttttgtatgtcataagaaagcaacaaatgagttgttaaatgctaaaattaaacaccattttagcaaaattaaagacagataagatgtaagtttccaaaaattagggctgccag

SEQ ID NO: 39907 - DNA, 842 bp, Homo sapiens
gttttataatatattatcaaagtttgaaattcaaaaaaagagtttgttcataagcagcttaactctaggagattgactactttatacaaatataaaaccattagatgctcaattttatgtcattcctcttagtgtgtcagagattaaaattacatttaatagctttttgttattttcacaccatccagccacattttcagttcaataattcacccactactgcagtcattacatctcacttgggaggagagaataattctgtttcactcaaaaagggcacattggtctattttgtctcctccaatatcacctataaaatagtttctgattttctatttttcagcttaatgtgacctttctctgtaatgaataaaaatatattcatcaactgatctcggtgaattttctttctgataacaaatgccatgactctatgaagagacttcctcattatcttaataaaaggaaaagggctgagtcacagtggtgtatgattcattgacttagcaggccagtgagtcagttgggccctgactagagattgtaagtatgacaaagggggcaggcagatttctgcttcatgagttgccactatggaacaggggagcaggtcaatgaataggaccagggaatggaagctctgttgcttacagagatacttggacctctgcagagcagccaatgaaatcaagagggctttcaccaggatagccaaaaggctaagaagcaggcgagggaagttttgcagaaacagcagaagcatgaatctgtctgatgcgggcttgtttgtgaaatctggaaataaaagcagcacaatttctattttattggtacaatagaat

SEQ ID NO: 39908 - DNA, 1417 bp, Homo sapiens
atacttaaaaatgcatctggaaccattgcagaagcagaactaaaattagctgcaattgataataagaattcttacataaaaataacaatagtaaaaattaacaatagctactgttgattgagcacctgccaaatgtgaggttcagtgccagattatttacatttattcatcattatccctgcaacaaatatggaaggctggactgagccaatgcccatctcttttcacaaggccagcttgcctcctattccatgacaaacacctgcaggaaagaatagagtggaatgggcagaacaaaagagaaatggaacctagagtatcatttcctcctccttagtgcacatgcctggcatgtgcagccaataattagtcactcaataaatatttgaaaaggaaatgaacaactagaagtttagataacaaactttaatggttaattttggatggtggggccgggagctacattttccttggtgttttccccaagctttctgcattaaatttatacttatgtaaattgtaaaactctgagcatatataactatatgccaacattgaaatattttgaaaattatgatcactttaattcctaaatgaagaggttttgtttgtttgtttcttgtatacataaggctttcctgtatatcacttaggccttaacttttttgtacacacagattctgggttgcagaaatgcctcctaaaacatctacttttggcaccaactacagcagggtgccattgtgaaaaccactctgaatcccaaattgagggctgctgcagccttttccaggggaagaggactgctgtttagggcacctcgtctcctgatctcctgatcttttgaaaaggggcttctatttttgtttatggacatgcagatgtctttaaaagagaaagagtcctaaacatctcttttaaatcactgacccatgtttcttaatagccagcaatgaacaagggaattcccagcaaatgtgatggtagtcacatccaaaaattagaaagctaaggcatctacttagattaaaatatgcctgggtgtcggccctgttttctgtggtagtaatatattttctgtcctcatgactcagcctgtaatagccagtaatgaagtaaataattcccagcaaatgtgacagcagtcagattgaaaaattagtaagctaagacatctactttgtttataatatacctgagtgtcatggctcagtttcctggaatcacccccagaaattctacccttacgttggataaatgaaaatgctctggaatgtcactttttgttccccagcaaaccactctctgacaagcaattggtcctctgccaggtgaccttgacccaaaagctgaaccatgcttccactgttcatagatgaagaaactgaggctcagagaacttctgccagggagcaca

SEQ ID NO: 39909 - DNA, 1279 bp, Homo sapiens
aaaggaagtagataaaaacctatggttattaatagatgcttcttattctctgttagtgtttctaaatgcacttgatgaaacaaaataaaagaattgagtaaattagtggaaggcttctacttctagtgcaggattcttaacaatggtgctattgacattttgggccagattatgtctttgttctgagggactttcctatgcaacgtagaatgtttagcagcatccctggcctctaccctctcccaatcatgacaataaaaaatatctccagacattgccaaatatccccttatgggcaaaatccccccagttgagaatccctgctctagtaaattcatcattgacgcacatagctcctggggtacagaaatcagtaataagtaccccctctgtgtttgaagacaggagagaatgtttaaaaacaaacaagcaaaaactaaaacaaagtcagctgaattttggtcaaagtctggggtaggtcatttggcatgataaattctacctgatatctgactgtgctgagtcattctattgtcaacttcactgagctggaactaggttgcccagaatcgctgtccctgagtggctccagatagggctgatcaaaagagaaatcggaacaaaattttggagacagaaatagagcaacggccattattccccaagggactttgggatctgatagagagatgggcagatgcagaggtatgcagccagctctggcttgtcctcattctccttctctccttgtccagttcttcccaacagctggtcctgctgaccagctgcaagcccagctcaccaacttgactgtggaagcacagaggtggtagactcacagaggcaacaactttctctccatgatagttctactttagtaactggacatgcttatcaagtttccctgcaagctctgacttgtctactgaatagtgccttaggaggtctggttaggacttattctctgaccccatggctctttttctttacttctttcagaattttattttcccagcaacccctataattgggtaatatgcaatttttataataaattccatcctttattctaacacattcattgtcacagagtgactgaactttggtaacatcactctgtgtcttcttagcttccccagaaccagaatttcagaagccactgctatctaagataattttttttttcatagccatcccaagggaagacacttgggacatgaatcatcactcagaactgaggctgagaggcagggcaaacagtcaacttccttcctaattc

SEQ ID NO: 39910 - DNA, 555 bp, Homo sapiens
tttttattctcaaggtcaatgaggggtatagtgaaacctgacacataactggtttttggttattttcttggaaaatttttcatttttgtttaacacctcacttgagtacctggctaatcaaaatgtgggcccgggatgggcagcattggcatcacctgggagcttgttagaaaagctcaggccccagcccagacctacaaaatcaaaatctgcattttagggagctctccaggtgattcgcatgcacattacattttgagaagccctgcttttgaagtcctttcaactgtttcttggtgtctcaatcttcctatttactttcctgttacacatttagagtccaatgtcctaatgtagctttgtgggttctattttcagaaaggaggagtgccagtgtctgtcctttgcaattgcagatctcaaactatttataaacctattaataacttaaatgtctttttactgaattcaaatgttctattgtcacatcaagttcagtatatcctacgtcaaatccagcattttcccccaaatccgacacctattctaactcct

SEQ ID NO: 39911 - DNA, 633 bp, Homo sapiens
agtttggtgcctggattttattattagttcccatttgtttggcatccttggtggaatcaggccattctttttcatcactgtgttttgaaagttcccagctcaattgttgttccagtatcagagtgtctagcagccctgtcctaacgggaaatgaaggggagctggacgtttacagtgggcttttcacaggatgccctaatgcctagttatccaacctgtgaccagaggtccctcacatggggaacttgtttatactggcaaacgcccttgtggctcctatctgacccagtttatgcccgcctgaccatcgctctggcattgggaacccaatcttgtgatctctttggcattccgggaaaaccctaactaggacagcccctagttcttcagatggaaggtaacaaattcaatacactgccacaacaggaaacaagttcaaaggttttttttttacttacagatcctgggcggggtgggtgcaatgagttgggagggtagtcctctctctgtacctggggtcacacgaggcaggtatgaagagtcacgcagagagagagagagagagagagagagagagagaaatatgtaacaactattagcatgtataagggaatagggtgtgtgggttacttt

SEQ ID NO: 39912 - DNA, 2181 bp, Homo sapiens
cttgagaggatttccagggattcagaaatcgccagtgtaactccataaatgctttattttcatggagcgacttccaccctgcagctaaaattgacaaagtgttttcacagccgagttgttggggctgaggcagtgggtctcaggaagatccctggcttaatggatgcaaacgcacaatgaagtcccggcctggagtggaacctttcaactcccagtcattcttccaggaccgggaactcctggcacgagcccgaaagcgttcctcacttgcagcagtctttgggagtctttctgacagcgcgggctcactaacccggcggttccgcagctgtgtttgggagacttgggggcgcattagcctggacagctccctgatcggtaacccctttgatgtgtgttgaatgaatgagcgtcgttagcgtagtagtaaatttatgggagaattaaagcaatccagataggggtcactacggagactttaattacccagggactgtgaagtggggaagagctgtctgtggaggagcgccacaccatgtcttagattcaggcaggccccggattctggtgacccattactctacggtcactgagggtccgggcccccaggactcagaggcaggagacaggaaaagcctgacttagaatcggggaaggacctggagtcgcacatgggggctcccgaaccgcggccccaatactgcactgcgccgcagggaagagccccgggaggggcgcgggtccccgccccgggcgcgcgcagccctgccccgcctcctcccggtgcgccccgcccctcccggcgcgtgccgcccgcgcgcccgaggtgctctggaggaaccggcccggcgggcaccccctgccccggcgcaggcgcgatcgcgggccgcccctcccgccgggcgccctgcacgcgcccccgccccgcctccgcaggctcccccgctccgggcgcctctgattggctctcggccgggccagcaggtgtcggcggtggctgcggccaggctggccctggctgcctgcggcgcgggcgcctccctcgcagccgctgctgccgacgccgctgcgctcccgcctcctgtcggttcccgggttcccgctgcggctgcggttctggcagccgagcccccgcggtgctgcagcccagctttagcgcgcagaccgacccgcgccccttcttcgccgccggcagcctctaatccacgcggcgcgttgcggcaggtgccctgggcgtactgaggcgcggtggcctgagcccggccgccatcgatgaccccggtcgcggacttgcttcaggctggccaccccccgtgagtaccgtccgcctccctcttctcccctctggcagctttgcgccactctcccctcaacgttgccgcaacttcgggggtgggtgtgtgaaggtgtggaggtgtctctcacgctcccccgcaccctgtgcgcgtccggagccaggaaccctaggcgcggccagtcagcctctgcggaggggcgaggggcgcgggtacttgaacttgctcagggatcatcgcggagccagaatcgcctctttctctcgctgctggggtgggagctcgcctctgcgtttccctcgcgttttccgatcccggatggccacgtagtgcttgggctgcggttcaccgcgtacctactgtgctgcgggcgcaccggcgggacgcctcaaaccatccgttaagcgccccgcaagcagcccagcgcgacggacctgactcaaactcttaattctgtaaaacgggggtaatcagggactctctcaaggtcacagctggtgctcagagttagaacacaggtggattgcgtctggccctcgcccgcgggctgcctggggaggggagagctgttggcggggcggtcacttcagcttcatcccgggttcctcctcatactccctttccgccacagccgccagacttgaagaggtagggagccaatcccagggggctctacatagatttggaggtaacggcggaggatcttcctgatggacgcgtggagcggaaagattcagtggtgggaaccccaagacctgcggctttttggagcacttgctccccttcttgttccttaatttactgacgtcttggcagggtaggggaatttgttcttatatccgtcctgctcctcttttcttttgccaaataagcaccgtccccaagg

SEQ ID NO: 39913 - DNA, 947 bp, Homo sapiens
aggcttgagccactgtgcccagccaacaattatttttaaaaatagagtttcccataatttttaggtatgtactgcttagaggtgtttccctacaatatcatctttgctgctgctgagaaaatggcaaaataagattatttatgtttttatccttttgaagaagagaacttattgatttttagtttgtatttcatagtcatatggttaaaactttaagggatatattatacataggatttttttaaagtattataattttttttataaattaacatatttttatttttataaaataattattttgtttgtattattttgcagttacatataatacttaacatttagaacttcaaagcacaaaagtttagaacttttagatattgccttttggcattttgcagaaatccatactaagtcttatgtatggttcactttgttataaagaatttttttttcttaatttaagaattgggatgatgaaactggcaaatgacccattattttctctttttctctgtggccttggtgaggtcatttgtaaatatttgctgagtctgagtcaagagaaagatactaccttacataaacacttacatataaacactatatttaactctattttaataacaaaataggttgattttgtccatgtagagattttatcttgcttgtatcattttggtttcccaggtcttgtttcatcatctgtgttgagtaaccatggggaggaagctggacctgtctggtttgactgatgatgaaacagagcatgttcttcaggtggttcaaagagacttcaatcttcgcaaaaaagaagaagaacgactaaggtgagatgcctgttttgctcagcagcgtacagcaaaccacatgtggacaagcgtaacaggtttcctgagggtattccctcctgctagccctgagtttggatatacacttatgtttgt

SEQ ID NO: 39914 - DNA, 2212 bp, Homo sapiens
acctctgcctcccaaagtgctgggattacaggcctgagccaccatgcccggccgcatattcttatctatttacaaaatgggagaaccgaggctctaaaacggtgttaaataatttgctcaagttgtacagagtaagaagtgaattcaaactcaggcggagcagccctagagtgagaccagtaccaaggcagtacactgcccttggtactgaaaacaaggacattcaggtgccgtgggatagaatagatgaaattaggaccatcttggaaaatctggcacctgtgcttgctaaaacttgggatgtgttcagggatgggaaagtggtagggtttaagtcagtatatgagaagtgtgtagttgggacaatacagtagccaactagccacatgtggcattaagcactttgagtatgtcttatccaaattggggtgtagtctaagtgtgaaataaatgctagatttcaaagatcaagtataaaaaatgtaaaatagctcaataatttttatattgattacacattgaaatgtttctaaaattacatcttaaatatatttttaaagttaatttcacttttttttactttttaaaatgtggctactagaaagttttaaattatatatatggctcacattatatttttattggacagtgctggtctgaaatgcaagattaagcagtttgggatttattaaaccaaaaagtaagctttctttcccaattttgtttaggattattccttttttatatgtggtttttaggtatctgtaagagccagctaaagttttagctaattagtcagatattggcctttgctatcaaatattgttgtctctgtcacgtgaaggtggtctctgagtcatgcctcagtgttgggtttattacacagtttaaaaaaaagcatactgtgtccatgccatattcatgacaaagagtttatgcatctcaggacagaatgaaccctttcatgtttccctgaagttaatggttgaccaaatacttcatgacctttgaaataacacatggctttagaatggcccactattcaaaatttatatcacatctttggcgccgtaaagttatcagacattcacctgtggggtctgcctttagaaatggtcaggagagtttgatgttacaagtgtgcttgtaatgtagaaaaaggaatcatgctgatgctcttatttgctttttaacttgtggtccttcaaagatgtacagttactaatttggagattcaaatatgttctccccataatcccactttctttaataacagttttctactaggttgcttttatggctccaagttcctgatcttatttacttttccactgcaaatgccagagactcagcttctgggccctgataaagcttttgtggccttaattcttggcctgaccttcatttcttagacctctggctgtggaaagcatttctttggcattacatgtgcatagaattcaggacttgaaagggagcaaggaggaaagtttccacagcaatttgaaaaagtagcttttctcacttacagtaattcaggaatgtacaaaatcctttagccagaaatggcctgaaaacgcagaggaggtaagcacaatgaacagcctggaaatcagagtttcttcctctctctgtgctgtgctggtggcatgacaacttacttgttctcacaggctccttcagtgcctgggggcagtttcctgcctcagggttaaagggctgccttcccctccttactcagcttctgaagccaacagatccacctcctggtccgtttctgaacctgatacctgcagaaggaaattcatcaacaacctctccctgactgtcagggtgacttataatgagcttcttctccttctcccagatggggagattcctgtcctagcccaaagacttttttggctggaaaccaggttgccttaaattgccaggagagccagcctccctggcctggtcccagccctctgtgctcaccttccccctgctggtctgacttacaggctcccattttgtgtcagcttctcctctatcggtgggtgtgggcctaagacttaggaccccttccctggctaattcttatacctcaggctggaagagactagctcctgcatacccagctggatctggctctccagatatggtgatgtgcccagtaggttggcaggctgtttggttctgaccacctctggaattagtactagaataatac

SEQ ID NO: 39915 - DNA, 1013 bp, Homo sapiens
agccccatctgcccttggacaaagctccaaaaccacactttctcctcagtcagatgagtgtaacagtcccagcctcacagtgctgtggatgaaattcagtgagaggcacatgcaaggggctcagccctgcccctggccaggagtaagcactgatacatgttacctattattattgctgctgttgttattgttatcactgggaagtgagatggctaagtagatcaacagaacaaagaatacaaactgaaatgtctgcttcaagaagggagtgtgttatgagagaccaggctttagttctattacagagggcatttatctagtgtgaatgtaataggttaagaagccaaagcaagagggctagtctgtgatcagtggcatggtagccaatgtttaactagttctccaggggaaaagaaagctttgatttgtagtgtttgccgatttccactatgtaaatactactaccttgtacattgttaagctgccaacatgtcatcactgaatacagagctgggaaaaaatgcacacagagagctctctggatccagaacgagtctgcttcagcataccactgactgggtggagtggggtggagtagggtgtttccaagaaacaacaggaagattcagattgaagactgcactagggattatcactttttctgtgaccagctggcaggtaggggtgccactgctggggcacaaagatgcctgtgcctcactacaccattgtcttgtgtttgtaagtggggacagacaggagaccctatgctataaaaaggagagggagcaagacccagtcaccaggaaggaggctggcagaagtgccaggctctgtgcagaaaaaggtgggcagccatgaagaacaagacccaggccaagggctggttgacctgggagccaataagcagtgatgctgtgggaagacagcaggggtccccaaggcttttggcacctgctttgattggcagcaagtaggggtaggaggggaggggggacagatgttggaactca

SEQ ID NO: 39916 - DNA, 1497 bp, Homo sapiens
tatcaatattttaaaaaagtggatagctgatagtaagtacatgtaaataatttaaaaataaatacatatatttcaggggtacattgtcaaacagtttttactgatgggttgtgtggcttaaaaggtttgaagaccatctaccagttagaaaacatagcaagcttctgatgactcacattccccctccagcttgtccccatccctacccctgtaaggggcagtgctaattctttagacctgattcaatgtgtaaagggcagatagaaggacagaggtggggaggtaatccagagagttcctagccattggtgaccctcataagaggattaggtcctgggatgtgttgtgccattccttttgtgaaaactttctgtcgatcttgtttcttccttactctcctccccaagccagagacagaatgtctacttactatccagctattttaactcaagttctaaaggacaacagcttattactgcctagcaataaaccaatggactgccttgaggtttgggcttttcagtcaagtgtctttatggttctttgaaatgtgccaaagttaaatctttctgctaacacaggtaagagccatgtgacattatgaggcaaatgaatgaggtaacatactcctcctctatctagctctgcctatctccatgtttatagtgttcaaagccaggcaggcaggcaggggcagcaatttacaagcccggcaacccaagcatctctgtaaagtctacttgtgcaggaaaagtgccatgaatgtctgtacatctgttaatgattaagaccttccatgagtccagagagtctgcaccctgccacaattagggcaatttggcatgcctttggtgcttcccagatggctccttcaagtgtgccgagttctcagccttgtactgttcagggacgtttggggaagacagaactgaaaggctaaaagcctcaaggttgtgaaagccaccttttctatatgctatctcacatgacaaggaacactgcttgcctagagccatgacatgccataaccatgaagcattaggtggtgaggtgacaggatgataaagcatgtaattgctgtcctcattcactgagcactgtggtaattacttaatcgaagataagagggctacttgtaggcagtggtggtagtaaatgttttctactatatttctatcttcaacatgccctttcctgtttcctagtaatgacagcaatttgcaatttcagagcctgtcctttctgatttatttttctctactatttcattcatttcaggacaaatccacggggaagttgggaagacttttaaagacagtctttaaaatgggaaggcagggcaagcatgctttgcctgataaacacaggctatgtgtaaagaatgctccactgtggacagactctatgcatgagcatttttaccctatttgtaatttggtctttgtagagccaccctggtgatgaatgggatgttcttttaggtctgctgggctgaga

SEQ ID NO: 39917 - DNA, 2028 bp, Homo sapiens
ggaagatattacggtctggtacatgactccatcaattaacctatttgctgagctcaccttcagcttatacctggcatctttcctgaattctctgttgggccttctgaggcacacaaaatgagctgacaagctgattttctggtatcttctgttcatacacacctggcccccactcgatgccaggcccaggattaagctgggcagtgattctcaagcctgatcccagaccagcaggcaggatcagcatcaccaaggagcttatgagaattgcagattttcaggtcacaccctagacttcctgaaacagaaactctggggtctatcagtgttttctcaagccctccagagacacacgctttagtctgagatccaccgtgctagggaatcggaggtccgtccaatcctggaaagagaggctcccatctccagtattggttgagactaacaccgctcctgcaactggggttggaatttcaatgcaggtagttgctgagcgggggccaatgagttgaaagccggagcaaggggacttgttttgttcctgcaccccgattttacttacattacccggggcctcgagggtgactcatagagattagccctgagcgtcgacccctcggcgccgccactgcacagcgagagaaggggagtcaagagagacgcttgagtcccttgactgtcctcccctacgagctctctgggaagagagccccagacctgcgaactctgggccgctctgcggccgcttgaacacttcgcgggtcttccgccccgcgctagaggacgcactccgtgacgggaattgcggtctcggccgcccccggcctcaggctttccgggctctgctgcctccagaaaactacaagtcccaggatgctcggcgcgggacggtcacgtgggaggggccgcgggcgcggctaaatagtctccatcggccattttgtgcgagaagccgcagcgccgcctcttctctcgcgccctcgcctcttcctccgcctcctccttcgcctcttcctgcctcctcccggcttccgccgccgccactccagcctaatcccaaccccagggcgaagcgttttcttatttatttccgttttctcgccactacagcctcctgacaaggtgatccgggcgggccccgcaggaattttatcccctcaccggcctcacactagtatcgcatgtccactatccagaacctccaatctttcggtaagatcccgtcgccgccgcctccctcccttgcccggcgcgcatctcggccttttgcccgcctggccaccgcccctaggggccccctttctgcccttcccgcacccctagtggggctttgtctcggcgcccagaaaatggcgacggggcccctggcgaccccttccccgaggacagcgccggactccgagccctcctctcggagccccggccgcgggccctgcgccaccccctgccccgtccttgacccggctctcgcctccgcttctgccccttgaaaccttggcgatcctatttcgtggactcctagatcggccctgctacttgcaaagggtatgccgggccagggaaaccagggatcggcgcccgttctctggcagctcctgggggcacttagggaaagatgcggatgcaagcctctgatctgtcactggccagtggttcagtcttctctgcttgcgtagcaatttgttaaattacgcctcttgatatatatgtaatctactttttttttggcaaggcacagttacggttaaatgattaaggtgggcgtattcgaatgtttatgttttcatcagaatgtaatcgagatgacgcacatttttatagcggctacaatattaaggttttctaaatctttttctcattagaggaccatattgaacgataacattatttatctataacagcgtttttctacaatggacatagctgttcaaatgtttctctttttgtgagagtatcttgggggttttattaatactccacccccatctccattcctaccggcaaaaacagcaaaggcactagaacctt

SEQ ID NO: 39918 - DNA, 1848 bp, Homo sapiens
agtcactttaacacagagatacagcttcaatttacaagcagccagttgcaaagcttcagaaaaggttttcaaaaaaacaggacaatgggtccactctgcagtctaggcctgatgttgaccctttttcacagtcctgctttgttttgaggctattaaaaccctgcttcatttaagttccatctaaactttacacttcctcaaaatcctgtaactttatattttccttcccctggtaaaatgtcccatggtgtctctggtgtgcaatctccctcattaaaaaagatcgatagacctggttttgctgactacaggtttgtccctggtggtcttaggctgactgggcttgaacagtcttgctcagcttcagggttcctaagattgcaaatttcaaaaactgatacaacaaacattttttcactcctaaatacaaatgcacctgtccacgttgccaggtagttatgcacatggctaccatgtcaatttggtcataactagggttaggtcacttctctggaaggttagttattaagaacaagaaagaaagtcagggttctgcacagcttttggtttgattcttgtactgacttatgtttctttttctttggggctacaggtaaatattttgtctgctaaactgacgcccccatcgccagtgtctgaacaaacaaaactgagacatatctagtcagctgaagctgacaaatacaggggccaatctggttacaggcaggcagtcctggcctcgtgacaccgcagagactgtgggacaagtggacgtgctcctactgtccctcgcatcccccatctgggccgcgggactagtgccctcaggtctatgacccactgcaagaacccaaagctcgacgcccgcccagcccttcacatccgtcccttgcaacaagcaagagaagaggggcgcggcttcaggggacgggcgacggtttacaggacagctcgtacacagtaccagctgacatcccctaagcctgagtgtctaggcccctgcctccacatttaagagccgactgcgccccttggtgattggacgtccggacgcaccttgagtagaggccaagcaaactatcgagcccgtccaaaacgccatatttgtaactgacgtcatcctcatgttgcctttcctctctgtgattgaggaaccaatcagttgggtgtagcagacggggcgtggctcttcaggtagaggccgaaggggctgagagcggtcccaggcggccatcttgattcctggcatcactctcaacgtgccctccctctccgtgattggacgagcagggcgggccttccggaggcacacagccgaccaaccagagatctgcgcgtgctcgatctggtcatctgttttctgacatctggagccactagcagttatcctgttcattcctgggcgcctgcgaccttccgaaggaaacaagacttgcttggggaaagttgccttgccagtatagtggagcttggtagaaacttaaaaactgcctggggctgcctgggatggggatctcgagatgcttgtggggagcacattttaggaaacagggggctcaagctgcatgaaatgctgcgggaaataggaatgagagacgcagaatggtcggagaaaaaagctaggaaggtgtttgggagtaagattttggagtgccttgaatgccagactagggagtttggactatatcctgtaagataggggataaaaatcaactttaaacaggagtgatataacaagataatgtactttagaaaataattctgtaactgtagggggagtcccaaagtgtttctcaaattgtgttcggggaagttcaaagtgtgtttgagagcttgtttttatat

SEQ ID NO: 39919 - DNA, 1863 bp, Homo sapiens
aaagaatgtaacgccaggcacggcggctcacgcctgtaatcccagcactttaggaagctgagggaggcagatcacgaggtcaggagttcgagaccagcctggccaacatagtgaaaccctgtctctactaaaaatgcaaaaaaattagccggccatggtggcgcgcgcctgtagtcccggctacttgggaggctgaggctggagaatcacttgaacccgggaggcggaggttgcggtgagccaagcccccgccactgcactccaacctgggcaacagaccgagactccgtctttaaaaaaaaaaaaatgtagcgatagaaggacatcatgtcggcaatttcctttcaaatgatatagcacatgcaaaacgttaacatttgtggaatctagaagggtttgtgggaattatttgtactagtttagcaatatttctgtaactgtgaattacttgaaaatgaaaggttaacaaagttactgagattaggagagaacgtgaggagcgaacagacctagccatgaataaccaacaaataaaactcgaggaaataaaaaggaactcaaatggcatgcgaccaacggaagacatagcttctgtactcttaaccctaaattactaagcgatgaccctcctgcagctttctaatccaaatcaccaaaaacaatctcgccgcccaactttgccaaaaagcaacttaacgccagccgactccgccatgttttcccagtgagcttgcgagcgcgtgcgtacgcacgcacgcacgcacgcaccaaccaatcggtgctcacgtcggtgactcgttaccgcaggggcggtgcgttcttctacacatgcgcagggttgggcgggtcttcttccttctcgcctaacgccgccaacatggtgagtcttactgttgcgggctccggggccgtcgaccatgccgctcgacctccacctccgctgggaagctgaggcgccaaacggctcccagagggtcccgggaagcgcatggtgagggtccccgggccggctgtgcagcggaatcgggcccttcccggactcgcgcccttcccggactcgccgctggcgagcgcgtggagggcccggcaggcctggcgcgccttgggccacgcgtgcgcgcctccgccgctggagctggatggctgatgcggctcgtggtccgagagccttgtcctgccgtgtgggccttgcggacctgggagctggcgggcgttgggaaccgggcttaagctactgaggcgtttgctgatttcgtccatccaggttggcgcctggctctcgggcgtttgttccctgcagcattctttttcgctgaatttaaccatgttgtctttagctgcagaaggtgacatatgtagcgagtatttctaagtaagtttcactgtcctttctcctccaattttaggtgttcaggcgcttcgtggaggttggccgggtggcctatgtctcctttggacctcatgccggaaaattggtcgcgattgtagatgttattgatcagaacagggtaagtgtcacaactttttactaaacatggcagtggacatgtgccctgcagatggcaataatgaattgtctcgatggctgtgtaagatgaggatgctatgggtagtcgctttattttaccattgaggaaacaggtaatggtacgggttttaagcacagcctgaagttagctattagtattgaatttcagtattagccacttaagctagagccagttataggctgaaacgttggttagttttaaatgagttactatacgtaaagtgagtttagaacagatccagcacgtagaaagcacttttgtatttactgctgtgtatttgaaacaagcaaactaaggagttgaccactgacta

SEQ ID NO: 39920 - DNA, 1557 bp, Homo sapiens
agtaagactccatctcggaaaaaaaaaaaaaaagttttagtcagtctcaagatctctgttttaatgttaatgctggtccgtagtgcctgaattccaagggcataacgaggcaagtccgatcccctgcttcccatcatggcctgaactagattgccaggttttctttggaatgttttggctgagagaagtggtccattcagttggttgggggacttagaattttatttttggtttacaaaactgttgcatgaattgactcagttaattcactgaatttataaattacaaacttttaccattctcaactgataaattgaggcaacgatttaagtataacttgagcaagtccatatagagtggagccaggaacgcagacaatgagacaccataccccatggtcttaggtcacagtcattcagtgggagacaggggctataaattcattagaaggttaagttaggaattaagtaattaggtaaggaattaggaattcagttaattaagttacaaattgttaaatatggaggaatttatcatgtagttggggtactaagacataagagaaaataataaagaaaaacaggagcggccgggcgcggtggctcacgcctgtattcccagcactttgggaggccgaggcgggcggacagcttgagctcaggagttcgagaacagcctgcgcaacatagcgagacccccgtttcaaaaaacacacgaaaaaattaaaattaaaaaacaaacaaaccaggcgcagagcggttgtggagaagggaagcgaagggttggagtttcgtttcgtgggaaccatagagaagggccagcctcccggcttcctagagaggctgtagggaccgacggccggccagctaatgcttccgtcttggccaccttgcgagcgctcgggttgagtttcccgggcttccctgactcggctacctgttctggaggtcaggctttgggcccttgcagaggtcgccgaggggcccgcgccgccgccagagcctgggcccagtccccagtcttcagagacgccctcgaccttcctgctccgaggagctggcctgatgtcctcgggtcgcggtattcatggggaggatgggagccgtgactatagggtctcctgcttcccagggtggagcgttcagatcccggttaggtcttcggtcagcatcacccgctgggacattaagcgtcttacccttgtcacccggggctgggtcaccacttatattttgtcctgcagcctgtggtttgtttaggggtccccgttatatcctactttctctccagagacttgttttgggtttttgccatgaacactagaagcattcaatacaaactgtttagtaatgcattcatagtggggccaagaattttttttaaaaaacagccacgaatccactgcagttcttgactcttactttacagatattctttctagagtttccagtgtcaccaagcagatctataggagaatatgcagagggagcatttgcaacatcccatgaatcagtggagagggtgaatgacagcagctagtgtgccaagaatatctgc

SEQ ID NO: 39921 - DNA, 2247 bp, Homo sapiens
agaagatttaactttgattaagtccaatttatcatgtttttttccactggctaatactgtttagaatttgtggtgtatatgtatgtacgtttatgtgcacccactcatggtaaatgttcattttaataggtttagcgaagggacagtatgcacatgtatgtccttgtcatgccattgtttctggaaatctaattatttaaaacaagtgctgtgcataaactttaaagtgaaaatactatagattttataaaatgaactgtttctgtgacagttaaaatctctgtgctaggtggccccacaatggctcccaatggttctcatatcctggcattcaaaccttgtgtatctcttcccacactgaatcatgactaatctgaggagaatgtattgaggaaatcatgatgcatgatttccaaaactaggtcataaaagctttggccttggcctcttggattgctcactttgggagaaagctacatgccatgttgtgaaaaccctcacatgggaaggaactgacgcttcctgccaacaaccagcacccacttgacagccatgtgagtaaaccaccttggaggtggatcctccaaactcagtcaagcttcagatgacttcagccccacatgacacctgactgcaacctcagcagagaccctcagccagtaccacccagccaagctgctcttgaattctgggtccacagaaactgtcaaaagataacaatgtttattgtttttagccacaaagcattagagtagtttattatccagcagtagatacataatatactctccatggcaggacttgttttgaaagtggtggataaatctaattcctgtggaaggaataactaaaatctgtttccaggctgggccgggacacacatcccagtacagggcaggaaagggctctaagccaaatgttaatagctctttcgctaaacttcgaaaattgtccttaaaaaaatctatttccctaaagcacgccacatattggagtcccagcagcacctattttgtgtcttcaaaaaacacaattggaaaacaaaacaatacaaactcacgagtacatactatgtgccaggcacaactgtaaataatttacctatcaattaactaatttaatgaattaaccctgaacagcctcaagaggttggtaccaccatcataatacccatttaatagacaaggaaaccggggcaaagaaacttgctgcaggtcacacaactagcaagtggtgcagctgggtttctggacctacgtagtccatacacattcggccttctgagtaatgggttcgcctttccccacacccacttttcccactgcagcgcacccacacaatccagacagttttggcgcatgtgaagggcgcgatggtcccttcattatctggaaggacacccagagtggcaaatgccagataaccacgaataatacccaggatagtaaccattctgtggcctgagctggccagacgtcatgccccgaaggagctaccaggtgtgggcgctgcaggacccctgcctggggccgcccgctcgggcccgtgttgtctcaggcagtagggacactggcgctgacggcgggggtaggaaaccacagagactggcaacttcccaggttcctagagaggaggggcatggaaaacgcacttccggcggagggtctcaagctttccccggtgtcggcggcaggtggaatttccacgctttatctgcgcctgcgccgcgcgggattcgcggtccgagctgaagaggttcgcggtccgggtaactgattggttttcctggggcttgttctgcctggttttgcaacccctttgctttttggggtgaggagttggcggaaaggagaggggcccaagtagcacagagggcatttgcggggtgcgaggcagcatcaatctcaccggtgcttctttattttctcttcagtttcacttctccgaaccctgaggcagtgtgtgaagctgggacgccagccatgttccagaccgcttggcgccaggtgagtgagcatcctctccctccctcccaccctttagatgtcaagagagagcaggtgtcacctctgcattcagatcttgagttgtgtaggccagtggcttccattgtgcatctgtcactatgagagggatggagaggtgagaatgcccaaattaagactagaaaactagtgagtgtggggggattggttgggatttggcatttgaagccagcttaaaaataaaaattatgaaatgtggaaa

SEQ ID NO: 39922 - DNA, 1885 bp, Homo sapiens
tgactggctcatgttcagaagcttggagtgaggctgttgtgtactggttgattttcagagtacgtgtactgatctaaaattatgtaaattaatggcaagtacttgttagtgacttgggactttggtcaaaaaacagtcttttcctttcctgaatatgaaaagtaagttcttttaattagcagcctcccctcttcactgttttttcttcctgcagtccaactaacagaacagaccataaaggtctgtccagatcattatttatggaagtatgagatatatatatttcagctggtgttaacattttatttaagtgccagttactgagcagaaaaatagctgtaactacgagtttttgtaatttattggaaaaagctaaatataagacatttagggtgtcctcccaaagtcaacacaggacaagatcatttaatataggacatgtcctgtgtatacaggatgcctagcaactgtatgtagccacgggtgttttggttgttaaatgaatctgtcctaaaaggttctacgcacatctaggtccttggaagggagagggctaaaacggcgagtggaaaccatggtttccctgaggactgcccagctgaggacccaagcaagatcctgggcttgggcctcttagagatgacaaagcaggcgccattctcccctcacctgcacggcccaggcttcaggtgagccacggggccaaggcggccaacagctgaggcgcagcccgtgaactgggggcccacttgtgcctagagggcgaggtctcggtagagccaggctgtatcagtccgtgacactccagccagaggcgatgccgacggctgccggagaaagccgggcttagagcgccacagttccacgcccgccgccggcctctcagcccagccggtcgccgcaacctcgcctcttccgcagggcggggccagccatgaaaggcggggcgggtctggccacggggcgaccgagatggcggcctccgggggcctagagggaccctgggcgtgcactcgcccttccggctcggcctttagttagtgaccagctcctcggcgttctgcagagcgtgggtttcagcgagttctacgtgccaggtccgcccggtgccggcttcctcgctgcccctggcggctcgtcagcccccactacccctgaacttggtcccaatggcggcccgcccctccttcacccggaccgtgggcatctgggcctcgccgaagccgtcaaggtggctgctcgggcttctagagcccgtgtccagccctttgccaccgaggcctgatcctcttttctgccctaaagaacttgccctgacagcctctggctcccggtactgacgtttctgatgtttggggttgcctgttttcttgggtggagtgttaagatcacggttgggtggggtctccggtcagcatcacccactgggacgctgagtattttacccttaatccgcattcagccaccccagtccctcttctcctgaggttctttcttttgggtccacgtcatcgtccctgtaagcattctgtaaagactctttacgtttgtagagacccaacacaatagggacagggctcttgggtccctcagtttacccgtacgaatgggctcaaaaaaagctcttcggactgagcaggcaggtggaagattgtcctgaagactaggcagaacaattcataagaagtttggggctatcagcgtgagaacaattagagggagtcctagtagaatctccgtgcatccagtgctggaaatgtggaaactgggagggccataggttgctgtaggtggtggacgacagggtccttagcactcatggctctttttctcttagctcttgaggatcttgcttgtccaaacccagaagacagtgcatgaagcc

SEQ ID NO: 39923 - DNA, 572 bp, Homo sapiens
cttgcttgagaggtaagtgggccacttaggagggttcagaaaaggaaggaaaacccaaaggtacactacagagtcttaaactaacaacgctggcagaaaaccaaacgccctcaggagtgtctggtcgttcctgtgacagccaggactaggcaggccagagggcccagatgagcgctggccttgcctgtagcagcaaggctggaggtccttcacactagattaaacacagatcacttggaaggcccttgcatgcccagccccctctgaaggtcactgatcctgagtgtctggcactgagttgtagctgcggccaaatgggaagtgcctggtcagaggttatgttggcatggtgtttacagagtcagtccctgtgtgcggagacacaacccaaagcggccagggctggtggagaaatgcagggccatcaggagattccagaggccatagtgtgatcaggatgtttctcgctctacaaattttcctgagccctggctcagggcctggtactctgcaggggcctgggatcaagaagcctctcctaactgcccagcaggggtaaagacccctgatcc

SEQ ID NO: 39924 - DNA, 678 bp, Homo sapiens
gacactgttacttatgcaattccatcagtttcttgagagaggtatgatcctggggggaatctgttaatagaaacataaatctaggaaggcctcagagcctctcatttcacagttaggtaactaaagcccagcaaggttactcacaatgacacatccaaagtggcagagccaaggccagaaggaaagctctgtcaaggaaggcacatccttcttagagcagggctcactcttgcatgcattccctgcttccctttctttctcctcctctcacatacttccttgttgcttttgttgagcaggagggctaaatcacagccagttttcagaggtcagtttccagggtaggcaggtgctgaggttatgcaactacatggtgaatcattctggaaggacagctcaagcacattctcatgtggtcagctccacaggatgtggcatttttctacagctgcagagaagctggaacaatcctatctgcaggataaaacccctcttaagagttttaactgttttaaccaagcctttgaggagctctccgcgcagcaactacaacaatcctatgggcagccacgggggatggaaaaaccctttacaaagacgatttaacccccaagtttgggtaaataaaatgtggatctaccaggagaaaataaatatccaggaaaggagccattcctt

SEQ ID NO: 39925 - DNA, 1086 bp, Homo sapiens
tactgtatagtatattgcaaatgggattagtctgctgaaaagctaaccctatgttccaggaaatttgactttccatcacaaatgatgctaagatcaggccccatgccagagggagaatggcctgagtgccaggcattcacccgaagggcaaggtctctggaggctgctgcacattctacagggcggagtcagagcccttgcttggaaaggggactcctgagccctggccttgggtgtgccccaccccacccccattcagcttgcaccttccctcccccatctcctagtcccaaggccaggcatctagaaaagctctctccttgttttatctggcagaactttgggacaataattggactgagttcaactggccaggaaaccaaagcccaacagaaaaatgcctcatgagtcctgccaacctcctgctccttgccaggcccagtgccggacaaacagccctgctagcgtttgggtttgcgagaggaagtacattccgtatgtggaagctacataatggaagttatgtacttttcgggaactgtataagcaagcacaactgctgctcccattatgtggctcatgaaagagttttcacctcctgggctggaagggagttggtctgtctgcaacaaaggcgtttgcctctgtggctttctgaaaaagaatgtgtgcgcttgtcaaaacagaactttcctgcgtacttggaagagtgggcctgtctgcctgccagaaaggagcaaggctcagtttggttaaaaagggaaaaaaattccactaagcagccccattagccactgctcagagcagccttcttctctcacaaagacatttgttcactgttgcaaagccggcttccctagcaatttcccactactgcagtttgactcggctggaaggtggagagctggcattagggatgagtgttttcccatcatggaaaggttaaacaaaacttttctctgtggtggtccagagccccagggctcagagaaatatgaatactgtgttggtaaatgctctcactatgtttttccgatcattttttttttctccaaagtaggctgctgttattcctctaatggtagt

SEQ ID NO: 39926 - DNA, 1816 bp, Homo sapiens
ccttctttccaaataagatcacattctgaggttctcagtgaacatgaatcttgttggggggcaggtattcaatccactctcacatcgggattagtagatatagttatttccatttcatcaatgggaaaggtgagacccaggaggagatgaacttgccctgccactgaactgaacactgaaagagtttggttgaggacttagctcagtctgatgccagctttattctctttctgctgtgtcatgctgcttctagaaaaccaaactgcaaactcaagtctagaaagtaatgacatcaacatttatccatccattggcttccagaccataccacttggaggcaaaagatcaggagtaagtagataaattctcgtagaatatgagaattttgagctcctactaggtgccaaatttttatatgtcccttaaatagccacaataccttatgaagtgactatttgaggtcacttcattcagggatgggattgagactcaaagattttgacttgcccaaggtcacatagctagtgggttaccgaactcaaattttgtttcagatattgtgttgcatttaagttcatgatgagctcatcagtggaagtgattatgccatgtattgcaatattaggtactccatcaggacctaactatccaaccatcacacaatggtgagagggccaggatcattctcctgtagggtcctagttctaactagtgaggtgaccttagacaagtcaattttctgggcctttgtaataggaagagctagcactggacaatgccttcattgctgatgttttgtaagcatattgtatagttataggaaagtgcccttgcccatatatgttaatatttgctggagtgtggccagggtaatacaaagtatgttctcactactgacttttcacccccaagttaatagttaactttgcctccttgtttaactatgctgtctgttggctttggtcagaaagaaaaattctgaaacacctagtggaacggtgctaacatttgtctttcttcacctttacttgatgtggtttatttctattaagttaggtcaggatagcttttcaaaaacatgatatttcaaaaacatagtttagtgtaacacaatttaccatataaatctctgaacagataaatgttcaaaatagaagtattttctttatatgttcatggtatttttaaaggttagagtcatctattgcagcaatttggaaaatccttctttacaggctgctcagtaaaggaaaggtctatggccgcactgtgaggtgggaacagtaggaactttttttttttccagacagggtcttattctgtcacccaggctggaatgcggggaccacatcttggctcaatgcaacctctgactcccaggttcaagcgattctcctgcctgagcctctcaaagtgctgggattacaggcatgagccactgcatccagccaacagtgtgaactttggggtcatgcaaacctttgatcaatttgagttctgtaacccactagccatgtgaccttgggcaagtcacaatctctgagtctcaatctcatccctgaatgcacctcagaaagtcacttcataaattattgtgtctataaaacggacatataaaaatttggcacctagtaggggctcaattaatccactcctcctcctccctcctttagtctgttgttttgtggagtaaaaatccaccattttgcaaatgtggttaggaccacacgatgtaattcccttctcttccaagtctactggtgaagtggaaaaggtgaatctatttgtctcattttgattaggcctcagggaaggc

SEQ ID NO: 39927 - DNA, 1701 bp, Homo sapiens
taacaaggagagtaaataagcaaacccagacaacacaagccctgagcaagggtcacagaagcctagcctagcattttagcaattaagggtacttgtccataaagcacttaaaaatccatttagaccatccaagtcggttcaagctctttaatcttggataaagtaaacaagattgtttttaaggtttttttttttttttctattttaaagtaagaatattggaagagaaaaaactaagacactcaaggccagacctttggaccccagtaatgtgtaacagctgcagatgctggtgagaccttttggtgatattttcagtctgctaatgccagctcaccctttcacagattgaaaacaactcatctctttgaagtacccttttcaattgcacctcgaaaattccttaagggcaggacccagacattattctgtaccccacaaagtgtagttcagcccatggggtctcagcaaatgcttgttaagagatggctcgttggaagcagcaggctttgccctcctcaacaatggacaaatctcaccacagccctcaggcactgcactatgcagccaaaccaactccctttccattctgaatctctgcctccctgttttgcacatactggctacacacccgaagcacagttctatctttctttcttcattctatctccctcagctgaagggacacctcagaggagctttccctgacctctttggcagttccctcgtttatttttctgctaccagtctcttggcagtgagttctggaaggcatggactactacatgtttccctgtgtttatttgttcaatgtctgttttcccaccaaactccaagaaggcagggacaagtgctttattcacctctgtatccccaatgcccagcacaaggcctgccagcgtgtgtactgagttgagctgaataacttagacatcaagaagaccaggctaaacaaatctcaatttattctcccttccagttcaagtcttaaaggataatgtgtcctttaaccaacatggttcagacagctgattagtcatcgaaggccacaaaactccaagtttactgggtgtgacactccaaagtatggatttcaggagccagaggagaaacatcatggggttcttgtctgaacaatgtgtacctacaagagaatttccaagaataggagatggaatgtgaccagactggggacagcagtgtctatttctacttgggaaaattgttcaatagagctacagtcacacctccactttttaaagttctttttcaactggaaaatgttcccctacatgggggatttcctgaagtcctggtcacattccctaagtaggagtgttccggagaggccagcagcctgcccctgtgtgtgtgctgacaggtgtggcactgttaggcagcaatgtgctgaacttcagacccccccccggagaccaaatacttcaaagctgcttggagacctagaaacacaaacaaagcatttaatcttgaggccctgacacttttgcaaggtagaaaaatgtcaccaatggaccacactccattcctctacttaggagacaagacgttgcaaacacacagctttgaggctcgtcatacagcccctttggattttgttttgttttgatttcctgttcagttaggatagtctttgttgaaactttttattttgaaataattacacaggaagttgcaaagata

SEQ ID NO: 39928 - DNA, 1876 bp, Homo sapiens
tgtccctgtggggacacttccccaccaatggatcacctggtcattgctgtccagtccacatgacattgatggggaaggtcactgctattagcctcccttgaccgatgtcagggctgtaaggatcactctcctccatcttccttccaatctagccccttgtccatatcctccctctgtggagctcacctgtgtctggaaggagttgtgcaacctcaagtggcctcagtgaaagctgcagttgaagagagcaattcagttgaccacaaaggaatgtgacagagaatcatccaacgctgcctagaacatctctcctgctcacctcacctggcatgctcacatgcagccatgtggtcagggcaataccgaggctgagttcagtgccaccctgtgctgccccttgccggtgaacttgtcacacttgtttacacatgtttgcaggcctctttcttatgggcatcagcagcttgttgaggaccattctatgtcttcattttgtgctcagaacctaatgtagtgcctggacacaaagggttctcagcaaacacttgtggatacaaaggagggagggagggagggaagagggaagtcggttgctaggagataaaatgatttgcttatagcacagttgccaaaaataagtcacaagtggggacttcccagaactaaccgttcagtgcaatacttagctgaaatctattgcaaaatgcagtacttacttaggcacttacttttgtctttattgttttttaagaaagagatgctccaaaggtcagtgactcagaccactaggtgacttggctgtggtttcctatgagtcaagcctaccagacagcagaggacagaggtgaacaggaaactgggccagagaaaaaccagagaaacagagagtcaacacagacgtcaaggaggcttccgcccagctctctcaggccaaaggggcagacaaacccgtgaactcccagatattcatgtccaagtgaatgcagctgtacgaacttcagcttgaaaacttctctcaaatagcaggtggggagaacaggtagtaaatgcctggggttgtggccgcttccttccccagcagagctctgccccaatgagaacacaggaagggtagataagagagcaaagtgggcagtttttcttatttatttgtttgggtaaaggaaaaacaaaacaagatgtgaacacgcatatcttcacaaactgtaaaatttatctctgtcctctattccctgcatccttctccctactctaacatcttaacaatcctaatatttgcctattgttacacaaaatgtacgccagtagatatcaacataccaattaaaaaaaaacgaaaaaaatactttgctgtttttccttgaaagcacaatgacatgaggcatctttggagagaagaagctgccacaatccgatgcctcctcgtacctgctactagctgtgtaggcttgtctgatctagccccctggatgtgaacaaactagagcaacagggagaagcagagatgcaaaagagttaatcatacaaattgctgagtgtgcacaggaaaaacatactacatttgtaattgtgtttacagtgtacaaagcactctcccatattcctcataatctaacaacaatcctgaaatcatcactatttacgatgcagaaactgaaggaacaataaatggcatgtcctatgccatacagctaataccaggcagatcttggcattgaactagagctgtctgagcctagaccaaatattgtttccaggattctgcagcaaactctaccaactaggtacctacagcctcccctaacctgccttcggtctcctgagcagaagtgtttatacctcagtcccagcatgcaataaccgtaacaggtaataa

SEQ ID NO: 39929 - DNA, 745 bp, Homo sapiens
gctaccttcctctccagcctcagccctcaagattgaaagcttccagagcacagtcatccctgttctttcctaaatatgaggcagaaacaccaatacgccacgccattgctgacctccgcacctgtgcccacgctgcacagggaaggtgtgagccttccctttccctacccctaatacttattttgcaaggcttgctacacttctcttgccttccaccctctttacttatcctttcctttaggaaaggatacattactcatctttcctctggactccaaagtgcagtgtttcctctgggctccttccctctgggctccaaagtgcagtgttcagccttgtttaaacacccactgcatgatgtaatggttggttaccatacctgcctcccttactctgctgtgagcagccagcagacagccacacctcactcatctttatctctcacgcccattcctatcagctttccctgaggctcttgagtcatatcctattaacatatggagaagattcttaagtcagtaggctacgtaatagtgtgtctaagtcaacaagtgaaatctttagaaatccacatggtggtagagagttttggaagcgaaggcccggaatgtggtgtgctagatgacacaagcacagatgatctgagaaattaacttgcataatgtgcctggagtgaagtggacattcaatgaatgttggttgaaaccacgttttccattggccttgacttctcatgtgcctatag

SEQ ID NO: 39930 - DNA, 2934 bp, Homo sapiens
atgaattacaaacgtttttaaatagaaaattagttaaaaaattggaggctgcttaatcgatagctttctctataaacatacttggatttcacaaataagtaataccgtaaaaatcttcttctccaaagaaaaatccccacaaataaatctattgatacctagtgacaagtggaaccagataaaaatggaatctataagaattaacctaattgacagcgctctggagctaatccatttccattagttatttgttcacagtaggtactcctaaggacttgttgaattgcgggcttggcgcccgttctacggagagttcacagccttcgtgagtggggacagaaggcggctcggcccggtgattcaggtcgaaattcaagctgaacagcctgctgagaggtgggatccaccatccggacagtggggggctttgggggtgctgtgagactgggctgcgacccaggtccagcagggagtgtgcggcacagaccacaaggtcggcgaggccccctaacccgcgcccggccgggaacccgcagaccagcgacggggcagctgcggggccaggagcgccccaagacgggcgggcgctgaacccgagcccctgccgccgccctggccccgaacttccgccctcccaggacctgtcccggccgccccgagcggtactcgaaggccggggccgagatgccaccttccgcaggccgcgggaaaggcgcgccgagtcctgcagctgctctcccggttcgggaaacgcgcggggcgggggcgtcgggcttgggacaggggaggataccagggccaccttccccaacccaggccgcgggggcccggcctccccgatgcagaccacagcgccctcacgggctgccctcaggccgcgcagcgggcagccgccagccgtcaccccggggagcgtccgtggggtgcccaggcaccccaccccggcccggggcgctcagacggcagcagactgctgggcggcgcggggactactttccaccgccccctcgcgccccgccccttgtcctcgcgcggcggaacgctccgcgctgcgccggtggcggcaggatacagcggcttctgcgcgacttataagagctccttgtgcggcgccattttaagcctctcggtctgtggcagcagcgttggcccggccccgggagcggagagcgaggggaggcggagacggaggaaggtctgaggagcagcttcagtccccgccgagccgccaccgcaggtcgaggacggtcggactcccgcggcgggaggagcctgttcccctgaggtgcttgggcgctcctttccttatccttccggggctgctcccgcttcctctcggagccaaacttcgtagcaggcgcgcggtccgggcggcgggctgggcgcagccgggaggcctggggttgggagcggggagctcaggtgggggacggtgagggtgggccgcgcccggggcgcggagggcggcggccgggcccgggttccggtcgcgctgcctctctggggccctgggggcatcgcttgcggggagggggcgccgcgggggcgcgtacaggagcccggatggcaggcggggtgggggtgggggtgggggtctgtggtttccgtccggggctctggccttggccgagtttgggggagggacccggtgcctcgggatgcgccgggccctgggtggggggcggggtggggacggggggctccgccttctcagctcttgcggcgagttggggttcgggcgctgaggcagagacgccaccctaagtcccatcagtcctggggatcggaccagtggactttctcttaagatttcctctttcattcttaagaatagaagtgttattattttttttaatgccctggctatgtgagtttgaatcgaagcaactttaaaccttagagcaactaaactctaagtgcagcgggtgcgatgcgtcagtagggtgagcacataaaaaatccatgtcttgcacctgtattttagcgtactatgcaggtgagtgaaagcagtggataatgtactgggagtcttatggatttatggtagtgggtatgagaccctggtgaaataagggggtggaggaaggcgaaggtgatggcttactgtttcttaccaagtgaactgcaggattcagcctctgactcagaccgcttcgagaattttgttcgtagaaataatttaaatttattcaaatagtttgatggcagctaaaattgaattatagagcacgttttcttttcagcggagtgaatttttccttcgctccaaagctggccaaatggaattcaagcattgcaacttctttcagtgttttgtctggagagaggactttgaaccgagacttttcgaagttaagttcctatagcctgcttctgaatctgccaagcttgaaagctttggcagttgggtgtatgtagttgttgccttcgttctcttcccttttggagggagcgttgtctcctactttgtatcttccagacatctgtggtcttccccccacccctcgagtttgtgagtggtgaatgaagaaagactaggctgctggtatgcagaggtcggcaaaaggaaatcgaggagtggttttagtgaaatgagagctttgtatcatgaataatggtggcttaggctagacatcaacttgaagagacggcagcatttcctttcataaagtctaggctaatgtttttcagatcgctaagttgtagtttgtctggaatttaggaagccatttcagtatttgtcacttggtgaacgaacattcaataccttcagatgtcttcgtgttgacttgtattcatcctaagaaatagtaaatatagtctcaagtgttatttatgttatactgctggtttattctctgcttaaattattgacataaatttctactttggaggcttttcgtttgaactaaggctgtgcggaatttattttac

SEQ ID NO: 39931 - DNA, 918 bp, Homo sapiens
tcgattgtgtcactctttctttttttcttgtcattaataaatggtttgtgagggtggtaagtaagtttatccaactcaactttatcctgaactttatcctgagatagatagatacatagtgaagtaatttgttgtagcgatagagagggccctacttctctagatgcaatttgccaagtttctttagcatttggccctggattacgctggacccctaaaaaagtgtttcagccttgcacattgtgattagttctgggctttggtgggagaaagccaagcagactatccatctatctatctctaccccaatccccctcagatgatttgattccattaaagtaatgaaataaatagtaactacccctacctggatttggatttgaatcaccttcacccaagtgtgactcattgggagaggggaattccttcaactggactttgaactaataataattaaataaattaaataggtttaagtgttgatgtttatctgaacataatcagaaccagaatgagccttccacagtacctgccagatgatcctatcatcccggtggtaggtctgacaagcttagttcatctcatctcttcaggtagacctgtttgttaagacttgtgttttggtcttttaaaaagtaaaagaaagaagtgttttgtctttagggagagctctttctgatttactgtttttattttgatgatgattgatagtgactattaattatgagaaaaacatacattcagttctttttcgttaaaaatcagcttcatctggggaggcctttttgtgaatgcccttgctttgcaaaaatgaattcattgtggtctaaaatgtaattagggtttgaaaagaaacattcacatagctgatgatgtggtaggtctcaggttctgtctcatgtgtgataaaccaaacca

SEQ ID NO: 39932 - DNA, 797 bp, Homo sapiens
atggtcttcctgacttcgaatccttgatctcaaccatcaaaggacactgagaaagaatgaaggagtcagcagttgtagctgagatgtctaccagattgagagagcccgtgaaataggagtccaactgtagctgtgtttgattcagtggcttcatggcacagccgactacttcacattcatattcctcaactgggggtgattttgacccccaggagacatttggcaatgtctggaaacacttttggtggtcacaactggggataaggggaggtggactggcatctaatgggtagagccagaaatgctgctatacactccatattgcacaggacagtccccatgataaagaattatctgactcacaatgtcaatagtgccgaggttgagaaaccataggctagaccatctgatccatgctgagtcacgctgtgttgccttctcatgttacatcaggatgcctttctttgaaaggttactaaccaccctccccactggactacaaacccttcttttcctctctcctgaggttgaagtcttggaccagcctttcttccaacacataatactcttacttctgcggtacttgggtcagtggctatcacttggttatatcctgtcccagggtgaacttgtgcttcaaggtccttctgggctgcccaaggcagagaggttctggcagactacccttaaatgcctcacactcggcagggcatggtggcttatgcctgtaatcccagcactttgggagaccgaggcgggcagatcatttgtggtcaggagttcgagaccagtctggc

SEQ ID NO: 39933 - DNA, 985 bp, Homo sapiens
aacttttgaaaaaggtctagggacagactcatggatttaaagatgagtggcagccacagaaccttaaattaaattgttataagactattttggcacagatacagcccaattattgtgggccttggcctagaatacacggttatgactatattgaagcagaataaaattttggtgggcttgatttattagttcccttagatttctgatatgccaaacaaccaaaacagtcaattctactctatggagctgtgttccaatttgatattgctccaatttgctggcatttctctgagtctcatgtatctcgtggattcatgtaccaaggacttctatttatgtggtggcagggaagataaaagattatgagaaaagatgcctccatgacagctacccgactctgctaagcctttggatgcagtgcactttctactaatgattctatgtgggaatgcctgagacatctgtgctctacactgcccactaaactggctcagaggctaacattccaatggggccaaagtacagtgaactgggttgtcccacaatcctcatgagaaagacacaggcaatcttgtacagcctgtggtgcttgggaaacaccctagaagaagtgacttatctattacttcccataaagaatgtttggacagtgacaaagcagagttactcatgtgtcattgctacttgggctttggggatcctctggatcagtgatccattactacagaggagacctagaagttctctttaccttctgccaagttagaaacaatttgctggttgcaaagaacagttctatagcactttgttaagggttacagtaaagcactggtatgggttttgcttttgaaagtatttgtcttatttgacctgatatttaggtgattttgaagcaaaccattaagtacacagaaacaaaacattagatcaaaagatccaacttaaaaagaatgcctacaagatcaaagcctctgttcatcctctc

SEQ ID NO: 39934 - DNA, 1092 bp, Homo sapiens
ggccatgtagggatgaaccaagaataaaattaagaggaatgaagtctctctgtcctacccccaccttagtcctatttattcagagagcagaggaatcaggagaagggagaggtaaataaagaagggaaagaatctctgcctgttctgagctcagttttgcaggacaaagacattagctcccccaagaatgacaggacaggtccatggagatcactgggttggtccatggagctgccccatcttaggttcccttgcttgcttgcagtttttatctactcataaaaagagtagacaagacacatgaagcaagacacatgacacaagaggcgtaagtcccgatccactgtctttgagcccccatccggcaaggacacactgtcatctccaaagggattctccatctccatctacgctctctgcctttcgggcatccaccttgtcatgcagttcttacttagatacagacttgattttctggcaactacctcagtatttaatttatgattaacattactgagctcttgccatgggctaatcttataaactcaaagtccatgccctcaaactccagagtcaagcaggttaacagatatacaaacaaatataaaagtagaattaacttctatcacagatatgcatgtatgcacaggatgtaagggaacagacacgaagaaaacctagctagcccaaactggtgagaggaggtgttcgtgagccttgaaagactgtaggaattggccagttatgatgtggggaggggcaggcatgatagaggagggtaaggaggactaccaggagagcattgtaaaaggtcagtgtgacagatggaacagaatgatacagccttgaatgccatgctaagaaatgctaagaagtttgggttttaccctaaaggttatgggtaacctccaaggattttaagcaaaatgacacagaaagatttgctgttcaaactccaatctgattgtaacaggaaaaatgaactggaagaagtgtagtctagaacactgctaatcaaagtgtggtctgcagaccaaagatagcctacaaactgtcacaggtctatgacaagataactacagaaatctgaaa

SEQ ID NO: 39935 - DNA, 571 bp, Homo sapiens
gacagaagcttcctggatagcctacacttctctgcatgaatacaactgcatgatacttactggggaagtaagacatctcgaatgagagccagaagattgctgtcagaatcaacactggccttctccttgccatccccaaactcctggttcacgagtagagatgtggtttctgagagcaaccgcaagctaaagagtctccactccacttgaaagaaaaaaaaaatgccaagaatgtgactccatggagacagaatgaaaatagaatgtgtaactgatgcaattcttgctggtgtcatcacacttaccattttggctttgaaccaaggacaccaagggtggcagtatatagtcaacaacctaaaagaaagcatgtaaaagactcagaatctctatgaacacaaaactgatatcaaccactatctatattttttccacagacagaatccctaatcaaaggagtgaaaaaaagcaacggctaagtttatcctggatttaaactctccatgacatttaataaaccaccaagctcatttaaatctaaaaaagtcctcaggtcaaaatgacattatga

SEQ ID NO: 39936 - DNA, 1649 bp, Homo sapiens
aaatgctaaccaaacacccctgaaggctatattcctgataatgtacttgacaggtaaaccatccttcccaccagctcccaagtgcatgttgaggctgggacagcccaggcaaggctcctttcttaaacatctctcccacaagggctgggggaatgggtggactctcaacccgaagctaagttgaagggaggtggacgcaaacatgattctttctgcctacaacacccactccccacccggaagttaacatctacttgccttcaagacttacgtcaagaacttcctcctcttaagatcatctccagactctgtcagactaaatagggctcccagcatgcacggtgtacaacaccaataaagcactcttcaaactgtgctccaatattggtcatcccctccatcctcatcccaccccctcccctgacaccacagaggagccattcagagtaggacctgaatctggctcactactttctcaaagatggtatagccaagcatggtggctcacacctgtagcctcagctacttaggaggccgaggtgggagaatcgcttgagcccaggagtttgagaccagcctgagccacatagtggaacccccatccctaaaaaatgaataaacaaacaaatagatggtttatcaaaggtacttactaagaatatatgagtaaaccaaatagctaaaaagttttcttggggccactttttacatcactgctataactctattcatactatttttgtataaataaggtattttttaaaagatttgaacttataaaagtatttgtttgtggtacagaatgtcaatttctttagaacaaaacaaaacaaaatctgatttgtttttgtatcctagttatcagctgaggtcaccctaaacttcgagtttcaaataaaaccgtcagccctgtgtgctattaagcaatttagtgtcctttccaagatttctgggaatttgcagaggtttatttactttcccatgattcactgccaactctgagtttctacctcacttatctgctttttaccttctcctaactgctatttgcttctggaagcctgaatatactggtggtagccagactatataagacaatagaactctaacccacaacctctacaggaaccagtagggaagccaaaaccacaacctctgtagccattagcctgggatggttaggatttagtcaacaactgtcagcttcagtattttttgtactcttccaacttagggccgactagagaaagccaaaaatgttccccgaaccaatcacataggatgtcctgcttctaatgagcccacttccagtttcccctgccaaatagcctccaatcagggcacacctgaagtcttccttctcccactcccctccttgcctttaagtctctgccaaatgctagtgatgttggccaacttctttgccatagcaactctgaaaaaacaacctgtttgttctcatttggttggtctttgttgatttctacccaccagtgtaagtcatagaatatagcccctttttaataattaaatttagaagactcacaaattcttggtatgtataccagactttattgagagtctggagtaatggagggtttatagcagcaacaccaacaatttaaaattgaagtatatctgtttttaat

SEQ ID NO: 39937 - DNA, 487 bp, Homo sapiens
atatctttttctatagttttaactcttttggaagcacattcatgctctacatattttaaaaattagaagcaacaaaagaggaaggagaaaaagaaaacctaaaattgaaagcaaatggagacaaatcaactgtacttcaaacgaatattataaccacactaggagtggggaagggagctaatccaagtaccttatgaacacagtattgactatatactcccagtgttgcttggagatgacaagaggttgggaaggcaaagaattctgcaaacaaatcgtgacctcatttggtttgttttgatactggtttcagtgaagcaattccataacaatttattacaggattagcaaatgagaaaatgtgctgatgatgctggaagccaaaacttccacaaagggacacacaaatacagaacgggcaatggcaagaaagaactgtgtaggggactggatacaaagatagcagtgtgaactcatgatttcaaat

SEQ ID NO: 39938 - DNA, 1348 bp, Homo sapiens
cacaatcatgactcccgcaccagaagcatgagcatcacctgggacttaatacaaaagaaaaagttatcggccctgccccaaatttacggaatcatacactacggcggtagggcctggccttctgtgttactacacgccctggggtgactgggatgcgctcaagtctgcgaaatgccagccaaatcaaccccgagatgtaaccgatggcgcgcgccacactaagcactccataggtgctcctcctcgccgcacttcacagactcaattatcacagactcaggggcgctacgtagtcactcaccccccccccccccccccccgctccccaggcaactcgcggcgggcgaatcggcggctttcgcggcctcgctacgtccgtaggcatcagtccgcgagaccggctgggagcctaggaagcgctgcagggcggtgaagacgcggtccgctctgggaagttaagagatggcgtccataaagcacatctcccaagccgaaacacacaagcactctctctccccgctgcacccaggtcctagaagaggcgtcccgtgtgcccttaactaacgcccggataaaaacgggcggcttttttaacacgagcgcaaagcaggggagcgcagggggtacggggtccactggcagaaggagagagggcggccaggcgccaccacccacccgccccggcaggcctgcgcgctcttccgcgaccgcttaggcagacacgaactcagactcgtagctactaaaaccgccactgccacgcacctggtagctaagtcaagaaaagagtccagtccacttggctgctcccgcggttgcgcgcatctcggcctctgcctcaggacaggtccacaggcccaagaatgggggagaaagcagtgaagcaaagcggaacgcgcggaagaagccgaccagccttacggaggcgacgcccctccaggtttggattcgtccatacggtttccacggcagcacacagaacgccggaagaagctcaggaagccgactggctgtgcagtttccgttcctgttggctggggcccggaagtgagagaccacgagggcccctccctccacccaaagggcatcacgccctgcctttggacgagcccacaggccagagactggggcgggaagtgctggagtaacagtcatagtggtcggcccaccatccctctatgtttggatttgctcattccatctccatggcagcacgcagaacgctggaaaaacgcaaagcgctgattggttaagagtctcagttcctattggccagagtccgaagtgggagcccgtgagggactactcttcaatcttaagtgggtgctgaggctagagtgtggagaac

SEQ ID NO: 39939 - DNA, 3736 bp, Homo sapiens
tgagccaatcttcactatacacttgatgatctcttcaagtcaagtctatgccagtatgagaaatcaggttttgcagggtttagtttccttacacctttggttctggtctgagtcttcttcaagtcctcccaatgtcctctatgacccctgggttgaaaagaagtagactcagtagcctcaactggaaatgagatcatgtgggttgttccctgttaaaccgtccacaagtgatttgcataatagagtggcctgtgagctcttacttcctggatcggttcctgatcccctctctgctgtccgccagccccctgcctgtcaccctttggtggcatcttagtccaacagccagttccatcccctccagccttccccccgtccccggctccatcctccctccatttaagcctaagggcggctttgctaggagacagcccgccctgcaggaacagaacgcctggacttccactgtgttcacgacaatcagcgccccgggccgcgggggtcccatccttctcttagactgactctggaaggaccccgagaagtgctagaagtaaataagcgctcggggagggatgtgatcagcttttccggatccaggtctttaccggatacttctctgtgccccacggcgtgggtaaaagtgcaggggcagccgcgggcgaggaaggcggggcgcggctccaggcgactaggacgtggccggcgggcatcctggagggcggcccgcaggtggcggcgcggggcggcgggcggggctgggaagggggagggctcggcgcgcgtcgggcggtgacggcagcgcggaggggaggtgcaagccgcccgctcgcgggggagccatggcgagaggccgcgcggcggcgcccgcaacagtgcccgcgtccgcagcagcgcccccgcccgccgccccggggcccacccggccgccgcccccgcgcgccccgagcccttgacgcccgcgcgcctcaagcgaggcgtcccccagagtggggccgcgcgcgggagagccggagcgcagccttagcgtccccgagagtctcgaacgccccgacgacccccgcgtctcggaaccccggactccgagcccaggagcgccagagcggcaggcgggcagcaggaggcggcggcgccagagcggagcccccgcgagtgcccccgtgccgcccggccggctgcagcggagggaaccgaagccgccgggcggccggggccgggccgagaacgacgcggaggaagcccccaccgaggccccccggcaccgcgcctgctgccgggttgcgctccgtgcacctcttgcgggtaagccaggggtccgctcacccgcgccgcctgcgcctcgggcccaggggctggggaaggacacgggtgttctgggagtgtccgcgtgagatagtggcggcgtgagaggccgggcgccgggaccctgcggggacagccctcctaatgcaccggccgcacctgcaggaggccctcggagcccggaaaagtgcccctagggcatcgtgtcggccacgccgcgtggcctggattccgcgctccggcactccgaggtgacagtgaggcgaccttcaaagagcctggagctgagcgcgggcagcaccccgattcccactcacccgcaaaacttgatgaaaatgacatcatctgagcgtgtcagagagcagagagcctttagagccctcctttgcatccttgagagttaacaagtttactttgtcactttcttgacctgatttttaaagttcttttctagtctccaaggtcaagctcttgcaggtaaaaacaaatgtaatgaactgtatcgtttcttcttttgtaaagttgtgtttcaggaaagatgttaaaagtcggcctgctcttgaggctggtgctgggtgccccttccgctttaagcttgcctgttttagaacccgtggctgcacttgttcagacactgaaattagcgtccgctttgagagccttcagagtattcgtcgttggaccgctgatttttttttttttctgatatgcttcactggaactttatttgcttcaaaagtgtaaacgttgtcaatactgtctgtgagtgtgtattcgggactggtaaccttttctggagggtcttttgtttatctggaaggagagtggaggttaccatagggaaacggtctagttccagggtcctttccaatttccaactacaagagcagcgaagaggaaggtgctcagactaagctctgattagccctggagccagtctgcactggggagggtctccccagattgagtgaagggacaacaggctgggagcttgactggtaggtttggagagttggacctggagtgacagatggcgccttcccctctgtctctcggtttggaatggtcatactcggttgctctttgatcttggacctcagctttgtcacagaggttcccagcccagtgtagcctaagccagctggaaagctgagcccggctctgggggatgctgaatcggtttaaagcccttgtctcagggctgcgagtttggcaacagttgggtttcagcttggccccagcaccagccgtttcctgtttgatgccccagggaccagtttcccatccccagcgctcgcttgagggtgtctccactctggctgtgttgcttctccttctctgtggtcttggagtgggaaacctggactgaaattccaactcctctctattggctgtgtgaccttacttaacctctctgtcctgctctcccctctctgggagacaatgttttaaatggaggtgtctgtaaaagtttgactgaatgacatgggagcgttttcaggtctccttccaacatgattgggtttgtaatttggtaagctttttgagccccaacagggataataaagcatataatagtaattattgttttataggtttattatgagggtcaaatcaggtaatataaaagagctttgggccgggcatggtgacttgtgcgtgtattcccagcattttgggaggctgaggcaggtggatcacttaaggtcaggagttcgagaccagcctggccaacatggtgaaaccccgtctctactaaaaatacaaaaattagctgggcatgatgatgggcacctgtaatcccagctactaaggagggtgagtcaggagaatagcttgaatccgggaggcagaggtttcattgagccaagatcccgccactgcacttcagccagggcgacagagcaagaccccatctcaaaaacaaaaacaaaaacaaaaaacataaaaataaaagggctttcaaaaataatagagcactattcacattgaatggagttcttaaactttcactttccaaactaacaacaccttaaggtttgccatcttaagtggactttgttcctgtcattgcattctggttttttgtttttttttttctttttgagtcagagtgtcgctctgtcatcgaggctagagtgcagtggtgcgatcttggctcactgcggcctccacctcacaggttcaagtgattctttggcctcagcctcccgagtagctgggattgcaggcacctgccaccacgcccagctaatttttgtatttttagtagagacggggtttcaccactttggccaggctggtctcaaactcttgacctcgagtgatctgctggccatgacctcccaaagtgctgggattataggcgcaagccaccactcccagtccctgtcgttgcattctgagtccctgcctctgaccttgtatatagtag

SEQ ID NO: 39940 - DNA, 2182 bp, Homo sapiens
aatagggatataggatctcacttttttttgtctctctccaggattacagagataaagcatttatgcatatacagaaccacgggattttagaagttgtccatcagttcctctggttgttttggtacaataaaaaagtgctttttttagagatagaatctctgttgcctgggctgaagtgcagtggcctgatcatagctcactgtaaccttgaactcctggactcaagccatcttcccgctttggcttcctgagtagcatgcgtgctgccacacttggctaattttcttttcttttttaaatttttttgtagaggtgaggtcttgctatgttgcccaggctgccttagcttcaagcgatccttctgccttggcctcccgaagtactgggattacaagcatgagccactgtacctggccaggcagttctttaacataaacaacgtgtgctgtgggtctggattttttttatgctaacattctgtaagctctcagtttttaagttttgcaaaatgtagaacatatatgatacaacctactctagatacacagcctctagtgtaggctgcctccttttattatgggtttctatcaaataatttccagtttgagatttgagatgtgaccaaagataaaatgtctccttataatgttagaagtggtttggcttcagctgtattattgagtcaggaatttggacctttaggagcaggtaaacaatgagagcagaaactacccttgaatttatgtttgtctgaggaccattgggaaatatttcttggagagtggggaagacaaattcctttgacctccagaagaattgattgtcctcagtgtgatgagaaaatcagggagagagtgactgaagacagctcagctgttcatgccaaagggactgacggtccagattcatggtggaaccaggtggccgtgttctggctggagaacagcagtgggaagaggacaatgctcacgagagggacaatgctgtctcggtttctgcctgacttttggttgctactgtgttctgtggaacaaatattttatatcatgttgcattaccatctaaggttgacaagttaactagaacctttaatttcttacgcattgaacctttaattatcttagctccattaattttacttacatataccacttgtactgccagtaactccttgtagataaccactcttgtgacctctattaccataggataattgtgcctgttttgggcttcatgtaaattgagtcatatagtgtgtacttttgtgtctggtcttttgctcaatgttttgtctgcaatgttcatccatttgttgcatgtactagtgcttcattcctttttagtgtgggatggtattccattttatggttatatcatgatttgttcatacatttacctgtggatggacatttgttttttttccagttgggactatcatggataaagctgctatgaactaagtgtataagtactcatttctatcgggtatatgctcaggagtggatcattgggtcataagacatatgttcagctttagtaaaaattaagttttccaagtgttcattcttctctggatttggtatatgagacttccagaagaaaaaaagataactctgtaaaagagtatgctacatcttgtgtttctgaatacagggctcccacagtaaacttggtttgcctgttggacttccagttggggagtttggtaatctgatatcttaagagatctagtaagacagttatagtatcaaggggcattttttacttagtgtgagatccagaggtgtgggccttgcctgcactgaagaatttcaaacctgggaagaaaattggaggtttacttaaactaaagggacagattcttgtcatgttcggaagttggaattggcaagctttatactggagaattaaaaactcaaaacaaacaaaaaaccaaacctatgattcaggaatagcattataatgatttagaggaaaggtggggaggaggaaaatgagcaatttgttatgtgtatgactcactggtgctgtgtctgcgagtattacatttgggtgcagaatttctgagacaattggtttactggctttcttagtagagaataaaagagtgtcacctagacagtgagcatttcatttcaacctttgcatctagaatatattttaaataaaatgcagaatacta

SEQ ID NO: 39941 - DNA, 818 bp, Homo sapiens
ctctttcaatgtccataagacctgtagtgatgtccccatattttatttctggtatttgcctttcatgttaagaatgtgtctgttcaaagggagaggggaaggagaaaagaagaatgtgtctgttcaaaggactgctggatcagggtaacttagctcaagaaaatgagaaggggtggtttctggaaggggagaatgaaagccgtggaggaaataaagcatgaatgtgggggagggcgggggcggggactgcttctcttgctggctgccttctctctctggagaatctgctggagaaggagcagtcacgtgggtggtgagctcattaggctggggacaccagctgtgctattattagggcttttaaagtccgtggcagatgttcttaggcggtgttccagccttgttcacttcccacatatggcatgatactgtacacagaaaaaagagggactctttaacaaatagcttttccatgaaatgcatcactatttttttcccatgaacttttttcttttctttcttcctctgtctctgtttctttgtttctctctctgctgtttgttctttcttctttctccgtttatctttctccctctgtctctttcttgctttcctctatttttctgtattctcattctccctgtctctccctccatccctcctttctatacttccttcttttgtcctttgaggccctttttatttaatcctttgtgaaactagaagaggactcagaggcacatgaagaaagtttgtctattttagattaaaagtgagccttagcatttcatagaaagtataagaaatgtgggtaagtc

SEQ ID NO: 39942 - DNA, 828 bp, Homo sapiens
tgcaacctccagcctcttctcaggcttttcctctatgtcttattgatatccaaataaataaatatcaaacaaattaagagccagatgaataccattggctgtcttttgtattaatgttggcaacaagactattgtcatatcttttatttcctcagggtttctttttgctcccagtctggcagcaaacattttgtaaccccataaaacaagtgtggtaggctgcttttcttcttataatgaaactatgttgccattggaattaaaacactggctgccaggcatagcggtgcgtgcctgtcgttccagctactcagaggccgaggtgggaggatctcttgagcccgagagttcaaggctgtggtgagccatgattgcgccacctgcactccagcgtggacaacagagtgagacctactcttgaaacaaaacaaaccactgactggcttgtttggaaatgtgggaaggaatttttcctgtggagttatgatcaagtcagcttttttagaaatataaattctaggccagtgtttccttaaaaaccaatatttcgatgtgtttgttctggaagtattagcacatcacattcccagtgctttttaatgggctctgggtaattaccgcggcctcccatctcagccagtacagtaagccattcaagaggacagccggtgcttattacccagcagcctggcagtctgtgacccctcctccttggaaatgtgtgaggcgcaattagagagctctggtgtggggataagggattgctggggcataaataatgcaatctatgctgtcgttctgtgaatgtggtggggcggagcggctttg

SEQ ID NO: 39943 - DNA, 2662 bp, Homo sapiens
aaaccaccttctagtcctggcattctttgacctttgacatcatggtctataataccctcattctttccttctggaaatgctgtttcccttggcttctgggaagctacaccctcttggttttcctcctacttctccaaccacaccaccttaattgccttgtagatggcaattaagactggcaaggctcctggtgatctcgccaggccagtgccttggttgccatcactacccaaatcttggttcagacctgtctcctgagctctggacctgttcacccacctgtctgctcattccgcacctccatcgtagcctgtacaaacgcttcccggctgaccaccactgccattacccgttccctgccacccccaaagaaaaggatctgcctgtgagcagtgacatggagggcaccgctgtcctcagctgctcaggcaggaaccagtacgttttcctgacacttctttttgctctagccccttctggtcagtcacctcccagatctccctaattgtcctgttggacttggctgctctaatgttttctctactctggtgttaagtgaccttcctaaagtgcagatcgaatcccatcactcccctgcttaaaatcagttcgggagctccccatggggcaaaagaggctgctgcctctcctccccttgctaaagccattcagagcgttttcagttttctaatgggccgtgcttctcccttctccaggacttttgcttctgcagttacctctgcctatatagagaactctgcccacccccaaaccctacttgcttctctgcacagcctgttctggcagctccagcttgtgctggcagtctaggtatttcctgctcaacttttaagtcagacctacggttggcctgggaagccttccctgaccccaagtgacccatctgtgtcagcagttttgacagtggcctggcactgctgatattttggtctgcggccccttgaaagtaaagggcatctgtgagaggctttatttggacagtgggggacacagagatggctgacctggcatctggcacttgacccaaagggcagttcttgtctgtgtgttacaggggcctgagcttgttgagatcattactcccaaaagattgtaggttccatgagggcagagatttttgttggattcattttctgctatattctcagcactagcagtgcctcacagtagtgcctggtacatagtaggtactcagtaaatatttactgaatgactaaaatgtgaacttttcaatcttcacttagtgggttttcatgatacccggtgtgtgttcctcttacagctcttagaagttgctctgtctctctgccagggtagatagatgggcatggatttggaagtgggtactggctcattggagcaggctttctctgcagcctctctgctctttccccacacatttgtgaacctcttgaaatcacaagctgtaatcaccagagcagtgtaacagaattcctgggtcatgagatagccgtgactgttctgactcatgtcacacaaggggaaaattagcgtgtttctagtcctaagagttacagacttcctaggcttgactctgtaacagccaaatgccttttaaccttctagggagtttattgtactttttattttctatctttttgagacagggtctcgctctgtcacccagctggagtgcagtggtgcaatcatagctcactgtagcctcgaactttggggctcaagcagtcctcctacctcagcttcctgagtagctaggattacaggtgcatgccaccacacctggctaatttttatttattcatttattctatttttgtaaattttattatttttctttttttctctgctgcttgaatcatcataatttcttattattttttgtagagacaaatcttgttatgttgcccatgctgatctcatactcttaggctccagctatcttcccaccttggcctcccaaagcatcgggattacaggtgtgagccatcatgctttgaatttaacctggccaagtgcagtagataatgctgtggtaccacagagcagaaatgtgctattgttgtagtgtgataccatagaagctgcttttagagttttaggattcaagtaactgattagataaggttcatcatcattcttttattggacaaatatacacggtgtgtccattttagacccattttccttaattatcttattcactggcttatggattttgttttcggccttccctctaagtagaccagaagcttccagaggtcaggggcttcatctgatgtttcctgcagatgttcaggacctagagaggtgcctggcaagtgttgagtcaatggcaggcagggtactggggatggtgagcaggcatgcagatgcataaactgtcatggtgtttacagtctggtactatagacagacattaatgcaatttcacaaacaaatgtcaaattgtaactctgacagtttctgtggcagagaccactgttctcagatgactaacataagagctttggcttagccaggagtttgggagaacttgccaagggctaaagaaaaggtacccaggtggaggaagtctcgtgacctgtgtctggagagtgtgtgctagaggaaacaactggagcaaaattggaatcatgtctttctgtctctaagagcaggt

SEQ ID NO: 39944 - DNA, 914 bp, Homo sapiens
gaacccaggaggcagaggttgcagtgagcccagatcatgccactacactctagcttgggcgacagagcaagactcagcctcaaaaaaccccaaaaaacataaacccattgttctctgtgaggtggtgggtcagcatggatccgatcctaggtggtgggaaaacaccctttgcctaatgctaatgcgtaagctctggctgctgagtacaccttgtacagactttggagagatgggagtagggggcatttgctggacttgaatttacacctgtggttgggatccaggacccagactggggagtccagctcttatccccaccagcagttattctgtgattctgaggcagtgccatctggctaccacccttagccaagactcttttacctgggatggttagatatcaggctgctgtgtttagtaaattgaaacactttataatgtgctttattcagagttactgagttctgaatcaggcctatattccagggccattgctataattgcctattagcatatacagacagtttgaaaaatctgtttatttgagctttttgcttatgtggactttggataattgagcaattcagtatattacatagcgggagtccttgtgcctacacatctctgagcctgcagagaatgactctcttcaccctaccactctctttcctatgtcaggccggtatctaagccagtaatgtgtgttctgggccagtggtccctaaactgaagggcaaccagataaaaactggaaacttaacatgggtagcagattaccaaatttggaaccagaagctttgcttccttgataatcatggttttgactgagcaacctttgcaattttatatctttttgttgatttaaatcttctgtagagaacatttaaaaaaaaaaaaaagaccacacataattt

SEQ ID NO: 39945 - DNA, 430 bp, Homo sapiens
cacatgtatagagtcatgtaaccaccccaaggatacaaaatagttctgacaccccaaagaaactgcccgtaaaactctctctctttataaaactctctcccatagactttttaaaaagctttgttaaaataacagctttattgagatatgattaacataccattcagttgtcacatctaaagtatggaattcaatggttttcagtgtttacagagttgtgcaacatcaccacagcaaatcttatttgttgagacaggttctcttgctctgttgcccaagctggaatgcaatggtgtgatcatggcttactgcagcctcgacctcctgggcccaggcaatcctcccatatcagcttcctgagtagctgagatcacaggcgtgtgccaccatgctctgctaattttttaatttttttgtaaagatggagtct

SEQ ID NO: 39946 - DNA, 765 bp, Homo sapiens
agccatcatgtgagaattccattccgtgcaagtacaaatacaagagaatttgggaatgttcactttggcttgtgttatgctaagtcatctcacttctttcccatctaatttatgaatcagaacaccaacaatatataccagtttattaactaatgaatcaggagcaacaagcccatccatctacccatctgcatggatttgagctttattcagtagtactttgccttggaaatggtccaggttattttggaaacggatattcaattcaaatgatgacagccattggcactcactctggggctcaggagggaaaccacgcccttctaggctattgctgacgccatccctccagaatgcagctgtctcgggtggaggctctgggacagctgcttctggctaaggctgcccatttgggagaaggggacattgaaattgcaagaggagtcatggctgagagagatcctgctcatatgtgtggcaggaatcctacagcagacaagattttgacaatggacaagtcactcaccttctaacatgtccactttcctgtggatgaagtggaattttccaaaagcaggagtacagtgctgcctgttactcttgtgaaactctcaatctcttggtgaactactggtattataaaggagtgccgtattagcggaggtgcaaacaaaatgcttcagtgcttttgattcctttggctaaggataggtcttaattttgaatattttttttcctactagggccaatttcaaaaaaaatcaa

SEQ ID NO: 39947 - DNA, 1456 bp, Homo sapiens
caggcgctcaccaccatgcctggcaatttttttgtatctttagtagagatggggttttgccatgtaggtcaggctggtctcaaactcctgacctcaggtgatccgccctcctcggcctcctaaagtgctaggattacaggcgtgagccactgcgccctgctggaagctcctttttttttgttgtttttttaaccccttgcaaaatcagtgatttattgtttacaaagggcagctctgtctgctcgtgatctcctactggaagttacctgtgtgtgggtgagaatagtttcacaatcattgcaccagggagtggagaaggacttaccagggtgcacaaatccttctgcatttccacctgccctcttttgtacttcctggagtggtatagctggaaggcagtgtgttgaaggttgctcgatcccttccttgtccagatgaggggtctgaggcccagggacataacacagtttcctcagtgtcacacagctttgagttttagttaaggttctgagtcacagaaatgacatcggttgagggtagcggggagaaaatattaggaacttgcacacgtgtattttgtcagcaaatttgagttcagtagcaaactggcataacgttgaacaaccgtgcgttaagtactcttgacaaactgggggccggaattgttgatcattgagttgagaagagtggggcaggggacctgggccacccaccccaggctcagcttccatgtatactttatcctactactattcctggcacctcttttgctgaaaaattgacctggttgcagaatttctcactcctctgctaagaaaaatcctgccttcctgcagctctctaggcagaattcagtaaactaaacagaggcgctttcatctctcagggccatgccatccactctcacttttcttaagccttgtttgtttcctctgcctgaaagaagccttttgcctggtgtgccagggtttgctggagccagagaacatccagggcagtggatgctttgttcctgagcccctgtgaaacctcagaaatgcctgtttacattagagtgaagttaggctggcaccttggggaaagattgtcacctttgccctacaaattcctgggtgtccccagagggcacatgctgtgactcattcttcaagctagaaagtgggtggaggccttacaaaccagcttttgagtagtctgtaaatgaggtctcctgatccttgaattgtatctgggtcattttacatgtttgactattaaactactctttttttttgagataggatctcactgtgtcacccaggctggggtggagtggcacaatcatggctctctacagcctcaacttcctgggttcaggtggtcctcccacctcaacctccctagtagcagggaccacagacacatgccaccaatcctggtcaattttttgtatttttttgtagagttagggttccac

SEQ ID NO: 39948 - DNA, 934 bp, Homo sapiens
cacgcctggccaactttacaggactttaaattagctgtgtgttagtcaagtgttgctgtaggagtgctaacagcctccaaatcctagtggttcctacaacatttatttcttgctcacagacatgggtcatctgaggattggctttgtttgtctcttatttggggatttgggccacaaagttgggacctacctaaggacatgttctcctctgggcagaggacaagagctcaagaggacagacccaaccacgccacacaggcatgcttagagcctcccactggacatggagttatgccggccacagcgaatcatgtggcccagcctgaagtcacagagttgtgaaatattttgcccatattgggcaaatagtgaaccatagcaagagtgattcaggaaggatgcaggaagaattgtggacaaagtgaacagcttagagtttagaatattcttaggtgacaggagtggcactgaatggccgaggtacattagttgctttcaggaaagcctcgtggtgccagtcacctctgaattattggcttcttctattagccctgcttgaggaggggaaggacatgactcttacggcctagagcaggagttggcaaactcctgtaaagggccagagagtaaatcttttaggtttgcaggtcagaaggtctctgtctcaactgcttgtctctgctgttgcagcacatgaagcagccatagacattccctagaggaatgggtgtggctgtgtttgggaaacacttttctttatgaaaataacagagggctgggtttccccttaagccatagtttgcagactcctggcctagaccttcaaggaatgacctctgtcatgacaccaacttaagagagaaccacctctttttagttgggaagccaaatagtattcaaagagctgttggtgagtccagcaatcctccaccta

SEQ ID NO: 39949 - DNA, 1160 bp, Homo sapiens
agcaaaacaaattcaaatcgacagtaatagtctattttttgagtattctcctggagatttaactctgggctgaacttatacacgttaactttcacgtttaaaataaatttgtgtacaatttttgctttgtgttttaatattagaatcaatctaacactaataacctgtactgtaattatcgcctgtttttttttagttgtgacattttggggcctccgtaacaggatccttcctccctttcctttgccctgcccttcttgtcctttcttgttgagcaacaaactggcatgcccaagtggaatgcgccacattcagttgccctttagcctcacgtcggacaccctgtttccaaacacggctgagtcggctggattggctgtctctgtgcgactgcttctttgggggtatgtgtcaccggggctggtgcatgtatgtgtgagtagatggtaactcggtacgtgacaccaggctatgtggaactcaactgtgtaattttgtgtccgttttcttagaaagcgtttcttctgttggtaattaaggccatggaattctagagaactccccagtgttggttttcgttcctgtctctgaagcatagttagtctttcctttcccatcctatgagggtttctctgcttgtccttctctcttctggagatcccctttgctgttcacagcaagtgagctgtccctcagtggggagagaggcagaaaaggaagacttggacctatcccttgtccctttgtggctggggtgtgagccagggtggagtcggaggtcttgcttccatttctgccactgcttagccttgagacttcccccatgtctctgaaccttgcagggccacagtttccccttctgtcttttagatctgggtctcctcatttatgaaatgtgttcccaatcctcatcctgcactgcctgctggcttgtgagagtaaatgaaaggcagtaatagatacaagtgctttgcgttgttcagcaaacatttattgaacacttactagttaccaggcagggttccgggtgctgggcaaacagcggaaagcgaatcagcatctggaggtgctgtcgctacatcccgaggcctcttgcatggtgggacctgccgcaggccaagcacccatctcgagtctgctgctggtttgctctgtgacat

SEQ ID NO: 39950 - DNA, 621 bp, Homo sapiens
ggtctcgatctcttgacctcgtgttccgcccacctcagcctcccaaagtgctgggattataggcgtgagccaccgcgcccggctactgcttcctgtgctttaaaggggaaaattattccaacacctccctaatttgtgattatgtttcattttacatgcctaccacaagtatgaagtcttccacctgtttagaacaaaaacttcctgatgatgacatcctgggaattccccagcatttcaagtgcaccctcctaggagctgggtagcaggtgttggaggggagatcacagcttttagtggaacagctgaggctgctcctacctgatctgctgcttagttagctgaatcaacttgaccaacaagatgtgccgcagccctcgtgcatcccagcttactgatctgtaataacaggcaaatctctgtgtgccacattgctgggacggtgagacaatggtctggcttgatgtttggcatggtgaaagcattcctggggaattcttttttttttttttttttgagacggagtcttgctgtgtcccccaggctggagtgcagtggcgcagtctcggctcactgcaagctccgcctccggggttcacaccattctcctgcctcagcctc

SEQ ID NO: 39951 - DNA, 2355 bp, Homo sapiens
gacgtgtggaaggctgagtgttgtggaatacactggaattctgtcttatttatttagatcttttatttcttttattctttaataaagaagcacttatcagatatcacagcctttttttgtcgttgttaatatcccagagtttttcaagttttagatggaattgttttccttttcagtcctttgtattttacgtcttcaaagctttctcctgaggaaagggtctgtgagccttgccaaactggcagagcgtcaccagaaggcacaggttcagagtcctgctgtgtgcatggtatcctttttgggtttcgtgtgtttgtttacacgtgtgtaaccctggagatgctgtgactcaccagtatgttgtatcagttttgaggcgtgtgagaagacaaggtagcctgcatcgattagggcagaggttctcggttgtgggcgggcatggggataaggagcgctggggttctgatacgctcccctacgtgagaaatcctagagaagagggccagctacacattgctatgcagatcagagcagacacagccccttcctgcacatcctccccctgagtggagaaacgcggctttaccttttaaatttggccctcacttgacttcctaagaagaggcgagaaagctttgggcatccacctttgccaggtggtacaatgaccttttcagagaagttttagtgcttctcccagtcaggtggacttgtaactcctgagtctgagaaacacagaaaattaaaatgacccacaaaacaaatatacccacaacgatgggacatttgggagaaagcatagtcaacgtacggtacttgcagtgtgctgggtaatcctcagagtggcctgaatttaatactcttgcattctgcacatgaggatggcgaggctcagggaagttagggaaaagtcacatacctagcaaggtgagtcagacctagtttgtctggtctgactccatctcttacccagtatctcagattagctacaaaggggacaagaaaacttcttgtttaagaatgaaattcatctggtgaaatacaaaaaaagcaaaaaccccatcaaaaccttagtttcaaaatctgtcagtagcttatttatttataaataaataaaatatatgtctaacatattcaaaattcattttttttcatggctcagggcattgtcccaagtgacacttagcttgatacagcttaatttgaagatgaggtttcttttttccctgtgattttcacctccatcctgtggcttgtaggtcacacttccctaatccctggtggaaatgacagtgtgtgctatagacttttgtagtcacataacacgcagcagacagcagacatgaaagctgctgcattggtctttaggtggctatgcaactctttttggtcccttcttccaggggctgttctatgtaactttttggttaaggagcattgattgagggaaaaaaaaaaaaatccatatctcacctgcatatgatctgcagaccaccctccctgagtttacctggagcagctttttcctaagaagagaaggttatgaagcaaataagagtttcaaaatattgttccatcgtttgcttttactgtaaagtaatattaaggaattagccaacagtatttactgagtgactggtatttacctctgatcctttgaggacttgtttgcatttcagctcaggttttctgactaaggagataaaaacatctcctggactatttatttttttccgtgacctaacccaaggactttgcactgggttggaccaatgcaggcagctcttgaggccttcggtgccatcctaccctgagttgcttactttgcttatgtgggaggagggaggggggtctgggaacctgcatattaaaccagctccccttgccattttaacttttaaaaattgaacttaaaagtaaacaacaacaacaaagacctttaatctagtccaaccatcattgttcacatggggcccctgaggtgcggggtgcattgacttgctaagccttgcacagccagggtatgtggggccaggaattgtgtgcaggtctcctcaccactctagagttgtgtccataaagtagaacctacagtaatattattatacccccattttcacctttgctcattcacttgtgtccacacggtcacagacatagcaagcgtttatacggttggttttatggggcaacgaacctcatgttttttactcatgcagggctcatcccaggagagtgggaatttgctcaagataaggcatgaggacccggagtatctggcatggagtttaactggaatccctctacctccaccactgtacctggaggctcctgtctcccctcatcctgtttgac

SEQ ID NO: 39952 - DNA, 941 bp, Homo sapiens
aaccaccgtacccagcctgttttatttttaaagggtcttcatggcaacagcgtctgtttatgtctttgtgttccatgtctaatgccattctgttcctgtcctgataagattcatgcctgagttactgcctttccttggaactaggagggtgtcctggttaaagtctaactgtcccagtcatgtggctgttgcactgtgcggtggttttcctgggctttggctctgtttcttctgttctcttgctatgatttccatgcctgccacaggcaggcaaatgggggattcgcacaggatcccaaagcacagccttccaccagcgtggagagttcgcttctggttttaaggggaagaggatgctgtggctcacctgggcttgctgctgtctggaatgcacctttgggcagagcttgcctcctcctcggttacagagagggtgattccactggccccttagtcatgctttttatcctgaaattggtgaatgagatgagtcagttgctaagtgtaggcggcaggctgtttggaatctctagtgggtgtgtcagtcagtgcaagagttcattggtaaaaaggggctgagactcaagttacagtcttttttaagtctatgcttttaaagcatagtgaggagagggagcaggcagttagaatgagctctaccttgcctcatttcttgggggaataaaggaactagttcttttaataccttatttccaagggcctaaattacttgtttgtggtctctttttctcattgtagtttaatccagtggccatcttctagctgttttcttgtttttatcctttttttttggtagggatggtgtctcactatgttgcccaggctggtcttaaactcctggccttctcaaactcctgattctcccaccttgggctcccaaagtgttgggattacagacataagctgccacgcccaacctg

SEQ ID NO: 39953 - DNA, 1870 bp, Homo sapiens
agcaactcaccccatcacagggcagggaccacatggggcagtgaggaagtagaagtgccagcagatacgtctcagtggagaagtcccaggagatcctgaagtacctggccccagacagatgtgggaatcattccacacactgcctgggagcagagaggcaggtatgtcctgaagagccttgccaacaggacaaaggaagtggacaccagcctcccccgcagctctggccagtgccagcacccagaacctagatgccacctggggagaagttggtggaggaagaaagtcatgctgaattacctgagtcaattgagagcttataatagggattaagtcgagatttagaaaaaaatgaaattttttgtgcatctgagctcacggctcaaaaacatcatatcctaaaaggaattctttttctgtagccagcagagggcacttggagacagcaaaagacctgaagaaaccgccctaatccaatcacaagatcagatgggtttgcttttccctggaaagtagttcagggcgggcaactctgcctcctggaacccccaacatcctcactgtaaacagagtgcttgtttctggggtgcaagttgagaggaaatggccaggaagaaggcctggcccctcacattccagagcccctccttgggaccaggagtctgacgtcccttctggagcttcagtggattctcggggctgctgtggttggcggagggcgggggggtggtggaggggggaaaggcgggtgggtaggggtgccatgccagatccccaaggactccttaggtggaggagtcttccctcctgagcctgggttcctccgtcccactcttcgtctcaagatgtcctgagtcctccctcagtgtgactcagttccatgctgctctgggaatccagagaggaaccgacacagtcccagcccttgaaaggggctccgtctgcgcaggcagcagaagtggtcatgatgacagtggagggagtccctctgcttggggtctcagaagccacttgaagaaggcatgagcatggtctcagttctccaggggaactggagggaggcattccagaacaagaggacagcgtgtgcacaggcttggggtgcaagtgaagaaattaatcatagaatgaggaggaggccaccttgcctatcatcctgctgcaccaggaagtagaaagacatttttaaaaagtttacaaaacgtattctgtattagagtgcttcccaccttatgaaatcaacccgctcctttctaatgcatcttctttttagaaaatgttttctttgctttttttttctgaaaacatccgaaagtaagagcctttcctccgtactactttagcctgtagttcctaagttctataaagccacagcacgatgactgaatccagggttaaaggaaatgtttgcttggcagtacttgggcattcaccatgccaaatgcccaaagttcaggctgatcctgctctgaagtcccaaagaattgaaaaccagtgagagaaatccaggcctttagcttagaccagcagcctccaggaccagcagcgctgaggctcagcaatgcctgtacatcgatgtgacaagattcaggggaaaaaagtaagagagggaacctagggccccccaagagcagggaagggcagaatccagcagggtttccaagggccaggcagctggtagcagtggggaccattgatagaggagattctcaagtgacaggcaaaggcttaagtacttcttttcaaaaaagaaagaacagtgatgtattgttctcccacacctcaattgcataaactcatagtcctccctggggcctctattaagtcacctgtgacactaaggaccagagtagcagcagtagccttggac

SEQ ID NO: 39954 - DNA, 1070 bp, Homo sapiens
ggcaggatgagggttagagtgaggggggtgctctgttagttggggtggccagagggaatgacagtggggcaagagcaggtcattccccctccctgatgatcagaggaatttaaaccatatgcatcagagctggggctcagagatcttgcagtccaggtcaaaacatccagttccctgcctctgcagaagcagcctggacagtagctaaggagaaccaggtggcctggggcctcagcagggtctgaactcccctaggcaggggctcaggggctgaccaagcagtaaggagaggatgtctggctggatatggtgaggcttgtttcttgggtccctcattgcagcagtgacccaggcccacagactccatctggatgtggagtgtcccccccggctgcctccagctcaatgtcctcggtgccaagtgacacagaacaagcagctcttgaaaagactaatatttactcttcaaacgagagctggcacaggctgtttcctgcaactggcgtctgactcgccctgtgggatggacacaacaggaggcactccgggagataggcaaatgtcccctcggacgccagcattctgtatgagacgatgtctgtgagatggggacagcatgttccaaggttccattagacacatctcatttctgcccgcacacctcacagtggagagctcactgcctctccagcccctgctggacagctctgtgagaaagttcattctaatgctggccctgtgttccttgccccggcccttgctctgatccctggggcctcaggaaaagcgcctggaataacccccagggctgggggaataaaggtcctggtcacctttattcctcccaccccgacccgcctctggcttcacttccccaggcccacactctgggctctgtggccagaacaggatatttctgggttaggaggaagaaattgccttgagggcacctctgtccccctgcagctgtgttccttgtcctcatgagagccctttagctgagtgcctcatatgggaaagtcttgaccaggaaactgctggtcagacggctcgaatatgggaaggagagt

SEQ ID NO: 39955 - DNA, 1691 bp, Homo sapiens
aaatgtaattaaatattaccctatatgttggttctgagctgtatttttttctgaccatgtcacaaatttcaccaattacttttcacactggcaatagtcttccgtggcttttatttctacaaacctaatttttccccgagtgctttatccttctggctctggaggtacatgtgtaaatctgtaatgaacacaaaacctgtaatggaacgtcctacacctagtgctctgaaaagttggttcagtgtatccaatatttaaagtctaataacacgggcatgctaagggaagtttgctattcagattaaacaatgctctgacgtgagcttcgtgaatggttaaagaaacaatcgtcccctttctcactccccatctcttccaactgggagaagcccttggcgcccatctgtcagcccagggttcctgcaggcgcgtgccttgggtggccccggggtccgggaacaggctgacgggagaaaggggacagaggactccaagaagcccagtgaagccccgtggggagccccatggtcaaggccgggactgagggccgggtgggccctgggccgcctccacctctgggcccgccctgcgccacaccctaacccgcctgctcttggctaacgggccgcggcacccgcctccgcccgccagccctcacctcgcccggacggcggccttcggaagtcggcgcctgccagctacccgccgcctcctcagcaatcttagccgaccgggagggctcggcccaggtcaccggcagcccaggcgcaggtaggccgtggtgcgcgtgcgcgagtcttgagccaccccacctcccccctaccccgcattcgctgctgctaagcgacacccgcacccaaaccgaccaatcccggcgcgcctccacagcccccgtcccggcgaaggcgcgaacgtagtggttcttaaagggctgcgacccaaacggagagggagtgtgacgggggcgcgcgcctcccaactttcttcccacctcccggctctcaccgcggcggtttgagatccaagcctgtaattctcacgtccggaggtgagaaggagccttcgtgatctaagctcgattcctgccggggtagcaaccggactgacgtctggaggcggggaggctccgcgtgacagagtgataacgcccggggcgtatgttctgcggtccgcgcggctgggcgggaggcccgagataggcaaaccaaagagcacaacctactgccagcctggatggggcgccaaagtccgacccagggggacacaccccaagctggggaccgaggcacccacagatggatgactggctggaaggagattaggtaggtagcagagtccgtccatttattcatttagcaagtattgagcacctgctatgtgccaggggttgtggacaaagcgaggaattcctgacacgaaaaactatgttaagagaggaggcagggtgagagcacccttcaaacaatcaaacacctgtataaatacaaactgctcttcagggaggagcaggggttttgggagaatttacagaagcttctaggctggtgttgggaatcacaggaggctaactaggcaaaggggagaggaagtgtgtttcagatggagagattagcatgtatataagaactctgtggaaggcagcagagctcctttgagggatgaaaagaaacccagaaagggggaaatggaaa

SEQ ID NO: 39956 - DNA, 1005 bp, Homo sapiens
cactggaggtgctgacgccaggtaggtcagcagtagacccagccccaacccacaagtttcgctctccagactgcgcaagcgcaaaggatacgaaaacgcccccggcgttctgggggctgggaccgaggaaagcgctgagtatagctcttgcgcgtccagtcacaaatgacgtcccttctgtaccccgccctgtaggcgggagcatccaatcaacttcgagagcgtaggccccacctatcgtgggtcgagttgcttggcggtcgtggttccggaggttcctcgggatgtcggtggccttcgtaccggactggctgaggggcaaggcggaagtcaatcaagagactatccagcgggtgagcatccacgcgggcgggcgggcgggcggagagaagtcgggatcccgaggggctgcggggtgcgagaagcatcctgtagtgagcggcctcccagctgactgtgaagggtgctgagcagccggggtgcggggtgagatgggcacgaaatcagcacaggcgccggggcaggaccccggcatggggttcggtcccccgccgtccagacgtcacactgcactaaccctttctctccttttttttttttttttgagacggagtcccgctctgtcgcccaggctggagtgcagtggtgcatcttggctcactgaaaccaccgcttcctggcttcaagcgagtctcctgcctcagcctcctgagtagctgggattacaggagcgcgacgccactcccggctaatttttgtatttttagtatggggtttccccatgttggccaggctagtctcgaactcctgacctcgtgatccgcctagatcggcctcccaaagggccggggttacaggcgtgagccactgcgcccggcctgcactgaccctttctttctctgatctttcagctccttgaggagaatgaccagctgatccgctgtattgtggagtatcagaacaagggccgcgggaacgagtgcgtgcagtaagtacccccacccc

SEQ ID NO: 39957 - DNA, 2355 bp, Homo sapiens
ggcggagcttgcagtgagccgagatcccgccactgcactccagcctgggcgacagagcgagactccgtctcaaaaaaaaaaaaaagagtcttttcaacaaacggtaatggaacgactgtatatcccaataggaaaatgttgacacttacttgacaacataagcaaaaattaatgatattagatcatatcatagacttacacgttaaagactatgtaaaacatatatgagaacacagaatatcttcaagaacttgaggtaggcagagatttcctagcacaggaaaagcacaaaccattaaaatataaaactgaccaattgacttaatcagaattaaaaacttctttgccaaaaacgtcaaaacaatgaaacgacaggcccagattgggaaaaagacttcgcaatcatttatgtaacaaaagattttcattcagagcatacatatatctaacaaaacatttgtatccagaactgttaaacacgaaggaccagatttaaaaacgggcagaagactggaactgaaacttcacaaaagatgcagaatggtcagtaagcacaggacaaaaacggtgccagtgacgctggtgccaaagcgggaaggaacgcattcttcagcctaaaagacctaacagtaggacacggacataaccactcccggccaaaaagaacacagagcaacacaacgtcttggctaacgaaaactcaaagcctcaattcactcagttccttcacagcgctcggaaacagagaagtctcgcggtatcggaaaatgcgcggcgctcacagccacacctgacgagatggagggcgcaggcgcatccacggctttcagattgggcgactgacttcaaaggggggggcaaacagggaacgcgcaggtataggagcgctggctggaggctcctcgagagctccccagacacgcccccgtgcgtacgcccccgtgcgtacgcccccgctgccgccaccttcggttgaccacccccatctagactgtactctcgcggtatttgtcccgactctcgcggggtttagcgtggcattgggaggcccggcctgggggaggagacggcgttccgttagcggcgttggggtttggctgcagtggcagtgctttctcttctgctcacggggacccgctcaggctggaggccagccaggtgaagagctcgcccgcatgcgtgcgcgctgcgtgggagccgcgaggcccggggcgggagggggcctcgtcttggcctcctgcgctgtcgcgacgggccggcgtgaggcaccgtggcgcggacttcgtctcagccccgccctcgcccctgccctcgcccccgccctcgcccctgccctgaccgcttttctccccctctctcccagctcttgccgccacctcggtcgcgatgggggcgcaggaccggccgcagtgccacttcgacatcgagatcaaccgggagccgggtgagctggaaactggggagcgctgctggggccgaggcctgccttggcgaaggggaggggtctaccctcagcaaccctcccccggcctttttgggagcgggtaggaggcgcaggcaactttccgttttctcttgagagaaaatcagtgggagaggaaggtggcctgggcacacccctaactcgcagtccgggcctcttcctgccaaaccccacacaccccgctgcatctccggactgagtcctcgtagccagcctggcgccaagaaaaggaggtgcagttctttgaggactttttctctcccagtgtctccgtgaggcagacactcccgatccgatttccggttatcttgcttggtgctatgaagtttcaactagtaggaaatattgtgtgtttcctaatcacgatatatcactaatatgttaattttgcctctatttttccttaagaatctttagctagaatttcgtggttcctgggaaaatggcttagtgaagatcttttgtgataaaccagagcattttgtaccagcagaattgcagcatgcatgcacttagcattaatgtttgtctttagggaatccagacatttgttagtgtattttttttaaatgaaacatttccttctaaagcatagttatttcattctaagtagcagagcgtgcagggtttcaaactgttttcttagctttttttgttatccgtgacaaaagttttaattggagacatatatatatgtgttgtctttgtgcaacatcttgttctgcatattcttatgagagcctgctactgttctagggtctggagatagagcagcgcataaaacaaaggcctcttccttttatagtttatattctattggggggaagacggacaactaggaaaaaaataacagtgacttgtagttgggatac

SEQ ID NO: 39958 - DNA, 558 bp, Homo sapiens
tttttctgtcttagcacttaatcatttgtcatattatgcaattctttttttttttttttttttttttttgagacaagagtcttgctctgtcacccaggctggagtgcagtggcactatctcggctcactgcaacctctgcctcctgggttcaggtgattctcctgcctcagcctctggagtagctgggattatagggatgcaccaccatgcctggctaatttttgttatttttagtagagacatggtttcaccatgttggccaggctggtcttgtactcctgacctcaagtgatttgctcaccttggcctcccacagtgttaggattacagatatgagtcactgcaccgggcctatttcttgttacttgacccaacaagaatataggcttcataaagacaagggacttactaccttacaatcttgccagtaattttattataaacttgaaaaaaactgtctacatttcattttttgtttgctgtatgtaaagcatattttatgatattcagtaatcacattttttactctgaaaggtaggcactgaatttagtactaa

SEQ ID NO: 39959 - DNA, 2074 bp, Homo sapiens
agtgacccaggatgggcagtagtgagcttggggtaggaggaggggatgtccacagaggcctctcctctacaatggtggcccagtcaccatccagaccttgccaggtctagtgccccgtggtccccaccctgctgcctgctcagcctggcagccttcctttacagcctcctgccaacagagccagccccctgcccccacgggtgtccatgccagagcagcattccgcaagcctggctgcatctccccagcagaggctgagcaagggggccactcagcagtggtcaggtcacacggctagaggggcacagtggggcctgggcctctggtccctactcctctggtccctctgtctcctggccctgggccagtcaccttagatgatttgatcgctgcggttgtagtcctgggatttaaatctcctgccctgggtggccctatgcagcatgaggccgccaggtaggtatgggtccactggagccaagtcctggaggcacagagcaaaatgagccctgcgccgccctgggatagggatgggggactggaccagttggggaccccagactcacccccaggtcagagcagcccaggcgagagggtgggggtggtgagcgcggctggggtgcggggttcagtccctcagcgtgggatccctcaggggagcgggtggaagccttttctgttcggatccggggcccggcgcgctcagcttcctgatttcacggcagcttcctatcctggctccccctccgtggcgcaaccggagggcagcgatgtttgactcccggacgaacttcccggcagaaaggaggctcagcacgggagggtggggccggggtctatctgctcggatatgagcagtggggacgggctgggggctggagctggggctgggggtggagggcagcctgcggcagggcgggctgcacggggaccgcgcacaccacgcgtgtccgcgccccccgccggcacgcaggcggcctggccctttaagcgtccagacggcggccccagctgacgcgcgggctccaatcggcgccccgcgccccccgcccgccgcgcccgaggctctggggccgcagctgcttggcgctggactcgccgcggccctgcgcctccgcctgcctggccgcgcccccgggggccatggtcgcggggccctgcgcgggggcggcccccagcgcggcgcttcatggagcggccctggcctggccgccgggggcagcgcgatcccgcggggccctgtgagcccccagcgccacggcaccatggtacgcagggccctgcctgtccccccgcttatccgcccacctgccagctctgacctcccaggcacacggcccgcgggcccgggtggaggggctggagggatcttcccccctcccccggtctcccggctccatctgctgggtcccgcgggccgggaatgcggcgctgtggcgctgctctcggtggggagggggttaaattcctgtggtgggggcgccggcgcgcgaggctgaggtcttgctaggcaccggcgaaggggggcgctcccctgcgcccggacggcgccgccctcgggctgggtaatggggggaagagggagtcggattcccgcctgggccttgggccacgtgggcgctggagccgccctgcctggggattcgggatgacccgggccaagggggtgtgggaggacacccagagctcccgtaccaactcctgtgtgaccttgggcagatcccccgccctctctgggtctatttccaagggaaagaggggaggtaagtgcacagaggaggctggcatggacactccctcaccaaaaggaggagcctagaggtcatgagcctgtgcccccttgctcagtctgggcccccccactgctgcccagcatagaaagaattgacatgggaggggggcgcagatggactccccaggtttcatcatggggccttccagggaggctctgaggcagggtagagagatgaggcttctcatcagtgaggcaaggtacccctcaggtgtagaaggctctgacttgggtgagcagcctggagagatgtctggcacctggccaatccccagcctgact

SEQ ID NO: 39960 - DNA, 428 bp, Homo sapiens
tactaggaaggcttaggcaggagaattgcttgaaccctggaggcggaggttgcagtgagctgagattgcgccattgcactccagcctgagcaacaagagcgaaactccgtctaaaaacaaaagggacagagagtgatattgctgagatcacaaaagggaggtgactcagtcctagcccagcctgctgtcatctctcctatacccaccccctcccccactcccccgcctgacgttataaacaagtgactcagaggaatgatgggggtgtgtctcataatagttcattccaatgtcctgggggctaaatttaacacacagctgcagcctctggcactttgggaacaagttaatcttggtgactgaggctgatgtgtgtgtgtgtgtgtgtgtgtgtgtgtctggtggtggggcggggtggggagggtgtg

SEQ ID NO: 39961 - DNA, 1562 bp, Homo sapiens
gtgagccaagatcgtgccactgcactctaatctgggcaacagagcaagactctgtctcaaaaagaaaaaaattaaaaacataaatgggcttgtcagattttctctccaaaacgtgagaatgaaaatcagaaatggtgacttcagagtgaagactggatttaagtggttttcagggacgcttagggctggcagtcagatgaggccacaaccaagtctgggctttggcaaagcttgcaagagacagttaacaatgagaggggctggggaagagggagtaaccccagatctgcttcccaggtctgctgggtggagatgtatctcctgctccccctggagcccatcagcttctctacagccttgcaaaagtgcaagtggccccttccacagctgaatctgtaaccaggctgagtgtaggcttccttagccaggctttgtgttttttgtttcagacagaaaaggccaaagaatggagggaggtgcattaggctaccatgagtctttaggataccaaattccccttgctttgtaattcagcattgactgaccagagctttggtcctatgaacgtacctatcctcaaacgcatttactctcaaaggcaaggacaatagtctggtagatgctgagtcagccctgttgctctccgtgattggtgacatctataatactttcttatttattagccatctgcgaattgctcaatgggtatatacataacacaggacaatcaagtccaaagtcctcactacatcagcagggcaaaagtcaaactcataaccacagagccaatgtccagctcacaaccatgatcaaaggtcattcccagacctgcaaagccaaggtcctcaccagactcatggggccaccatgaggtctccaccaacacagccaaggtctagcccagacttacagggccaagacccagcccacaccttgttggtggttgggtcccatgatatcctcctagaacaggtgactcatctacctttctggagcagcaacagcaggtgctgtagagttcatacctggctctactggggcttttttttttttcaagacaggatctctgttgcccagggttcagtgcagtgggggtgatcatagctcactgcaggctgctgggccttttttatgttcacaacataacatgtgagccagtgcaccaaggagaaatggatcctgccagcccctttacatgctgcgagcatgatggcaaacccttgtcatgagtcccagctggatcaccaacattgcctatgatgcttgcctgctggcccttctggcccatttttaaatccctcattgctccctgtgctcccattttctggtgggctggcctccctggggctgctcttttcctctaccctctccctcacttccaggactcctctggacaagcttgatcacaactgacccttggcactctcttgggaatctgctctctggaacctgctgtctgccctatctgaagtccctggactgcagggcaaggactatcacaacaatggtggagctacctgtgaaggcaaatctgtcctcttctattttctttttgaggtgtt

SEQ ID NO: 39962 - DNA, 3909 bp, Homo sapiens
attataggtgtgagccaccacatccaaccagaagttattcttaaagggcatggagtttctgtttgggctgatgaaaagactttagaggtggatggtggtgatggttacatagcattttgaatatacttagttccactgtattgtacacttaaaaatggttaaaatggtaatttttatatgtatatttaccacaataaaggttttaaaaatcagctgtgcatacttgtgtgggtgtaatggctttttttcctaatccctaaattaggttctccccacagttccatgtagttccaactttaaagtgggacttttacccatgcttatttatcttaatgataatagtcaccaaatatatttcccatcactgaaattctctctcccaccaataagtaaacataacataaacagtggccctactcttactatgagaaacaaaaatgaattgaacaaagtcagaagtgggaatacctgagttttgacctcattagtcaagtcacaaacctcaactttcttcttaaaacggtaatagtacctttattatcatgataatcaaataggtcatgaaagtgctttgtaaaatgtgaaattctcttcagttatctttattattttagtagtcacatatattaattactacagatttagctgttttgcctggtaatggaagtaagttctgctacagcttaaaaccaaggcctcatttggctctctccatttcacagctctcattctagacctcagctttgcaggccccaaatccaatttagttattataccatgagtatctcttggggctagacttacaccagtcacgtgtaactgacatacaaaccaggaacactaagtctctcgtttatatctgtgggttgtgacccatgtccagagactctcccttcccagcatcaggcacccacaaagccaaaagagtcatcagaaagatattgtgagcatggattcagaacaaacagaaacaaactgcctagagggtatttttggcccagggttaagccttattaaattattccacttcacaatcaggagccctacatagataaaaattgttcattttctacaaaaaattagccgggcgtagtggcgggcgcctgtagtcccagctacttgggaggctgaggcaggagaatggcgtgaacccgggaggcggagcttgcagtgagccgagatcccgccactgcactccagcctgggcgacagagcgagactcggtctcaaaaaaaaaaaaaaaaaaaaaattgttcattttctccaggttcaagcccctttgtgctggaagttctgcctgtacaacttgccatggatttgggctttggtagctactagcctcccagagtcctccagcacattttgtgtttagcttaacaccatttggctacagtcaatcttattttatccacggaactattttgtctaagatgtgtttgtatagatgtggtcccactcatcatatgttgactttattagaaaactcaatgttctgccaagattcgtcaatccttagctccaagggacctctctgatagatgagatctaccctggctctccaccaagccttcagcacaaggttgctaatatatttattttatcctcaaatttctcatttccattcttggctcacatcatagtctttcaaaacatttgggtgagtcacctgatcctagtaattattcatttctctcattaactaggtccgcaatgccttgtgcacttaatagtatttaatttaccacttccacagtaaagaccatttgtatgtgggaatctcttcagcttcctttctataaaggctgaaacaattagctaggtgtggtggtgtgcacctatagttccagctactcaggaggctgaggcagaattgcttgagctcaggagacagagctgcagtgagttatgatcatgccactgcactccagcctgggcgacagagcaagacccagtctcaattaaaaaacacatatatataagccaggcacagtggctcatgcctgtaaccccagcactttgggaggctgaggcaggcagatcacttgggctcaggaggttgagaccagcctgaccaacatggtgaaatcccatctctacaaaaaatacaaatatcagctgggtgtggcggcccatgcccgtagtccaactacctggggagctgtggtgggaagatcacttgagcccaggaggtttgagctcaggggatgacagcgggagatggggttatcattgacagaaatgagtgagctaggaagaggcactgtggggaagacaacagatagggttgtagacaaggtgagattaggtaaggaccataactcaaagatgtgatggcaaaattttagtcagtcctaacacttcagagttgcattcaggataggaaaagacctaacaccaacgttgtaagaagctcagaatactactgcaaggacctgttcttaggtttctctgaggggatcaactggacaccggcctccaccgtagactcacttattactgctgaattcagggggaaatttttctaacttttgtcttgctacaaacaaattctttcttttgcttcgttcagtgactaagggggaagtaggcaaggaaactagattgtatgagcagtgttagttcttccatgaactcatatcaggtaaatcattcactgataaaagtagcaaaccagtcagggtgcatgtcccagctgcctctctcaaatttccctattctattcaaacagctttcaaatgggaccaagtgtataaataatatttggcagttccactctgacatgagaactttaaaatactttatgttcattcagtgttgttctggtctggtagttatgatgtgataaaactatagatgtacatggggatacaacctaaatttcaagtccctgaaactgagcagcagttcctcatctctgaggcaagagacatggcctacatgaccaatactccttccactccaaaaatctgtctgtgattcagaagtcgagtgttatttagggggcttttaagtgtggagtcaaattccaactcttaccaccagatgtcactgttgttcagtaactagaaatacataccttctagggacagtaggatcctgaatgtagaagccccaaaccttttaattctaattaattcaacaaacgctgaacacttatgtgtgccacgtgctttggatgagaaaggccatcatgccctcagacaactggaggagaggcatggaagcaatcacacacaccaacactccaataacatccaacattaagccatggactctaactctcaatgaaaaatcaacatactatctccgtaaagtagaacattgtttcctcagggagaatttctccaaccccaaccctgggttaggttcccccagccggatgttcctgttgcatcctctacctaataattatcatcctttattgtgttgggactcagaaacaaataccccaaaatacgatgctttgacatgctggactgaagatgcagcctcaaggtctctctgacctcctaccccctccccgccatgaagctgttctgtgaagtttccttatctgcttaaagtctagacctgccaaaggcggggggaaaattactcctggtcctttccgttttttgtttttttttttttttgagatggagtctcgctctgttgctcaaactggagtgcagtggcgtgatctcctaggttcaagcaattctcccacctcagcctcatgagtagctgggactacaggtgcatgccaccatgcccggctaatttttgtattttttttagtagagagggggtttcaccatgttggccaggctggtctcaaactcctgacctcaagtgatccgcctgcctcggcctcccgaagtgctgggattacaggtgtgagccactgcaccggcacggagttttcattag

SEQ ID NO: 39963 - DNA, 5523 bp, Homo sapiens
ttttcaggtttggtttttctttttttacactgagtcagaacattattttaatagttacaaaactttttttttaacagaatcagtataaaatagcagttgatttctccataattatcagaattatttatatttgaggtcttgcctaagtggggctgaaatcaacaaaaggtcttggactactggctcagaaatcatcctaggaagcccgccctgttgacatttgtcatgcttagctcttatgagatgacccggtcctttaaaaaaaaaaaaagtatctccgtttattctgtttatttggaggtttgaagtgaattcggcagcattcattaaactccttccagctcctgtcatttatcattctgactacatccatttcaactttgcctgctctgttctgagttgctttaacaatattaaatcgtccaaattcttttctctctcttctcagaggttttttactactgctgaggtctgggctatatagttttttatgactctgtccctactggcatgagctgccatcaaagactcaaagttgtttacaggtttggctggcatcaatcttccctgcaaaggaagctgttggaactgtagtgtttaattaatgtactagtctgtatcaactgtccacatcaccttgagtaattcctggaactcggcgaactcctcacagttcacactgccactgggtgccaccatactggactcaggttcacatcttaattgacctcctctcagaaatttttgtctctttaagttcgtaagtgctttggttatgcagtcccataggaccttgtactttccttataacccttataagcaccagtttgtctgtttcttttgctagaatccttcaagtcagggaccaatacctgctctgcttgtatccaactccactgcctggtgcaataccctatatataatatgtacactacaaatgtttcttgaatacatttaaaagttacatttctcaacaactgaaagcattcttaggttattcagtaatattgagtacaaaaaaataacaatcatacagatttgtagagtttaatcagtaagaaaaatgcctaactgtatgtacctaagtgcttatttcttttatgtttcttatattgtacctatgaaaagagaaataacctgaggtcttagttccttgcaacacaggggacaaaactattatataccataatccacttttaaaaactaaaaacttctgcagatataaaagcatgttttccccttttttgcctgaatcatttctaaactaaaaaatcatttgggaattgtctttaaaagcaagaaagttggtagccgggcatggtggtgcacacctgtagtcccagctcctcaggaggctgaggcaggagggctgcttgagcctggaaagtggaggttgcggtgagccatgatccagccactgcactccagccggggcaacaggcaagacccttgctgagggacccaacaaacaaacaaaaacaggacataaatcgttttttaaaaatagcaagaaagttggtagtttttcttataattatctcacatctggctgactctaattctccaacaggtcaatggagcaaaaggtttttttttttttctcctttcaggagggagggggttagttgtctctttcctgtatataaatcaagaacagaagaaaacctatttctccgttcttcatctatgatacagactctgaagcttgtatggatagggcatttgacctgggtttcagaaagtagcccctgcggtaagcatcagggtgtggggaacaaaatggtcattatttgcttgaaacgacagatgataatctgtctgtgattccagaataccttatgtgtacatttcagaataaaattagtaaggattaatatttaaaaatccaacacatatcagttatttgttattctgtagtcaaaatattataattcccatatagtacatatctaaaatactctctgaatacaaaattttgataactgtctaattaccacgtagaagtttccaaagtattcatggtttatagccacctgaattgaaaactggttaagtatcaggaacaataagttctaatcatataatttgagagtaacaaatcagatgaataatccaagccaatagccttattttacaggtggggaaagggttgtgagagggttatacgaattgctcagtacaaggaatacatgtctggtggggtaggattagaatccagctcttctgatagagagtcctgggttcttttgattgacgatatattgccaaagcatcaatcttacgctgctgatgtaaattagattaaattggcagataagaattctgattagaaaatttaagaatccattactcaacagaagcccacgttgttctctttgaatgatatatataaaaaaatcatgcctaaggtaaacggaatcttcttcagtgacttaactcatctaacaatttcaattgtgatttgaaaagacttttttcactacaccactgccagactttccttcattatcgttttctcatccacccacagtagttgtcccagatttctgtcagaaagttgaatagacgctaaaaaaggcaccagtaaccagatatttaaagtcagtttggagagcacaaattaattctgtacgcttagtaagacacgactgaagacctttccacagggaacctaaagaggcattaagggaagatgagccgtccagcatcaggagacgtaacaggttgaatgaaggatctttcttcacagtcattttgtcacgggaattactatctaaagcaacgctggcttcaaactgattttgcatcagtcgcccatcagcttgtttaaaatggctgccaaggccccagcatggagatccggattcaggtggtctggggcagagctcaaggaatctttaagaagccccttcaagtgactctggtgcacaaagagaactcctagtatacaggactccaaatatgtgtgtcatgctggagcttcatgaccaggttgtcaccgcttcaacctgttagaactttccatccaaacctgtcttactccaaagtgcctttgtacttccggaagcagggatccctgtcgtggggattactccgaagagggaaatagctgcttcccactccgggaatttaagacaaaggcgaatatcactgctgcatcatgtcggctgctcctaattctgcccttacgctgtgctttgtaatctctaacccgccgactcggcaggagaaaaatttaattcggtcacagaagcactacacaggaccctaggccttatcactttcccagggtggaggaaacaccaggtcggggagaaaagcaagaccaggactggaaggtcctctgctagtacgccctcccctcaacctcccgaccttcctcgccgcctctcttcctgtgaccttgtcgtgactccgtgaccggagcgctcgctctcctatcccgcctcgcctgccgcttagcccgctcttcagaatgttccaagctccggggaagctcccgctcctcgctccccgccgtcgggcccagtcaacaccctcctggcccccgtctctcattaccaccccatcagcgagtcttccccgctcggcaactcactccacaagcttctgctccatctcctcgctggctccgtctcccctcacccgaaggaccctaggcctcggctcccgactcctctcatccgcccatgctcgaggccgggcctgagccccggcaactccacctctcctccctcattcgagacacggactcccagcccccacccccaaagtcctttcggcctggccaagcgctgccccacttcttcccgccccgcggcccgagtccctggctcgcagtcccccggcttgtttcgcttacctagagcgagaaaacctctcacaccccaaccggcttccgatccctgcaggcgcacccagtcctcccggcttctccccacccacagccgtcccagccaatcagaggccagcggccgcaaaaggacgcgtgcgtgtgcgcggcgggtggggcagtgcagagcgggtcctggattggctgggccggtgagtgctggcccactaccccggctctagcgtactggcggagacagacgtgagagctcggcgcctggggttcgcgcccgggcacttgaggggctttggctcctggcccaaggactcctcagatttctcctgcccttttcccctcgggcagcggaggcgagcaccgcgaacgccgtgtcccgagcgccgccgcctgcggacgcctcacgggccgggaagggatgcgggtgaggggtttcggctgcgggtgaggttgtgttccccgacccacccgggtccgactgcttgttctcgccgttcagtaacgagatgcagacagactgggaaagaacggagtttatttctgcaacaggttacagggagaaggtcggagtaactcaccagaccaactcaaaattattaatacaagtttttctagtgcttaaatacattcagtgcatttacaagtcgaaagccaaagtgtttcactcaagccaatctttaacggtaatagggtcaggtgtctagacaattgcttcagagccttggaaataatctaaagtgggtcctggtacaaggtgtgcaagaacaactccattattttaattaaactctaggggttgaaaaagctcaggcgggatcctaatggacttgtctttacattctagcctttctcctaaggcaccagtttctccaatgtttaacttatacatgcatcagaatgacagtgaggcgttggtgagagctgctctggttgctaatggagatctggcctgccacagtgggagcagagcttgcccagtgcgccgggacgactgcgggctccatccattccgctcccagggcggttgtcggccaggaccgtgagctgtcaggtcccccgcgggatccttcctggagcttacactatagtaggaggcagccagtacttgcaagcacggggtcgcgggaactacgacctcacccaggccaggcgacctttctctcaagaaggagatgtcagaggcccctcgtgacagcgagcttccggggacagggctcctaatgtgtttgtcaagtaaataatgagtaataatccggccaattggtgggtcaacgaaaaaagtcaaactctaagatatttgaagagatttattctgaaccaaatgtgagtgaccgtggcccctgacacagccctcaggaggtcctgagaacatgtgcccaaggtggtccaggcacacttggttttatacattttagagaggcatgagacatcaatcaaatacatttaagaaatacattggtttggtccagaaacgggggacaactcaaaggcgagaggggagggggcttccaggctataggtaaatttaaacattttctggttgataattggttgagtttgtctgaagacctgggatcaacagaaagggaatgttcaagttaagataaaagattgtggagaccaaggttcttttgaagtcttgtagtggctgcctttagagacaatagatgacaaat

SEQ ID NO: 39964 - DNA, 1246 bp, Homo sapiens
tactttgaatgaaatttcaggtagatatcacagtaagtggagcagtttcaaaggcttcttgggactggggcttaagtgggccttgaaggatgactaggatgtaaataaattgggaggatatttcagaaacagcaaacagagggcagaagaatagaggcagactctgggattgtagctgtgtcacagaggacagcaagtgtgaaaaggcaaacatttgtgactagagcagagtcagagagaataatgaaaagtgagtcactgtggggaggaccttccatgttaattaaagaacctggacaatgttctattaggtgccgcctgaagacgttggagcaggatgttgacaagagcagagggcatttgaggttattggaagtgaaatagaatggattagaaagggagtgtcagccttagccagaaaatttaaaactattcagtaataacccattacatactgtgtattgagaccattttccccttggtcttaaggatgtagaggtagttacatgcagtagtgttatctctacttcttgacaaggactgccactttgaggcagcaataatctttaaagaccagtccccagggagaattggctaggggccaggccatcagaagattccatgtcagaaaattgccctaacaggctattcataatgtgttccaatttagtaccctttacactgcagagtcatggaatagtacttaagctgttcattttagacaaaaatacacttcccagacacattaattgcatgtttcaaagttgtatttaaaacttgcctaaaaggtaggagcttttaagtaaacaaaaaattttctcttggcaaaaagtaaccagactcttccttgatctgcttattcaaatctatcaggtgttttataagaaacactaatatttttccagaaggaccagctggcatcatatccgaccatgttctgctaaggtgacaatttttctttctcacactttatgcattccagaacattaattctcaagggaggtacctggttcattcctctaccctttaggaagaacagctctaaaatgaaagctcaaaactctccagagggagaaaagtcacagccacttttaatttggtatgagtcaggctccacaggctctggggtttgctttgctgcttactagttatgtgacactgagcaagttaattaatcatcttgtacctctgtttcttcatttgtacaataataggtcctacttagtaggactctggggagtgttaa

SEQ ID NO: 39965 - DNA, 1216 bp, Homo sapiens
ctttatcttgcatatattttgttattaaatatgtcttttagtagagaatgagtaggaagactttggtctttataatattcagttttatgtgggttatatcctgatttttaaagttagaaactcataattttatgtaattctatgtaactaaaaagattgatttgtttttataatctatatttgtataagtatgggactagattacacaaaacaacattgatcactggaactaagagctttcttttgaccacaggcaaacagctctttccagtagaaaagagctgggctccctcactgtttcctggctctttccagtagaaaagagctgggctccctcactgtttcctggctctttccagtagaaaagagctgggctccctcactgtttcctggcacacggtatgatattgagttccatgattatgcatgtaccttgggttacaacccccctggcggcagaacctctattgtgtccttctttgtattgcccacagagcctgttggtgacctgcacacaggagccctccagtcagtactgattgaattactcaaggctgcctctctgcaaagttgaggtaagcagctgagttcaatgatgctggctgcattttcagctattggggctgcagtagctaggcaggggctgcaggcccttctggctttttagccctcctgctcacccaccatttacacagtcttcctttcagagcccccctttctcctcctgcacttccttgaatattgactgcctctctgatttccctcactttgtctctcccaaatattagggctgtttttatggtctgctaattctgtgagaatgaggtacctcttctgggaggcactgccacactcaatggcactgcaaacaggtttttattggctcatctccaagctctccaagtcattctgccctcatactgattatgagacaccatctgtttatcttgattgcataataaattgaggactcataaatgtagttgacatctaaattagatccaaatcacagtaagaacaggataatggtctcctttgtcagagatggatgaataattacttttatagctctggaagaaaaatgggttatgcaaacagatacttcacccaaattggtttcctgagtgactctccgtatgttgatgtttttgctcagggacaggaacctgcctaccctgtttcagggaaaaccagaaaagaaatataatctgctttg

SEQ ID NO: 39966 - DNA, 1609 bp, Homo sapiens
cagctacttgggaggtggaggcaggattgcatcactgcactgcagcctgggtgacagagcaagactccagctcaaaaaaaaaaaaaaaaaaaaaagaataaaaccagtaacagaataattgttattccaatctgccccccttccccagtcatgaaagctaggatctttttgctgtatccaccagatctcaggcttgtgtctcttcccctctctgtagtcttggctgtgtgtccaccacaacactgttcctttgatgtgagtcaatcattacgctcactccagtgtttgtttttgcatgatgctgtccccttcctttcacttggttctaggctaagccccattattccaccaggccccacatggtctaggctgtgcctcctgtcttcactttgctgaagtggcgggacagtcttctcctatccaggtttcacttttaaaaagttatcccttcctcttgttttcttcatctccgataaagcctagcatggagtgacttttgcgtttgagtttttccttttgtttcttacagcatcccctcccctgccaccttgcctaggggaatttgtactgaacttggtcaggagtcagagtaatctgtctcaatatctccctctcctcaatcaggggctccagacaaaaggatgctcaactgctttctctcctgtctgggagatcagggtgtgaccttcattctataatttattcaagtgtctctctcctgtgtagcctgtcagccttcgtgtctccagtcattctcttcctagacagacttgtctgggatgttcagaactggaagtttggtggcttgccctgacatgtccaatactcagtaagcaagcagaacttaccctctttgggctctctgcactgtgtgctcttctaagccatgcaatcaacttctaagaccataagaggggagctaagcaccattcagctttgtatatgccctgagggaactaacacagttgcataggatggcaagaaacctatacatttttgcggaatgaattaataaaatctattgacttttgtgctctgcttttctcccttaactttattgcagcaagcaatcaaataaaggtaattagtcctagtttgttctacactaagtatatcacactgtgattctgatttcataacttagatctgagttttagaacactgagacaatcacagtcgtcccttcgtatccacaggggattggtttcacatctgacctcatgtgataggttgcagtcaaaacccagtcaaaactttgtttcatgcacaaaattattgtatgaagttaacttcagactatgtgtatgaggtgtatatgaagcataaataaatgtgtttaaacttgggtctcatcccatagatatctcattatttatattttgaaatatttcaaaatccaggaaattccgaaatccaaaacacttctggtgccaagcattttgaataagggatactcaacctataatacctaatataatgtaaatgctatgtaaatagttgttatactgtattttaaaaaatttgtatttttttattgctgtattgttatttttaaatttttttaaaaaatattttcagtcctttgttggttgaatccatggatttggaa

SEQ ID NO: 39967 - DNA, 6117 bp, Homo sapiens
tgtttgtgatctgaggtagggagggggaagatttcagtcttttaccattaagtgtgatgttagctctgggtttttttttttttgttttttttttttgtagataccattaatcaggttgaggatgttccctagtttattgaattttttttttttttcaatcaggaaaggtggtgaagattaccaaatgttctttctgcatctgttaaggtgatcatgtggtttttgtcctttattcttttcatatgttgtcttacattgtttgagtttcggatgttgaacggtttaaccttgcatgcctggcaaatagcttaactagtcatggtgtataacccgttatatctgtagttggatttgggttgttagtatgttgtttagggagttgtgtgtgtctgagaatctatatatggtccataagggatattggtgtgtagtgttcttttcttgtgatgtctttgttgggtttttgtatcagagtaatactggactcatagaatgagttgggaaatgtttcttccccttctgttttttgaaagagtttgagaggattagtggtaattctttaaacatttggtagaatttaccagtgaagtcatctggttctgggcttttctttgtgggacattttttgattactaatgaaattcctttctttgttataggtctattcagattttctttttcctcttgagagagttttggtagtttatgtctttctagaaatttgttcatatgaattatctaatttattggcatacagatgttcatagtattttcttataatctttttttctatagtgattctctctcttttatttctgattttagcaattagagtcttctcccttttttcttagtcaattagttaaaagtttgtcagttttgctgatgttttccaagaacaacctttggttttgttgattttctctattgtattcatattctctcattcatttgtactccaatatttattttgtctttatttttgcttgctttcagtttagtttgcccttctttttccagaatcataggcgaaaagttagtttactgaattggggtctctttttaaaaatatctgtattcacatttctctctaagcattgcttttactatgtcccataagtttggtacattttatttttgttttcattcatctcaaagtattttctaatctcccttgtgatttcttctttgacccattggttatttaggagtgtgttgtttaatttccacatggttttgaattccccaaatttttccttctgttattgattgagtttaattccattatggttggagaagatattatatatggtttcagttcttctgaatgcattgagacttgttatatggcctaacatattctctgtcctggagaatgctgtatgtgcacctgagaagaacatgtattttgcagttgttgggtggagtgtcttacttatatcagttttaggtattcacttttcacctggttaaacattattcattctttgagtcacaggtccaaaggatttcttgtgtcaaatatttcttaatccatctccctaagtaaaatgtagtttcttcatttgaatttctataattctgccaacacctataactgtattataacttttattccaattcagtctttctaaattctgatgttatgggtttctttgtgcagagccatgttgtaactgtatctccatatcactgaaaccttacttctagtggtaactttaaagcatgtcatcgaaaggctgaaagaatctgctggttattgagcactttgtcaatccagagccataaactacctacaatggattatggataaggagaagcaaggcagtgtactctgcctctggggaacctacattttagttaagagatctacgagataccaatgtaggaaacctttaagacaagatttgaccaagtgccaagatgaaggcactaggggattggacttgttcactttgtctctctccccatgcgtgggaaagaggcttgtggaattgtgaggctggaacagccctcagggtttctgatttctagtcatcatccagcctgtgcgtggacactctcacccacagggagacgcccccacactcccatttaggacttgttgatggttgtttgctaactttgggcagagcaagaaaaatgaattgccctttagctaccacacacccttcagtcttctccataaaataaaccataagcctgcaaaatcatgtgtaaagtcaacagggaaaggaaagagctgtagtcataaattctaatcccaggaggatatgtcaaaggatgcttgcattatatatatatatatatatttttttttttttcttttcttttcttttcttttctgagacagagtcttgctctgtcacccaggctggagtgcagtggtgcaatctctgctcactgcaatctctgcctccagggttcaagtgattctcctgcctcagcctcccaagtagctgggattacagatgcctgccaccacgcccagctgatttttgtattttttagtagagatggggtttcactatgttggtcaggctagccttgaactcctgacctcaggtgatccacctgccttggcctcccaaagtgttaggattacaggcgtgagccaccgcgcctggccagcttgcattatattttgatttcagataaggaaagtcagatcaagtgactgtgagaaggtcacttctttcttctcccttccttccttccacaatgcagcccctaaaagtggcaacatcttgttttaaggggaaccaaaaggaatgttttctgagacttattattctcctagtgcctacctgtctgtgaatgttctgggaaggtctgaggatgagatttggagatatggagatttggagcggcgaatttatctcacatgccagttagacactttattctgtctaattcaggacaaagactgatgatttggggggctaatcaggggattcttttcaagaatacagtgtgatgaagaaggttatcaagacagactgcaaactcttttctctagtaacctctgaaaatagaatcataatgtgaagtacaatacctgcaattatggtagcacacattaaatgaaataggaggataatataagagcaggcccatagttgtatatattagtggactaaatgagtgatatctttattgtgatcatcatggtcacatttattgacagtcagtttagggcaaaacactcctgggagaggggagcatcaagccatctgaaattggacggaattaaagagttagaaaaggaacagagcaggtgtcctggtatagagtggacttgaacagggtgaaagaatgggcgatctttggatggagagaaggggagaagaaaatgagggtgagtaaaaggccacagaggttggaatgtgtaagatacacatttcatcaatgcaaaaataccagaaggtggcaaacgtggactttggtagaggcatggcacaggaaaattgctgttcataagtccacataggtgtgtcagcttccaaacaatattagctcactagatgcaaatgaattatccacattactctgttccaggcaatagcccctattgagctagtgacaaaggtaaaccatctctgactcatcagaaattctcttcccaaagaagtgaagggagaaaatgggagtggtaggccaggaatgaggggcaattctggttggcccagggtgagtcactttccctaatgttcctaccaggagatcaggccatgagctcttggctctgctgctcattcttgtcacctttcccccatattctagctccctcgggtcactcatcctatcacttttccgatagggccgtggagttgtaccctctctaattttatagatagggaccctgtggcctaaagaggattggggcttgcccttcttcctatagcacagttgggactaggagagggacctcttgaccatcaaccccttgcatctgcactctgtcctctgccatgtgacgtaactcttttagtcttcatgccaactgagaggcaaatgagacacaaaacagaacatgggaaaacttgaaggggctgtaccttgactgcaaagggcaccggggtacatgcgtagaggcaagaagagtttaggggcagcaggtcatcctacatgaccctattctcaaaagaaaatcagcccccataatccagtttcaggtctcatattccaaaacctaaactctgaactaacaaacattgtgattctttcatagatgtctaatatttactaaacaaatattgggacttgttttcaataccctctttcaaataccccttataacagggttcatatttctcttcctgaatgttatgaggcttcctctttcctgcctaactgtcccaaggcctctcctcctccaatgaccatgtggcaatcatagagggggtcttagatagtattcctgtatcaaaggaagtatgtctaaggaattggaggatgctggtcgttagcctctgattgataagcacttcttatttatttaatttttttttaaaatagagatgggggtttcaccctcttggtcaggttggtcttgaactcctggcctcaagttatctccctgcctcagcctcccaaagggctgggattacaggcatgagccaccacgcccagcctttgattgataaactcttctttcctcttccttcattctgtaatgcaacccctaaaagtggcaaaatcttgttttaaaattttgtctgtcccctcccccaaatttggcatattgaaaacaagatatggagcaatagtgactctgagaggagaagaggtgtagtgcaggacacaagaagctccccgctggtgaaatcctgtaatgtgtttctttcaagtccccctccctgcctttgtctcctggtgatgaggtgtaagttctgccttttttcttttctttttttttttattttcagaaagtctttgttgcttcaggcaagcatcagaaactgaatctgctggggtgttggttggactgtgtggcctctctttatccctctcttcccagacccctcaaaatcaggtgcattctatatccccttaggctagatagacattctatggatgctccggtctgcatgaggaagggaactccaacctcccccaagtcagttaattttaaacattttggtcttttttctgtataatttgggattggtgtaccagaaatgactaaaaacctgtggttttctgagagtgatcctgggactataattttctgaaattaaacttcaggcaaaaaaaataaaaaaaaagagaagaaaagaaaaagaaaaacagaaactctcatcgtggccagatggagccagagatttgtgagaagacgaggcttaaagagtaaaaggctatcagtgtgcgagatgggttgaaaaacaaaaaataaaaggtgaaatccgagactgccacgctcacctaggagaagttgcaaaacctccttagtgatgttgggaaaattcttttcagtgaaaagtctcttatggacctgttaaaaatatcccaagagcaaaacagcagaccccccacctttaaaggaggtgtaccttttgtcacttaatgcctgcctgtttcaaatccaaccttcattgctttgtgacgttaaaacatttcttctttgccagctggcatgatgctaaactttatcagcagggggcgctggagggctaatttcattggccaatggcagtggtttcttgccctccagcttcagttgcccaggatgctgcttgccagttttgacccatagtttcctgcctgctagccccagctgctgagtgtggatgagctccatctagggcaacccagttgaacatctgtgccatccagtagctgcaatcgcaccctctcaaaggaggtctgcatcctagctttggggcagggctcccttctcttccaaattagtacttttgtaagtagtctccctctgcctaggatgttctttagagttctcttcaattctcttgtagtagttacttctcttcaaatagtcaatacatctttatattaaactttccctgttcaacttactgtggttactgtctcctgactctcctttcatggaccatgatgccaaaaatgcaattactagtaggtgaaaggtttgatagt

SEQ ID NO: 39968 - DNA, 1537 bp, Homo sapiens
ttcaggtgtgtgtatgtgtacaatagactgcctggtaaaatgcatttcctattgtgggatacagacaaaaataactgcttagatggaaacaggcctggattctcatccaaattctcctcctcccctgctgtctagcagggtggtctccatactctgtgagccacagaaacaggttaattttgctgggtggctaactgagatggcaaagtgctatgtttatgcctggtgttctgatttagccaaagtgttcctgagcctatttatatgcccagaactctccatttagagggaattgagttctttaggagagaggactgggatcaggccaaacaggccatgaacccatgttcccttttccagattccaagcccacacccagagcttctgcttccaaacattccatcacttttccagttacaacatttccatatctttcatgacttcctcattttgtagccacacttcccactctgatatgtgatgtgggtggggcacgtgctcattcctggagccgcctccctgttgtcccacctctacctctccgggaacccgctgtgctgtgggacaggaggagacctagcggacagcctttggataaagcaggtagataagcattggaggggaaatagccctggagcagactctgagacaaagatttgagtgtaaattttaggttgaactatatgaaattgccatttttataggtcaaaaatctcaaatattggcaatgtcatatggtcccactaacagtttatctggaagttggagacatgggcaggagagtggggaggtgaggcagaggaaggaaggcagccagtgaagagtgtgttagcaaaccagcttcccctgtgggtggttggacttaatcccccaggagaaactcggggagacagtgcagtgcacacaccttggagttattccacccaagggcaagggaggtggggtatttaggcaccaactgacctcagtcattggttgagggttcttggtggggggcagggaacattatgtcctggaatttctggcatgctgcactggtgggcaggggcaagacaggctttgttagccagagcaaggccacagacagagcagtgtgggtactcacagctggaagtcagccagtgtgtgcccagcaggtgggagctctggtagacgagggccaccaatggtgcctgctacaggagctctgccaggggattccaaaggtgccttcagtgagcacctctggccacacactcatgtagatgagaaaatatgattgtagttttctagaagaagctattttctattttgagacccccattctacaggatatggaaacttaattgcagtcactgtgagggtcaccactcgcccagaattacatcagttccaggaaactggttactgcccaggtgcaggggagcatggtgccacctggttcttggtggcacctgtccacacgggcctccacttagacatcagcatcctgcctccctgttggacatcagcctatgtgtccacactcagggtagtccactagcaccttcaggcctgg

SEQ ID NO: 39969 - DNA, 2563 bp, Homo sapiens
acagggtaaacaaaggcctggacctctgggatgggctgttagtgtacttgacccagctactagggaatcattccagagaggggatacatgctttccaaacactatctttgggggatgctcttttatggggtgggagtcatctgagcttgactcttatcaatgagagaaatagctcatggctatgcagctgagatgagggctggggcaagggcaaagggattttttttattccagttgaaagcaggatatacataggctgctgtccagagaggggatgagcgcatggaaaggaattacactctgtctgcacttccctgaggaagaggcacctggcgctgccgctctcctcccaggcttgtggtggacattctcaagcaagtcattctggctccggtaggttatagccatactcggggtgtggggtgggggtgagacttcccaggggacacagggagagactgaacccagtggcttggggagtgggcacaggtgctgggaagagggaggtgctaagtcagtgcagagctttctctccagggcagctgttggagcaattgcttccagcacctggagagtgatgggtcttctgacctctttcccttccttgactctggctctgagaatctgctttgcagattctgaaaacccctgagagttggttctccaacctggctgggggagctcaggcattcctttccatctctgggcctcagtgttcccggctgtaagataatggggcagatgagatggtctttaagggcctctctcccagggccaaagtttcacagctctgtggtctcttcttttgcacatgtccaccctctccccatcctgctcctttcccaaattcttggcccccttccttctgcccaaaacagttccagattcaaatagtccctggatctcctcccatgcatcccagcctgaatcaaatgtcatttaatcagcgagtttattcattttaggggctggaagagaaccaatagtatatgccaggcccttagtttaccataataaccctgcaagggaggcagattataggtgagaaagctaagtatcagagaggttaaataatgagctcggagttgcacagccattaagaagtgagttaagctatattctgtctgttctaccctgcctattctgtctattctaccatgctgagtgtcctgcctttcctggggatagtggggtttcattttcatgctgaaatacacacgcaaggagttctcatgggaacattacaggcaacaagtacagaggcaaaaaacaaaacatcaaaaaacattctgggaaagacatgaaagtctcaccttctgcagcagcagctccttgaagggtcgggctctgaaagtgcttactttttgttagctgaaataagttttgggaggagggttactcttgtgattttatatatgtcacaaacatctctatctcctgaccaggccaggaaacattgagtgatgtggggtcccagggagcgtggggagcaggcaggcctcacatatctcaggagaagcagacagctatgtctagctggaagctgcaaggggactcctgccctgctgaggaatggacaaggccactcccttccagccagactttgtgtaatctggtgtaccagacgtggctctgggcatgaaaacagacaaacaggatacactaagatgttcctgtgggttatttttgcagtggtagcatctcaggggacttttgtttttgttttttggcctcttttctatttttccactgtatttccacattttacattgaatatatattattatggcaatcaggaaaaaataacatgttaaaaaagtaaggagagagagtgtgccgtgatctggaatcagaggccagctgattcctctggccagctgtgcctggcttacagtgtggccctggatttcctgggaaactagagaggcgatacctgttcaccccttcacgagggagccaggaagacacagcaatgactgggataaaaaaaggtatctggaaacacaaagccctgtgtaagtgtcagggctggtttctattatcttcattgtgttttataaatcacaatctgaatatgcttcccatgcagaccatccagaaggcagctgttcatcctgcaagcccgaggaaggggtgcacacaggctgaactcccagtgtgtgatttggggctccagctctggagccagctgcaggaacttggtttccagttctgccatatacttgctgtgtgtccttgggcactttactccccttctctgagtctcagttcctcatctgtaaaatggggcccattttataaggttattgtgagaagtcagtgcattattacatataaagctcagggaaggggatctacaacctagttgttattattgttatttttttgagacagggtctcgctatgttgcccatgctggtctcaaactcctaggctcaaggaatctaccaatctcagcctcccaagtagctgggactataggtgcatgccactgcacctggctgtgcttactattttctttgagtggtattgtaacctagcatttaagagcatggacacccat

SEQ ID NO: 39970 - DNA, 3288 bp, Homo sapiens
agggctaataatagtatttacttctatcaggtaaatgtgaggattaaataaattaatatatttaaagcccttaccctagattgtattttaaaggaggatatgatttccacattcaaaggaagccagcaaaagtattttccactagaagtgatctcaaacggtgtccttggcttcatatttcaaaggctggtgtggcctctggagatcacattcagtcttgtttatttgatcagtttgcatgttgaatcagctgcactgtgaacagtacactcaggatgggtgtgctttcagcccctgagggacctacacatgaccctgtccataggcttcttggctgtaggtagggcggccgtgaaattgatgtctaagatggaagaggggagatggtgggagacacaaaagagggttcgctgagtcaagcagggtttggtcaagctctgtgggggcctgatcaggggaatgctggtgaaggtttgacaagaagctctgggctgggggcacaggggaggtaggatggcagaggagaggaaagccttgatttatagcatttgccatggtgtaaatattcccagtttcaggttaccaacttaacatcactgaacgcagagttggttaattccatgatcatttgtttaatgcctcccagatgccatatgactggctctcagcacaccactggctttgaaccttcctgccactagttgccgaggccagaagtcccactgtcggaacctcaaccttcgaatttaagtttgatccattttgaaagggagtgtgggggggaaggggtcgtcacttccacctcacgttgtgagggccatccaatccccggccccccatttgctaatctgaggctgtggacaattgggcttcacctatccacacctgtttctttatctggaaagtggggattataatcactttgcttcccaggactatggtgaagataggatgagaaaattacatgttagtgttcaactcatagaaggagcccaactaacatgctgcatcctcatcacaatatctttcctcttgttgcctcaactgcgactttcctgagagacctaagggaggtgagccctggatatctcccagtgagggtaagatcctgggcaaccagcaaagactgaatcatacctttcttttttttttttttttttgagatggagtttcactcttgttgcccaggctgtagtgcaatggtgtgatctcagctcactgcaacctctgcctcctgggttcaagtgattctcctacctcagcctcccaagtagctgggattacaggtgtgcactaccatgcccggctattttttgtatttttagtagagatggggtttcgccacgttgaccaggctggtctcaaactcctgacctcaggtgatccacccaccttggcctcccaaagtgctggaattacaagcatgagccaccacacccagccttcaatcacacctttctcagtgactcctttttgtaactgctaggtagagcagaacagaggctaaggatgaggtgggaccagggacaaggtaccatgtgcctggagtctgaagacttggatttcagatgcaacttgactagtgaccctggtaaagttgctttgctcctgggttaaatgggactgatggttccttcccaatttgccttataaggctgctgcagtgcatatgaaggtgtctggccagctgtaacatgcatatgggagtgctgactgctgctgtcattgttggcattattgatgaaagtgataggagggaatggttgctccagaggtgagggagacctggaaagattcccagagtgaaagatcaggggtaaaggcctgattgctgttgccactgttgttggcattattgatgaaagtgataggaggatggttgctccataggtgaggatgacctggaaagattcccagagtgagagatcaggagggcaaaggcctgatggctgtggtcattcttgttggctttactgatgaaagtgataggaggatggttgctccagaagtgaggatgaccagaaaagattcccagagtgaaagatcaggaggctaaagacctcgagtgggaagggaatagagtgttccatgtagagagagaacaaaggtggcctggactagcaggttctgctgactctgacctctggctttgattgaaacattcatcagacttggttgtttgctgaaacaaaagtcaggggacttcgagaaatcaagtcaagatcaaggtccatgtcagcagctcagaagagctggtgtttaatcaatgtcaactcctgagtaataagccctgataagacccgagtatactcctcacatcctccttctgcagcagctcacaggctcccagcaccagccatgtgctaggagtgtccttactgctgcccagaaaagggaggagttgaaggccaggaggcccctggtgcagaggagaggacaggaagaccagcagaaaaaggcactgggtaaagttcctaaggttgatcaggaacagagttgggccttagataaagccactcaggctgagctcctggggtgggggcaggtcatgtgtggtttccacagcatctggtccagatgccatcggataggagcccaagggtggggcagaagctcacagagtgggaggactccagggctccctcaggagaggttctgtttcagcagcactgaatagttccatcagccatgagatcatggtatcatagatactttgggtcaactgaggacccgagtcaacatttctttcgaagtctgcctgaaaaaaggggataaaacttttatcagaaagggctaaggaaaatgtttgcaatacatatgaaaaaagctaacatcctcactattataagacctcataaaatgagcatcccacccattaaaagaataaataatttacagaagaaatacaagggggtattgaacatattaaaaagttcaagctcatgcaagtaaaatattaaaaagtaaaattcagaagtacggggtagagctgatttgcatttctcagtttgtggcccgtgaccatcagcagtctacaggcctctcttcagtggctcttcacgattgcctgcttggaccacaaattcctttttatctccttcctctctcctcctcaagcccccttccccattggtgaatgctctttgttcaatatgaagtctctctctctccctgtctttctcctggaacacactacaggtttgagcctaattcttagttcatgacatacttgtatcactggtttatgtgaagctctcatcaaaaaattattttaaataatgcaataaa

SEQ ID NO: 39971 - DNA, 6153 bp, Homo sapiens
ccacagggtccattaagttcctatctgcacatggtcactctcagttgagaccttctggtcctgactcagggaactccagccctcagcctcaccccagccaatccataggccactctcctggcccatattcctttgggtgtgaggcacaaaaggagacacagcaccaaggtctagggagggccaaggaggtgtgttaaggctctgttcctgcttccccacagccccagccccattgtactgggcacagggcctggctgggcagagatgtcattggtacatttcccatggatagtcttccaccttccagcccatttctcctccttctatgccccctactcaactcttctccttgtgctcctggtccttgtagaataggatgggatatctcagcttctcctaaccaggcagagctctatcaagccctaggcagacatcagcatttgcgggcagctgacctcagagaaatgcaggccctggaccagggtcacatagctagttggagacagactgtcaccccagctcaggcccttgcctactctcctggcagagcagaacaggcagccagcctcaggagaaatgtgaggctgccagagatgtaagataaaagtagcagagagaagttccactggctggtcgctgggtcggggggtccatgcagcctgggcccacctcctccaagacactctatccagctcccacagtcattcttcctcctgtcccagctccagctggagccctgccatcagccagctgcagctatggcagccaccccctcaccctcttgtagcactgataagcacgctgggaagggggattgtcttcatttcatagattggagggctgaggccaggaaatgatttgaggactgaaagtaaattagccgagactggaagtcaggtttctaacatttaatctccacttagggaattggaggtcagaaatgaataaaataccatgccccagtaggctccagtctagggaagtgggcagcaggcagaaaccaagacacagaaagcaacgacacataacagatatgctatgatacaaatggtgctgcaggagctgcacagttcggaggccatttctggccagaggatgggatgcgtgaaatccaggaaggcttccaggaaggagtagctggcactgggatgggcaggaacagcaatgtctctactgatggtttcattggagaaagctggcaaagttgagaagtttggagactaaccgtgacaaaatttaaacatcaggtatgtgaaggcaagggggaccaactgtgacaaaatgtaaacgtcaagtgtgtgaagtcaaaggggaaccaggaaagtaaaagagtgacaatcagcagtgcttttggcaaaaaggcctctggcagcagtgtagaagagaaacgcagagatcacaggtataagaatgacagtaggagaggggaggagggtacatatttcagaggcatcacaggggggtgtactgataggacgggggcctgcttgtatgaaggtgaaagaggaggagggagagtgtctctgggagatggggtgaatggtagtgttctgagcagagagagcagggaaatcaggaggaggagtggttcagggaagaggcaggggttcagatgccaagttctgcattggccaagctgagtcagaggtgctgggagactcccatgtgggtctggggatagaagaaagctctgagttcagcaatgatcatggaaaccaagggagggttgacagcaccctgaggtgggggagacatgggcactgaggagggatcttgaatgattcctacattaaagacatcctgactgggcacagtggctcatgcctgtaatcccagaactttgggaggccgaggaggccggccaaaatggtgaaacgccgtctctactaaaaatacagaaactagccgggtgtggtggtgcgcacctataatcccagctactcagaagcctgaggcaggagaattacttgaacccgggaggcagaggttgtagtgagccaagatcacaccactgcactgcagcctgggcaacagagtgagactctgtctcaaaaaaaaaaaaaggtatcatttctctagacctgtgctatccaatagggcagccacctgccacacacggcaattaagcacttggaatgtggctagtctgaactgggaagaactgcaaaagtacagtacataccagactttgaagacaggatgaaaaagggaaggtaaaaactattacgttaaaatttttaatagtgatcacgttgaaatgccaatattttggatatattggattaagtaaagtatattataaaaatgaattgtttcattttactttttaaaaatgtgtttaccaggaaactaaattagctgggcaaggtggtaggtgcctgtaatcccagctactggggaggctgaggcaggagaattgcttaaacccaggaggcagaggttgcagtgagcagagatcgcaccgctgcactgcagcctcggcgacagagcaagactctgtctcaaaacaaacaaacaaaaccaaaaaaccccactactcatgtagcttgcttcatatttatgttggatgacactgttctagaacctgaattccataggatgtgggataagtgttgctgaaaaaactaaagcaagctgggagagtggaggctgatgtttgcaagatgccatgttactcgtgtctggggggaaccagtctctgtactcaggacttctcaaggcaggcatcatctcccaaaccaagttgcccacagatactcccccttcctctggacttcctgtgagaggagggttcggcagaacccactctgagagatggtattttaaagagaatgataagcctgtcagatgactaggcggggagagagcgaggacaggcagaacagaggtagggggtgccacaggaccagagggaggggtggccagtggggtcttggggctgcagaggggtgagaacaggtgagagatgcaatagaactcctctggccaggtttgcagctggcttggccaagctcactctgtaggatgcaggcggtagcggaagcgcacatcgtggctgggctgcatggtgccaaaaccccagcgctgcgggtcaacatggggtagtggtgtgtcagggtccaccaactctaagtcaaagtgtgtgaccataagcaggataaagagcttcacctcactgagtgcaaagaacctcccagggcagatggaaacgcccgaaccccagggcatggtgtagtggtggatcttcttgcctgtcttgaagaagtccactttccggctgccattagggttgaggaagcgatcgtacttgaagacggtgggctcagggtggatgtcagggtccatgtgcactgagaggtagggaaagagggccaggatgtctccatggcggaacagatactcctgcccactggacatcttcagggtatagtcttcatgaaccaacctgaggagggtgggtgcagccctcagccgcagcgtctcctccaccacgctgtctagaactggggtgtgttgcagggcaccgagtttgaaggcaaaggactgcttggtctccagcctggcctcacccaggacctgggtagcttcctccctcacagcccgaatagcttctgggtgcttcaggaggtacaagagggcccagaaagaggtaggccccgtgttcccctgggaggcccagagcatcatgaagttgaacttgtcctgcatagctgagggtaccccctgctccctcagaaactgaagcatgttgcccagccagttgctgatgccctccttctcctggctgtggctcacggagagcatcttgtgaaagagacgctggagtcggcccacttctagccactcccggggccacagcagggagtagacaaaccttgggaaaagaaggtcaaacttgcggaactccatgaataactctcctgcctgtagcaggtcctgctccttgtccttcgtgtagccgaacaagctcaggtagccagctgtgaacaagatgtaatagcagaagcgaaagaggctgtcctcatgccagcaactggcatccagactccagcctttggacgtcagcattacaaaggacaggctgtccagcatggtctcattaagatccttcaagccatcccccctcagatgcttggtgctggctgagtgtatcatctcatggtccccttgcactgaacggtatccaaataccttcagcaccagtttttttgcatattgcccaaagtctagttttctctgtgtgtccttgaggatggagccaaaggagagggggtccatgacgaaggtgaagtactggccccctagctgcactgtgaacacatccccatgcttggtcctcatgcgcttcagaaattcaaacatattcttccggaaagccatggcatggccaagccagggcacggtacccttgtccagagggggctcccatggcctgcgttgtcggagcatccctggcaggcacaggtatccagcaatgaccaccagcagagctcccagcactggaccccagagaaccatggctatgctcctgcggattaagctctcgacacgcacactgttccctgggtgccagagagctttgggaggccttggaaagtccaggatgtaaaggtctgagcacctggaccttgccctgtggccgcaagttatggcaaataacactagtgagacagtacttggaagcagcaaaatgttcccctggacttaacacttggctgactggtcacgtaggggaggaggaggtaaccaggagaaagctcagagagaagcttccagctatggtcacagctgctcaccagcttcatgctttgctctgaccttttcagacagctcttgcaccttctctctaagcctgccttgagcccactcccacccccatagctgacagactatttatacccccatttactcatgcttttatttatttgccagttcagttggtagaaatgaatcaagcacttacaaaatctcacttccactctttcctcatctttagaagactcaacaaatgcctccattcctacttggcccccttggtcaagtaagttaacctcactgtggctccactccctcatctgtgaagtagggataattacagtgccttgtaggtgctgttgtgaggcaaaaagagataacacctgaaaagcacttagaatagtgcctggctcatgctagtgctccatatatgttagttagtatcctaaagccttttctcttacctttgcctgctcccctggacctcacagcagcccgtgcttatctcctcattctttccctagtctgtcttcctctctggtctcaaagatgcttgccaagggggcatgaccttgttgaagtcatgtctgctcctacctccatgtgcacagagtacacagtcaaaggcaagtgaagaatgactgtatgcccttccacaacagctctgacccctaacccaaaaaaagaggcattgatgctggggctttagatgctgagaaggctgagatggtggagggggtgttgactccatcttggggtatgagtgtgaatgaactcatctgaggaggccacagagcctcccagatgatgactcttcaagcagaggctgagccctcagtctctgagcctctcacccggagccctctcacctgcccaactgcttgcctatacacttctctgacaagaaggcagaatcctggaattgtaaaatgtcagagacaatagagacctcactcaatcacttcatacttcatttcacaatgaggatctaggtgcagaacgcagtggggaccctctttgacagctgccctggcttggggccttgagataagctaatcattgactaagggccttctgagacatgtcagcccaggtccctgccagcagctcaagagggagaaaactgtaccattgacgccaaggcattagtcaagcagcctggcccattgttgctataggtgaggttcaaactcaattcaatcagttctgataacctccaaattactttttaacttcctaacgacctgagaacagggacttcggctcttcagacaaaagagggtatggaacttccatatcccctctggagtgagcttcctttgcctatgagcttccccttggcagggagttggaactgtccacactctgcttcccagaatccctctttaattgttcagg

SEQ ID NO: 39972 - DNA, 1506 bp, Homo sapiens
ggggctgtggcacgggccatggtcactcatatttggctcaggataaatcccttcaaatattttacagtttgacttttcgtggacaattctacaaatattccttggcagttaaagaaataactccccaggaggtgctagacatcgggcgcatgttagaggcacaaagatgagaatgttaaaagacataaaatacaggtctgctctgggaatgcaaaaactggtaaaaggagagataaaagagcaggtgcagtctagtgaagtacccgctacctcctatcagcaaatatctgtccacctagggtgcagcgagctggagaggaaggggtggcctagagcgcaggggaaggattcctccccagccgcctgcacccctaccccggtagcggtccctgggatcgtccgtgtctccaggagaaccggaccgctctcccctccctccccgagcgagaaaggaggaccacagagatgcggcgccctccgccgtcctagagcaaccggagcggcccgagccccggcctcccggatgctggggcctggcgggtgtggagcacggggagtcgggcgtggggcgggcagggagtggagtcggggtcttactccggtggctgcagggcgcagggtagccgtgtcaggcctgcccaggtgcagagcgctcttccgcgaccccaacagcctctggtccggtctggcgcgccctcgctttcccagagggcgacctgggctatggcggccgtggcgctggcgagcgggacacgcctcggccttgtcctcgagctgctcccgggacagcccgcgctgccccgggcgcgccgggtgagtgcggggccggagcctggaagcagtcttggccctgccctgggttctaggcccggagacggggtggtgcggcggctgggaaatgggggtacaacccagagtgaggggcctcgagggacaggcagcacagcggagtcgacacccctggacctgagcctcaaggagagcagacgtgcagcggcacggggttgagccgactgctggggcagagcgcacagagtgctgtcgggggcgatgaatggccagaatttcagagctgcctttacagagctggttatgtttgagctgggtattaggttgaaaaggaatttgcaatgcaggagcaggaaggaagaactggatattcaggcaagagtagccgcaggtgcaaggacacagaacagggtgaggaaagagtttggtttcccaatgcaatggtgagaggatcggagatgagagtggtggtggctgatgatcctggccaggaaagctgggtctgtgagtagtgaatggaattgtctgtagtgcagaggaatgtggactctattaggcagacaaagttgagccagccaaagccttggagccctggagtgctggataaatagctgtggagactttctagtgcgcaaggactgaagtgcagtggaccagaatgggctcctccacagtgtggagactgagaccctgaaggaggcagtggctgagaattac

SEQ ID NO: 39973 - DNA, 1305 bp, Homo sapiens
ggacaaaaactcttcattgttaattagcttagtggtcaacggattttccttccaaatcctcttggggactgaacccaaacaaggcgaagaagtgacagtaaaaaaagacttgtccttctgacaagcgacagtaaagaaaaagacttgtcctgcttggcaggagagggtggcagtttgggcaacactcagccatattgctgagttgcagcgaactcaccaagcaccctcacaccttagaggcgtccctcaccgtccagccttggtgcatcacccgtcaggcgggcagtcagggcgtagacctttccttcctagcacctgggcccctactccagaagaccagaagactgcggctggccgagcccccggcagggcttttattgtgaagggagcttccccctcccgcgctttcaggggaatggggaagctgggccgggacgcgcggcagggactttgcaaactctgcaaaagtcccgagtagaccgcagaggctcgcggccgcgggtaggctccctcagatccccgtagatctcagtagatccggcgtgtattccccacccgcggagtatcccggtgtgcagcgatctcccgagagttggcgcagggccacttggctgcagagaacgtgtgcaccttcagtccgggaaacccgccccagccgagtagccgcgcatcctgggaagcctggcgagccacggcgccgggggcggccaaggggaggcgggatgagtctgcgagccggctgagcgcgccgaggagccggccggggcaccgccggggacatggtaggactcgcgggaaggaacgcgcgagcggagggtggggcgatcaccaggacaggtggctgcagtcaacgcgcagcggcccagggcgcgcgcagcctgcgcggcctcccgaggccggagttgttccccgaaagttgcatggggcggcggcggctttcatttctgcaccagagctgggggcgatcggctttcctgccgctcttagtggggcggaccgtaataagggggcttttattactaatctgcactccttgacctaaccgtaacccactcgcaactctgcaatcttcatgcaatccacaaggcagggagaggggagcgttccctggggaacccacggcagcctctgatgagatgcttttgaagtcattttaatactctccaaagttcatgtgaattttatactatcttctctaatttagctatgtattgatattaaaaataatgtcctaacgtttattaacatttaataactaaattaacattgagttaaattggctctagtaaggttccaatccgcctt

SEQ ID NO: 39974 - DNA, 1441 bp, Homo sapiens
aattctatttcacacatcagaaggcgaacattcccttggccgacattgcatattatctttgttacattcctctgtcacatttcccagtagatgaataagatcaagcttaggttctcagaaaagcaaacaggaaaatcacattaatactttgtaaagaatatccttctcactttagttgttgtagagtgctgctcccaagaaattaactgtacagtcattcaacacacggatgaggtgatggaccatttcattgtagttgtattttggggcaaagtggggcacggaggacagtgaagactaatttctgttgcttgctagttttgtctttgaaaatctggccctggactcatttcctcaattaaattttacattttcatgaagacaagaaaaattttgttcttttgagaccctatggcaccatcatgaactggtggagatgcctgggtgcctgtcacagaaaggaagagggggttgagtccacattttcctaggaggagagctctctccttggcttctcttcccctcctccacccctgcccctccctgtccaccagacacatcattccagatgcctcagtgttgggaacacccagtgccagatcttcaccttggcagaaccctgagcagggcgcagacattgtgggcctagtccagaaagccgaccccgggtcatatgctgtaagaagttccacgtcatgacacaagggaaggagcgaaacccttccagctgctgcttttcttggtggaacttgatgatatgcagtccgggaaagcgatcattccttctaacactggatacagctaaatccaaacagcacgtggccacatctagcctgcaatggacttggcctggccagagcagggcaggaagccagaacaaagaaaaggagccagatattatgaaatattggtctgtgctcagcaggcttatgcagcctccagcaagtatgtggacaagaatgcagagcttgcctatttgtttgtgaacatgaagctgcagacagggagctgaggggaaatattgattaatttgattccctttcaaaagaggagagctgtaatccaagatgaggggctatggctacttacttccagggacactatttttccaggagcctcagtgagacatgagaggaggtgaggaaggtaaaggtgaaggtggggataggtgggcccctgcggatgtaattagactgctggcactgggggcctctggaggcagtcaagtttgctttggaggaagaatttctgaggggtagggaggcttcctgtgaggtgggtccttgcctcaccccttccccttctcctgcaggctccaggggtctgaccgggctgcctgtctctcttcaaccaccctctttcccacccgcagttgtggctcctcaaggcttgctgggcaccctgccctttctactgtcacgtatgctctcccttccctttg

SEQ ID NO: 39975 - DNA, 1151 bp, Homo sapiens
gttttcttgacctgtaaaataaggatgataacagtagtacgtatctcataagacgggcatgaggattaaattataagtaaggttttcaagcagtctcagacatgtagtgaatgctgaatcaatgttagttatcattcttttggttttctttctttttcctggaattggctgagccagaaattacaggggcaaaagtccgctcttgtcttgaagttgctgatgtgtaaggaaaaatcaaagccctctgatggagctgagcaagggagcctggcctggtggtagctttggagacaggctgcctgttattctgcccacagtggagcaaacagcccagcctctcaggacccagcatatctgactggagagggaggttgtgcctgttgcctttgccctagaggccggttcagctctgcctgcctggggtctgactttgggaaatcaaggaaagcagggttgcctgctgagttcctcctaggactgggacatgtggttttaatccagccctctgaaaaagtctgctcatatattccctttcaccccagccatagttttgttgtgacaaactgcactttaagaaatggaacagaaactccaaattcccaaatctttgccagtttaactcagagcctaagtagtgatgaatcaggcagggtggctgtttagaaaggggcaaaggtcggggaacagaaactaaggggttgtcacacctttagtgatgactccagagttagacccaaattccgtttttaacacacacacacacacacacacacacacacaccccatcacatggcttccctctaccccttctcccacccagaaaactcttaaaaaacactttacaagtgctttgtgattttgtctgtttgggtggggagaagagcatgtgatctgtcttctctccatcttccctgcccagcatgttatcccattgcccatggcagtttggtggaggaccaaatttttgtcatccttttttgatgtctggtagttgaggaaagatgacttagcctctgtctttgccagctggtccctgtgcagccagccaactgcagtcatatttgtaggcagtggaggtgtcagggtgtagagtggtgcagggcatagaggcagtctggggagtggagatctagtgccaaactgtcaggcaa

SEQ ID NO: 39976 - DNA, 1148 bp, Homo sapiens
cacctcgcgtggctccccaccacccccgccaaatgtgcaccacccatcacctcccaaagcaaaagggcctgaggacccgacgccagtgcctgccacgagctgagggctcgaactggcaagccccagggcgttgcccaggtccccggcccccggcccccgacccccaatccccggcccccgaccctgagggtccacccccgccccgcccacctcccgcgcctccctcagctcgcttcacacgtcacccctcagttctgcaaactctcctggatcccgaaggcgtcctagaacctccccctcaccccggggcccagcaccgcgtcgtcccctccagggggccgagggttcgacacctccacttcaagtcccaggcgggtgtcggagtccgctccagccccaagcgcgcgcgcgtcttacctgaagcctggactccgcgggacgaagccacctccgccgacgcgtccaggaggccccacggcggcgccgctttcccaccccgccgccgcccccagcgccagcttctggcccaggaggcccagaaggcccaggcagccagcacaggtttggccgcgccgccgggttcgcagcgaccgccacctccaggctcgcaggtgtccgccgtgcgcctgcccggcgggcgagcccggcgcggagcctgtgcgcctgcgcagagccgcgagttcggttgccctggccccggccacaaccttggctcgcggaatcctgggaggtgtagttttgcgtacgaggacagcccgcgccgccaccagcctgcggaatgttgggagtgataatttgcgccgagaggctgagttttacttagtgttaggattacacagttatggcagttctgataataaatttaaatgcaagtttaaccaacaaccaaatgtcattgtaaagtcaaggtaattaatacgtttacatgcttttaaaaattgtaatgctacagagaacttacaaaagcaccagtcctctgcggcaccattccattaaccagctgtcaccttatcccaccgtccagtcctggctgtccagtcctcaagggcagctacttatggctgtggcatctggcattcccgcggattctccgaatatacatatgcccctatttcttgagttatgaattttagatcttttgacttctt

SEQ ID NO: 39977 - DNA, 807 bp, Homo sapiens
gttcactctcagggaggcacagtcatttgtgttctcattcccatagggtggaggtgatggtggggaaaagggtggagaaagcaaggctgaaacagagtgtgaggtgctgggatgggagggcgtcgatgtgggaataaatgttcaggcaggcaggatggctgttaggcagcacatggtctccagggccgaaacagggaagaggcctgaaatacgggcagccctgtagttaacaaggatggtggaatctacagggatagaggaccatcaggtatcagagggcatagggatggggggatgccccagcctacattatcacaagagaaaggaagaggagtcatggtggccacagcccttcttcttctggaaatccttccctgcctcagagatgctcctcacccgaattcccgcagcagcgtccgtttactgcctgctgccctcgcctggaatcttaggaaactaccaccactgcaaccacaggcgtgttcttcaaagagtgagtcagccattggccaaggcaggaatccaatggaagggtgtcagagctggaaggaaccggagggatcatttttgtacagccactccattttacaaataaagaaactgaggcccaggaaggggtcttaggccacattagtggacttgagcttcctaatctacagtcacagatgatctctgtggctcaaatttcatccaaacctgggaaatagaggatacccctacgagcacactcttgtagtttaggtacaggtgttacagaaacgtgtccacagtcaaccactaatgtagctgtttataattccaaacatg

SEQ ID NO: 39978 - DNA, 3533 bp, Homo sapiens
ctctcaattttaactcaaaaaatccacagcaccgagggaagcagctcctccaagctggctgcatgaagcagggccacagccgactgtcccatctgcttccctgctcctgccctcctagagctctggcctcagccatggcatcctagagatggtgttgcggggtttgtcaactgaccagaagagagagcaaaattaaattacatatgaaggttgactgtggaaaacaagaggagccaatgttgagtagcagcatctcagtgagacagatgatggcattgcttatggtaaccctcatcttgagaggggctgttcagtctgtgaggtgcaccactggaagcttccaaaaggcccagcaagacccatttctgtggctgacttgccatgtgaaacaccccaggcatgtggcctgcacctggagatgccacacccatgccaccaccaccgtcaccccgtacaccttttgtaagtgtgccccctggggcctggcaccagagacacacagatcatgagcgcagaaccatacctggagaggcgcctcctgcaacatgaatattcaacctcacagagaattttgacctttgctatttctcattggctttgtggaataatcagaggagccagcgtgagaacaaggctggcattcacaaagcttagctctcatttcctcattaatcctccgagtcagcattacgaggcagggagaggtcaaacacgattattgccttcatccagaacggtagggtaatggcctgccctgtgtcatgcatgagtcacaagcagagtggggtctaaccgtgatctttggaccttggctcctgattgcaatgggaaggtagaggtcacagatgcacagattggcagaacagttacctgagcagtgtgacttcaagttcaaggcaaagatcttcctctatggttctgtctactgttgcccaagtggctaccattggtcctcctttggtgttaagcatagtttacagccagtatttcctaaatggccagaatagttcatggccaatatttcccaagtgtcttggaccaggggcttgcttttggcactcctggtccaaaatatttgggaaatacaggccgagcggacagctggagctgcctgaagcatcgctcctgggccttggtaaaaacatcacctcaatctgttcaaatgttccccaagctcagttcatcagtctggctgagtcctgggcagacacgtaggaaaagtccattttacttcggtaggagggagtcgcagatggctctgtggagagatggggcccacccatctcagaggcagaaatgagagcaggatgaatccatgtctggggcagaagccgtggagggagacaaatggcatgcaggtcctccaaaagccagccaggggccccctaggccgcaccctgcctccaactcacacttagcttttggtgaaaggcttttccctgtctcttccaattattgctcttttaccttgtgctaggctctgggataaatcattttcatgtattctcacaatttccagtgaaaatctgacactcagagaggtgaactgctcatgcttgcatagctgggaaatggttgaggtggaatttgaactcctgtctggctggagtctaaatgttcctgcttctcagaacattcctatacatttattcacggacctaaacaagttgtggggagggagaggaagaggaatgaaggggaccagctccgaggcagagaggaaatggtgaggtggagacacaggaaatcctgactgtgtatgtatatgctgtcagcacgtaaactgagctattttaaggtcaaggccagggtgcagcccaacagaattgcgaaagcaaaatgtgtttgcttctgcagttggctttttaaatacatttttctttattaattggagcactggtgaacatctgggtcatcctaaattaggcctttgacatttgaaaaaataatctcaggtaacagagtaaatggttcaggctctgtggccagaagtctcctggtctctgacatccaatctgtttctgctcacctggtccctctttttaataaacttgctggaaagagctccagagaaaaggggaccgtcctgagaaactgtggccgagcaaatgcagcaaaagacaggtccagcagaagttggtggccacaaatccagcagcccctgcagacaaagtccttagatagttgggctcatgtgactcttctgcataccccatgggcagcatctgcaagggggtcgtgggagttctatagccctgtgtgccctttagggcgtaggatcccccaaccctccaccaaagcttcccatgcaagtcgagctcaaatgcccaccaattacagccactgtcactcccagctctggcatgctaggtgaccttgaataagttacttaacttctccatccctctgttttcttatctgtaagatgagtgtgataataacataagtgaccttatggggttgtgatgggataaaatgagacaatacaggcaaggcgcttgaacagttcggggcacactgagcaccatgcaagcatgtgcgattcttccttgttctggctgtggagaacatgggggagggaggattgattgcacaccttctgtgtgtcagagggtttccacagatgacctctaatgcttcctataatcccttaagaaaggggtcatcaccaaagtttacagttagggcaccaagtctcggaggggatcagtaactttgcctaaggtcacagggtttggagacacgtgtcagggtttgtactcacataaccctgacttcaaaatctattatctgagtcattccacacctcctccctaaaccacacctggcccgaattacgtgtaacacctgctcagatggtttggtgattaaaccgcagccttgggggcaggatctgggaagctggaccatgctcactcatgactccccgggatgggtcttttctatcattcacagttcccgttggtggcccagtgtggagtgaccagagatgtcacgttaagggaactgaaaagtgagaacaaagctagaagaggagatgggatcttgagggcaggaagggacacattccagcagaaacattcctgtgtttttggcctggcttttcacctgtcccccaggaaagctggccccaggcagagtgacacgtgtgaggagactcctaggaaagtcactccctgtgaccgaggcacctccctgggctggtccttgcacctgtcatctcatgcactctctacgggaactaatgatgatgattatgcattttatagagaggtcactgaagcgcattaaagtgaaacaagttgctccaagccacacggcggaggaagattcaaccttgagtctggggttcaaagtctctgcattttctatgacagatcccttcgcgatagcaatggcgctgctcgtataatagataatatgtgatagggcactggccaaggctgggcttctatcagggacaaacccagggacaataacctatgggttatattctttttattttcatttatttattttttaattttaatttt

SEQ ID NO: 39979 - DNA, 471 bp, Homo sapiens
ttctggctttaacacagaagggctgaggtgttgaatgcaaaacagttggaggttgacccctggctggctgatcccaactctgagttaatcattgcctgccaccaatcaggtaggaaatatcactttactgtatggccaccgagaaccattactttcaaattgttgtgggttgccacggaaacaaggacatcttaatgttaagaataatttactctgtaatgaaaatggtctatctctaaaggaaagttaacttggaaaccttttgagtcatccccagttgctgtcccctccccacccccaccctactttcttctgcttgcctagaggccttaattttgatgatctatgaggtgtcagccagaaggtcttgtgctctgccgcaaagcactataaaaaggcagatgtatgactgtgtcatccacaaataccctagaaagttaagtgttaaaccagtgttaataatacatgttt

SEQ ID NO: 39980 - DNA, 1458 bp, Homo sapiens
aggtgcagctggggaggaggcacaggggagctgatgtgcccagaaggggcgaaaggatctgaggatatagggacatggggctgacagcatcctgcctcacactccacccacaagaatataaaggaaagaaggaacccagagttttcttccaggtccatctatttgttcatcactcatccattgatttaagcaaacatatactcagcactggtcatgttccagttattgtgctaaatactgagggtttctaaaaaaaaaaacatggtcaagtgtggggaagccagtactaatcttatacttgagaggctagcactccaaaaaggtggggtggggaatatgtacccaaatgtctatcacccaggtcaggtttggacttaaatatttctaacttctgtctaggtctcttccatgaagggccaagccttcgatctcagaaaaaaaaccaaaactctctgtacaattatgtaatccaaaggttctaaggctatgctgccaaatgttaataaagcacctagagatccctggatgaaaagcacaacatgagtgcaaggtattattagtaatcaaagtggtatttagtaataccaaaataaataagttgacccagaagttttgctccgcattcaagggagcgttctgggtatcctaggccctttatctaagaatcaaatgctcccacagctataacacattcctgccctggtttgtcttatgaactgagcattttgctggcatcacactttggtaagtaccctgctgattccaagggcagcatttcagcagcagccctggcaggcgggttacttaaggtcacgtccatctattgcccatgacccacatgccaggaccaggagagagtgagaaggggctggagtgagtggagactaatagcaaaacattctcatttgtagggtaaaacaggttaggaaaagtgcaggtagtcttcctgttcctcctagggccacagactggcagataggagggtgtgcccaagactacggctgctggattaaataggggccacacagttaaatctggactgcagataaataacacatactctttttttagtatgagtatgtcccaaacatctcatgggacatacttacagtgaaactttttttgttgcttatctgaaattcaaatgtaactgggcaccgtgtatttttatttgctagctctggcaagcctaccccaaggacttcaccacaaggacttttctcctttaattccctgctcaggtcagaagtgggaggccagatagctaaagaggacttcatatcaggctggatagggagttcggatctccctaagcaagctattgatctgatgtcaaataaaattgctttttaaggtcttcccctaactgtccctgggaagtgtgttcatggggcaggaaatgaaggcaaaaaaatgaccaaggaaagaatcccttggcagagcctcaaattctagaat

SEQ ID NO: 39981 - DNA, 1467 bp, Homo sapiens
gacacagagataataaaatcctatctccactctcaagtagcttgtatcaagaggaggagtgtaacttgtgaatgaaaaaagtgacaacgcaggggaataagcgattgcaagcgaactctggtttggagttgaggagtcatggggaaggagagagggggtgtcagccatgcctagaggaacagaaacacaggagtgtggcaggggctagtctagttcaaccagcttggtggctgagtcatttcacaacatcaccaggtgggaaaacttgagttcacattcccacatcctccctgagaacagacttgcctgtaggtccaaatacacctgatggttccccatggacctccacgaactctggaggtgctaccactggcagccccggtccccaaagagctgaccaggggcttttttcccagctcctcttttgacgggggctcttactgactgattggccaactccaaagcccagcatccccttctcagtcctgtctcacttctacatcagaattttgtccatctgaaagtactttccattgagcaaggcaggactgggaataaactcctgcccataaagtcaacacttgaaccattccagtccttagcatctagacttagcaattctattcaaacctgcagcatggccacctttgataattcaatcattcaaagctatttattagccagggcctgacccaaatgtccatctgagtcatcctgttactgatggttaataattatgctggaatttttagcctcactagtaatcaacaatgcaacaaagagctactctttttcacctgtcaaattagcagtgcttttttttccggagaatactcaatgccagccaggaggctgtgagatgggttccttcaacactaccattagtaaaataaatgggacatcctttctggaaagcaattcaacaatatgtatcaaaaactgcttaaatattaaaacttattaactctgcaaattcatctaaaagtttaaaggaaatagtcagggatttaggcaaatatttatactgctaccatttattacgctgaagggagtacaccatgtgccaagcacttaatacataaattatctcccacaccaacaaagatgtccacaaaagcattgtttttaatagtaaaaaatcataaacaagctacatttacaaaaatagagaatgctaacacaacttagaattagtccatagaacataatactacacattagaaactaggtctttaaagaatgttaaatgccatggggaaagtgcttttatatacaacataattctaacttatgaaagatatataacaaatatacatgcattaaaataaagagaaataaataaaaacactagtaggtagtataggactttttcaatgctttctacattttcctatttttctacgattgacatacatcccctttcatgatgaaaaagttataaaaatgaaaacacgcacacacaaatgt

SEQ ID NO: 39982 - DNA, 2104 bp, Homo sapiens
aggccagcactgcattcagatgttgggcttttccaattttgcttaaataacaacaaaatcaaccgaattttttcaaattagagtcccagggagaagaaactacagagaaaaaaatcatattatgtatatatatgtatatacatatgtgcatgtgtgtatgtatatgtatttttacaatttttttatccttgtttaaacctgggcgggaaccaaagagtaaagcgcgtgcggctccctgccccctgccgccaagacgcagtcctgtacagacgcggtcccttccctccgatttcccctgacagctcgcgctactttttcccggccattgttccgtgtccctggtgcttcctcctcccccgtcctccatcctccttgggcgccttgcccgctttgtcccgccagccgcctcagccccgactcgccggggtcagaaagccgccaggatgccctccagcagcccgcgcgccggccgcaggtgcgcgccgccccgccctgcccttcccgcggccccgccccagcgctgacgtcacagtgacgcgcagcccgcgcaggcgcagctacccggcaccccctccccgcggccggcagcccgctcggtattatgattagcgctgggtgcggggtttcggcggccgggagggagttgtcggcgccgcggccgctgcggacggacgctcgcctgccggctgaggtaggggcgagcgcggagcgcggcggggcgcggcggccgtaggcaggggtgcggggccggcctccgccgcctcagtagcctccgctgttgccgggctgggcgcccgggccggggcgctcgccgcaggcggaaagtaagttgcgctctcggcgccggccgcagcgcgcggcccgggaggacgcggggcccgggctgcggtggcccggaccccgcggcgcggcctggcggcggggcggcggcggggcccggcgggagccgtcactgcggcggcggccgcggtcgcctggaggccctgcccttgcggccgcggcgggattgcggcacctcggaaggcgcccgcatccccgcgccccgccccggagcgggccgagtgcggcgcccgcggggccccgcgccctgggcgcttggtagggtgtgtgttctttgaatgcgttttcccctttcagaagactgtagaaatccggcctcagcaaaagggttccgtggtcaaactgctttacaatagagtggggatgttgtctgtagagaaagggcaaaggggtaaggaaagaggagcagtgccattcccgagggagagctagaatttttgcagactgggagactgggaaatctacgttcttttccatagtcatcgcctgttgatttctttctggtccattttacagggaccttcctgccttttacttggacttgggttgcaggaaagtggcagccttttatcttcggggttcttggagctgtgctatttgtaactgttggatcgcatacagtccagtagtttcatagggagtttcaggctttggggagaatttagcagtggagttcctaaatctatagaggtctgaggatatgggacctttcaaactgtcatgttactttccaccccccttccctttaattatgtgcattcttaaagtcttaggaaccgtggtaaagttgacttaatgccttaaacattttgtcaggttttaaggtgaagcatggcttgcaagtgttggacatcctgttgaatctccaccaagttcctatcaaacatgaaatgcctgagtttgggctccttgtatgggattggagcactatgtcccaaaccagtctttaacttatcagaatatatacagcagtgtactttaaagcccgggttgtcaaggcttatgtaatcagtttgttaatttataatctcgttacattgctttccagatttataaaataattcccttaaggaaatctgtcctcaacgtctgcttaaatatttctcttggaattggattcttgaagaggaatgtactgtacaagtgatgattaaagcatactaattagacaagtttctttttttaaagaacaccaaataccaaatttttaatctgattatctgtgtaattgtccttgagaggagaacaggtggacattcccatt

SEQ ID NO: 39983 - DNA, 1008 bp, Homo sapiens
ttttaattgttcattttgtgcacaaaaattactctcaccgtattttttaataattctgagtatttttttctgttttactgcagtaagatccattagtctaaaacatgctagaactcagaagttgtactaattttatttttctagaccagaagtataggttgggtctttatggtttagatttaatcacataatcctaaaagaaaggcttttaaatgtccttattaaaattgaagggctttcgtgatatttttactggtcacaggaaatactgttcatctgaacttcactgtgagtacttccctcatacagaaagtgaaaccaaatagaaaaatatttatttctggagatactgagcagccatggttctaagtactggtataaataagacatgatttcttccctgtagcagcttgtctaatcctaagagctctttacactgcccaagaagaaaagggtacaaatgaactttccataggccagaatcttaggaattaaaaaccgtagatgagaaactctagacttaatgtaactgcatcccagctgtttgcttaaagatagagtgtttataactaagatgctttagtaagaaaactgttattcagaatttaggtatttcccagtgtgtatctatgtgcaggtaaacttagaacaacttaggtggaaaaattgagtggatcctagcagttctgaagataaacttaacctttgatcatttattcatggaatgtttgtgtgtctcttttggtggccctagggtagagggagggcagcagtagaaaagtgaataaaaaccagttcctgactgtaggttcttagaagctactggggaacaccaaggtaaacagtaacagtacgaacagatgaactgtggtgaggcatagggaaaaacctgcagaagcacaaggatggcggcagtgaacaacctgacatggaaatgcttcacagaggaggtgatggttaaactggtcttgaagaataggaagaattcccaggcagagaaaaagggaa

SEQ ID NO: 39984 - DNA, 820 bp, Homo sapiens
aggtgaaggtaacttgctgagttcctttggctagtgattggtgagctgggattcaaatgcagttgttggtctttagaaccagtacttattactgtactaccgcactgctttgccacagagactagggatgaaacaggggctgctggaaaaagagaagcaggcaaggatagtggaaggagctactatatccctcttggagctgaagaaccagtcaggtaggcatcccagggttcatctgtcactagatatggacctgtgcccatggctttgccagccctgtgtgtgctgcagaactgttgctccacattccctcattcctggcaggacacttgctttcatatccagaggtcaaccacctttcctcgtcctttcacctgtcctatcttgtttcctccattcccttgcactccttttctcccaagtgcatttgaactttacctggacacctctcaccattagtgtatagtgtaaattatcatgttggcataatgtgaatgtttaggcctctctgttattcatgtaatagtttattttcatgggaagacctgcaaggctaccttggtcagtattccctcattgtgccatgaagtttggatataagtgatttgctcacattccttttgtttgtggtgatagtttctttgttactatcaagtgacagtcctcggatgatgaaggtgctttgtgtgatccctaatgctggcatcataagtgatttccacttgccttctagaggacagtgtgttgtaaagcttgccgtccttggctgctatagcgtgagggtttcatgagcctttaggggctcctagagactgggtgg

SEQ ID NO: 39985 - DNA, 647 bp, Homo sapiens
ccacttgacttgcatctctgggctctgttacctccatttgtgaaatggggttcatagttcctgcctttaggattattgaggggattagatgaatgaatacatgtaaagtacttagcataacgccagacacaaaattagccctcagtccatcagatgtcactgtctcagtgctgctgctttgggaaacgtcatgggatgctttatgtttctatggtgttgctgctgtggtcccagagggacacttaacattagatcctggccttattttcctttcctgcctctttctcaatgtgggaggaagagtatccgaggtacccttgtcccctttggaaatttgtcctcgggaatttctgaaatgttggctgccgtgggaaaatggggaggaagggcaggcctgggacctttgctcctgtggttttctcacatgtttttagttgtatttaactttcagaatgttatgttatttgtatttagggaataggttaacttctaaagtagggatttttctttcttttttaaaatgttagataaaaaaaaatgaaagtcttggtgtttatttgatagcaggttagtttcttagaacttcagaagggcttttcaaaccactcaaaacagtagctattttagtacaaaaatacatatggaag

SEQ ID NO: 39986 - DNA, 592 bp, Homo sapiens
gcattgttcagcctgctgctttccagtggttctttctccagcctcaggtagttttctcataagtactgatcagtactcaaccaaagaccacagattttcttttggagcttgctcactatctgtgcagctccctcctctctgccctgcacattgatcttgaacttcaaactacctgctcaactcaaccagactatttgggctttccctctctgtgttctggcaactgcctttgggcagtgagctggggcattcaactcagggctcacctcatttgcctcccttctctcggggtgacagccctatgctgtctgttgctcaatgtctggaaactattgctccatatattttgtttggtttcctagttgtttaaggcaagagggtcaatcaaattcctctaattctatcctggccagaaacagcagtctaaatagtgggtcactcccctgctcaaaatccttccatggctttccatctcagatttaaaagtttaatccttgtgtggtggcccacaaggccctagtgtgtcctctgccccagttatcacatctgctcctctcaacttgctcattcagctctggctgcaataacctcc

SEQ ID NO: 39987 - DNA, 744 bp, Homo sapiens
acatgtgagagaatagaatccagcccctgagtgtggaggtgtccctcatggggcgcagatgtgggccatctgcagtgacaggagaaaaagtcaaatacatgggcacaaatgcatgcaagtggtgtagctggcgggagttttcatgtagtgcgcccattttctcagtgaggtaggaagcaaggtcatgagccaagagcaagggagggaaggaggcactggaggactgagggaggagaaggcatgaaacagtcatgtggaagggcaggagagagaatgaccatggaaatacacatgcatgccaagcagcattgagggctatttgaggtcagtgattaggaatctaaagtgaggcaggccatgagtcagaggtatgactgtggaggtgggaggctgagatcagaaggaagacaggtcagtggaggagaggtcaaggatgtcagcagccatggatgtggaaggagtgacaggtacgtgtattagagaggttctgcagagagagggggtgagtcaggcccttaagtccttgaggaatggggggaaatgacctggggtaagccaggctaggtactgtaaatcaactagttagcaggataggagggcagtcttccatctcacagatcctttctggggccagctaatttaattgttctgactggttgattatttctcctttcaccaccctaagaacccctctcaaaacttcactgggctgggctgcatgtgtgatcttttcctcagggtttc

SEQ ID NO: 39988 - DNA, 1926 bp, Homo sapiens
agtttaatatagacaactgtgttctgctctctgtctttgaaagtattgatgctggaaatgtaactgaatcaagcagggtttttacttgcaagccacaaataccaattctggtgtatctgggcaaagaagaggttggttaaaaggttatcaggtagttcacgtaccctctaaaaggtctaaagaaccaggctgagcagtcatacagtgaggagcaatgtccaaagtcatatctagagctggttcagcaatgatgccaggctgcacacaggcacaacaccattggcatagcactgccacagctactgtcagctgagtggattctgcatggtacctgcctcttggggtccaaaagcttacagttcaaagtttagggtaaaaaattattactggctcaatatagatcatgtgcccacgtccataccccagaagcaagggaggctggaaagggagtacctgcattatcagcttctatagtgggagggggcatctgccatgaggtcagagattctctggacacaggaaagaggtttatgtgttcagtgataaaacaggatgactcatgtatattacaccagtctttcaggcaaaccaatattcaaacctgtcaacttaagctaagtatgcctgaaaagggggttctcagcagaggaaacagcacagcctacaataccaagtaagcaagagctcattccattggaggagtcacatgagctgagtattattaaagtggagagaggagagcagcggaaagagctgcatgatttcatgaagggcctcgaaaactacactaaaatctgggctttaatcctgaaaatggtagagaggcagtaaaggcttttaaggaaggagtaagatcagatttctgtttcagaataatcattttagcagcagaatggattagagagcaccaagactggggagcctggatgccagttaagaacatgctatgctgtagcaactcagaaaaggaataatgagggcttaccctaaggctacacacaaggcactgagtggagaagaaatgggttagatgaaacaaccacctggacagtagctgtttgagtgtgaggagtgaggatgactaaccccaagttctggttatgactagatggatggtggtagatgaactcagctttggactgctcaatttgagatcactgggagacattcaagtgaaagcaacgaaggtaaatacatacacaatacacatgtagatgtccaatgggcactgttaggcgtaaaggtaacgcaagccatggagtagacaagctcacccaggggctacagaggaagtcatggggtagatgagctcatccagggactacagtggaagctgtggagtagatgagctcatccagagactagagtgtaagccatggagtagatgagctcatccaggggctacagtggaggtggaagtcatggggtaaacaagctcacccaggggccacagtggaagccatggggtagataagctcacctaggggctacacctggagtagatgagcacaggggctacagtggaagccacggagatgagcagatgagtttaaccaatgattgaatgaagaagaagaggattgggaaggaaccttaagaaagaatagcccaggaagaagctcaggaacaggcttaaggaggaatagccaaagaggtaggaagaaaaccaggaaacgaatccctcatagaaggaatgactttctagaataactgagtcatttgcttcaaacaagcattgtgcttggttgggggaaatattcaaagaaaattttaggcaacagttttgtcaagtttccaactcaattccttttaactccccctaccctacctttcccatgtagatcctgagagctgtctataagtggtaattgcagcatgcctgcaacagttcctgcatttacagtccaccccacagcagtaatctgg

SEQ ID NO: 39989 - DNA, 2070 bp, Homo sapiens
gcatgttatgtatgtaaaaggccaaacttgggtattcttttaactaaaacctgtgtaatatgactaataaactctaggcaaaaagacaaaaaataagtctgtggtcactagcagaagtattctaactttcaagtatgtctacatgctgtagagctaatatttcaactattttgaagacaaaacaaaatgacagatcttcaagaaccaacctacatttttaagcaaattattttactttggagaaatgtttttaacaatctttaaattacacgttctggcttaatctttatctaaagaattcaccaagatctatgtcatcttaatagtggcttataaattattccagctttttcaaattattttgtgagaataaaggtaaaataagggattctcatgactcagataaagttctctatcttctaatgtctatggaagagtcttttcttgcatcaacattttaaaatatgaaatgaaaagctactatgctgcattttaggtttcttattggtataaaaaataaatatataggtctctaaaataaaaatgtgtgatctgacgatttgtcatttacatggtaattaaagcataatcatgaggccgggcgcagtggctcacacctgtaatctcagcactttgggaggctgaggtgggcagatcacttcaggtcaggagttcgagaccagcctagctaacatggtgaaaccccatctctactaaaatatacaaaaattagccaggcgtggtagtgagcacctgtagtcccagctactcaggaggctgaggcaggaggatcacctgagcccaggaggcggaggttgcagtgagccgagattgggccatcggccactgcactccaacctggtgacagaacaagaccctgtctcaaaaaaaaaaaaacaaaacccatagtcatgaaagagccaagagcattgtcacaagctcagtgatgcttcacccaacaaacttaaaccctcttcactcagtcaccccgtccacattgccaagcagcatcctgctgattcatctgccagccctatgtatgacatcaactgtaccttgccaacaaggagaagagctgaatcacaagcagctaggatgaaagtctcaaatattcccctaaagctcttagtaatgcaaaaggataaaggtcccatagtcaaaaggacagaggactcagactgtctaaataaagaggcaatagtcactgatgctctgataattgcaaatgctatgccttcgcttaaacttctcacgtttaatggcttaaaattctttccaaagattaggggagaaaaagccatcatcgctgccttgccatccttgctcagtttagaactaattttatactaaatatgaaaacacaggtaggtgtatacatgcagggaggagtagatagaaagaaataatctgactaggtcattggaaatcccaattttcataaaggaggctatacaactgttcatccagtataatactgattccttaatgacttccacagatgtatctttatttgcagagatacataaaattctcaaaacaaaattaaattgttttttatatcatataataaaattgactggtgtattgttttatgaattttaatgcacgtatagtttcatataaccaccaccacaatcaggtacagaacagtttcatcacccaccaaaaatctctcaagctatatctttatagttagatgaagcaaaattaattttaattcatattattttaatgctttttcccataaaagagtaatgcaaaacaacaacagcaatctccccaaaacatctaggaatctccaacccagagattcaaatacaaagtgatatggtaaggtttcagtctaagtgaggaggggaattcatgtaaagcacatgccctgttctaaaggcaagattctttacttggtcatccctgttctgcatggcacaaacgttctctatactctctgtctttgtgtcctctatggcaaagccaggacctaaatccaggagaagctcaataatacctccccttgcttccaggcatgatagagcccaagacttcatcaaaatagtcggtaaagactca

SEQ ID NO: 39990 - DNA, 2029 bp, Homo sapiens
taaacctcagctgcactttttaagtctgggatctccatacaccgtcctgctggaatataaggttttacagaaggcagcgcacaccaatgctggtgctgtgaaggcacccacaaaatcagacgctgcctataggggagaaccccattccatccacgtttctcaggtgtcccaggcactagccagacaggtatctattatttaaactgtacagtatgtcccagtcaaaagcctggaaactcagtcacctcgatgtgagcattatcctgcaagcccgctccggccaaacctgcttggagacagcctagtccgccctgatccccggactgcccgggaagcaagaaccccgggacccgcgagctgacccttctaaaaaccacccttcactccgctccgccgaccaccccactcactgcctccttccccaaagcgctgaggcccccaacatcctccatcctgacttcaccagccccaaatttccgcctcaccgcctttctctcaggactcaaaccctcgccccagacccataatcccctccacaaacctctcccctcccctgcgaccgccgctccccgcaacaccttcactcgtccctgcccccacagcccccgcgcccatcctggtcccacttcccatccccaggggtgctggcaccgggaggcggcccgggaacgcagggcggcgaccaggcggagctcctggagcctgcagcggccggggctctgtggctgcaaggggccgggctctgctgcggacagctggggggtccgaggtgccctccccgactcaccagccgccgcagcgctccacgtcttcggaggcgggtccgagagccggcgagaaccggaggccgggcgaaagagtgctcggtgcggggggcgggccaggccagtggggcgggcgccgccgagcgctgggcgtggcggacgcggcggggcctagatgcggtcacacgcaggggggcggggccgcggcgggagaggcggggcctcactgggcggtagctccgggaggggcggaactgcggtgggaggggcggggcctcactgggcgatcgtagtggacgagaacctagactggaaccggtccgaagaaaaaaaggcagccctcattgggctgtcgcctggaacaggagaccaggccgggagaaagggaggggcgtgcctaacgtactgtaccacccatcgaaatccggacggcagcgggagaggcgcggccgagaaggcagaggcctggttgggctgtcactccgagccggggcggcatgtggctgggctctccaaccgcgagcggtcggggcaggggaaaggaatacgccccttcacatttccctcttccatctcttaaagaccagaacctaattttctggtcactttcaggtataagaacaagtctcattttaactgtagctcactttcaagttgtgaaaaacgcagatccttttataattaaaacctaacatccaaccacagccaaatcccaaaacccttgctcctcctagaaatcgccagacacctttccacctccaggctcagagtctgccccagccattccttctgcccagaaagctcttccctcggttggctgcttggctcacttcctcacctccctcagtgtttgctgggctctcactttctccctgaggccctttctgaccatcctacttaatacctgttctcatctgctcctcaccccaccatttccttacctgctctcctatttcttctgtccaccacactttttgactttttgttgttgttgttttgagatagagcctcgcaatgtcacccaggctggagtgcagtggcgcagtctcggctcactgcaacctccgcctcccgggttcaagcgattctcctgcctcagcctcctgagtagctgggattacaggcgcgcaccatcatgcccagctaatttttgtattttttgtagagacagggtttcactatgttggccaggctggtctagaactcctgacctcaggtgatccgcctgcctcggtttcccaaagtgctgggattacaggcgtgag

SEQ ID NO: 39991 - DNA, 653 bp, Homo sapiens
ttttaagtttcctgaggccttcccagaagccaagcagatgccagcatcatgcttcctgtacagcctgaaaaaccagagccaattaaacctctttgctttataaattacccagtctcagttatttctttatagcaatatgagaatggactaatacaaggacctacagtatggacacaccagacaaagagatgattcacatcgcaggagggatggagtaggacaggcggagatttcatcacgatactcagaatggcacacaatttaaaacttatgcaatgtttatttctggaattttccatgcaatgttttctgacctcagttgactgaaggtaattgaaaccatggaaagagaaactgtggctaaggagaactactgtatcaattacctatgactgcatgtcaaacaattacacagaattagggattcctttctccacttgtctctctttgggtatttcctccatgttctctctggcttccaagagtcccttttcccaactcctctgtccagaaggacaggttttctctcaggtgactgtgtcaccataccactgcagggcagctcccagacagggaatggcttcagggaaacggagggagagaaaaaaaggaatcagcagtttccaccactttctctagcttgcagcagactt

SEQ ID NO: 39992 - DNA, 4087 bp, Homo sapiens
acacctattcgcacactccctccccttttgaaagtccctaataaaaacttgctggttttgcggcttgtggggcatcacggaacctaccaacatgtgatgtctcccccggacacccagctttaaaatttctctcttttgtactctgtccctttatttctcaaaccagccaatgcttagggaaaatagaaaagaacctatgtgactatcggggcaggttccccgataaggaggagattgactttggatttgagataaacatattttataattaagtaagaattgatcaattcttattttgttgaaattctttacctattaggatgaatgctggattttattacatgccttttcatcatctatgaagatagtcatgtgatttgtttttcttagtaattgtgagttttgttaataggtttccttatttagcctttattctaagagaaatgagtcactggggaattctgagcagatgagagacattattcagaattaaatattaacagaatcactcaggcttctgtgttgagatacacagcagagacacaaggatggaagctggctgttgcaatctttgagacaagagatggattgattgtaccagggtggtagcagtggaactgatgagaagtagttggattttagaaatattttgaaggtagaagtttcaggaattgatgacatatgagatgtaaagtatgagagaaagaggagtcaattgataactgaggtagggaaaactataggaaaatcagatttgggagaaattcaggagccctgcgatggatattcttgggtttgagatgccttttggaaatctgagtcagtaaataggcctctgacattcaggagagatgccaaagctagagataagaatttgcaagttatcaacagaaaatgatatttgatgctatgagactggatgaactcaccagagttgtgagtgcagttatagaagggaagaggaccaaggacagagcctcaatcattaactccaatagtaagaagttgagagaagagaaaatagcaaaggaacttgggaaagactggccaatgagatgcaaggtaaacccagagaatggggaagggcagtgtctcagaagcaaacaaacaatctgaattaaagaggagttctgccatatgttgatgctagatcaagtaagataagaactgaaaaaataaaatgacagcactaggatgaacatatttgtcctatcaattattataaatctaaaatctaaatactaaatctaaatactaaaactaaaatctaaatactaaaatcatttgtgaataaagatattgaaactggatgaattaaaactcagctctgtactctacatgagagacacacctaaaacaaattgattcaaaaagttttaaaataaaagatgggcaaagacacaccaggcaaatataaacaccaataaagccaagattctgataaagttaaattcagagggaaaaaaaagcctattaaacaaaagagagaaggggagtttagaatgttaaggtgcagacttcacaatgacataacctcctatgagtatatatgccccaagtaacattgctgcccctcaaatgcacccagatgcccctgctttggagccttggcagtggttgttacctctgcctggaatactgtcccccagagcacaagtaactcattcatttccctaagactgctcaaaacgttattttctcaatgaatcctattgtgacctccatatttaaaattgtaacttattctgtctaattcttttaaactctattttgcacattgtttttgttcctgctcttcacatctcttgctgagtgttctttagtgtctgttctttcatggactgcttccagttttttctttatttctttgatgccttttttttcccctttcacttctttttgaagtgctaccagctcgtgtttgatcggttgtctcactttccctcacgtgagctacctgcaagaggtatatgttagtagagcccagtttcctggctggaaggagtttgactgatggttcaagactgagtgagtgaattgttttagtctttacttctcccaagccaaaaactaggcagctggaaggctgctgtcagtgcggtcttctctccatgtttactggcagactgcttcctgcaaataaatgaattgtctgcatcttcattcagttctgtcctccacatgttgctcttctggttaggatctggctttgtgaccttctcccacaagccctttaatttgtagtgtgcaccagcctcatttgagatctgcaaccccttctccagcttttctactaaccctcactgccttgataccactcccacattttgtatggttttgagtttgagatatctccttgttttgcaaaggtggggttttcatttctgttcctcagttggccttattactgctgagtggtttctaagagaaaggaggaatgcttatagtatccacccttctcaaaccagagttgccaactgattttctataaattagggttttactattagcaaaagccaagttaggtgttccagctactaaaaggtcttcagacttggcataaacatagtgctttttttttctttctgagatttgtttaaaaatattctcattgtatgagagggacccactagataacctctgggtccccttcagcttggaaattccatgattctacataacacacccaacttacctcaatgaatgtagagaacccattattttctatggcaaaagaaagtgcttataaaaaaaaaaaaagaagaaagaaaagaaaaaaaaagaaagttacaggctgggtacagtggctcacacctgtaatcccagcactttgggaggccaaggcgggtggatcacctgaggtcaggagttcaagaccagactggccaacatggtgaaaccccgtctctactaaaaatatagagcgtggtggtgggcgcctataatcccagctacttgggaggctgaggcaggagaattgcttgaacccaggagacagaggttgcagtgagccaacacgatgccactgcagtgcagcctcggtgacagagtgagactctgtctcaaaaaaaaaaaaaaaagaaagtaagttacaaaattgtaattatctccttcagaatatgatacagagttcagtacttaagaaaattgttttgaattaaattgacggtgctggttattttctgtttgtccacatctaccctctacccttctccaccctcctctgtgccctaggaggctggcctctatggatgtgtcagtaggcttccttgtcttctggttcctgattgggttcagttaatgggagcactggcaggagactagagagaggtaagagagtgaggtcagagtatttgttccttggctacctctgtgctgagtcatggcaagctggccatgtccctcagtggaaggccatagctctagtcaggcagccctttccatatagtggagtaactgcttccgctccttgcccttcaggcctagaacggtaatgactcaattattactagcttcagggtgcaccaccatccctcatggtttccctaaactttgctcacacatttgtgaatagtctctttttaaaactccactcaaattaccaaattggagtatgccatctgtttcctgccaggactgtgactgatgcattggacatgttttgctgccctaaatatattccagcatctccatgcagcactacacagtttctataatagacttgactgccatcctaaactcttcccaacatgactcagattttaatggaggtaattcacgatttgatttttcatgtttggacagccttcataaggcagatatgacataatgaaaatagtttagatgtgaacatttagcttctagtaggcaatgaataaaaagtctatacaaagagcagtggtggtaaatagaattaatattctgattataaaaaattctatttaaatataacagcaacctttagatcaaatcaattatagtcaggtatttcgcatcacgtttaaaatgcctcaacatatcaagtagaaataaaatgaagagaaaaagaactttacatttttgctgaagacatttttgatgttttcta

SEQ ID NO: 39993 - DNA, 1072 bp, Homo sapiens
tagatgggatattgtgacaaatcttttttctacctatttgtgaaaaatgaaatgtttagtaagtattttttaaagggtaaaaatactttaactcacaagtagccagagagcagctagaggtttgtgaaacggtggtcaagggcctgattcccagcactcactgggtaggaagttacacacctgctgtacagcgagacaagtcgttgccacaggagtttgcagttgcaccacagcgccatcaagtgaaggggtgagaaaggtgactctcaacaattattaatactcaaggtaggtaccactcctgttgaacatattgctcccagatatagcagcctaaaaaccacagagtcattatgtcactcagtttctgacaggaatgtgggagtggcttagctgagtggttctggctcagaattgatcctgaggttgtggtcaagatgtcacctgcagtcatctgaaggcttgactcaggctggagggtctgcctctaaggtggctccctcacatgactgcaggcagtctcagttccccaccagatagatctctccaccaggctgctcacccgtcctcaggacatggcatgggcttcctgcagagggagggctcagagagagagagcgagcaagcaggaagctgtaatacctgggaatcacctactctccaaagtcacacaccatcatttctgtgttgttctagttgttagaagcacatcactaggtccagcccacattccaggggagaggaattagccttcatcttttgaaaggggcgtcaaagaatttcacattttaagtcatcgcagtgcagccagcccagagatcagatgactcagccagtttgccctcactagatctagagggctcccgtccacacccttgctaggtgtttacagtgcatttctagcactaatgtttaagacatagatccaaatgccacacaactaaaataagttgaagaatcaatttgtgatgaaaatacagacaattctggctgggtgcagtggctcacgcctgtaatcccagcactctgggaggccgaggtgggcggatcacgaggtcaggagattgagacc

SEQ ID NO: 39994 - DNA, 2043 bp, Homo sapiens
acctaatgaataattaagagaatgaaatggttttcaataagatttcatgcttagtgctttttgtattctaatacttttgatagattgtcatggttgattgtctaattccccagtcatgcgagtaaacagagaatttaatgtgtttcaaggggacttccatggtaagttatttgcaagcatattaaaccaaaatctgaagtgcattaaaaatcctcagccaacgctagcatacacgcaggctgccacatgaattgcagctatagggagctatggctagctggaaccactcagaatccatccttttccttctagatagaaaaagaaaataattattggaactaaggataattatacataaaattatataccaaaatattgttcttatagttgaggattcatttgttgctcttattcattgtcatatgtttaaagaatttgacacaagattgatatcaaaaaattatctggattgggggttcctttcctattcctggtgccacttcatgctgtaataaactctcactcttgtttctttcttgttacccctgttatggtagacatatcactctacttggagaaaattccaaatcactgtttacagtagaagaaaaatccaatacctatattcggcagttgaaagaccaagatcccaaaaggtgatatgacttatacaaagctacatagcaagttagttatagagcccaatgagaacctgtgtttcccaactcccaagcaaaggcctttgtgcaacatccattgccacaccaaagccaataactgctaatgaaagttctccacccattgcagccacggaaactgaaaaaactactgagaaatgttatttcaacaaatgcatttgacttataaggttgaagtaccatatattctattgaaaatgtctgaattgaaaggatttaagtcactttaagcagaaaattagagcacacatggcactgtctatttttaggatctctgagtctcaggcacaggcattttagtaatttagatctttacatgagtgctcctccaagttttgtttcatcttcagaatggaggccatgtcatcaagcgagtgtgggaagcttgagctcattctacaggaggttatgccaggtgcaggaaaagggattgcttggtgtaataattagatccttaccacctacccacccacccacatacagacatacacagatacacacacacagctgagccatttgaaaataaactgtagactcatgccatttcattgctaaatatttcaacatgcatttcctaataaggacattctccttactggtgagaaatgatatttcgatgccaagatcaaggggcaaggtatgttaattgacacaagggtatcattgcttcaaagccctttcagtgaacagatccaggaatgacaaatacacttttaaaaggttatttaatgtgaatttctcaatgcaaatttaaccttacagtgttttattttaagttctttgacttaatagttgtttttgcctctcttttctgttacactgaaagttttggtttgtaataatatagtgtttctttcctcctaattcagaattgtacacttgttttctcctagttcagaattataatactatataaataataaattactgactgaaatttaagatttccttctattcatttatccttagatcaaatccattatgagtgtataattaaagtactgaaataattctgttctttgtatagctgtggttgccacatttgaaataaagttaagctcattggtcccaattgttttccattttaggattttacttttgtcttttttatttgaattttttaaatatataaaacatttatgtggtcccaaagttaaaaaatacacgaaaaggtaaccaaacccacagaagtttcactcctaaccctctcccttcacttcattccccccacctcctataggtaattatttttattgcttctttttgcaaatataggcgaatacctaaatatattcttattcctcctttttcccccttacacacaaaatatagcatactatactaa

SEQ ID NO: 39995 - DNA, 2796 bp, Homo sapiens
tagtctgggagggtaacagcacagagatttacctgtcttgctgctgtccaagaccatgcttctgtccgtaagttccctaataaatcaccttttgctgacaagctggatttgtctccttcattctttagtttctcagctccttctgtatttggaggtcactttgaatatacggccctttcatgaaacaaccaggaattcctgtaaaaatgttttttatatgttctggtcttccctaaaatattttatgaattagatcaaacacaataaaaaatgtattagttattactatgcctaagagattataagtggctttcccccctctaaattacagaagacaccattcctatcctagaggactttctcgtgtagttggaaagatattcgataatgtttatttaaaagctgtaacaattacacaaggctgagaacctgagagctagatgggtgataaagacaggtttacagtggggctcagaggagagaaaaagagggaggagagtcagggaaggagaacaatgaactgagtctaaaataaaggttaatatattcgcgtaggatctatcaaaacaggagcagtatttcaacccattgttttcaagcacctagaacaaagtgagcccatagtagacacacaccaaacataaatggatgagtagtagtgggtggcagaattccaaaagcaggttgcacctgattgctaaaaggcttgaaaacaggtcaagaaatactgctatttaggttagtcatttcacctcaataactcgaagtacctaaacatagacttttttttttttttttgagacggagtttcgttcttgttgcccaggctggagtgcaatggtgcgatctcggctcaccgcaacctccgcctcccgagttcaagcgattctcctacctcaggctcccgagtagctggaattacaggtatgcgccaccgcgcccggctaattttgtatttttaatagagacggggtttcttcagctcaggctggtctccaactcccgacctcagaaaatccgcccgccttggccgcccaaagtgctgggattacaggcctgagccaccgcgcccggccaacaccgactcttttcaccctcccaggtatctagagagtcgagtgggagggaaattgctggctctggccactacagtaacatcagcacctagagcagtgctcaactgactgaaggctcctgtgagtcgccctctccccctggccccccaacccgcggggaaaggctggcgggacgccacacagcacctcgattacgccatttcatttgccactgcaccatctatcggacactagctaggctcttccaggaccggacgcacctccgtccccaaggtgccacctgacagccaacaccgacggggtgatgcatgaatacagtcattattcaaattagctaaaacacctaactcattcgggtgagtctcgccagtccctctgggctgactgtcccgccccgcgcttacacccgggagcgtcgggcgggagaactagtgcatgctggctggggatggcggacgcaaagccggaggcaaggccgcgcacgcgcaaacgcgggcgcgccgccgggccgtgctagtgcgcggaagacgcatgcgctggcggcctgcgccgccttaagtgccgcgccagcccggggcggcccagtcggcctgtcagccggcttcgagataagtcccggcgcttgcgcggcggcggctatggcggcggaggaggaggaggtggactctgccgacaccggagagaggtaagcgcagccggcagggggcttcgtgtgtctccggcgcgcaccctccgcgcgggccgggttagggcccagcgggcagcaccaaggagtcgccgcccgcctggcgacgacgggcggcttcctcgaccctccccggcatgagtccgcgcggcgcccagaggcgtcccggcgccgctctgcctgggagaggctcccctcagcgtcggggccccgaggtgtctgagccggactccggccgcgccgggaggccgccttgaccccgcgcggagggtccgccccgttgttgtataagccaccccgcgggccggcgacggagctggccgcggcggccgcaccggctcgggctctgccaagggacccggcctgccccaatgccgccggcgggcggtgcccggtcgaccctgcacctgactgcgaggcgcgggaaatgaccgggtctgtcagcctcccatcgcggcttccgtctacaggtactacctgtgctctgtccagcctcagccactggacgatccttcccgtagccgtaggaaggggcggcgcttccttggaggggatattagaggcccgaattcgcccgggaagcggcgggagggcgggggtgccgggaaggagggaggggagaaggagtgagggaagtgggtgtatggctgtgagtttcagatacttcatagaaagaaagttagcccttaagatagagatacacgttcaaatgtcataattcatctttcggatgaaggtctttggcttgcaagctccactgtcccttatttgtttgcgcttctgggattattctggctttactggcgaagtgtgtgttgcatgtgccttagaagaacacacataatgtataggaaactgtggaagttggagggcagatgtctaatgtgaaacttttttatatacaggtatagtgagtttattcttttctacacctaaatgacttcttgcacttgttagtagaagaatagtagttaatgagtggaataattaaattgttatggaggttattgccttgtttctcaaggcctgtcgttt

SEQ ID NO: 39996 - DNA, 475 bp, Homo sapiens
gcagtgatgttctgatgtcatctgggggaccagaaaaatccagctggatatgcttatgctatgattatactttataaaatttgtatatccttaatagactaggactaaaagaaaatgtggaaaagcatattaatccaaatgtttaccaagcatctgccatgtgctaagcctcatgctaggttatgaagacatagaattgagcaattgtagggacagtagaattgagcaattgtagggacagtagaattgagcaattgtaggcacggttcactccttttcaaaaagaaacaaaaagatcatctgccttagtatatatactttgcataatttgttaaactggcattttcacctagggatgaaattttgaagatcatatttaaaaggcaagccagaactaaggcaaaaacagtcacttacctacagacagatgagacttctgtcaagttttcctttgtcctacctgtttttgggttag

SEQ ID NO: 39997 - DNA, 1138 bp, Homo sapiens
ggaccctgatggaactactcaactctgctgttgcagtgtaaaagcagccagatgtaaatgaatgggtgtggctttatgccaataaaactttatttacaaaaccatgtggccagcctgtgagtcagaatttgctgacctatggtatagacacatgacgtaaatgggtcagaagggttttgggcgagacaaatgagaaggattaaggttatcagagcactgcatcgtttatctcagtctgtataaatggtgtcaccctggaatgatgcagtacacagactgcaaaaccatacgttgtagtcttgagagtgagataaaaagaaaacaagcctcacaacctagactgtcctctctgggaatggttaagtgctaggactctggtttttggtggggtgacagattgagaaatagcttcagaaaagaaagtgggagggccacttgcctgcccaaaggtatcacgctccaggataatcagcttctcagtggttatcagaagaatgaagggttatgtgatatcctattcccagagggtgaggaaggcagaccacctaatgacctggccccgtggaatttggcctccctgcttcgtggcacttattcagcagtgctccactgtggaagcagggtgtggctgggtctggcattaagtagtgacagccctctggggcagaaccacacatctaagaatggactaagccagtcacaagtctcacttctttggaactccattccagggttcccagagcagttgggaacaccgttctgtaatcaaactgagttcacctttgggcaccagctgctcccacagaccaagggcaggacaaagtacagaaaatagattgaagcaaagtacagaaaagagattgaagcaggtgctgctttctgtgaatttgatccagactgggaaaaaaaaaaaagatggaaaactcatttctctgaaaagctccatctgttggcaaaaaccatcatcagaagttctgctctggacaggggagcttgcccagcaaatactgggacaggagtgccatgctccgaagttgggcactaaatgaggcaaggctggagaaatggacttggagcgagaagggatatgccagtgagagcctaagggaggtatcagcgggatatgtaaaaagccact

SEQ ID NO: 39998 - DNA, 715 bp, Homo sapiens
ttttctaaaaaaaatctcccagtgggcagaggttgcagtgagcagagatcgcgccattgcactccagcctggcgacagagcaagactccatctcaaaaaaaaaaaaaaatctctagaaaaagaagcccttttgcaggttctgagacctgttcaggtagcctgctctctggagatggaggaacgcagtggattgcaggtttctaaaactggtagcagaatgacatttgaggccttgttaaaacttctgaggcctggtcttctaaattagactctcttggactgaaggccaggaatctgtatttgacaagtttcctgggttacctggatatgcagcctggtttgggaaccctggcctggggacctcccaagatttttgttggccctagggcagagctgatgtaactactgccccaattgtgcccaggtttctgtttgttttgttttgttttgtttgcttggctgtgctaaagcccagagagggagacagggagctaaggattaggacatggcttctgccttcacagatccccagcgtaatgtttaaatcatggtaccagctatgatttagggcagccattgtgccctccttagcgacatacagatggttagagaaaccagcccttgaatggcaaagcaggagagtgactaagagttgtactagtgacttttttttacttttatttattttttttctgagacagagtctcgctctgtc

SEQ ID NO: 39999 - DNA, 3286 bp, Homo sapiens
tttctggggacttgcgaggggccagggtacaggctgactgccattaacttactgatactctcaaccattcagtacatttacaaaagattggaaggaggagagctagagagagggcacataagccttcctaggactctgatgcaaaggaatgacagaggaggcaacacctggagaaggacgtgggggcaacagagggcttggggagaattgctggagctgttgagcgagagggaatacgggacctagggcaaaggagtttcccatagctggcaaggtccatctccaggaacaggagtgaggggagaacggagacacagagctcagaggatgggggaaagcaggtgggcgcctgtgcaatgcctcctccatgtaatgggaagctcgtcaccagagggaggctgtgaggctctgagggaagagagaggcagcaaaggcagaaagcccctggacagggtggggcctgtgataggcagacctctggggggctgctgcccctgctcccactccccatgtgggcagctgtccagctgctttctgccccaccagcctcagggaaagaagatctcagaaggcagaaaggcaagggtaaagggtaaggctggcctggaaatccttccctgctggctatctgccgccaggtagaagtaggccgccaggtagaagtagcccacctgtccaccagccagtcagcgagcagacctccatcttctttattaaacaccttctaagctcctgacactgagtggttgctgggtatattaaagtactgtctttcctactagactcactgctgtgtcatgtgactggagctcagttggcaatgagactctgaaggaggagcaagtctttctgcctaagaggtgaaggcagaactttgtaggagttggcattaacaagtcagcagttttttttttttctttgttttgagacagagtcttgctttgtcacccaggctggagtgcagtggtgcgatcacggctcactgccatctctgcctcccaggttcaagtgattcttgtgcctcagcctcctgagtagctgagattacagatgtgtgccaccatacttggctaattttttgtatttttagtagagatggggtttcaccatgttggacaggctggtcttgaactcctggcctcaagcaatccacccacctcagcctcccaaagttctgggttacaggcgtgagccaccgtgccctgcacaaatcagcagtttttcgttttgttttgtttttctcggaagaagaccagaagggcattcctgcagagagaataacatcggccaaggcacccaggtgtgaaggtttcagcctgctggccttacctgctgtagaagaggctcccagtgcaaataagtctttgtagctgtcaggagaaggtttctatggagaagaatattattcaggaagcctaagggggcttgatggacaaggacacagggaagtgtcccagggtgagagggagaccagaaaatggaccctttggttatggtaggcccatgttcactgaactgaattgttcaaaatccaactctaatgtctgtgatggggaccctgcaggggcaccctcctttaagtcagtagtcagaagctgagcttagtcactaaattggcagtgtcacctctggaagggacagctgtagtatttaagtcacatgtgagccatcacattcctgagttattcaatcacaagaaaattgatatctcaaatctgcagaggagaggaaatgagctaatatttcttgggggctctttgaaatagcagataacatactaagtactttggcattttctcccttaagccaacaccttcgcttcttgtacatgttgtatctattaagaaataggggctcaaagatgtgctgcacaactgacacagagccaaggtggccaactaacaaacctgtgctcattcccaaatggcatgaacccaaacatctgtggaggccaagcgaacatcagctcaggtgtgatgataaagggcaactgagcctccccttaattagagggagtgacagggggactgtgtgcctcatgggagtataagcccaatctttctgtaccttttagcttttccaaagaagccagaaatctggattttgaatgaagtttcccatgtctgaagtataattacttaaaacactgtgctgcccaaacaagacacattgatgggttagcccccagctgtgagttgccatattccaagtgtcctagttgggattgcatttagctgtgtgtgacacattcctgctagggtagtgcaagcacaaaggaatttgtcttctcccataacgagaggtctcaggaggtagtacagggctgacgtgagctctgcaatgctgctgtcattgtcccagctgtgttcatctttctgctccattctcttgagtgggaacagcaaacaaaatacagttagccatctgtgtccatgggctccgtatctacaaattcaaccaggatgaaaaatatttggaaaaaaataatgcaaataaaaaaccaatggagtgtaacaactcttcaaatagtatttacattgtattaggtactactataagtaatttagagatgatttaaagtacaggggaggatgtatataaggtatctgcaaatactactctgttttctatcaggggcttgaggagaaatctgcagattttagttttcaaggaggttctggaaccaatctcctgcagatatcgagagaggactgtactcagcgtgtgtaagcaaggcaagatcagggatctgtctggttgaagtttgcttgcattgctcttggtgcagacctccaccagtgaagtaaatctgtagaggtacctgctgtgggaagaagccattgtcccctctgaggggtgctttcttctgagttggcatgagcaaagaggaacttagaacctggctttagctctgcaagtgaaaatttcctccaagtaaaataagaaagagtctacattcttctcttactgaagccaatctagaatgtcctcttccctcccctgatctctagctcatctcacccaggtgcaactttcacattctttccataaaaattctctggattgataaaaaatcaatctacctgagctggatgagagatgaaaccatcccttgatataaagatggtttgaagtagaaggaaaacctccctgtgcaggggtgaggctgggttggaagagagttggaggctagggaagtgttgagtgaaggtccttcctgggactcatggacttcagcatttccagggagacaaggtgagtggagtttcaggcataccctagagtg

SEQ ID NO: 40000 - DNA, 3356 bp, Homo sapiens
ggaacttgactttaaagcctgtctagttcatggaacagcaacgtcaatcactttttactgagcatgtactacgtgccacacattctaccaaaggcttgctaggcaatagttacttaatgttcacagtaccctgggaggtaggtgccactatctccatttaaagatttcccctcagggatactgaagttggaggtcttaagaagcttccttaaagtcacacactcaggaagaggcatcttgtctacctccttagcccacgtttggagtcatgtgcaattaatccactcactccttaaacctatgcattcccatttgtgcgtatcgaattttataattatttctaatctgcctctaagatttaatagaggttaagctttctatgtgagctcactctttctttccttcttcttctccttcttcctcttcctcttcctcctcttcttcttcttttgttgctttaataaaagtgtttaaaatagcagttaccagagctgctgttttctctgcctctttcgccaccagcccactgccctcatcactgatgtttatctcgtgagacctaggccccagttctttgcatttagaggagacagcccacagtcctgcagatctgagatcttgcagcctttttgcaatgactctcagttcttacatcttacatgagagtcataatcctaggtcaaaggtcagttcttacaactttcagtgagagtcataatcctaggtcaaaggtttttggactccttcctctcttagagctcttctgcaaatgattcttatttgtgctcagccaaatgtgcctgtcctgaaggagacaggtacagggaaaagaacaatgactgcttctgccttgcttggccccctggaagtgcaaaaaagcttaaggtgtcaccagctctgcagtccacaccagcctcttccttgccagttaatggcatctgttcaccaaccagcagcaaccagctcatacctcagccattctcctttcttttctgcattctgaacaccaagtgcagagactctgcactttttccatcttctgcacatgatattttcacaatgtaccaaagttcattgtgggcagagactgtgtcttagtaaacactataagaaacagtgtataaagcaccaagacaaaattaaaaaaaaaaagaaaaaagaagaactaagatatgggccctacctatctggaagccaggtttgctgaccaaagaactccccctgtgccagagagacaagtcaacagtgatgcttgtggaattctctggtcccaccatgttcctgattatccacaagaatcctccccttcagtagcagctgtggaagggggcccatgctgccatgtaaccttggatgaagtttgctctggattaaggggctgttctggagatttatcaacctcacccccttccaaatggaaagtgtttttgaacttgccttgcttgaattgcattattgtatttaggatgtgttagtgaggactgttgttacaatcaggttgcaaaattatgaggaggaaacacaaggcttgactgttacagaaccagggagaaacagattccactggagattgtggactctgagaaaaatggttaacaaggtcatctctgggtgtagtcacacagctgtgactgtgggtgtctctcacgggtaagtgcatgtttgcacttttagatcttggtaaatgcaggatcctttaaaaatgtgctatgagaagaaggatgtgtgagcctggcaggcacagaagtggaatgagtgcacaggtttcctggcccggtctgcctcggccacttccaaagaagttgccttgcccacagaacaaaaatagaacaatcagcctttaccttcaacaattgaaaccaaggatgcagatgtcgcaggtgactggtgtgaagccaggagccttgttacagaggcctgggtgaggtgagccagcagggtaggagggccaggggaggagggaggagaggagagtgctatttggctttctgagggccttttttccctgtagtggtggagctgcctctcttcctgctgtttttcctgggcagctccttccttcccataaactccccttcctgaccagtaagagggcttctgattcttgtaacccctgactagggcaaatgccggccagcttgaccttccaggctttctccaccctctccaccaaaggcatgtccataaatgcttcaaattcctgagtgcagggactgtggtgcttcaccctcatcctcgcctcgcagactgtcctgggtctggctcatagcaggagtcccatggctggtgaacaaaccgtgactctctggagccacatcattcttcctgtaaatcagctgccacctgaccaaggcccagaatagtccaggcccatgtcatcccgagcactcttgtgtggaaaacaatgagccacagaggtgcagaggcagttcacccactgctgagtgtgctgaattctggcctccgttgaatgtgtgctgatgacacatgccatcttttaaagcttgtagagccccctattgtccacaggtacaaacacaaagcattctgatcaccctgcaaagcaaaatgaacccaggagtgggtgtcataactggatcctagaagcagaactccccagtgggtgtgaggaccagtagcctcagaatctcctgggggattggtagaaatgcacattcttgggcttcccctgagacctgctggatcagaatatgcatttcaacaagatctgctcccacttcatccccattatttacttgcatgttaaagtctgagaggtgctcattcagaaacacattcagcttcataaacaatatttctaaagttctagatacttttcatgttaagaagaaagagtagcacccccatgctcatgcccatgacagaagggggtgccatgtggtcgttcagagtgtgagcctggcttcagagcccactgcatgacctgggtggcctcctaacttcccttagattcagtttccttatctgtaaaatgaaaataaaagcaggaactaccccagaaaactgctgtagggattaaatgagaatatacatatttaaatagcttaggactaggtccttactacatgtgcgctactattattttgcatcatcaaaatagttgccatttagtaagtgtttgctgtgtgttaaatactgtgctaagcacttcataccacacatggaggtattattgtcttcctactgaagaggaaacagaaggtcagagtggatcaggatcttggactgagatcttggctctcgaaggctagccgtgctcttaccccctaagtcatgtcacctgttgaggtctatggtatagctacaaaggggccaaccaaagagggaacccattt

SEQ ID NO: 40001 - DNA, 3276 bp, Homo sapiens
acgggccagggcactgtctgtgcatgtcagcagcaggctgagtctaggagccggctgtgaaggagcttggagaggctgaagggaggaagttctgacttctgactttagtaggaacagtgcccttctggctaaggctggaattttgcccagggaacagttaagtaagaggtggggtgggaagtgatcaaatccaagaatcaaagtggacaagatgaatttggatatggagaatggagaaatctgaccttcctcccaattagaatgtcagtgtagccaggactgtgtggcaagaccaagagggggctgcagatgcctgctttagctgctgctaagatgccagcacattggccctgctaatgggcccaaattcagaagtgacatgaataaaacatggattctgaagttcttcagacctggattaaaatcctggcttagacacttgtcacttactagatctcattttcctcacctgtgagatgtgcatagggacactgctaggttcagagaccctgggtacagctggcacatggcaggctgttagcatatggcacttactgctgttacataagaacctgtgtccacctcctgctgtcaggcactttgcagcacccagctgtttggtcaccttttcacctcccttcacctctgttctagtcttggctcacccttcaaatacaactggccccttacgtcgggtgacctagagagtagtccctgccacttgcacaatcccagtaagctctagttaggaaaataccctcatccaagtagttccagaataacactgctgtttgtttgggactccctgacccatagcttaggaatcatgcatgcgctggggtgacactaagagcaacaagatgtccatcgggaaccactgcagttcctccgcctcccttggcaccgtgccctgggactgagtttgattgcagcgcctttcccagctgtgaccagcagggggcggctcctctctctcgtgtccctttccagtatcctggtagggttcgttccctccccagcccactcaggcctcctcccgggctccgcctctcgggctccctgagacacggccccggctccttccgccttccttggaggaggcttgcagacctgcagggcggggcctgactgagagcggggcgggatctccttccgggctggggaacagatgccctggcgtccttggcactgggttggctggtccctctccgtcctggctccattccaagcacggcaggccccgggaggggcccaggctgctcctttttccagccaggacagaaaagcatcaaggaactctcggtcatgagacacgcccgtcagagaggaggcacattccaggaatgacatatgccctgaaatgtcatatgctctgaggaggtgacactccccaatgggtgacacagcccacaaaggggacatggcccacaaagaggtgacatgacccacaggggtcacatgctccacagaggtgacatactccacagaggtgacctggcccacaaaggtgacatggcccacagaggtgacacaagccacagaggtgacacagaccacagaggtgacacactccacagaggtgacacaggccacagaggtgacacactccacagaggtgacctggcccacagaggtgacatgctccacagaggtggtatgcttcacaaaggtgatatggccctcagggacacactccacagagatgatccggtgcacagaggtgacatacttcacagaggcaacccggcccacacaacaactgtgtctcaaccatactagacacctcaggtatcagaacctttccatggcacagcaggccatggagcaggcactgcagtgttcgccctacaaacccggcgactcagttccaagaccctgcagtccagagagcagctcagaggcaacgggccgaggccagcccagccgttttgcctaaaggtggctgccaaccctggggccctcagcctgggcctcctgtgtctctgacctcctgcctatagaagtctgttgctcttgcaaggccagtaggtagacagagacaagcatcagtgagaggaagagtcatttatgatttatgaataatgaactaatttaatcctgggtttctcttgtgcctcccatttagtaatttgttccatttcttaatggctcgagttctttatcaggctgtgacagaggcgagtggtgagtcatcacactggggatcaggagggtgacctagatattggcactgggaaagcagtcctgagagacgagcatcagctccaccctccactccctctccactgtgggcagctctgcgttggcacagctcctatctctgcatcaaagtggcaggaagaggtggccgttcagtggaggtgggtgtggctggggcttgtctgaagctgtggttccacagcaagccccttgcttgtgcttagattggacatcaggggagaagatggagaagactggggtctagccccactacacagctgcattgagagggagacaagactttggcgtcaggccacttgggctaaaatcctggctgccacctctgtctttgtgaccctgggtgcattgctttaccgctcagagccaagaaaagatgcttccaacagtgaaggctgtcacctctatcctcacgctgctgtctggtttcttgaacctgttatttcttttctttttattacacacaagtatattgaggctttggaaggttaaacaccttaacgaagagagcaggagagtggtctgtgtacagaggaggggagagtggaacctgagaaggcctggaatcaggaccccagggtggacccttgagggccagctttgccttgcctcctccgtgtcatcttgcatggcatctggccccaaagtgccctcacacaggagcaggcaggggggcagcagggggctggtcagacagcagcagccactgagagcacaaggaaggactaaagccagcaggtaggtggggagaagaagtgtgggcagctgtaggaggcatctgtcatgtatttgcatagttagcccaccctgttggcgtttatcctgtgaagcaatggttattgtgcccactttacaggcagatacacttgggacagaggagtcaaagaattgcctaagcagcacagctggtgcggggtggaatctgccttcttccagcctcttctctaaatgccgtcccactgcctcttgccagtcccagttctgataggtgtgggtgtgtgaggccacctgctctgtgatgatgggtgtcctcttcctcttctagtgcttggtggtcta

SEQ ID NO: 40002 - DNA, 1279 bp, Homo sapiens
ggcccctcagcattcgggtggggcgtccagcgaggcagaccacatcatcaaatgtgcagagacggcaggtggacacgagtgaatagggtgagaacagcagccatgaggctgtgcagtctcacccccgctgggtgctggctctccctgcccctgcttgatgggctgtgggctggcagcaagtccctgggatattccccttaggtggaggaggggaagcaccttgtggagagagacctttgaactggacagtgatcgaattcctggattagactaacatttttattggattagactgggctttgctggagtggactgaatttagtgttcctgctgccaagtgggaatgagagctcattaaagaaagtacatgcaattattattattttttaagtgcagttgaattctcccaggccccactttaatttggccaggagccctgtccttgagtgtgaaccctgaagagagccaaccagactctggcacttggacaaatagggtttgttttctgtggctggaatcacaaggcctcgggtgaaccaggatgtagtccagcggtctagcacagaacctgtctacacaggaggcctacctgtgcacccccaaccacagagataatggaaataaaacatcagcacttcaagtacacttttaagattcgatttactgtttgtattcattgtgaacatagctccagtatcattttgctgggttttgtatgagctgggtgtatgtgtgtgtgtaatggttaagagctcaggctctctgatcagatagacctgatttgagaaccagctctgtcaccagtaatgtaagcttgagcacgttctcaacctttctgaggctcagcttgtcatctgaaaagtgagctaatccataccaacctcattggaccatcgtgagaagccagacccagcttcactcaccatctccaccattcccgccatgcccacagcccacttcctgctggctactctctgcttccaccctgccccaacctggatccagtctctgcccagatctgtactcttggggaggtggacactgtggacttcactgggctcgtagcccactggtctccggttggatttggcccatggcaggtgctggcagggctgaggcagcgggaggagggagatgggagaatctctccctgcccccccctcgctctggtgccgactgtgcccctggctgtgccccttttgtggctctggctgtcagtggactctgattccctcctttgactcttcaggcctaaggtggcccagcatcactctgaggt

SEQ ID NO: 40003 - DNA, 635 bp, Homo sapiens
gtttgtacagtgaccttcagaggttgagactgcaaaggcaaattgtgctccccacccacctcaccccacccctgcccagaactctttcctcaaggctagcctaggggagcacaaccttgggctgcttcccctgcatgcttagatccagccagagcccccctgctgggccacagacctccatccccatagcggcttcttttccaaagtgcattcacctcattgagaacagcctctcccctcctgaacattccagacattccactcaggctgacttaatgccacctggccagaaaaaaacagtgtccattcccccttttctaaaaccttgattttgtgatcgtttgaacctttgagtttagaatcactgtattataacttccttgggatcctacctttgcagctagccacattccaaattataagactctctctggaagcccgttgtagacaaccaaaagccctgatgatgtaagggagctcgccagacacacactttcatactcaccaccttgtcttaagctgcttaccatctgctggccccagtcagctcttctgggaaaagctgcgtttggaaaaggagttccccgaatgtatttaatatcaaatggagcaatggttctcaaagtgtgctccct

SEQ ID NO: 40004 - DNA, 2812 bp, Homo sapiens
ccgaaattcttgaatgaacttagagggatcctggctaaatgaacccaacttggattgaatttgccaaagttcagacaatggaaaagggacatgaactcaaattgttcccaaatctccgtttgccaccttgtggagaggcataacacttgggggattttctgaggactttgtactagtggcatatgtaactcctgtgcaagtatgtgagggtaataaagtatctggatggtaggggacaggggttgattggggcatggagcagatggcaaggggtgcacaatgagttttgacatgcgtgcattacggagatgcatagaaattctagttacttttaaatttggagggaagaagtctggtaccagatgctggctttaggtaacagggaagtctagttacctctaaattcctcaggtaaggagtttctgcctaaggatggtcggcttcatggccaccaggtgatctttgctttcaattctattggcttgatttcatctgtggcagtttctggggggaatcaaaattataggaacaaaataaaactaacagtaaaactttcatgctgactggggaatgcttaacgtttaaaaataggtgctgaagggtccaaagcaaacaacacaagccggaaaagaaatgtttaaaagttagctatatttatacaaggaaaaccaaaagaaatacttaaatgagacttttaaaattcgaggctctccactgagacttgttccctggcgccagctccgggagttccgcagagcctcgccccctgccagggcgcccggggcgaaggaccgcacggcgcatgcgcgcctcctccagcagtccctttccccttcttccccaagatccagcgcgtgctcggttgcccttctccgttccttgcaggcccttgggtcaggacccaccacctgccggaccatcattttccgagtccctccggcctagtcggagtgctcgctcgcgcctcctaaagctctcagccgagcgcgccgagacccctcagggcggccggtaagaaggcggaggggcgggggctcaaagcgcgcggcgaaggtgcagcagttaccagggtgctgacgtcagctagaggcagggcaccgcggaaggttgaatccacgccctggctgtgcgcaggcgccgtagggggaaggcctggcacgctccagccaaccagggcgtcacctgcagctcgtccccctgcccgggcttgcctcgagcgccctgccgccgccggagcggggagggtgttgggggcaggtggagccgggagggcccagctgagaattcagggttgggggctcagagggcactgcggctaggagcccgtcaaagcctgtcgcccaccggggcgagggcaggtgggagcgcctggccgtgcgtcgcgcgctggttggccagctgacgccccagtgcgcatgcgcgtccgaacagccctgcgggcggagcgactgtcctcccttctggtgtactgggtgggaggtggaactagtcggacaaagccctcgcgtcggacccttgccagaactgtaaggagcaagaggggaggggctccggtggtgcattcatgctcctctaggggggaagcggggtcggaggggagtgctcagagccaccttagcgcaaagtgctaacttttgaattgaggcagtgccaggggacgcagtatccgcatcgcatctacattttaactcgctgtgaaatgagaacgcaaagacgatttaggttttattgtttccgacttatatttttccgaggtctttgatttacgggaaattgttacgtactaaatctcatatagcgagatttagaaaaggaagctacagaatctaggctaatgtatctaatagcatttcctgcttttgctctttttctttgcctttttcccctactctaagaagttcatattcaactgaaaagccatgaaaattaccgcttttgtccctccttgatataacaaactgctttcagaaaccgtacaagatagtcactaagggaagtcacagttcaaatgagagtggcatgatattaattttgttaaaataaattactttcaaataaaagttgtgccaaatggtcaaagctcaatcctgagagctctatttggcacacactcggtgttagttgaaagtaagcaaaacaaaaccgtttttcgtgtactcttccataatttggatttttcactgatttaggtatctttccaccaaatttggtttgaaactgcacagatttaatgcctcacttagaacagattttaggtaaaattagaaattttcactttatgaaacagaaactaatatcactgttaagtagattaaagtagtcatttacaatggtttgtaaataaattttatccttcccggtcctctgccctcttccaggaaaggcaccatttccttagagaagaccttcctgagctctccccgccccattccaagtgttgcgtctgggagtttctcatattctgtgcatgtttgtattattgcatttactgcgttgttttatacttatctgcttgtgtctgtttttacactcccccctccctctaaaagtcttttgagtattagaattgtcttaataattttctagtcccaatgctttacgcaggacctggcccataagtggtgatgaatgggtgagttaaagactcggtatgcctcccaagtgtgataagacagtgcaacctcttcagttattttatagcattttccaagtggaagtatagtgggctaagtgcagtatggacaggaaccacctatgtaagaatttatctgaagacgagaagcctgcggttgatgtggatgtcccagacttt

SEQ ID NO: 40005 - DNA, 517 bp, Homo sapiens
ggaatgatttcattgaacattgtaaagtgagaagactttactaactgatagtgaatgggggtagtgaactaatttgggttttgtgctttgcaacattgagaaaggtggtaccacaataacaaaaataaggaagataatcctggattgagttgctaactgctccctggccttctgtaaccaggctgaatttagaaagataataatgactcatactccttttttagatatgtaaaatttgagcagctggcaggagagctaagtgtatgtcagacgttgggaaatgagaacggaagctcagagggataagtggagttgccactgtggtttacttagactagctcatatttaatgctggctgattctttcctttactttaaactcctgttctaatctttgatgtacaaatccatatattgactttataaaaggttcaaatatataggagaaacaaaagataatctgcaaataggttggtggtctccagattgtttaaaaatcaccagaaatgattccacaa

SEQ ID NO: 40006 - DNA, 863 bp, Homo sapiens
cagtaaattgaatcaacagaaaaatattcattaactcggggatgcattaataaagtttttaaattcaaaatgtatagaaaaatcaagcttagtaatactttaatattattctaccaatgtattttttttaattaagacttctgtatgcagcagggcatggtggcacacctgtagtcccagctactagggaggctgaggcaggaggattacttgagcccaggaattcaagcctgggcaacatagtgagtcctcatctcctaaatttaaaaaacaaacaacaaaaacttctacgtgtggtaaagggttaactcagcaagcttgggttgcttaaaccttgcacattccaaagaaaggtctgaccccagtgctgacctttgactggctactgggaaatgagctctgagcccctggataggaatgtttctgtttgcctgaggcctttgaccatgccagatagtttatgctaacaatgtgatttatagtgaatacctgttttcctgtgtctaagaccctgggctgcactgtattaatttgaccttgggtatttggggagctgagactgagtagctgaagtgagtcacataagcactaaatgcttacctgactgacccccagtaaaactctggacatccagacttggatgagcttccttgggtggcaacacttttacgtattgtcacacaccattgctggggggattaagcactgtctgtaaaactccactgtgaaatgacaactggaaacttgcacgtggtctctcctgattctgctctattcaccttttccctttgctgattttaatctccattcttttgttgtaataaaccataatggtgaataaaacagcttgtctgagttctgtg

SEQ ID NO: 40007 - DNA, 1660 bp, Homo sapiens
aaaaaaaaaaaaaaaaagcaaaacgcaaaaagcagtggtgaccataggtcatgagcaacgtcagcggacttttggaagacatatacctcagggaaggccattacatgttcttcaggcaaaaggtggttaactaacactcaaagtctcattgtgaccctcccttctgctccctgccccagcattagtagctgggacctctccacagaagcacagatccaaaggccacagggcccctccctgagcacagacactatgtcagcccagcagtccactcctccaccataggtctgagttcagctccacaaggtccctcttccaatctcccacctttcaacaattctagccacgtctctttgttcctgctttgcactttgctccacatgaggtgggatcaataaactaccatcactcaaaactggttcggatgttgaaactgatgacactgcagacaccaagaggttatgaaaaagtttactactcacatgaggccttctagggaaagcaaagcgggcacccacgccagtctgttgggcttcagtgaaaggacgaacaagtggctctggtttttgttgtggttatgagagctcagtgcatttgacagtcagggtttgcacagtttgaacttcccctctgacgcaaagaggaagtggctgggctttcttatcagcttgtccagatccaggcaaactgagggggagagcttgaatgctattagcagacaaacgtcaaacatggggagactctattctagctcccccagtcctggggtggcagctgcttagcagttgctacctccaagacaccttggcattttcttcttgcctttttagctacttaaatatagtacacttctttataaggtctttgctaaaataactggtgtggtttctggcaactaaaacctggctgatataaaatctccttgctgttcttagcagggttaacattaactttaaaaggtgtggtagctggcatacaagtatttactctccttttcctcatctaataaagtagaatgaaaaacatctccatcttctggatcccatttcttcattaaaattatgagtttacagcttctggcttcacttgttatttattaagcaaaattaaggagatttaggcaaggaggagcttataatttcctataaagtgcatgtcttggtgactgtgcgtcagtatatagagaacatcctcatttttaaaaaaactgtggcctggtatttcatcatagatgtactagagttacttaagcgttcgtttactaatagccatttgtattgctcctgttaccagaaagcggtcgtgatccagtccccaagagagagttcttggaccttgctcaagaaaagaattcgggcgagtccacaaagtgaaagtagttaatattaagaaagtaaagaaatacagaatggctactccataggaagagtagccccaagggctgctggttgcctatttttatggttatttattgattatatgctaaacaaggggtagattattcataagtttcccgggaaaggtgtgagcaattaccagaactgagggttcctctcctttttagaccatatagtgttacttcctgatgttgccatggcattttttttttttttttttgagacagagtcttgctctgtcacccaggctggagtgcagtggc

SEQ ID NO: 40008 - DNA, 1230 bp, Homo sapiens
attacacacttccaaatggttaaatggtaaacgtttatgtattgtatggtaaatgttatgtgttattttggcacaatattgtttcctcacaataatactaacaggttttttaaaaagcaagagcacgctctcatttcgtaatatatatttatggatgtcagtgtgcagaattatgcacagatattttaaatgtcaggaggcctggagacagatttcaggattgcggctacttttacttttcttctactttcccgtgttatctaattgtctctgataaatacgctttatatgcagaattggatgaaacgagaaagcccggagaaacccgggctccagattctctaccccggacgcctgggaggcaaagaggttctagatacgccctcagcgtggcgggggcgggatccaccgccagacccccgccacgggcgcagcctccaggccgggccccgtccgccgcccgggcaggcccgagaatgccgcggacttcggggagccccgcgcccgcaatgccgccacccccacccccgcgccccgccaggcctctcaccgactcccgccgccgagcgacaatcggtccacccgccgccaccgcagccgcccgtcccgcgcctacctcccggcggctccagtcgcgcacgcgcgtcggcgcccggggccctccgcggcctctctaggaaactgggaggcccaacgtctctgcttctctccggctccggtgcggcgggcggcggggcttgtccaacatccctcacctccctcagttggacatttcccttccacgctcggatgcccagccgcgcctgttttcttgcatccctcctgtcgtgtctgcggggctgccctgaaggcctctttccctccagggaagaaagggatccaaagctaggggtgaaaatagggccagcagtatctagcagactggtcctggccaggagaaggggttaagggagccactcattcttcgcctgggtacacttcaaagaggggaaccagatcctacgggaagctaggtgccagaactcctgcctttccaagacgagctcatccccatcatcaccatacccaggaatacttgttcatagccagctcagaggtgcaccatactttagcttcccacggccttcactcgttttctcctgtgggtgaattctaactaggctcgcctggtgagtgaacaatgatgccattgcccaataatatgtggaatctgggaggagtaggttgggg

SEQ ID NO: 40009 - DNA, 1473 bp, Homo sapiens
tgggaagataaccaataaacaaatacatgctatgttagacggcgacaggtgccaggaagtgaaataagacaagaaaaagggagaagtctatgccagatgttttcaatgtcaggagacctggagactaagatttccggacggtggctactttcacttttcttccacttatctaattgtctctaataagtacgctttattcgcataattgggtgaaaagataaagccagaagaaaccgggaattttccagattctctgccccagacgcccggggggcgaagaggtatgccctcggcgcggccgggcgggatccacggccagacccccgccccgggtgcagcctccaggcccggcctcacctgccactctcgcacgcacagccgcccccgctccgcaccccgcgccccgccgggccgctcaccgactccgccgccgagagacaatcatccaaacgccgccaccgcagccgaccgccccgcgcctacctcccagcttccccagttgcgcacgcgcgtcgcctccccgggccctctgcggcctctctaggaaactgggagggccaacatctctgcttctccctgggcccagggccgctggcggcgggcggcgggcggcgggcggcgggcggcgggcggcgggcggcggggcttgtccagcatccttcgcctccttccgcggacacttgtcttccacgctctgatgcccaggcgcgctccagaactctatcggctttggcgtattatcctacatccctcccatcggttctgcacggctgccctggaggcctcttttccttcagggaagaaagggatccaaagctagcggtgaaaatagagccagcggcctggcgcggtggctcacgcctgtaatcccagaactttgggaagccgaggtgggcggatcacgaggtcaggagatcggtggctaacacggtgaaaccccgtgtctactaaaaataaaaaaaaagtagctgggtgtggtggcgcggcgcctgtaatcgcagctacttcggcggctgaggcaggagaatcgtttgaacctgggaggcggaggttgcagtgagccgagatcgtgccactgcactccagcctgggagacagagccagactccgtctcaaaaaacaaacaaacaaaaaaatagggccagcacatccccaaacataaaacccttgaatggagaaattcccaaacaaggcaataagcccagcactggccgtgagagtttattatccccttttaagtaaatgctacaagccctaggcgcacttttgcaactgttcaagggtcatcaggctgcacatgactgaccaagacactcagttgcccactttggatggagctacagctttgtgggaaaaacagataatagaaattacacaaatacatcaatgtcaagtggttacgaacactgttgaaatgtaacagagttatttaattgacagcgactgatgataatgcttgtattttttctggta

SEQ ID NO: 40010 - DNA, 1251 bp, Homo sapiens
taccttgcaccatcaacttgattattatttaatatcatagctccaatatgtcatcatgtgggcaagagatacaccacagtaagcgaattcacaagagggtgatttataagtcatgttattatttatagtgagaattgcataagttcaagaagagaccagaaaagtcacctaccaggtcattcagacgtgaaggtcactccctatcaacctcaattgaaatgcaaatcaaaatagaaatgtccaactctcttaggaggcaacaggcatcctgagaccctgggtcctgtctttcatctctgcacccttccggtctgaaacagcggccagttcttgttcgatgtaaggaacactagtacccaagggctcaggagttccgcctctcttccccagttctgggaaaagaaacgaaccatagagatgtggcttcctagagatccgggatgaggggcggggtgcaaccggaagtcgcagtattctcggctcggccattattctgtgcctcggctgccggaagggctcgttcctgtgtcatctcctagcggcctggcgccgaggcggcggtacgcaaggctggagccgcagcgggagcccccggtgagcggggtgggctcgggggcgggtgggcgtgcagggaaggcggcccgggacgcgggcctgagcttgctgggactgcacagccctcggtagcctctcccgggccctgacccccggcatggtccgtcgccagcttcgtgttggggttcgacgtcgtggcctcggctgggcaggcagccggcccgagggaagtactgaggacagcagctccgagtctgtgtgtgtttgtggaccggtgctcctgtctaacggactctgctggcgctttgagaagagctgcctcagtagcctgctcccccagctcaggcctttctgctcttcctcagtcttgtctgaggctaatccacagaaacattctgaggtttccctattaccggtggcgcccagactcttgaggacggatttttttgtttgtttgttttaaggggtggaacgattttagcttttttagtcttttagttttgtaatataatggtatttaaaaatcaaacttgaaaaactcaaacttgaaaccacccataccaacattacttcaggcaatacattttaacacaaagtactaagaccgtaaactcagaataaatgctggcctttgcgcgcgcgcgcgcacacacacacacacacacacacacacacacacacactcattgccaacct

SEQ ID NO: 40011 - DNA, 1023 bp, Homo sapiens
ttcaaaataaaacatttgaggggaaattatcagggctttctacagattaatgctgtgtagcttcaggctcttgggtgcgcgcctcgcctgagtgtctcatccctgcttgggatgcgcccctccctgaggctcacttagagcttccaacagcacaatcctcctaagcgcttctgccccatccctggtctggggcgacattggacacccatcgagaggaaagcacctccgaggttcctagagaggccggcttggcgacttggggagccggaagcccatcccgaggcacttcctgtccggtcattgttctcgtgccggtagaagctgaagtaccggtcagccagcctcctgctgcagagccagtgaactcaggtcgggcttctcagctgcgcacagtgagtggggtcggagggggtgggcacgaacgtcgagggagaaaaaggggctctcccaggggccatggccctaggagcggcccctgcgtcctttccccggggacaccagccttgtctgtcggggtgcggggggcagtgagttccccaccgcctcggaatcccggctgctgcccacctggggcctggtccgggagaggatgcacacggaccggccaaggggccagataggtcccagggacagggccgcgaggagcctatacgtggaaagaatggattgccacgtttggaaatagagaaaggacgttgaaagggagcctttgatagagggccctgtgccgtctgggaccggaggtccgtcagaatctgatcagaagtctgatgagagtactcactgtaggcagtcttatacacaaggtggaactagtcttaaggaccttcataccagattgaattcggatagtgatggaaagaatagtcctccagaattaaggtttgtcacaggaatgaaagtattgcattacttaataaattcagtgtatacagtaagtggccagtaagttgacatggggaaaagagtatgatcacttcaatagcagcaacaggggattgaataagatttcgcacccttttc

SEQ ID NO: 40012 - DNA, 1173 bp, Homo sapiens
tcctgacctcaggtgatccgcccacctaggcctcccaaagtactgggattacaggcgtgagccactgtgcccgaccttctctatattatttttatttatttttaattaacaaagcatagaaacagattcaggacattcctccgaagacgttccagactcgagtcctaggacatggttggggcgggggtcatttgatcgagtggcctgtgtccttatctggaatacgggacgacgctgtaactctaactcaccctgcgaactcacagcttttgaggtaaacaagtgagaaagaagagacaataaagtgatctttctttaccatctaccaaggaccaggtggtttacacgtcagttcattttcaggaacacagcagcgctctgaaaactacagagcttcctgggcgtagggggctgtggtcgcttgaaaagaaccagcctgggggtccgagttccaccggaattgggttcgagcgcgggtgaaaagagggacccgacagcacccaccctccaagtagaggcaaaagttgaaagtggcgggctggctgcgcttccgaagaaacacgactggcgaaggctcaccttagtctctacggtgggtccctccctgtagccgacccgttccttgaagcgggccagaaacgccggctcggctggccgcacgtacgatacctggttccgcttgctcatggtagctctgggtaaagacagaagacaggttccgcgacggattcgcgacgatacagaggcgcttagctgtgacgtcactgggccacgcccccgatgcgtaggccgggcaacatggcggcctccatgcgggcgtcaacgtccgatccaagcgccaaattcaaatttgcggccatcttgagcgggcggaattcagtcgcgcgcggtgcagtcgggaggtggaggcaccggctgcattgttttcgggatcgaggggtgagggcgctatggcacccggctgcaaaagtaagtctgggcccccggcttcgttaccctatttttgcccccaaatacagctgtgaaaggatggcagcctcggaccgcccgcaaggttcttgctaggcatgaactgcaggagctgagtgaccggcggggacgtttgggaatcccgctctgtcgctcaaagacaatacgctagccgaaaagctcatcccttccttcagtgtcctg

SEQ ID NO: 40013 - DNA, 1963 bp, Homo sapiens
gctggtctcgaactcccgacctcaggtgatccacccgcctcggcctcccaaagtgctgggattacaggcatgagccaccacgcccagccggaaacattctaaacatacgtaagtataacaggagattagaagtcatgttgattctgcgtggcttgattatggatcattgtcttcctctcatcgcagatcctcattttttcggttttctgtgatgcgcttgtccccatatggggctctggcgtctttctgggtctggaggtccccagcgccctctgccgaggcatctcttggtccggcggtcctcaggctggagggtggagcggagaagcctggtcgacgtggatggactcggtgggccggcgcggggcccgttaggcatctttaataagtttcaccgggagccgggtggccgggatggagacggctaagccgcgagaagtttaccttctaccacagcgtccacagtacccggcttggcctcaggcctcgggtcccgacgtcctccccagagcacaaacctactacaggttaggccggaggccgccacagcccagggtctctgccacctggcccgccccctccgaggcgccggagagcgattcccaaggggcctgccggagcgtggcgtcacaggagcgtcgcgtcacgtgaggctgccatccaatcgcggcgcgcgctctgccctgcgggcagcgggtgccaggcacggtgtcagcaggcaacatggccgagaggccggggcctccgggcggcgccgtgtccgcgaccgcgtaccctgacacccccgcggaattccctccgcacctccaggcgggtgcgatgcggcgccgcttttggggcgtattcaactgtctgtgcgccggcgcgttcggggccctggccgccgcctccgccaagctggccttcggcagcgaggtcgagcccggggcgctgttggtgctgctgctgcgggcgggcgggcggggcgccgctgggcggaggaggggcgctgcggggcccgcggggctcttggggtggggcgggggtgggcgcagggcgccgccgcaccctcgccggtctgtcccgccggggccccgggccgcgggcggcgctgcggtcagctggggtggcagagagtgtttcgcctctaatcacgccaaaccctcgtccagtgtaggtggtaagagacgtcggggactgaggcctcttcccttaccagggacctaaaaccttttctccggttgggctagttcgctctcggggaagaactacacctcctacatccaccctctacctctcattttaagtcccttgtgcctgagcatttctctccacgtgactcttaaggtgagaagcctcttgcccatccctttactccgtaattaacgggtgttgtgaccagatgaccagtctgccccactaccaggaaaattgggagtttgggatactgtaggcataagaggatactgacagagacgttctggatgttttcctgacgctgagaactcctaaacttgcatcctggcgtctgctaaggtgtatctctgcctctccctcccacgtcgtagaccagcctctgcttgctataggggtttcattgcgtctgcagcccaaggttagcctctgacctggacagtggtcactgattatttagggttaagcctatttagggctaatccagtagtagctgccatgcttcaggttagtatcccattgggtgtagttcatggggtaagtggtcgaaagtaaaatgaataactttgtatgggccgtgaagtttgttgtcaggaactagaccttcataaccctttaagcaggttgccactggcccatatgctgctttgtgtaagacaaggttgtccaactcgcggcccaacgcaaatttgcaaatttaaaacatgaatttttttgcgatttattattttttttttagctcatcatatatcattagtgttagtgtattatatgtgtgacccaagacagt

SEQ ID NO: 40014 - DNA, 1575 bp, Homo sapiens
gaacctgggaggtggaggttgcagggaggcaagatagtgtcattgcacttcatcctggcgacaagagtgaaactccgtctcaaaaaaaaattagatcaggtagatctactttacaagatggcatacaatagcacttcctgggagagcgctccttttgctccttctctgagtgaacaacaggcttagggtctcctccaacgtgctggtggagatcagtcagaacagcctccattcccttcatccaagatgaaataagcacctactgtgtgccatgccatgagctacctgctcaacgcatggactgggaccgtgctgttgctgacttcagtgactttatagtacccctgggtccatgtgcattccctcacccaaaatttcctgagtacttgccacatgccaggtgttgcactgagcactctccatgtatgacatagtgtgaatcactcactcaacaaatatttgttgagtacctactctgtgccagggaacccagaggtaaagcagttcctgcctcctagacttgactgtactagcagagagagcagtaaacaaacaaaagtgcaagataatttcagacagggccagatatgatgaagaaaccaaaaacaagaggctcctccagcaagacagaaagcagcaggtcagggcggggctgactctgtcggtgctgactctgtcagggttggaagggcttccctgggaagtgaccctgctgagacccacgtcccaccatgtgaagagctgagagcagggtgttcccagccatgagcacggcaagtgccagggccctgaggagacaacacttgtgtcacatgctctttgtcatgagctaactctctggggaccagaaacccagtcatgacagggaggaaagtggggagctggggagaagcctcactgagggccacctgtgggctatggaaagaggttggatttgattctagtagtccctggagctcatgacataaactgaccgacctttcaaacaagatcctgcaacagcttgcagggtaggcggtggcatctgcctcctccagacgaggagtgaaggttaagcagttcccctgcattgcgtggagtgaacaagcatgttggtctgtggcacgagccagcagggttaaacaaatggtaactcgaatgagcatgtgacagaggcaggagctctagggagacctggatctgatgggtaaaaagggaggacgtggagaggaggcaggaagctcatctaaattgaacagaaaactaaaactggacatgtggggcagaaggaggcccctgcagaattagaggggctggagccaggggacaaatgagcctggaaaggaggggtgggggctccatgagtgggcagtaggtgggcccgaaccagaggagattgtcttgggggtggcccatggctgggccaatgttttcctttgggtgtctccagggccgaatcctagcatcgccaaacacaccctggtggtgctcgacccgaggacgccctcagaccactacaactggcaggcaacccttcaaaatgagtctggcaaagaggtgagcacccactgggctggcgggtgggctggctggctt

SEQ ID NO: 40015 - DNA, 465 bp, Homo sapiens
gacttataaacgtctaaagtgtttccagaacacagaaagcccctataatgacattacacaacctcagagtgggcaaggagaaggcgtcaggagaccaaacatgagcctgacttgtgctcctgcccacacccatgctgcctccaggccagcctgcctgtcaagtgaggcacctgccctgctcctctgtccatttgtcctcctccctctgtttagagacctgtcccttttgccctatttctcaaacggctgtctcacttccaagggggctgtttacaaatctgtgagtcatttcccacttcccttttcttttcaagctctatgtggacctatctactgctacattggagtaaatcactgaaaaatggtccagaaggctatagtggttgcaattgttcagatattacacttggaataattattccaaagctgaaagtggtaaagtaactgcttgagggagaccacaag

SEQ ID NO: 40016 - DNA, 2061 bp, Homo sapiens
catcagaattgctttaacctgccctccttgcttcaactaatttgggttaactttctcccatttatccacacggctcctttaaaacttgcaccatactttgtcagccccgccttaatgagttcctttggtgaccccagcttcaccttgcagatatcctctccgggtatccaatgcccatactcccactcggccatcgcaaggggttggggttggctttttttcgggcaactgctcacagctcccagtaatcacttccatcaagccggggtttccagttcccgctaggaagcgttggggacgtccgggcactgcgcacctcgccagtgccggttaccaagcgcctcctcccccgtctgtgggacaacgctctggtaagcacccgaggcaagaggtcccagcaaggtaatgggacagcgttcggtcacagagagtgagcgagccagcgagagatattcctgggtggaggggtggggacgccttaggactagtgtcccccattcccggacccttcccaccaagaactacctagggagggctgcatcgcctctccagccatcctagggactagagaaatggaggggagaagagcagggaaacagcacccccgggccaatcacgacgtccgcccctccttagtcggggtctctctctctctctctctctctctcacacacacacacacacacacacacacacacacgctcctaagtcaactccagctctgagcaactacgccgcacgcctctcccactgggagtcccccggcccgtgaggctcgcctcaccccagcttcttcacccctaccccagtttcccttcccaactgaccgtgaagccggaggcagttccccagtcccagaccccggtggggctcccgccgccgccgccgctgccttcccctgcagtccccaacccgggacccggcctcgggcttcggcgatggctcctcggaacgaggcgccgcggctctctggactcggccagacaccgggcggcgcgcaggagaagcccatcgagctctcccggcagtggcggcggccgcggctgcaggagcggccgccgcgcaggttgatgacgcgctgacgcggggcgggggggggtgggacgtgggggcgcggtccagaggaggggacgcgcgcagatgacgtgcggctcgtggggcagctcggcagcatggcgtccgtgacgctgagcgaggcggagaaggtgtacatcgtgcatggcgtccaggtagctacagcagcggcgttgggtcggccgccgggttcagcctggccctgcgggtcgcggcctgccctgggtttgccagtgaggaggcagccgagctgcggcgactctccgtttaccttgtgattaaacggttctgctgccggcgtttgcaattcagagctggcaacgtggacgtttttaggactgttagcgcatttgcagttttgcgggtctataagattccgaacccgggcaggaagcttgggcagtctcggaggccttttcttagtgagagagcatcggccccagggccatccattcggcgttcgcgcacagatcttgtccgagcctcagttttctcttcgaggaaatgggagtttggaggtgggcttctggcctgcttttcctcacctcgtggttaggagggcgcatgcgaggtgaacgcactttgaaaatacaaattgccgtacaaataaagggggaagggtttttaaaaagcggctaggacgcctgtaatcccagcactttgggaggccgaggcgggcggatcacgaggtcaagagaccgtcctgaccaacatggtgaaaccccgtctctgctaaaaatacaaaaaaatttagctgggcgtggtggcgcacgcctgtagtcccagctactcgggagactgaggcaggagaatcgcttgaacccgggaggcggaggttgcagtgagccgagtctcaaaaaaaaagcggctaggcagccgatagcctaagtgctgtttccattttgccaatgaagaactaagatccctaggcagctataacctaatgtcctctgtgttctatattaaatccctggttatgaccactcc

SEQ ID NO: 40017 - DNA, 613 bp, Homo sapiens
tgatatctaaagtttctgacaaagctctgacatactatcatacatgtcttttaagttattccagaaaggttattgtacttacattgtggtttttatattgagagtatcgtagtgtgttctaaagctgtgaaactagaggtggtgtatatgacaaaacccctctgtaacccagactgcttcattccctaggcctctcagtttcctaggcctgccagagaagagtatttattatactctgaagataagagagttaattattatcggccgaggttcacattaccatcactctcctgtttctctttgactaaagatggcttctgttagatgctattgggaaatcccatcacacacactgacaaatccaggtcacagtgctggtctggttcattacatgtgtctggagtcaggaaaagtggcagatgccatcctttcctcatctcagtgactttctgtcgagcagctggctcttccagcattctacagggaaactggaataaagctttgcctctttgctttttgcacttggaaagactcacccagtttttttgtttctgttttgtatagttcagccagtgctacccctgaatttgaaggtagaggaggtgatgacctt

SEQ ID NO: 40018 - DNA, 599 bp, Homo sapiens
tattccacatggttcagctttccaaacaggttgtgtagaagggacaagttgctatgcttttttggagttgacatttattctgactgattgacctttcccccttttatgctccaagtactttgaggaaaatttgcagcatttatgagtaaatacgtgggatagggtgttcatcctatgagagagcctacattaaggtaacagaggatcctattaaaaaacgaggattagaaacttctagggatataacctaaggacataattgaataaatgagcaaagatgtttattctaggatgttcatcacatcctagaataaacattacactgctttgtaatggtaagaaactggaaacaacctgagtttcacaatggaggggattgaagtccacacagcagcctatttaaaggcatgttaatatggaaaatagttcactaaatgcagtcccctcatcctggtttttgtttgttggtttgttgtattttactttggtagttcttatatgtaatgtgtctggaaatatgtacccccaagtaatcactgtaattatttttcagtgctcatattttggccaacataacatttacctgttttttagagctt

SEQ ID NO: 40019 - DNA, 1099 bp, Homo sapiens
aggcactgaactaacagttcttatgaatgaaggaagtgcagaaacccatcggaacacgatgactaagatgcagggcagctctgggacagtcgctgattgaaacatccctgagttctctgagcatcaaacatgcctgtgagatccttgattacactgcaggtaagcagacaggaggacagatgttgtgtaaggttggggaacgcaaggaagatgaatggacttcaacacaaggaaaggctctcagggaatactttccaagcccgcaggaatgtaaggacactcccacatcgctggtaagtgagtcatcaccaatcaccatccagttaagaatcattgtatgtaacaggcttagaatcaaagccttattattattattattttaatcaacagaaaagagaacctatttagaagtctggagaatgatctaaaaggacaggctaagatgagaacacttggaggcaggacagtagaaagacagggacactcctgtgtgactgttgggaagagcaaactcatagggaagcaaggaggcacttgccagctgggacctgctggtgtcatcatctagttcccctgaactcacaagatatttgccacccttcaggggacttcgtcaccatgtgccgctcttctccctggggcaattatcctttttaattatgtggcagtgatataactgtgccccatatttgtcaggcacattggtttgtttgcaataattctagctagaggaggtcagactcagacccaggtgagaattctggctctgttactgtccagcctggtgacttaacctttctggagctctgtttgctcatggaaactgtaaaatggggattattacaccctacctttgtgtcacaataataaaatgggatacagtgagtaaaatgtttagaatagcctcagaccccattgatgcttaatcaagtgtgttctttttctgttctctcttaattattcagcaccattagtgagcatctttttttccttttgtaaccagcctcaaacttgtttatttttccaggtgtacattgtcactagaagccaggcatttaaaataaaacatggttataataaaggttggtcataataaagt

SEQ ID NO: 40020 - DNA, 653 bp, Homo sapiens
tttacttattcttctgaaaacctggaagaatttgaaactactacacagcagacactgtaacatggaaaccaagagtgaggaaaatcttgtgatcattaactatttatcccccaagagtttatctttttaaaaaatctaaatgccaaaataatatctcaggttttaataccagcttttggaatgtgcttatctgctaaagttcatgcatatgaaaagaaatctacatgccttttaaagtgagtcattttcgtgaaagccatccagctcagaggaactattgattttaccattttgatgcttgcctgggtgttttgcagagcttagaacaatgagcaaaaagttaaatcatataaaactgtgtttgccaccgtgacaggtggggggtggatgggaactgagggtcagtgtggtgagatgcaagacaatcgccatcagggcaaataatactgtttccatctatctctcacagccaggtaaaggagacagaagtagcccttctctaacttttccgagattcccttgctcaggttttagggtaacgtcttgcaattctgggattccctttcccaaatcaaataaagaaaaagctacatacacatctctggaggaaaatgtctgtattaaaagccaaaaaaccacataagtacaagaag

SEQ ID NO: 40021 - DNA, 1705 bp, Homo sapiens
aaaccttgcttttcaaaggcgctggggtctctcggcggccccatctcgggaagaggaactaacgataactacagcacgaagcacaccggccgagtctccggcgggaaaggcacccgcgcgcgcggacacaggacggacacagggaggagcggagcgggtcacttggtcgccacccccgaagtgacggccgcggcggcggcggcagcggcggcggcggcggcggctgcggtggtccctgcgggcactgcggcgggggtggctgcggtggtgctggcggtggtccggcgctgttccatgccgttgggcaggaagccggcgatgatgggcaccggccagatgagggcggccacgctccacaccacgatgaccagggtcatgaagcaggccaccagcgtggactcaatgggcttacggttcagccgccagcccggctcgccctgcagctcctccaggctgaagtctaggcagcagaaatgcagcggctcgccctgcagccacagcggcccgggcggctcggccgcggggtaggctggcagcgcggtgggcgccccggcggtggcggcggcggcgctgggggcggcggcgggccggaggcggccggtgcggcgaccgcgcacccagccgcagcccacgcagaggcgcaggtcctgctgcgcgccgcccgccgccagccccaggtgctcgatgagcagcggcggcccgacgcggtggaaggcggcggcgaagaaagcgcggccgtgcgcgttggtggagaagagcagtaggtcgcactggaagccccgcgggcggccccagcgcacgagcagcgagctcagcatctgccgctgcacgctgatgttgcacggcgccgccgccgccgccgcctcctccgggcccgggcgctcggggggcccgggggccgccgaggccagcagccgcggggcgatgggctcgtccgcggaggacgcgttgactgaagcattggagggcaccccgaggaggccgggcgcgtccgcggccccgccgcggacgggcggcagcgggcaggcggcggccaggagcgcggcgagcaggggcagcatggcctgcggcgggcgcctacgcgcgcgaggccggcggcggttgcatggcgagcgggcgacgggccggcgagctcacggtgggaccgcgggagccggcggccgggcgcagtgcgggcgcgccgggcgcctgccaagcccgcaggggcggcgcggaggcggtgacggcggctggctcggcgcggggatccctccagacccggttgcgtttggggttccccgccgcccccggcgccggggcccttgggctgccgcgctgctctgcggggccgggtgctatcccagagcaggattccccggctcggctccgcctcccgcgtgccccgccccgccccgccctccgctcgccaggctcggggactcaggggagggcggggttccacgcgccggggctgggagaggaatcgccggggcggggctgggtgcgggggcgcggcggagagcggatcgcccggggtgcgtgcgggcgggcggggaagcctgcggacgcgcccgggcgcccccgcgctccgggtgaatcgcgttctcagagggaggctccagggcccggagaccatccttttgtcaggcctgaggggagcttcgctgtctcgccttagtgctaccgaacctcctttgttttacagaaggggaaactgaggtcgaga

SEQ ID NO: 40022 - DNA, 1170 bp, Homo sapiens
agaggtcgagacctgcccaagcccaggaggcagttgttgctacgctgggattcgaaccctggggtctgggctatatcccagggctcttttcaccagctgccgcctagtttattctgaggccactaaatcaacgactttcatccgtctgctataactgtaataatttgagtcccagacgtctagagctttgccgacaccagagcagttaaagggcgtgccagaggccgagaggcggagccccgggccgccgcgcagacgccccgccccgcccggcgggctgctgggagtcgaggactgggttgctctcctcccttccccggtcccgcccccgtctgtctgtgtcgactgcggacgctatcgataaagttgctgttttgacaacatggcggcgcccatggtccgtggcccggcagtgctcgcctaaaggtggagaacgaggagtagaggagccgcaggccagagcctgtgagcaggtaaacccccggaccgggcgcagcgagatgagagacgaggcccagtctcctcttcctccggctcgggagattctgacttgctgagggcaggaagggaaggtgcgggctgggttaggtggtcctggaaccttgcagtttcgaaactgaaaatatctgagatctaggtcttcaggacctttgagccaccgaccccattgatagctctggactctttcccagaaaaatgcacatatacacgtagttttgtactcaagctcccctctccactactcccctaccccagatctttgctccccggactaggggtttggacccagttgaaggtcatcccttgcctctctggggcccacaggtcgttttcacgttagggctcggaggtcctcagaaagatgaggttccagacgagaaatccgcctgaggtcacaggtaaattagtagctgcaaaatccaagattttttttgttttcacaaaacttggtttctttaagatgaatttttccaggtgcattcttgcactttcttttgagtgttgtacacagatgtcctcgtgtgcttctcccctgtgtcctgtttttttttttctgcctcctactcaggagaacagaaaaggaaggtgggttttgtctcacgggtcaaaacttagatcatcccacacacgcagggaaatgaatgactcccttctcaaggcatcactgtg

SEQ ID NO: 40023 - DNA, 1075 bp, Homo sapiens
gatcagaattctagaagctgttctgtcttttcctgaaatcttttcttgcattcctaatattaaaatattcaaaccctggggctttggaaccacacacttcagctctgagtcaccaactatctacacaatgcattttttgctgaaagggcagatgcggtctctccaaaggacaacttggaactctgttgttattgacacattacaggcacattagagagcaagagcctccctggaagccccaggtcattaaataataattaattgctcactactgttttgtccttgtctccatagtatccatatggggtgaggacaaagggtgagagcagatctgtaattctggggtaatggtttggttttccatcaaactgtttcaagtagaattctttgatgttatgtgaagggaaaagcttctgtgctcaaaaaatctggaataaacaaaaaaaaacaggtatctttgctttggacttctcagaacctttgctgtgctaatgtgcactgtgactgtctgagagaggaagtcataggcactcttgtcacacccagttgaccacggagccctgtttccatgcagtatccctagaaactagttatatggactgccgccttggtgaacaccaaatgtaagtcatttgtctgtttttccagagggtgtgagagacctgccttctttccagtgggtgccctgagggcaaaggacagatacctttttgtctggaatgtttcctttgtaattactaaagtgttttgctgttatctaactactattgtgaaatgcttcagtttcttctgatttcaccttcttagattcctgcatcacatcactagcacaggagtgattactgaacacattagtaattaggaaggaaggaagaaatatggagaacactagagacctattcaggaactttggattttaattgtgttgtttctaggaaatagattttgaccaggtatagcatgcgagctgctaccgtgcattcattgcaaatctgctaatatttaagttcaaagaccaatttttgtcctaactgagaaactggtataatataacttttacatgtaataagaagca

SEQ ID NO: 40024 - DNA, 673 bp, Homo sapiens
attttgtctataatctcagctagaacactacaaaactttccatcatgtcacagagcttttcatcatgtttgggacctttagaacatgtctcccaaacattcaaccactgttttagggcattgttccgagatctgacttaagcaccttgtgtaatacccttagctttatatctctcagttttcacacaatgtgttgtatccatgagtatgtcagcagcttttacagatgaccctatagcaggggttctcaaccaggggagattttgccaccaagagacatttggcaattttggaaacatttttgtttgtcacaactcagggagtgctattggtacagttcaacatcctgcaatgcaaaagacagcccccgcaacaaagtccacaatgtcagtagtaccaaggttgagaaatcctgcccttacaaaaccaaagagctggggggaaaagaaaaaaaaacccattcttatgaatacccgaagccaaaacagcaggccttggcccccctgggtgagtgatttattaatgctcaacttctcctcaaggacatatgtgagttaaagaataaatgtctacttagaatgtactattgcctttgggaacaaaacatagttaccagtttttgacttcctgactgagtggatttttctaggactgctaggaaatgctggaggagt

SEQ ID NO: 40025 - DNA, 844 bp, Homo sapiens
ttccactcacttataaaggcccctgctgtgcacagtcactatgatgaatgaataactcagttgcatacgcaagtctgttcccaagtaccatctgttgagtgaatgaatgagtgaacaaaagggaaacacattaccccaattgtgaatctgaataatgaacttggcaatgtgatgtgatctctgctccagcaggcctgggttccaagtccagcagggcccttgatgtcctttgtccttcattcctgtgcaccttgcgcctccaaatcacatttggtacgtctttcttgtagtgctgatggttatttatgagcatgtcctgggctgcctgttcttattgtaagctctccaattaattgcctagtgctgtgtacccaattatcatgtaaatacatgttgaatgaataaacaagtgtgactcattcagagctaaactacgcatgagagtagacatggccagcttcagccaagagtgaaaaccagattcccaactccctatagcccattccctggctccctggaaaagtggagggaaaacacttgggaatgagcaggattctaggagctgggaagcgcccctttccccactgggaaattccatgtgagcactcatcggggcattcccctgctctcattctcttgcttcagctgcttgggatctttcaatgcacccctccctgcaaaaagatggtggcactagctggaaagtatagcatccagtgccccacttcactcatttctttcttccctcctctcttgcctccactttgtcctactcacattatcccccacccctgctgctggtaggtttattcatccactgaaacaagcttgattgagttcaagg

SEQ ID NO: 40026 - DNA, 1098 bp, Homo sapiens
cacctgacctctccccttggcattaccacataaaggaatcattgtattttccacgcaagtgttaggtattcttacttccctaaaatgagcaaggaggcgaaaacgctacataaaaaccagggtcctgagtttctgttcctcactgctgaacaggatggccccactcccatctatatggaaatgttggcaggggcccaggctactataaataagcatcctgactgctccaggaaggctgggcttcctcattttttttaaagtggaatttgtaacagcttctgcccagaacatttgtgtccaaggtcctttcatctcccaggcatcctgtacaactgccatacggaggttttggaaatcttcccgctgcagctgggtcacaggacaagccacacaggaccagctcactaaaagaagtgatgatctctcttctgtgacctccgtctcatattcagatgtgagttttaataggattccatctgaggaacaagcaggaatcttctttctccttctgccaaaaggcacatctgttagacacagaataggttcattagcaagcgcaaaagccccgggccacaggaaccatctgggcagcaggaatctgtctttcataccacatgatcctcagctcctaaggagtcttcacttccctcaggctgactggcaacacagggttacagcaagagtgccaggtagtaaaacatggaaagctacaacaaataaggctatggcactggcacaagaaccaagacaggtcaacagaacagaatggactgatggacagtgcaagtcagagcggtcggtggaactctcagttccagtccacaacaagataaggagcttgtgctagctcctaagtcagctgtgtcaccgaggacaccgctgagttaggctaccattttttttccctctcaatgaaggaggtgatgtgttgatttacattctggcccaagttatttaccttatggcaaacaggcactttgagtagctcagaagtgaacagtttttgaaacagtccctggtataatacttgaaagaaaaatcacaaaccaatagggaagggaagatatattcaacaaattgggtttggaaagttgacca

SEQ ID NO: 40027 - DNA, 5206 bp, Homo sapiens
ccagaaatttatttaatttgagtaatgtttatgagaaataaatagctcatgcatccctgagaacttgtcctcagcccggttgagaaatgctaacttaagaaaaagagagggctttagtctatgaaaatatctatcttaaattaccactgcagaaaagaaattgagttttgatcgttggtaaaaataattttagataatcattgaaatgcaaacctaaaatgaaaagcatgtgtaagactccctgcaggtacacccagcttgagaacccaggctgggtcagcaccgtgccagcagcaaggacttctgtgaaggcctgggttctcgctccatgtgatctcactttgtgtcctggccagaaacaggctgcaagcgcagttcgatgtcattcagttcaattgtgcccatgttctttgtgcctgtgacatgctgggctctgcccacaccagggatacagagacaagagctaccgccttgtcaccttggaacaaaggtctgggggcacatgagctgtcacacacagtttatgtaagggctcggaagtcaggccatcctgggtataagtctcagttttacaacatatttaacacctctaagcctcagtttcctgagttataaaatggaggcacacacagtgcctgccttatccggctattgagagaattaggtaggataatgccaggaagtgcttagcctgcttctggatgcactaatgacaaaatcctcttaatacagagtgagcgccgacccagggccacgctctgccctagaacttcccaggtgtgagcttatttactaagcacagtggccctgtgaggcaggcttgttgttatccccattcacagacaggcagatgtgtgactaaccctatcttacaggcaaggaaatggtggcaggatggagctaaataactcactgaaggtcacacagctagtccagaatctactctgaatggtgactgctgctagcatcagcgttgccacttctggcagttggagaatcagaaaatacgttatgaggaaaaggacaggcagctttggctttgaaagaggagcagcctctccccagtggagagaagggtgtcgcaataccaggaacaaacataggggggcaggcccacagagacccgggctgagccagggaggtactggagcagagggcatagggcagtgctggagacaaagctaaaggtagggagtgtcccctcctcagaggccagacacccctcagaggacagggggctaccagggtgtgtgagcaggagagagaggggctgtgtcaggtcatcccgtctcttccactgcctggggtggagcctaggtggacaagtgacttcacttcatgtgcctcagcttccctatctgtaaaatgggatgggatattcatgcatcgactcacaggttcatacaagtgaattgcatagttcaatgcttggcacagagtgagagctcagcaaatggaagcttgtactgttattagccatcgcaaggctaccctcatgatggggacaggtgatggattcgagtgggaggaacacctgtggcctgggccctgtccggcaggtgtcagaaaagtccaggagagtcatgcttaggccttctccaaagatggaggtgcaagagccccacagcatagcagcctctttttgaagtgatgtcaatgtgcttcttcctctttgggcccttgaagctcaggctcagtgttgagtcccaacctgacttctctgcccatctcattggcgctttatgccagagacagggggagcatgattggcacctactcaccctgaagggactgccttggtaaggcaactcaggggaggcctggggagccagaaccgtgtgagggtgcccgaggcagcaagggaaagactcagagcacgatggccacattcagagatcacatgccctgcccccaaagccccagctgtggacaagaatgactcaggtcccttggacaggctgtcaccagtgatgacttaggaccagcctgcccggctccagcaaagcacaggaagctcgaaggtttagaaatgggtcattgttgtgctgaggccatgcgtcaaagaggacatcccacagccagctcctatcctggccagcactcttgacaaaggcagagggagtgcagcttagtgagctggtccctttacacaggttattcactccagaatctggagaattctgtccttaaggaaaaaaaaaaaaaaaactaagctcaagatcccacagcttgtaagaccaggcctaagagtcaaacctgaatctccccacatgagagcaccatgctccccctcacccagcaccccctctgtaggtggtggcccagaggagatgttgccctgggctgctcttccataggaggaaagacatgattcactaataactgcatgtcctgagaattccctgttggggaccccaggacttcactaggggcatggctcttgggtgacagttgggaggtctcttccagggtctcagtccagccaagcatgtggccttgcaagaaggcagcttctaatggctcagaaacaccagggcaggggggccacagtccttcacaccacacacttagttccccagcttcagaacgctttaaaacgctgcagcatggagcctcacgctttcaaaacagtatttcataatatgccaggactttgtgttttattcgtcctctccctgtgacctaggctaatgcagacaataaaaatgccaccaagttctgcaaaactgaaaaaatgaagtgggtgattaggggacatttgataatgtgctttggttgaaacttgagaaattattcctagtaacttttcctaagactgtgactatattttccaagtgaaaaataagagctagtgaaagtaatgtgtgtgtagatttcggagcaatgggattgaggatttggaagcatgacttcagaaactgagccacgtggtcaccttccctcattgaatcaatattcggtgaatacccacctgtgtctggaactgtactgacccatgttaagcgagaaagagtgattaatgtgacaagatgtggctccaatttctaagtcctcacactagagcgcccccttctggagccagtcagcagagagagaagtttgactgtgtcccccttgaaaccgtcaactgtttggtccacttgagacctaggtaaaatctgaggggacagctcactctaacctggatctgaacttaaacttgagccccgatgacagaataatccctttctgcctggaaatggcccaagccatctcatgctgaggctttttgacataatctctaccacagctgtgtatgggagcagtgctcagaaaatgcaaggcggtcctcactccacgtacgggcactcacatgcagtctcagtgtcggtctctttctgcaggtctaggcattaatcctattcagctggttgcattttacccttatgggaagcagagtgctgacttcctcctttctccacctctattcctttcccctaaacaaatgcagccatgccctttacaggcaggaggtttggtattgggccgcctgccactctgaggatgttcctcattgtttatcttggcttttctccttctcagatcaacaataaagcttgtggcaaaattcctgtgccccaacaagttgcccgggaccaggacaaagtccacgaatttgttcttcaaagcgagctgggtgtcaggcttttgcaaggacgaagcatcaagaagtccttcctttccccgagaactgccctcatcaacttcctggtgcaagattgacagccaggaggctgcagctaccacgagggcctctgaggaacctccttccaggcctgggatgagggggcgatgtctgctggcccaggggaagggaaaagacaaatgtcttgactgttgacctcggtcctgtggcagactgcagtcaacagtgtgcctctgtagtgtggcctggtgctggggtgaaggtgagctgggcaaaggagaaatatgagctactgaggagggggttggacatcctgcccctcaccccccacccacactgcaggtagaggaggccatctgatcccatgggaagccatcagagacactgctggtgggagcaggaaggagcagtgcccctcgagcagccaggaagcctgcggatctgggaaatggctctgccttaggcacttctcgggaatttgaggccagcctgaggaactgcaggactcaggtgcaatgtgccagccacttggaactgctaactgagcctccagatggtagtgaatggtctctttgccttcaggctggatgaggaagtcatttaggaaatgttcaaataaccaatatgtggaaatggacacagggatcttctgaagttgctttgaatcaaaaggcaggcagtgctggttcctctgcctgtgtccccaccactccccagctctgtcatgcaggcctgtcctccccaaccccagctggatgtgcctcccaggcctgctgtggttctgacacacaggatcccaggcaaggcaccacttcctcacatgaatgaggagcagcaagtcataaccactcccttgggtatacaatttgctgtgtagtgaagtggaaccaggctcaggctgctggtcccaacctcagagccccaccgcagcccagtagggatgcagcacgccccagagggctcatgtgggccccagatggcaatgccaccattgttgatgtgactccagagccagttattaggaagagcaagctcaccacagaggagtggaactgaggccccccagatgttgcctccggtgtccaagccacagcggtctggctgttgggaagatggccaggaatggactcataccattggcacattaggctaatcctggttttatgtgaagtcagcaattaagtgttcccactagaactgacctaagccactgattaatatttaatgagggaaggtaggggagaatctagccattttataatgccagaaatctatatatgttatctgatgccatttttctgaagtagcctcacatgtggtccccctgcagttcagcagttaacagatgacttttttagtgtaataaaatgtttatcatctatgacttcaggacatatgtgtgatcctggaatacaccatattccaatttcagagttaattacaaacagattgaggtattccatcatcatcggaagcattggctgtgtgtctgactccacatggaatgctataaagtgggat

SEQ ID NO: 40028 - DNA, 3467 bp, Homo sapiens
cacttcatcacccaggctggagtgcagcggtgcagtctaagctcactgcaacctctgcctctggggttcaagtgattctcgtgccttagccacctgagtagttgggattacaggcatggaccaccacacccagctaatttaggaggtaaactttcttaactggcgggcccagctggactgtataagtcaaggaaaggcagaggggtagataaaaaggagagttttccctcgtctttcttcctgtgagaagagcaagcagaaaacagctgtttcgtgggctgggtccctgcctgacactcagagcgtgggtggctaaaggctctcatccaagctgatgagcttggagaaaggaatctagggtgaccaacaacgagcaagtagggaaatcccccgagggcgggtgggtggttggtgatggtgctggtagggaggggagagcctggagcagccagggaaaggccagtcctgtaggcagaggcctcagatccaagggtgggcccaatgacctcactccaggcctccagtgccctccctcagcctgtccacatgaggggctggaggcagctgtgcagagataatgaggccctggaggggaggtggtgaccaggactgctggaacccaatgccccatgactcatctccctgtgccttaagccctgaacttgaatttcagttcttattcagcctctggaagagcacacctaagacagacaccctgtatacaggggccatgggctgcaatctcccgacattacaacaataatatctatcatttctgaggactaattatgggccaggccctgttctaagtgctttgccacataaggagccttgcccaagaccacacacaagaaggtggcagagccgtgatcccactctgctccacctcgctggttcccaaagacctttatgcaaaccagcccttgaacctcctgaattttcccagatggtccttatttatagctttctctccagttgttccccaaatgccctagagcctgccaaaaccacacttcctcatgtgtatctgtgaacgttggctcgctgtgggcacacacctggttgaatgcatccctgaagttctgaggcacccaattcagcatgtggggtcggctctctctcagcctgggactgacggctcccagggagccatcacccctggcagacagagcctcctttggacaccatccctgggacctagaagccaggaagccatccttgctcaactccacctactgtgaggaaaatcccatggcagaggggagaggggagacctgttctagacctccccgatgataagcactccttggcatctcagcagccccatctgtgtcttccgcagatcatcttttccacaaacaatagaagagccccatctgggattaattgaggagggttcagccctggtcccatccaagggaggcctcacctaccacatctgctgctgcatactcatggctgccttcagaactcagaggagaactagatcttaggggaggggttccccttcctcaggcactgtcgcgggggtgtagaaaggaataatgtgtcctttacactgtgagatccatagaggaagcaggcacccaaagattgatgccattcattgggtctggtttgtcaatcatcaaggccagactgggccagaggggctttgtcaggtggactcagagagagactcacttgtcagtgcacaagagggcagccactgcacagacataggctgagagctgcgaagagggaacctaaagcaagtgtcgccagatatccccattattagttatcagctaactcttagttttcagttaacatcatagtttccaggaaatattttagttttctattaatattttaattaactactagcatcagagtcatcagcaaatatctaagtcatcagtaaacatcttaggtgtcagtttcctctgagtgaatgtagtagacctcttagtcatcatttacttcattattaccagttatgcactaataattagtggtctgctaatatctcgtctaccaatcatcttcagcaataaacatgctttaattatcagctgataattaatgtagccataacaaataaacccccaaatgtcagtggtctgacccagcaaactttatttctctttcccatgagtctaatcctctagagaagggaacaggggaggaggttctgttccgttcagttccagcttgacggagggttcgtgcagactacacagtcttcagctcttggctttcatggttgcccctgacatcaaatccagcccgcagataagggggagagaggtggagtgtcacagtggctttggccaggtctggaaacagtgtacatcacttctgcccacttcctcttggccagaattcagtcacgtgcctcagccaattgctaggggctgggtagccacttcccagcagcaactctgcaggagggaaggggggcctgatcttggagggcagctggctgcctctgccacatggacaatctttgttttcgaattgttgcttgtcagtgtacacctaagttaccttctaagtatctcaggtgtctgctaaccaccttgttttgcagctactcctgagtcacagctgtttggcttctaaatctgtgacagctgctgtgagtctaaaatagcagagcaatcacagactcttgttgcctgccaaactgggatggtgcctgccccttgctcgagactttgcatggagatgtgtgaagtcacggacgtgctttgtgccattttataaaataccgggtttactccgagggtttgtttattggtccccaattctccccaccttccttcttctgtgaggctaacacattggtttgtgagacagtttggagtattttgttttagggggtgtcaggacattttgaaaggtagagaaagtcaggcttcccagatgccctgcaggaaacctgggaaattctccagattcctgctcctaaaaggtcatggctgctcattcagggtggaaatgtgacacttccccagaagcctcactgtgctctggtctaggagactcacacctcaccccaacacacacacacaccccaccccaccccccccacacactacatacaccatacaccacctacaccacaccacacacatgcacacgtatacaccacataccacacattcatacacaccacacagctgagggcctgctttgggggaaggtaatttatttttgcctgacagaagaacgtgcctcacaccatgtggctgtggaggtggagagggcaacgtagtcttgagagttcatcagagtcacagctgttagggaagtgcctgggcctggggccaaggtggacagtgaaacaggaaggctgcccccatttccacatgtgctcacatggggctcccccacctgaggcctccaactacaggtgcacccctcccctgacagcacccacctctggtgggagtcttctgtatgattaataaaaagcgtagtaa

SEQ ID NO: 40029 - DNA, 433 bp, Homo sapiens
gttaaacatcttttgctgctctctgagcagatggccctgggaggggttgggccagggccagcgggaaacctccctcccctatgggtgtatggggagcctgtggctaggcacatgcctccagctgggtctgcttgcatggccaaagggctggggtgaagaactgaagctggcaaagacagtgggctccagcagcctggcagaggccacacacacaggacaaggtcacggtcctaatatctgggtctggccttggcacctttccaggggaaaactcatgggacaaaggctcattgcaagcaccaggaaagggcctccattgcagctgcttctcttcattcatggggcaattccacagtggaccttggggccagagaagaccaatctgttctggaaacagatttggaggggccagtgttttcctggcctgctctgg

SEQ ID NO: 40030 - DNA, 3691 bp, Homo sapiens
aagtaaagagggtgctgaaaaagaacaacaggaaccactctgaggaggcctctaagaggaggtgacttcagcagggatgggaaagatgagccactcagtttaggggcaagctctgggcagacaccaggaagctcctgcagctagagtgcagggagggagggaagatccctagatctggcccagaaggctgcggcaaggggccgatttcaatttaattctggggtaagcactgaggatttaggtagagaagtgtctgttctagtatttgccttaggatcacgatggctgtagtgtgggaaatgaaacctctccaggatcgcctgggaactggtatagggagtcccgggccatgcgggggcgccaaggagtcaggcctggtgtccctgcagccgcgcggatccacttgcagatgggtccctctacgaataacgagcctactagggcacgtgcttttactgctgcactgaggacgtgaaatgcgcgcaggcacaacgagactttcttctttttcgctctttcagagggcccgggctcccatctacgctttgctggttacgttggcatgttgggcatttccccctctctgcctcagtctcccgacctgtcaaagaggacggtgggccagccatgggtgacacgcccgtgcgcctctccaatagtgcacctcgggcaagccgggcggcgggcacagcctggacggtgccggcctcgagaggcacaaagggctggctttccaccggggaaactgaggcagtggagcgaggagcggcgtcctcgaaagtcctcgcaaactcccagcgcctgtgttgggcccatgcaggctacccaggccgcccgtctccgagcggaggaccccgcccagcgctgccaggggcggggccgggctgaggacccgaggctggaagggaggtcggagcacccaattcggtccaggactcgcagggggcggcagtggcggcggcgaagtcccgtgcagtcccagtgctagagcgtgggacggacttgtggggcacccctcggtgttctccagccaggcctgggggcaggaggcccagccacgctgccgggtgcaggcctgcccctgggcgcccgcccgcgcgccgtccccgcccctcggccgccccctccgccccggcgcgggctcgggacgtgcagagccggcgagcgagcagcagggactgcgcctggcgcactcacttccgcgtcccgccgccctccggcccgcgcgcgccgatccgccgccgccatcggacaatgggccgccagccccagctgccgtgaacttcctgccgctgctcggccgcccgtgcgtcccggacggcgttcctgccaggcgccggccgggatcgcagctccggggaagcagcggaggacccagcgcctggaacgtacctgcgcctcagccgccgcgcgtttgctccggcccgactcgcggcctcggcgccctcccggccgattcagcttcacccggcccagtcggctgctgccttgctgtgagtttccgtgtttggttgcctaaggaggatgtgattttacttttttgctgttttctttttccttttataatttgaagaggagaaaagaactccgctgagcaggcccgggacggcgaagtgccaccagctaccccaacaaggacgtctccaggggaaagggagttggaagcaaacttggtccagctggcgttgaggtctcaacttcggctggactcttaaatcctggggtcatgcccttcacgctaggcaggtggaagtctttacttgtactgggccggacttgagccccgacccttcgccagcatctccccgctgccctcaacacacacacacacacacacacacacacacacacacacacacacacacacacacacacacacacacggcacctgggctaggcccggacacctgtctgcagcatggataagtatgacgacctgggcctggaggccagtaaattcatcgaggacctgaacatgtatgaggcctctaaggatgggctcttccgagtggacaagggtgcaggcaacaaccccgagtttgaggaaactcgcagggtgttcgccaccaagatggccaaaatccacctccagcagcagcagcagcagctcctgcaggaggagactctgcccagggggagtagaggccctgtcaatggagggggccgcctgggcccacaggcccgttgggaagttgtgggcagcaagctgactgtggatggtgctgccaagcctcctcttgctgcctcgacaggggcacctggggcagtcaccaccctcgctgctgggcagcccccgtacccaccgcaggagcagagatccaggccatacctgcatggcacgaggcatggcagccaggactgtggttccagggagagcctggcgacttctgagatgtctgctttccaccagccaggcccctgtgaggatccttcctgcctcactcatggagactattatgacaacctctccttggcaagcccaaagtggggtgacaaaccaggagtgtcccccagcatcggcctgagtgtagggagtgggtggcctagctccccggggagtgacccaccactgcccaaaccctgcggggaccatcccctaaatcaccgacagctctccctgagctccagcaggtcttctgagggtagcctcggtggtcagaatagtggcattggtggccgcagcagcgagaagccaacaggcctttggtccactgcctcctcccagcgggtgagccctggcctgccttccccaaacttggagaacggagcaccagctgtggggcctgttcagcccaggaccccttctgtgtcagcacccttggccctgagctgccccaggcaaggaggtcttccaagatcaaactcggggctggggggtgaggtttcaggtgtgatgtccaaacccaatgtggacccccaaccctggttccaggatgggcccaaatcttacctttccagttctgccccgtcatcctcgccagctggtctggacggttcacagcagggtgcggtccctgggctggggccgaagcctggctgcacagaccttggcactggtcccaagctcagccccaccagtcttgtccatccagtgatgtccaccctgcctgagttatcttgtaaagagggtcccctgggctggtcttctgatggtagcctgggatctgtgctcctggacagccccagctcccctagggtaaggctgccctgccagcccctcgtcccaggtcctgagctgagaccctctgctgctgagttgaaattagaagccctcacccaacgtctggagcgagagatggatgctcacccgaaggctgattactttggtgagtgagaggctggtggagttgcctatggtggggcgatggggttcttgagattggggaacatgccccctaccagggatgctgtgggctgtagttacctctctttgagtggcctgtttttttatttttttgttttgggcttcctctttcagctgctttttctgattcagaaacttgaaagcatcctggggcagaaagcggaccttgcagctggggttacccatgtgtgaagggtgcagcagggtgggattgctcatgactgctctcagaaaagagaaatgctgtgactttggatttcaagggttttgggtgtgactttagagcctcttgcagtgacaggctcatataggacttcagtgggacca

SEQ ID NO: 40031 - DNA, 1091 bp, Homo sapiens
cccagctcctggcaacaaccaatgtgcattctgtccctatggcatttacctattctggaatttcatttagaaacggaatcgtgtattttattcattttttgtataaacttcacagataagcaagcacgcacagtgaaaatcgagcctctttccctggtctgtctagtcaagtgttctgggtgtaataagcatgtgtgtgtttctgccagccccagtggtggcatgctgttccactgcacagcgtcttggcagtggctctacatcagcatgtgttcagctggctatacgtggctgctgtgcaatgtgcctaggtcacctaaggtcacctaagcagccctcactgatgggcctttggaatgtacccacctacaaggggcaggcgtagctgcaagatgagctcccaggagtgggactgtggggctgcgtggtttgtgtcctttaggtgtggcttggttgcttcctgcagagctcatgccagggctgagctgccagctatgtaggagagggtttgctccacacctgctttggtggcagagcttccatctgctcttctgcgacctaccttggggcagaggaggaagtctttcggtctgaagattggcagtcattgcctggccctgtgtggggaccatgaagagaccacatgctcctccagaccactcctcccttgtcggtagcctgaggaggctggacagctgaggggctccctcccacagatactttttcctcccctacatctggtattacttgaaagattttgtctacccaacacgctacatttgttaaataatggttagattctacttccaaacagaagaatgtttaatggtgcagggcgcttggcagtgagagtcagagtgacacaactccccatgagaggtgatgtcactcaggccaaaagcaaagcaaagtagatgtttgggttagcttgggccccttcctaggttgaactgaaggtgtccctttgggcatttgactttgtgggaagagcttgtgaatccctgttgccacctttgtaagcccttagagtctcaagatgcccagtttccagttactgattaacttggcacgggaactctcctggcactttc

SEQ ID NO: 40032 - DNA, 479 bp, Homo sapiens
gagccaagattgtgtcattgcactccagcctgggcaacagagcgagactcggtatcaaaaaaaaaaaaaaaaaaagaaggagaatgaagaaataaaaccaaacactgaattagtgataaggttcaaaatagaaaccgaaagacctggtctgtagaagttactcatgagatatttgttgaatgaatgaatcatggtatgtatttataatattacccaatcagaataaaaaagggaaatattttggtgacagtgctactgtttgctcagcagtagtggctaagaaacagtggatgctacataggtattttctccataacttgtgcctggtagtagctgtgccaattttcaccagaccttgattacctgttagagttttgaagggagagcttatctggtgaggacttgggtgacgttgcttgtgggaggagggccaagcacggaatggaagttgaatgttagaagtgctagacctccagatt

SEQ ID NO: 40033 - DNA, 1427 bp, Homo sapiens
tggggtttcaccatgttggccaggctggtctcaaactcctgacctcaggtgatctactcacctcggcctcccaaagtgctgggattacaggtgtgagccactgcaccagtccaagatagtcttaaaaagcaatgtttttgtcttttctaagaaagggccctgatggtttgccctgcgttacactcccaggcaggcacagaaccgatgttaaactctccattttatcacatgaaccctgcccagtgccctacccattcctcccacgccaggctcatgactgcatgtcaagcacagttgtgccaggtgtctacctgctccatttctcctcctcccagcagccctgcaaagtgcccgccaattttctctcctgttttgaagatgcgaaaactaaagcagagagccacaaggtcactcacctggtaagctgcagaactgaacaaagtgtgcttgtgaaactttctgtttgttctaaggagacaactgtgggtgggtggactctgctggaggctgtcccttgcctggctggcagcaaccaagccttctgcttctgacttgctggggagcgggaggacgggaagggctgtcggtggggaaattggagagaatacaaaacctcccctcagctttaataggctctaccaacagttttcactttgcctcttttccttctctggtatagccttcctcctctttggtgaatgcagattcagagcatctctaaaatctactctgtgttacttctgaggagaattcgggattttattttttctggaaaaatgaaaggattttcattctggttcccttctggttccgtgtggtggggcacctcactgcctgaggtcactgacctctgagcccttcttgccactccagtcatctctgccccacatggacacactcagccgcctgctggagtttgtgttttccgtggttggagggaggcaggagggcagttgaaagcgtgctgagtggggagatgggagcagggagctgtgagaaggagagaagctaaggtcagattgcgtgcgtcattcattcattccttcactcacttggtagatgtttattgagcgcctgctgtgagcttggcacctgctcaggtcaaaagggtggctgagtcctcaagggccctgctgtcctatggggacagttccaatacagtgtggtcattacccagtggaggagtagggaggggcgtggggcagggaaggagagagctcagtccggagagtctgggaggcctggggaagaactcaggaggttttgtgaagtgcagtgtgtggaatgtgggtgtctgtgaggagagtggttttatctttttatgaattcactgtgctaaggcctggaagaaaacacctttcctagaaagggagggaaggaaatgaacttttatggggcacctctgtgccaggagcagaggtaagagc

SEQ ID NO: 40034 - DNA, 1249 bp, Homo sapiens
caaacccagggcttggggtgtgatatactttttgtaaaaattgaggttactaaatcctagttggtggttcccactgaaaattaaaggaaataatttagttggaattgtctggccaggcatggtggctcacacctgtaatcctagcactttaggaggccgaggcgggaggattgcttgagcctaggagttcaagaccagtctgggcaacatatcaagatccccgtctcaaaaaaaaaaaaaaaaaaaaaaaaaaaagggaggaaaaaagaaatttcccaacctgcatgcttggcatattatagtgatggtgcaatctttctgaactgtcttacaaacagtgggaaccttcgaaagctttgggtggggtgagggagggagttgaccaagcccaggaattctggacattagcataacagtggggcagggaaagtgggacctaaagtccagcctggtagctgttttctgcagttgaaagagtgacagagggagagggagagaaagacacttcaaatgagtcatccactggatttggtggtgggctggccatggggagggatggtattatgctttgttcattggcttttttatgactcagtttacactggttccctcctgactcactgatgtttctcttgtcctgcaaggagcctgtgtgaaatgcagcaaaggggtgtttggggctggccaggcctgtcaggccatggggaacctctaccatgacacatgcttcacctgtgcagcttgcagtaagtgtgggtgtgggtgtcgggtgtgtgggggatgcgtaaggaacatgggaaccgagaaagggaggagagagatcatctttctggagacggttggtccatggccctcctcagccccacagaaaagccagacagtgtcttttacagcagggtttcttaccaccaacagaagcccatcagggcacggtgacttaacacaataccaaagattgcctgtgattctggtgataagttgaatgagttcagagtgatccctaatcacatcaggtttgaaatatgtaagaagaggtttcagaagatttgggaggaagtgctgggattcaccatgtctaccctgtttgtcagttctctcccccactgtggggaccagccaaccaaaagtgattagtcagtcagctaccccagtgtgaggtggaggtgggggtcctttattactctgtaaccacctccctaacctaatctttgatttggaggctgctgtatgagcatgaggtgtgtgtgca

SEQ ID NO: 40035 - DNA, 793 bp, Homo sapiens
tttctctatagccttgccaacatctactttttgactttttaataatggccattttgtggttttgatttgcatttctttgatgataatgatgtggaggtttgttttgttttgagatggggtctcactgtgtcatccaggctggagtgccatgatgtaattgtagctcactgcagccttgaactcaagcaacccttctgccttagcttctgagtagctgggactgcgggcatgtgccaccatgcccagctaatggtttaaaatttttgtagagacagaggtctcgctgtgttgcctaggctggtcttgagctcctgacttctggtgaccctcccacctcagcctcccacagggctgggattactggcataagccaccacacctgacccttgagcatttttttcatgtttgttggctgcttgtatcagatctttgtttacaatttatctttgacctttgactcctacaacagtttctcaatacttgctctatttttcaggaaaaagaaaataaatattaaggagaggctgttttccacctcaagcagttaccatttgaattagggaagctgttggtgagggaaaaccaattgatgagcgtcttagtctgtttggactgttataacaaagtaccatacactggttggcttataaacaatagaaatgtatttctcacagttctagatgctggaaagtccaagatcaaggtgctggcagatgaggtgtctgttgagggcccacttcccgggcactcatatggtagaaggggagctctctgggatctcctttataagggc

SEQ ID NO: 40036 - DNA, 509 bp, Homo sapiens
agtttcttgtttttgatattttatacatcaccaagtcaatgtagtcacattgtcaaaaaatgtatatgggagaagaaaatcacctataattcaataccaaaaagaacccccaaaaatgtatgctgtgcctacatagacgtttttgcctggttgtcatcacagtgtatgtttgcttttatgccctgctttttccacttagaaatatatcatatgccttttccctcattgcttcatagtcttcataaccatctgctgcgtaagatcctgttgatttgatgactcaaagccaacataaccttcttgccagttaaagtttaaaggggaagtgaactcttaccatgggagctcccagactcttcccaggagtactgaggctggctgagtgtggatcctgtggccaggttttcaaggaccagatgcatagcagggcacgggtcagcctgggggtccggcaaatccaatgcctggccagaggatgcaggcccttccctgtgttcaggggcagggtg

SEQ ID NO: 40037 - DNA, 620 bp, Homo sapiens
agctggtttttgtatttttagtagggacggggtttcaccatgttggccaggatggtcttggtctcctgacctcatgatccgcccaccttggcctcccaaagtgctgagattacaggcgtgagccaccacgcccagccgacaagtgagtttcaactgcccaaacgtcagggcacattattgcaagattaatgaaatgactcaagcaggcctccagggctggctggcttggggtaaattgtgctgcttcaacctgtccttgtcctggctgtggtttggcaccacctagtggcggttgggtgctctagcttaaatgtcaataaggaggattctggatcctgctcttgattggaactttcaggacagtggcagtgattccaggaattttcaggttagttggcgtctgtttcattggccaaatctggggtgattcagcctggagaataccttttctgcctccctgcttctcagcaccaggttgcttgctgtttcctacctggcctcagcctcctctcagcaaccccctttctccaaagatacaaactttagcctgtctccaagtggaaggttacctatcaagttacatctaaatgcctgtcatcacaaggagtttttacggagct

SEQ ID NO: 40038 - DNA, 1173 bp, Homo sapiens
ttgttaatatattttcagtctgggtgcagtagttcacacctgtaatcctgagatgggctgatcacttgagcccaggagttgttgactagccttagacaacatggcgaaacactgtctctacaaaaaaatacaaaaattaggcagttgtggtggtgcacacctgtagccctatctactcaggaggccgaggtgggaggattccttgagcctgggaggctgaggctgcagattgcaccactgcactccagcctgggtgacagagtcaggctccatctcaaaaaaaccccaaacatatatatatgctatccccaaacatatatatatgctatatataagcattttccaatatgactaaaacactatttaaatgacattttaaatagctatgtaacatttcatcatttatatgtactctggtttatataaccattcctctaaggctgccagtttggatctaagtaaatatttattcactttttaaaattctttcccaaagctaagtctcagataacctcactgagtcagagataaacattttaaagtttcccttccagggagagtttatcatcttacactctcagcagtagcttatgaaaatatacagtgacaacaatcacaaacacttaaaaaatctttgttgatctcctggatgaaaaagctttcgtttaatttgtttcttaacactagagggttcagtgcttctgcatgttcaatgatcttcctctgtgatttttggaatagaggtgatcttcgccctattacacaaaacgttgatttccagctcagattccttagaacttgctaaccccattcctggaaccaaagtgctgtttgctgtgttctccatacattggatcagaagcctaagctctggaagtcctgcgccgtttcctggtggcctcctagctccctctaggggccccatccgcaactgcagccccaccttctttcctctcttgaggaatgagtttaccctgcgggaattccgagaaggaagaggcgaaagtggggagctccacaagtaaagatttggactttgtgatcagacagtgtgtgaatagttttgcttactggttgagcaagcttctcttaggtgggctgtctttttttttttttttttttttttttcccgagacggagtctctctctgtcataaaggctagagtgcaatgg

SEQ ID NO: 40039 - DNA, 515 bp, Homo sapiens
cattttttacaagctttcaagtgatgccagggaactgctctttgagaaccactgagatgggattaaagcatctctatatacagtcccttacatagagcctggcatgctgtgggtgcccagacacagtcattgttagagtgagtggtactagtatttgtgatggctttcgtggcagagaatattctatgactcagcccacagctgtgttgtacttggggatgacagaattctgcacagagtgacacatctttctgagaaattccttataatcctcttggctgttggggaagtggctgattcatcttaccagtctgggtttaactttcttttctttttcttctgcagtactctggtttccagcagtcggctgacaggtgttttctttgtggacatctgatcatggacatggtgagtaggtcagccaaagaagagaacagcatctcaggtggaggaggaggtgttcagagaaaaaagaaattaataattgaggacagtgtttcttatcttgatttgtg

SEQ ID NO: 40040 - DNA, 1106 bp, Homo sapiens
catgtggtgtttagttttctgttcctttgttagtttgctgagaatgatggcttccagcttcatccatgtccctgcaaaggacatgatctcattcctttttcccatgagatatttttacatcctctttttgtcctaagtcttcggaatctgcatttacactgacagcacattttaagtggttcacagcaagtgccttgtggcagtgtctcctgtgttggacaggcctccacggggcaggagctgtgtttctgcactggcatttcctgcctatacagaaacacacagcaccctctgctgattttggggactgtggccttcaggtcagtcttgcagtctgttttgttttgcttcccctggacatgtctgcctccccacaggactgtggtctggagctcaatgatgaagatggccaccgctgttatccgctggaggaccacctgttctgtcactcctgccacgtgaagaggctggagaagagaccctcatctacagcccttcaccagcaccacttctagccagagccacttgcagacatcacggcaggggatgaggagccggggttgctgctgctgcttccggtggcccctggggtggaagtggggtaggggaagaggaggggcaggagggagagttcctgtgagcatgtggggggtgcctttcctttaaccagggaggtgaacactacctgcctcctgcgtgtattttccaagtgcttttctctgttgccacattttcctcaggttactcaggaaaatgctccagcatgtgcgagcacatgacctgaggttgcatcatagcaccaaaggaatcctcctgtcccctctgggaacatttcatgcttcagagggagaggtttttattgagcttgtttcacaatatccccttgaagggacagctcagctgccaatacattcaaccctttctcttccttcaggaaaatacctatacccaaatgttccctcccccgacatatatcatggcatgatttaaggcttcttttcacctgagagcttcagttcttctgcagaatggctgcaaatttaattgcattaaggcaagaaggaagctctaatgtgtgctttgtatcctaagataaatttgcttag

SEQ ID NO: 40041 - DNA, 2442 bp, Homo sapiens
tcttcaaagaatatttaatgaccttaaatctcagacaaaaaggtaaggagacaaaatgaggaacccatttccgtacaaccccaatttggaaaaacacatgtgcaagtatgcccatgttaaaaaatatagaagaaaaaaaggctttaaggaaaaaaaaaataatagtaatgatttagggtgggaatcgcgttaatattcccaataattttatatattttaaaaatctataattttatcaggggaaaacgttatgttgcggaaattaattgatcgattgagtgattggttaacggacagtgtccgatgactcatataatcccccggttcgagtccctttaggccgcagacgtttcgcgccttctcgggtgtccaagtcgcgcatccatacaatgaggggtaatatactagattacctgaggtcttcttacggtaaaaacaccggtgtcttaaggtttcccagtggaatttgggggccgggttgacttcggagctggagctcgcaaaggccggggctgctgcagattctgacgctttgtggacccctactaccgagcgcagccgcaccgcaggttttcttcgctgctggttagatccaaagcccatcccatcctagtaaactgggacagcgccgcttctcacatcactatgggggcttctgctccgtggcggggaaaggccagaactgctgccttaaatacgcttttgcatcatccggttgctaacctccggccacagcattccccactccaaaatgccacttttccaggtgtgtttgcctaaatttaccccatttacagacttctcaggtgcatcattgggaacagggcgctttgcagtttgcaaaccacctcagacaactccaggtttaaaggataaaggatgacattgtgagcaaagcggcatcaaaatttcagatatttaactttcacattctaaccatacacctttccaaggtcttgtaatactttcacattgtgaatatacatctttacaagacccagtagtacatgggtcaagtgtggcaaaacagacatcgcgagccagccaggagtcgaacctagaatcttctgatccgtagtcagacgcgttatccattgcgccactggccccgacttgctaaagccttctccgtgatagctgatcacccttatacagtttgaacgggcttccgggtaccaacgatccattttgcccttgcgccgcgctcccgctgctctgcctttccccaaaacgcgccccaccaatccgcagcggcttcgtcacggcgctcttcgtcgcactccaacccgccgcgtcggcggcatctctcgcgtgctcttgcttgcgcactaatttgtcctccaccgcctcccgttcaggccggctctcctgcggggcggggaaaggggtgggaagaggctgggagctgcggccgctgtgccagggtgaccggtagagttgtagccgaggtggcggcgcggggcggggcgggcggagagagaaggaaggaggtggttgtgcaggatggcgacggcggcctacgagcagctgaagctgtgagtcccacgggccagaggcctgaggcgcggcgggcggggcggcaggtgcgggccctggcctcggggagggcttctgagtcccggattgcagatagggtgtgggagctcctcgcatttaccggttttcctcagccggcgcggcctctcctaggcctcgcccgagtagccataggccgggaaccagcggctcgccggcctttctccaccgtgctcggccccagcgcccacggctgaagagagaagctgccgactggcccccaccgagccggggtcggcgttatgatgcggcccttcagggcacgcttgtccccactttctatgcagagctaccgactaaatttatctgtatgacttaacagagaaaaagagttttctcttacttaacggacctacagcagcaatttagagtctacgcacaaatcaacaaatctttgttttgcttacagcctatctgggtaccgaagcctgcctgccccctcttcagtgtgcagaaaaaatttaaagtacagtcagtagtcttaaggtcctgaaggagtttactttggtttaaattttaaacagctccagcctaaagcaggttcttaagtcagtgtcgacagccagaggctaatctcggtaattttggtactgcaaattgacttttcggtaaatccaagttcttgagtctttgatacagaggctgtggttgttaagagttataaaataggtgtttttaagggttttggtttgtcttggattaaaaacaacatgtgtttatttcccttagtgttacccattagcatccacacttttcttgtctgtgaataattttgttgtactcacttcgtgtttaatgctttacccctaggctgtttgaaaatctggtggccacagcctgggaatatctggtaggagaaacaaatgt

SEQ ID NO: 40042 - DNA, 865 bp, Homo sapiens
agagggcagaaaacaacgtggcacagcctcctcgcccaaaccgcacccactagagcagcgctgcccaaactgtgatgtgcctcaggccccctggacatagtgtgaagatacaggatctgattcagcaggatggggtgggcccgagcttctgcagtcccaacgagcgccttgttgctgctgctcccgctctagggaccacacttgaggtagcaaagctctctaggccagtggttctcaaagtgtgggtgccagactcatctgggaacctgctagaaatgtgaattcttggccctcccctggcctgcctgatcagaaccctgggggtgagtctcacagctgtgtttgaccagcccaagggactctgaggcacactcgagtttgaaggttgctctagaccagtggctcttgccccagctgcacattccatcacctggggagaactaaaacattccagtcccgtgctgtgcactgggattgagaacctcactgactaaattttgaatctgccaaattttctaaggtctaagttatcaactggactttggtcagggttcttggaaaatactgatgttggccgatgatcagagcatccagtgcctggaggcacaattccctgccccagtaagctgtgggggtccagcagggtcaaccctaaaacagcctatgatacaaagcaaaagtacagggaatagagaaaaagatattcactgaagcaaactgagcatggaatagaggcagagcataagctgagatctgcgggcaaagaacaaacgttgagtcatgatgcgaagcttaaagaagaggtgaagatgtgcatcaagaaacagctgttttccttgaggggcgtggcctctgtggctgtgtt

SEQ ID NO: 40043 - DNA, 2187 bp, Homo sapiens
ctatcttttctattcaacattgtactagaggtcctagccagtgcaataaggcaagagaaataaataaaaggctcacaatctcatttattcaaaattatttacctggaaaccccaactatttgaaacaaagctggtaatctggaagactaacattctcttataaagcaatctaaaaaggtcttggagcagcaaagatgccacaaagcctatgctcttcacacacagagtcccttaagccctcatcctgaagctacgtacaatcctaataaatggctccatttattttccaagcccaccttggaaaatggcaagagattggcaaaccaaacaaaaccaatgttagctaccagcctaaaaggaaagaacacgcataaaccataaaacgtagatgcagcagtttaaaaaaacagtgcttataaatcacttattaaaagggcaaacagctccacacctcagcagccctgagggcactgcagtgcaggacaataattgacacttgtaataatgactttgagtcatcaggaaaagataagattatgcttatgactcactgcttaagaaggcaggaaattatattttgtattaaaggtttttaatgtctgattttaaagaagtttgggttatttatatggagaaattttagtgttaggaaattactttataggtaatatctgatttcttttacaacctaaccactaaggtttttcatggcttaagcagtacttggccaggaaacagaagtcaatttcacaagtgtttggattgagcacctgtgatacttgagtcataatgacgggctctgctccaggcactcagtccagggatgttcttttttttttcagagttgttactatttaaaggcagctgtggcttggccacgtgagcatactgggctgaaaatggtaagcaggatttgtaatttcttctaagtcgagtcgaccctttgatgagtaagtattgaaagcatgcaaatattccttgcatttgctcttctatcttcttagttcactgtgggatgagatgctattgatgtcacacccaattccccttatcccagcctggaatgtggcctgcagaaggttctctgtgtctcttcacctgaagccctttcttggctacggaagcatgttcagcctaggtccaacaacaaggagttaacatctcaggagtaatcctcatcttgataaattaaggcctggtggatacattcccagcttcctcacgtctcagtgggattgagcgtggtggtccacagtgctaacctgctcattaacacacattttatctcctttcttccctttcctacctcatgcctccgtaccctcaccccactttctgggatcccctccccacttcaaccaagatccctgcctcagggttttgcttttgggggagctgaaataaaacatctggtgccagaaatggccctagaaagtggcctcaggatgagacactggacttgatgccagccagatgacaacaggatcccactgctagtagtaagtgtagtggtgataaaccctgtcacactactgggttagttaccaacactctcacctgggtatggattggaatgaaagaagagaagacagtctctgattagccaactattacctgaagagatgccctgacaactagaaagcccccaggtctctatttaaaagaacccacatctcctatgtgcagaagccagaatgtactgagaatccggcccatgattggattacagcagtgatgcagattcaaaggagaccaaattcacatgcccggaaagtctcctttgcttaagtcagggccctgattgggaaggaatgtgactctgagatatgaggggcccatttgggcaaatgccctcaacgaccttgatatcccagattcttctgaacccttgggtctagaagaagtggctcactcccccttgctagaggagggtagcctcctatcacctggaagccattccaaggcctctcttgaaaggagactggcaagataaccttggtcttcctcaggatcggtccctacttccactcattacttctaaaccaataaatagggctgaatatcagcatgccctatgcagagaaatattatcctgctttgagaagaaatggattagtcccccaaaagaacagaacctggactggcagaaactggaagaacatgtatggttatggatcttgaggatgc

SEQ ID NO: 40044 - DNA, 622 bp, Homo sapiens
caatagcagctgctgtgctggatgtagcatcccttcgagtcagcacttgatatgaggctggagatttggttaatgaattcttttaaatccccttcagaaaagagaatcaagaacaggttgaattcacctgggtcagataacacagtgtacactcaaagttttgctccaggagcatataaaccctcctgctctgttacaaaactgtccaaagaagtccttgatcatcgtgacattctgtagaacatcatcctggtccaatactttgatgacaaaatgttaactggacctagtgaacaggaatgaactggcaaataatctgagtgttccttatgacacatgcaccagagagaaggaggtaattcctacaaagattcagaggtcagaggtccaacaatctagggaatactgggacatcctgccaagtcaagagccagttattgcattttgtaccttctactactaagagaggtaagcactaggtagtattatctggattctgaagtcagcatgtacaacacttaggaatattgctctgaccatttcttgggtcactcagaaggctgcaagttttgagtacacagttaggagggctttgtacctctctatggttcaggctgtagtg

SEQ ID NO: 40045 - DNA, 1338 bp, Homo sapiens
taagtacaaacattgttagcttatttaacatttattaaaaatacagactctttatactaatgcagaaggataagcctcttcttcccactctaaaaatctcttctttgctgtaaagaattctcagtgcatgtgagctaagactctggagcactcagtagagaggtgtgtgggatgaccagacagaatcactaggttttctctgttttcaactagctgaaaataggaactctagttctaaatattcaaagtctaaatattagaaaaataaggagaggggatatgacaaaatgcttttcaaaatacatgcctgaggtgagactgcttgtatgtttgcatgtggtagcttccagaggaaatcttcagttttaatcttcaggttcatatctggagatataaattaagaacacaatgtcaggataccttttgttgttgttattaccaaataagtttacttgaagcagtggcactatatttctcacttcaaattactgttacggtagaagttggacacattcaactttgttttgatggtgactcagaggggatttttacatcaggtaggaggataggccagatcactgctaaggctccaagtctgtatatttggcatttagacctgtgataacttcatataattacctcaatcatcatgttgacaagaacagttgatacgactatatgagtaaagggctagcaaatctacttctctaaggacaaatctcaccttgaattccctttctagctctgctcccctggaactctgataaaggtaaaatgtcaactcagtttccaggcaaaacatctgatgaccacatctggacctggaggactatgaatgaactataaatacatggtgggagccaccactttaggtttccccctgtgcgatgagttcttttaactggacatacccttaactgggtatcatgtgactgctaagagagatactaatcctatgtagaacacggacttctaagccaagctggctatgacacccatctgcatgaatctcattctctccaacttaaactgtcatttaggggaacagtaagaccagttcttggactgcttagagtataccaccaaggagaagagaactacctaatgctgccctgcgagcttgctgtgtttcctgtctgacatcctgctaagtgaatccattgccaagagcagcttactgtaggcctgtgtgagtctaaaggcctagatgaacctaaaaagaagccctggtgggcattatagataaggtcaggccagagctcctccactttcctcaaatgaaggcttctggactaaatgatccagcaactaccaccggcttgacctctctggaacaag

SEQ ID NO: 40046 - DNA, 898 bp, Homo sapiens
gttaagaaccctgccgtgcaccttaggccggcagcagtttcctctatctctcctcacctgccacctaagagttgtgccttggctccagcccccgcaggcaggagagaaacgaagcgatgcggcggagctgggctgctgggaaaaggcttcacccaggattaccccagaagggcttgggctgcggttaaccgaatctctcgcgcccggcgcagctccccttctcagggaggctgaggtgcggccagacccaacgaggccacgtaatcattccgggcccacccgctcagtgtctccagccccggccgcgctctctcctgtgcgcggtgcggcgcctgagggtcggttactcaccatggcggcaggcagcggcggcagcctaaaggaacgggagaggccaggcggtgccccgccaagcctgggatcgccgagggtagttggaccacagaaaatggggaaggagggtaggttgtttagaagcctctggttgctaacggaaaccgaggcacgtggactgcaattatgcattttcattggtcctcaggatcacgcgacaggaagtattgcgtaaccggttgactgccacatgcgcattggcttccagggccggaagtcccacctttttgtgccagttcacttttgggagctgactgcagttgcagaaggtagcgggagggttgggctgcctggagttgcgtgtggccaccaacgcgcttcgcgcctcgtggcgtccgcttatggattgttgggaagttcttgtccagaacttcctgtggcataggtgaccccaaggatgaatggacatcccagacctttcaatggtctcatagggcgcggcccagacatttttttttttcaggagttcctacctgagcatcagggtggctgagacaggccaaca

SEQ ID NO: 40047 - DNA, 1023 bp, Homo sapiens
ggttgcattctcacctagtctcttaaagggttgcctcagcaaggaaacccaacccaaggagtttaataagtacgaaatcgttgaccattttcatcttttcccatcttaattttaaaaatcacatatttttcctgctgctaggagagattttctgctgaaatcttcccactgacttctgatctagtccattgccaacatgtttgtgcttgaccctcatttgggcatatttcttctgggtcttttagttaggattatttttagagagaagataagggaaaatgaaatacctctattcagcacagggtcgaagtacactggccttgtgcagatgtgcttaggagaggcgatggacactagagagggcccaggagtggcatttattccaagcctgcctagtatcagtacagagactgcctgtgcgtattataattattttgaaagactgtgaagaagcaaaacgaaaaaaaaaaaaaaaccccaaaaactcccttccagatcaaaacttcagagggcaaaagttcaagaaaggatttatttttaatgttgaaagagaagagattgtgagtaaaatcgagaacagtgattaaaatgcaaaagcccgggaagctcagaagtgctgtttggtttgctgaatgtttgtattttctcagtcagaagccagccaaatatacctgccttattcctgaaaggtttttctaactggctgctagcctacaataaaaaccattttctacagctttaatgtgtgctgaggaggggtgggggaatgtttaaaagaagtcctatgagtaagtagaccttgcgatgatgcattatagcattatatttgcaaagatatgtgtgcatgtgtgtatgtgtgtttgtgcctctctgtgcatgtgtgtgtgtgtttgcattcttgtgcctgcttatttgcagatacaagggacaaagtcacagataagtaggagcatagctgagaccataaactagcagtaaagcacataactgatatgaattctaccactttcttaggcttcataa

SEQ ID NO: 40048 - DNA, 709 bp, Homo sapiens
agccagacaacacagactgagaaacatcaagcaaggacctccttttcttatgggtcccatgtcataaactcttgacattttaacatggtggcactttatacaactcatatttttaaaaactgaccttgtgaaactctccttgaaaaccttgttggcaaatagctacactagaaaaatgagaaggccaagggagaataagtacttaaggatatccttgccgtggctgctttgtccctctgaagcctgctctgcctgtgtaagctatagcattcttgcggcagtcaggaaggttcagtggatccaggtcactgattaaaagcagcataaaataccagtgctagggcaaagtgcaggctaggtgagtggaaagtcccttgggttccacagggtacagagtaataggcctgtccatatttttcttactgctaaaactttgaggctttgagtgggtttatctgcagctaaaggaacctctgagagggcgcatctatcagagacaattgcaactaaatccgagcttcctttctcatggcatcctcgccaagcctgattagtgtttccaaaagatgaactaaactcaccgtgctggagcctcatggacaaagccaatccaatcaccaaactggagacccaagacagcccctactcactgttgcctctgtgactttgggccttgccttcccttcctggaacaccttcctctgaagca

SEQ ID NO: 40049 - DNA, 5238 bp, Homo sapiens
gtggctgtctgctcagcagtggtcagactccatggtggcacctgcacagaggaaggggaggccatggaggaagcagatacagacacaatttaacgacaatattagagaactctgctctgggcacaaaggtcaccctatctgggtgtattccctcaacaggagggcttgacctttctgtgtgggccttgttctgtgggcactctctggtttgtttctgacacacttctattcagacacagtgacctggtttggggctaaacaagaaattagatcaatcatattgcagcctatctttttgagctcactttccattcaccttagataggactgccttactttcctttaaaaagccacctagtggctctctccatccccttataccaaaggctacacggaatcagtgcagcccagcttcagacagctctgctaagcctaaggatccccatctcccccacacctggccccacaccctctccacctttctttctctgaagaatggtcagtctctagccaggcagtgctagttgggggagaggatgaggacacataccctcagaacttctggaccaaggaaagccgggcttgcctggcagggtccccttcgtcgtgaggcttgaagcctccagctgcccagagtccaactcagcctgggtgtgcagatgctgcctggccttctctccagaggcctgcacagcccctgcaccaggcaatggatgtgtctctatttttaagtttggttacagtcctctcccagctggtgagtcctgagttatcagccctacatgggcagctgttgaagtgatttacccgtagggctgaaggccaacagaagttaaagagatgtgagcacattggaaagaggtctggacatgcatctggagatcctacgtcctttcagaacctctcattcttcccttagatatccagtgcaaggttgtaatgtttgctggcaaagtagatagcaagactagagttggctgtggtggcagccggcactaaatgagggtctattgcgtgcagggctctgttacgtgctttacacacatgatcacttttaattctcacaatcaccctggtggagcagataacatcgtccctgtttacaaaggagaaaatgatgctcagaggagtcatgtaacttgttttaggccacgggccagtaaggcgaggaatcacagagactgaactctggtcagtctgatttcaaacctggtggttttccaataagtcctactgactttttaagactcagccattgtcactacagcaaatgaccaaccacttccaccggctcgaggtactaccatgaactccagcatctcccaagtaatgtgaacaccctgagtgttctaacacatgccacctctcactctcccactgccaccttgccctcgtggctccaggagtccaggcaagcagatcctggcatggaaaccaccccagccacaagctcctccaaatatttacataaggattcctgcctctgcccgaggagagggcctatcacagggcagagataactagagcctatttttaactaactagccaatgtagctgtgactcagtgcaaacaaggcccaaagagggcttctctggcttaggaaggaaacagacacatgcccgtaccacagtcccaggaattcatgagtcccagagagaagagcttcaggggagccacagagaaccccccaaacctcccaacaagtgttggcacccatccatcagggacaccaaactgaggatgggagtgctttatgagaagcctgcctgcccatccctgggtgtctctccaggtcaccagctgaacacaggcctgagcagggaccagccggggccctagagagagccagagaggataagaacctccactatcaacacacagctgccccagcacattccgtcaagtgtctgctacatgcaggctggggatacagaggcacacaagacacagtccagccctggaagagcctggctacccatcaaggagacagatggaaaaatatcacatatccagatacaatggaagaggctcacgtagagatatggataaaaagtcatgggcactcagtactgagaagatatgaactatgggcatacaaaacaacatggaggaatctgaaatgccctgtgctgagtcaaagaagcctctcaaaccaccacaactgtgcaatcccatttatatgctattctggcaaaggcaaatcattaggagagaaatcacatcagtagctgccagggtctaggggagaagggagagtctgactacaaaggagcacaggaaaatatggggggcaattctgtttactgccttgattacggtgatggttacatgactatatgtatttgacaaacatacacttgtcacaactcatataactataagttatatctcacaaaaaaggagcattgggatgaatttataaaaaaaaatgcagtgggatctgaggaagggaaaatctaattcagcttggggaagggagaagtggtagacactctgtgatggccaggcctaaaaagtgaacaggcagtcactggagagagccaaaaagaaaaggatgctgggacggaggcacacaagagtaaaggctgtttctctaactgcattcctcttatttggctgctgccaacacagaggagtttgcagtctctgagagaaataatcctggagaaagacgactggagtgataccctgtgatctttaaatgcagcccactgggtctgtgtgtacacttctgaccatgtctgtggagagggtggagcttgggaaggaggtgatagcaacaacagatcctgagtaactcatccgggctgcggccaggacaatgaaggaaccaaccagctggattttctggaaaccagccctaactggagtctggcacaagggaaacaatgtctgcaaacccaaacagcatcataagcctgaacacagatggcaacacactcctttaagacttcttggtgctttggtgacactgcccttgtgtgagcccaaggcaggagaccttctctgtctgaccttgggagtgtgctcttggctggtgtcaagttcccaggtcgtggggtgagctgttcccagccactcattacacaagctgatttttcaaagagcctgtgtcgccaccagcataatgagccctaagaaactgcctgccaggcctgtggggtgtggtgggcttccccactctggctctgggtcatcacctcacagggattcaggaagtaaatcagagcttccatagagaacatggtcaccatggggatgctattttcaggaactcagcatcttgccctccttgctcctccgtctcggtctgaggtcattactaaccaacaaaaggcacagaatgggcaagatcactctccaaacatggccaacttccttgtgtctctagataagcttgccctttcattgagggaatcacagactcctggcatgaaccagcctgatcctgacatctacaacccattagcaaatggctctcctaactcaggagacactcaaagctctgtacatactaccacggctgccccagcaccagcgtaaggactccaggactcacacacctcacagggcccccagtgtgccaatcacctcataaacccacagtccttgttgcacaacatgtaaaaaccttcgttgctgtctctgacaggctctttcaaatatcagagaaatgcgttttataaaatctttggaagcattgaatttccttgccaacaactcaaaattatgtttaagcctatccaaaatgtctgaaaacatccagttttctgacaaagaggaaaagggactcaatgcattttttaaaattcttatttttcacttggtactactgtatgagttcctagtcatgacctagatatcattttagaagtaaaggaccttctctgacctccaagttttttctatacctgcccagatgccctaaatgccttaaacaatagcaacggcaatttagtcaaattaagatacaaagatgctgactgactcatgcaaacctatttatgctatggtccaagtgactaatactcataatattgcccagaaactggctcagacagcatctgagtagtcacacaaggaaagaagaatcatcaggggaggaggaggttggaggcgtggaagtcaacctttctccaccttcaaaattttgctcccaacacaatagctaagggctgacccagagaggacaccttacagttggattcctcccccagtcccaaataaggaggagcctaccagttgtaaagtctcccctgaccaagaaagaatgttaaggacaaggatggttaaaaaggcagaaaagcctttctggaagagtccattgcctaggcctggttcagcacacccaacggcaactatctagttaccacctacagaaagggaggcacttggctggtacctgcagcttcgaaggcctggaggtcctgctggcccaggggctggaacaatcagtgggcaggcagactgcccttcccagagcttcaagagggtggctaggagagtgctccggagtttgccagaggccagctcagaggcaggcatttcagcacacgtgaacaaagactcattaggtgacccaaccccttggacctatgattaaagtgttaacccactgcatgcctgggtcatctttcccaaacactcctttttgcttgtcatcttctctctttcataaagggaatgagaacttgaggctttgccatggcttcttcaaccttctcttggtccccttccccccaccaacaatagcagtttccttggttgctctcccagaacacatacaaaacagccactattcgagtccatggaccccagagagcaggacttagagggctctgaggtgttgcttttggatctggggaagccaagtctttttttagtgaggtgggcagttgctcaagggaggagccacacctctgtacttgacgctgtggggctgagaaaatatccaagaggtgacaatgacaggcatgagaatctggacaatctctggaacaactgcatcaataattaagaactcaactggtgcatctactcctgctccaaagaatacaggcccaacctagatggggaaaaactacagatctccaaaattatatgctctgggacctctcctgaccgaagtgtcagggggtcaatccagctagttatgaactaagaactgaatctctgatagaatatgacatagccacaaaacatggccttgaggaagcagcaggcaacttctgtgtgct

SEQ ID NO: 40050 - DNA, 2427 bp, Homo sapiens
ttctagtcttgagtcaccaaagctgtgtctttggaatcttcagtaaacaaaagttacctatcagctaaacatctcccctaaagggaagcagggtgggtgggggtgagggggctgccatttcttgcgtacctactttgtattcttgagtcagcagtccatagccttggtgaccaatatgggtcaaagctaccagctgctctgatcttgctctgttatgggtgattcctctcatcacaaacatctatgggggccatccccctcaaaaaggaccaggttaaaaacttggctcctgaaattatactggtgctccaaacccagccccaaggggcaaaggtcatcggaacaacagctaaaggatcactgcctgagactgttaccaatctctaaagtaactgcaaaaaaaaaaaaaaatcaaagtaaaatattaagaattgagtatacggatattcaccatacaatcctttcagtgattctgtatgtttatttttctaataaaatattaaaaacaatttaaaaagtaaatgaagtgctacacaaagatagtcactttgaacataaacagataaactctatttcctaaagcaagagcctttaggagagatcctattaatcaaaggaggctgagatccatcactgtgacaattagctcttattttcagggtgataataaccacggtgcacaactagtatggggcattcaatgctttcagaacagtggttgtcacagaagggagggtcaagtggagctcactcaacaggggtccacttcagaaggtgggaactactgaaagcagaaaaccttggcatgatagctccagctccccacccctcccccacaccagcccccaacaccctccagccgcattaggcagatggcaggggaattaagcttgcagcctgagaccacaaggcctgcacgggcaggagaaccagtgagcagattaagccctggatcctctgccccgcaaaagcccctgacccatttctctgtcgggaaaggaaactgctgtggtaagacaagcagaggggctgagaggctctggccaacacaggcagtttcaacaagtgttctatttttttttctggagaggacacccaatgggaacagtgaagagtgacagggacatcagagaatacatgtgctttaacagggggccacgcggttaacgtgtcaaccacatgtgcttttcttacaaaaaataaaatcccgccatcctcccccctccccgccccacccccgccaggtttcaacagcacggactccagtccagtgcagtgccgccacaccagagacaacaggtgtttcgggaaaagacccctgggggctagctcgagaccctgcgcatgggcacaaggggcagtggatagtgaataggtcttggccaaaggatgggccaggaagaaagaagcttcttcccctcctgggaagagggcagagatccgagcaccagcggagtcttgcaaagtgaaggtctgggctgtcccggcccaactgggccagagactaaacttcctaaagaccacgcaggcaggaactccggggcctgccccatcctgcgctaagacattcaggcttgttctgagacgccgcatggtgggctcctttcctttgcgggccctccgccctccggggtcttggaactggtgtttggggtctgtctttctaaccgaccaacagaggcaggctgggtgcctgggccggcttccacctgcccgaggtgcttcccggcccgctgggcaaggacgggggcgctcgggcagggtctgagggagacctgggatgggcggggactgtaagggcaacaggtgacaagccgcgccccgagcgaagctctcgcctcagggatcgtgagcgacccaggtgcccccagagtccagccggtcttccgcggcacttacgcgctcgtgggtccaccgccgggcagaaccgaaactttctggggccaagcggaagaggacgggaacgcggtgctgacggccatgacgcgcacaccaagagggtggcgggggcggactacaactcccggcgtgctccccggggctgaggcctgcaactcccatcggactcccggggctccgactacaactcccggcgactccgcagggcggggtttaagtgctcccaccgcccagtccccggaccgactgtcccacccgcgacccatgctggccccaggttaacgcctgcaaccccggagggccacaaatcaaaggtctggcatcttgacaacaacgctgttcttgtgtggctaaggagcactccaaaggtagctagttcgagttgaatcgtgcacgtgctgtaagtgtgaaatacacctaggtaccaaagagtccgaagaatgttaactagctcattaatttttagtgattgcatgttaaaatgataatattttgatatattgggaaatagaaaaacatgtattggtg

SEQ ID NO: 40051 - DNA, 586 bp, Homo sapiens
tgctctaaaacttgcctctgtttctccctctgccttatgcccctcagttgaattctttcctttgaggaggtcagaatcgagttgctgcagacccatgcagattcggcattactaacaagtcaacattagcatacaaaaaacatagcacttggaagattccaagaattttaggagttgtatgccaggaaatggggatgaagaccaaatatctattgcataatatcacagtcactctctccatgagtcaagtagttccctgagatagtaaagagtgtttcatcaacaatattagaccctgtggtcaaataagttttgaaaacaggattggatgaagacaaaaaacaaagtccataccacaggactctggggaacctccaaatgtttaaaaatgagcccctggttgcagttgcttccaggagtccaggaagcaattgcagctggagatttgccatttcatacttgtgagcagtttatcttgtaagggatggggacttcaattcacctttgggcaaaatgtttctttattttgggaaaaaacactgaaatgggcctctttgtgcccattctctgttttatacttaaaaac

SEQ ID NO: 40052 - DNA, 630 bp, Homo sapiens
acatcacttcctctccctacagttccctttctctgtgcatcttcctggaccaaccataggtcccaacttcctggtcctctgtgagtaggactgtgtggtccttaccctagcagtctcttcccaggctgggagcagctctctgtgtaaccaaggctctctccctctctctttttttcctgggccatccacacagtgcttcaaggcctcccaggcctgagccagctggcccagggccatgatgctgccattttattgaattgaagaaccccttctcacagggccctggtcatatataaatgtggcatcatcctggccatccccctccctgggccagcaagccctgcgggtgtgattcgtgtctctccctcctttggcaggaagctgctgtgcatggctgtgtagaaagaccacatcacctcccagctgtcacctttgatggcccttcaaagtcagtggtgactcactaccccagtgttctctacgtaaggtttctaagccagccctggctctttccagggtgctggctggtgtggtggctaaacaagatggggggaaggtgaaacagaagcatctggaggatcctgtggtcccctcacccctctctctcctttatttgttaccaatcctatc

SEQ ID NO: 40053 - DNA, 396 bp, Homo sapiens
tctagatgtggaatctatttccactcttttgaatttctactcctgctttggctaaatgaatgtggaagtgatgctgtgccagttctaagcacagaagccttccagattttgctctcttttggaactctgccagccaccatgtaaatgaccttaaggtagcctactggatggtgagatgtatgactcagactcccctgttgccccagctaatagccagtcccaagctaaactggaagctggccatagttgcgtgagtgtaaccataattgccctgcagagctcagcctaaattgctgacttgcagaatcatcagcaatgacaaacgtttattacattaagccactaagttttgtactggtttgttatgcagaaatatttgaatgacacttgtcttct

SEQ ID NO: 40054 - DNA, 1809 bp, Homo sapiens
atgtaatttcttaagaattgatccttggtttccatagtagggagatttgtagctctgcctaaatatgggaccccatgtaataactcataggggaacaatcctaagtcttttcttggggctgttgtaatcctaagcagtgtattgggagacatttagtccaagacatttttgtttctaagattagtttggtgatatgctttttgagagtttgattcattctttctacctttccagaggaagggggacattacgaggtgtgataatcccatctaatttgtaaaccttacataattccccttaacatccttgaggtaaagtggctcccattgtttgaatcagtattttccaccaggccaaatctacgcacaatctgttttaatattattttgaccacattcttggtggtggctgtgggaagggggaaggcttccacccagccagaaaggtaatctgtgatcaccagtaaatactttagttttcctactttgggcatttctgtgaaatctacttgaatgctttgaaatggtcttagtctgggaggttttcctcccatgggctgttttctaattacctttttgtttatcctttgacaaattacacaacttccacatacttgtttagtgagggtaaaattcctgtagtattgcatcacggagagcctgaggtccccagtgactccctttgtgtaatatagacattagttctctcatcagggtttactgattgtttctctcccatcaggaagtactcatttcttatttttagtttaagtgacccctagtctgtctaattcttccttctcctctctggtaaactggggccttaatactaccttaggaatgtctgggatccagctaaatagtataatatcttcctccagggaggcttgcttagcagctttatctgcaagcctgtttcctgcagcttctatagtgttccctttctgatgaccatttacataaactatggctactttgctggaagcaggaggctttttacaacctgtttggccagttccccatgcaccaattattttcccctgctatttattagggcctgctttgttcagatttttctaaaaatgtgtaccaccccataagcatatttagaatcagtatgtatggtgcctttttggcctttgagttttagggcctggttaagagcatataattcacaagtttgggcccaccagccattaggtaatctacccttctcacataaggagtgtttattttcattaaggacagcataaccattatttttcttgccatctatcattgggatgacccatccacaaacagccttgtcccatcatgtagtggagcttccctgaggtctgatttaactttggtttggtattctatgatatctaacagttacagtctgatatctctttgttctcctctcctttccataggaaactggctggattcaggcaagcatttgtggttacaaccaaatcatctttttctagtaatatggcgtcatattttagaaactgagaatccgttaactatctcccggcttttcaatttgatacattcctgacctggtatggaatgcttactattagggccccaccaaaggttagttttcaactcttttctaccagcagggctgtggcagctactgcttgcacacattcaggccacccctgagagacaggattgagaagcttggagacaaaagcaacaggttgcctcttccctccccagatttgagtgagcactccaagggccatgccctgatctactgtgacgaacagatggaatagtttctttaaagacagaagggccagggccggggctg

SEQ ID NO: 40055 - DNA, 819 bp, Homo sapiens
tatcaattagagtacattgttcatagtacctttcatctttagcctaataatttccaggcaaaatattatcttccaatgttatttaggccagtcccttctctcccccagcccccactggtgcggttatataatgaatttgtaataaagtttatatgctttttatgcattgtctcccagctccgaacgcgtccttcaatatagcatatgcgctgacgtggacttctccaagcatctctctccttcagtgagctcggcaagattgctcggtagagggcggtggagggacgttgcaggaggaaggggcgctcctgccatttccagtgagggccacgggagggcggtccgggtgtgaggactgcggtctgctgcacctgcagcctgggtgtggcgatgaccttttctgcagccctctcaacacagacctcggagtctccgagcagcctgtgtgctctgcaggcctgctgtccgtgctggcgcccagacttcctctccaagctcccgcctgccctgtggccccgaaggttccatgctgagctgcagcacttcctgcaagcctccagtggctcaggcgctcaaaaggcctcctgtccccactgtatgcccatgtcactggttcccgatcccctgctcctttgtcggcttacagacagtggcctgttgcctgcccaacaaattcctggccagcgccagcctgaccaaaccggtgagagtcctctgctagcaggtgtgctgactgcacctccaagaagtctgaacccttccaagcttgtccttcccagggtgcactccctcagcacgaggatacaatgcagtttcttc

SEQ ID NO: 40056 - DNA, 2782 bp, Homo sapiens
ccagtgggatgagaaatgcaggttctggttcgtgccctgtgcccctgggctggtggcaggagcagcggggctggttagcatcccactgtcaaaccccagccttgaacgttcacctggagcttggcctgggagccactaaccatgggtcacctggtccagggacgtgagacatactctccactgccccacaggcagagctactcaggcagggacctgaggcaggctggtctcaggaacaggttggccacagcttcaacagtaagagagcggggatcacaagaaaaccaggcttaaaggaacccaaagttacaaattcactttctctcctttgagtccagtgtgttctctgttccctgtgctgatcatggcatcctttgctcagtgatactctttgcagcatttagaagggtaggtagcactcactctctcaagcctgaactggaaatactaccatagccagggtagctcacaaccccagcacagccacaggacctctcatccaccctcctttatgtttataaatttctttatgttcttaactacaagtgcatgatttcctaagtgatggcattgtggttttgttcctcacgtaagaggtattttgttgtgtagaagctccagcagcttgaattctttactcaatgccatgattgtgagataagcccatgttgatctatgtagctctagtttagggaatggcaaacctctttctgtaaagagccagataataaatattttaggctttgtggaccaagaggcaaatcaaagatattatgtaggtccttatctaggtataagaaggaagacaaattaccacaaaactttgttgatgaaattcaaaatgtaatattataataaaataataataatcaaatcaattgttttgtaatacagatctagaataatgaaattcttttggggaaaatatcaaagtgactattttttatctacttcaaatatccatctttatgagtcattcttagttcttgagccacacagaaactcgtgatgggccagatttggttgtgggccaaaggtgaccaaaccctactctagttcattcattttcactgccgcatagaattccactggatgactctaacaaaaggttttatctgttcactgggaggagagaggagtgttccagttgtttctattttaaaattgtatttctataagtattctaatacatatcagtatactatacgtgcaaatgtttatctggatggtatacatacaagtagaattgctgaacagggcatgtgtatctttaatcccaaactgtttcccaaagtggctgtactaatttctaagagtggcagctatatttgtccctgttgctccacaggcttataaacatttggtatttggtcagcaggctcttccaacacccctttgaaggcgtttcatgtttcctgccacagggttgggaggaggctgtgtagaccaaaaccacgtaataaaaataataatcatttttatgtatgccttttttatgccattgacaacagaattatgaaaaaaaaaaaacaaattcgaaacacacaagtgacaaaaaagttccagaagacagaaggaccaggagcagcgagggccactgcccactttggaggttttccattttcgtggcaagagcaggccccaggagctctgccagttaggaacctctgcagcctgggagcacacgtggatatctggtctaggttcagtaggtgccgctgcctgagctgccccgactgctgggcaaggagggatttcctgtagccatccacagacttccaaactcacatggtctcatattgattctggattgttggtttacataagccctggcgcaggctgcgaattttatctcagggaagtggtgtatttcagccaatgaacaggtcatcagaaatgagaacttttagaacatggagggcaagtcttctcattgggttgcagttaaaaattctcagttgaatcataaaaccagtcgttcaaaggaaacttttaaaagtaccagccctggaaaattctgttcttaggaatcacatctcagcttcaaggaggaactaaactggctggtaaaacttttgatcttgcattcagcacagggacagtgtaaaaggaaagaaaaatagtggaaagcattttcgttaaacttgaccgagagagcaatttctttggagaataagatcacagagggtaggctggccacatttgaaagggaaaagaggcttaccttgacccaaaggctcttacagttgggaaactaaaagagggaattatttaagtgtcattaggtctgagatgatgacacaccagcaagccccaacagaaaaagtggtaagttatcagagaggaaatggaggattccccagagaatgcatagatccagaaaactgtggacagttgccctcataaaaactgtaataagagcaattgcaagaccatccccgtcctccctcctcccacccctggaaccccagactgggatagttctatagagttaacagaatttgggacagaattcattcaacattcattcaaataattactgaatatccaggcactgttcagatgagcaaaaattccctgcttttctatgtcaagactggcagtttcctagaaaccaaggctatgtcaagaggtgattaaaaaatgaacaattgtggaaaaacagaatagtgagaaagaaagagagtgtggaaggagagggagagagttgccactttattgagggaatttaaggaaggcctccctaataattcaagaggaggcccagaggagctgacagaat

SEQ ID NO: 40057 - DNA, 5932 bp, Homo sapiens
tatgaccctgccaaatccccctctgtgagaaacacccaagaatgatcaacaaaaaataaataaataaataaataaataaataaaaataaaataaaaaaaaaagagagaaatccttcttccctcactagttgagaagttgatttgtgagccaagctcccgcttctcaattccatggccattgaataaaacttgtgctgcttaagattcacttttggttttgcatattggctttgcagcactaaacaggaaaagatcccatttgtggggaaaccagctttgtctgtaatagtactagacaactagaggcagtccctatgccctggagcactcagaattatttaaatgagccaatccacagggagcccatgaaacctagctagccccacgcaactccccaacttcctacccataaactgtccctcacagctccagctggctgttgctctgcccccaggcaccctctgtgggcctgcctggcagccttgccttgtttggaggtataactaacaaatagttctgccttttatctatcttcgtgtcattgtggtgtgtcccgccatcaaaagaaactttaaatttcatgaaactgacctcatctctagatctttcacttaattacatctgcagaaaccctttttccaaatgtggtcacattcaaaggtggacatctctttcgggatgtagcaatgacttaagccttgtatacagatgaagtcagcaaaaggaatgccaaagtcaagggagtctgctctctgtcatgcgatgctataccagagtcaggttggaaagtagctccattataccaggttaataaaactccctttaatgagatattatggtttgtagggcataacttttaccatgcatagccttaggtcttgtttataaattggttatctgattgcaacaagcagtctattttgtcagtcttatgatctctgttttaaccttgatgctggtgagttgtccctaaagtcaaagggagggagtatgataaggtgtttccaacctcccctcctgtcatagctgggaatttagtttttcaggtttctcaggggtccccttggccaaaagctagtccattcagttggtttgggggcttaggaacttatttttagttagcagtttaaaatcaataaagtgtaacaactatttacatagcatttacattgtattaggtattataagtaatctagagatcaattaaagtatacagaaggatgtgcatagattatatgcaaatactatgtcattttgtataagggacctgagcatctgaggattttgctatctgcagggggcgctggaaccaatccacctggaactgagggacagctctaatgctgagaaacaaaactggcttggaaagaggggagacccaggacttgagcctgccgaggagctaaacccaagggcaagagctgcaggcagctgggctggagaggaggaaggaggtggctttgtttccaactgccctggaagacctcctcatccccctgcatccccagcctcctttcctttttccttcctgctctgctcccttccttcctctcctcctcttgggaggtggccagggacataggtcagtgcctggccccgaggaagacacatgcagtttgtggacgggtcttgggatgcggacacccagagtcttgtgcaccttcctggagtgttgcccactccagtacccactccctaatctcccctcttcctcctcaatcctctcttgcaggaagcagaggatggagaaccccctcaggaaggagggcagtgactctgggtttgcctagggctaatggcctctcaccgacctgtgcccttgtacctgtcgcctgggcaaacagtgattgcatcagctttggtttctcatgggtgggcagccttggctgtctgccggaacgtaaagagcatggagcaaggacatgggaatccgaatcccgctgaggtcccaggaccacttcatccttcttccctgtgcctctcctccccagcatgagcacagcagcctgatggagaaggattttccaatgttagaactggaaagaacacctgtagcctgtctccaccgtttacagtggtgctggaagtgaaaagatgtgttccaggtcacaggcaggtagacagcggagccagactgaaattcactcctcctgatttggagtttagagctcttctttggcaacattttgatgaataaaatcacaagttctgtgtcttttgaaattccttgtggagcctagtgccatcctctgaacttggagccaactgacctttgtccttggggcagagacatggttcatgggcccaatccaggtcctcaaagggagggcaggtctgagtccttgccctctgaagtcagaaacctcatctcccactacagacctgccagggcccaggagagctcgacccacccaggcacaccatagccccagagatggctggggacacagaagtgtggaagcaaatgtttcaggagttaatgcgggaggtgaagccatggcacaggtggaccctgagaccagacaagggccttcttcccaacgtcctgaagccaggctggatgcaataccagcagtggaccttcgccaggtgagggggaatgtgatggtacacgttccagaaaattcttgcacatttcttactaggtatacctgttacttttcttgttctattctgtgctttcaaattgaagactatgggtaataagatgcccatcatccaagaagttgtaacttcattaaagatcgttttttcactattacaatgaaccccaaagcaagagcaggcctgagcacccttgtgagctaatgcctggatacagagaaatcagtctgtgggggtggggagagggagcagccaggaaaggggaggggaggaagggcagctgttgcacccacgggcggtgcatgtgccccatgcctagggagactgctggacccaccttggagcccctaggaggagagactcacggcactgagcagacaccctcgggggaggccggaggagcagggggcctgggcaacaggcagcaatcctgcccctctctactctgagctgatagaatctttttaaaataggagtcttagaaatcatcctaagcctcatcctctctttcccaggtggaaatggggagccccaaggcttggggctgattgcccacagtgcacagagggtggaggccgggtcccacccgctgtcccctcccagggagagtctacatagagggggcagagctctcccactggcctatggctatcccaggccaggagctgccatagggagcattgcaccaaagtctcagtccatttatccatgggaagtttgaactctgaacaagcacaggaacagagcactgagacccaggggatggcagtggacttctgctcagaacagggcccaggcccctctgcactgctgactctgggtgactcccagcaaggtcctctcacagtgatcacagcttcttggcctctccctctcatttcaaccttgcattcaccctgtgggttgcggctagagtcaagatacaggagcacaccctggactaactccctcttcccagccccctccaattcaccacctgcagcctaatttctctgtatccaggcatcgggggctcagccacagtgacaaataaacctggaaatatcactgatttaaccttacacgtggctcccaaggtcaccgaagcagaggaggagagagctggaatgtcttaccaaggcttctgtgaccatatctggaaggaacatatatcactgctggcctcatctcattgcccaactggtcccatggccccagcctcacggcaaaggggctgggaagtgggagggagtgcatggataatttggtgagcattaaatgtctccgccacagtgcagctctctgcctctcccataattcctttcccaggtgcagccatgtgcttcctgccttcttctctctctacctcctgacatgtatttgtccagataccttagctcaaaaactgccctcctccctgctgagacaaggtgtattatcttgtatcctgtctgaagccagtggcattcagaatatgaagttttccaggctaccttgagcaagggaactgggttggaggggaaacaaatgaagagagagctggacactgtgatctccctgcaataccgcagaccagggaccctcggcagccaagagaaaggcaaaggctttcctctaggagaaccctggacacttcaggctcccaccgccaacccatgagtctataacttaatcaacacccacctataggcatttgtggatttcagggtcctgaactgaactggctgctgttgcagttgtggcctctgacccatttgaatctacatttgaagaagctttgctttggaatagggagaccacagtcccagtcatgcctttttacacccactgggtctctggacatgaggagtttccagagtgtgcctcatctctaaaatggacgtgttggacttagaagatgcccaaggtccctcccagatctaacagcttgcaattcactgttttcatagcagacactgtgcagcatgcagtgtgtcagtggcacaatggagatgggaaagaggtcttagcaatttcttccaccactgagccacagccccagtcaagtcatgtctctgtgcagtcggtagctcctttctctctctggcagttccccgtgatttggtcacatggagccaggctgagactctcttctgtctccacaggttccagtgctcctcctgctctcgtaactgggcctctgcccaagttctggtccttttccacatgaactggagtgaggagaagtccaggggccaggtgaagatgagggtgtttacccagagatgtaagaagtgcccccaacctctgtttgaggaccctgagttcacacaagagaacatctcaaggatcctgaaaaacctggtgttccgaattctgaagaaatgctatagaggaagatttcagttgatagaggaggttcctatgatcaaggacatctctcttgaagggccacacaatagtgacaactgtgaggcatgtctgcagggcttctgtgctgggcccatacaggttacaagcctccccccatctcagaccccaagagtacactccatttacaaggtggaggaggtagttaagccctgggcctcaggagagaatgtctattcctacgcatgccaaaaccacatctgtaggaacttaagcattttctgctgttgtgtcattctcattgttatcgtggtgattgttgtaaaaactgctatatgagccttggaaacatgaagctaagtcagaaaaaaaatcagatacaaaaagtcatatgttgtatgatttcatttatgtgaaaggtccagaataggcaaatctattagatgaactgctagcagggcctagagatagtgggagatgggaagcaactacttaatcctgatgggttttttttgtggaggagagaggtgtgatgagaatgttttggactgagatagaggtgcggttgcacaacagtgtcaatgcactaaatgtcattgaactgtccactttcaatggttaaatttgttatgtgactttcacttcagtattttttaaaaaggccttcacaattgtgttcactctcaagagaactgagtctgaagtgtctatgattcataaaccatttggaaatcttgtgaagcctgtgggccccctcaccagggaattttgcacagaccctctgaggtcagactgtgagggcaaaagcatcaggatgaaaacctgggttctcaaacagttgtccccatggagggaggtgtgtatgctgctgagggggaaaggcaggatgtgccaccgggtgtttcctttttaaagataatgtaattagtataaattgttgattaacggggaactcacagccaatagcatcatgacccaggcctgaaggaagcttctctaa

SEQ ID NO: 40058 - DNA, 1892 bp, Homo sapiens
tcagagcacgtgggctgcacaagggctctgtgttctggctcaagagagctgtagaaaggtgactgcaaggccaaggatgcaaagtcgcaaagggactgttctgagcccatgcttggggcagattccgatggatattctcacatgcacactgctgatccccagcccacgccaaaaaaaaggcaggaagcctcttcctactaccttgcccctccagtgccttctactgagaaagcacagcactgcgctcactttaaagggccaatatttaaaggaatgccattgtataacacagggtatatttattgagtggcgcattcaaagctgagaagcagtaagttgataactgacaccgtgggtaaccaatttggttgagttctgacctcaaattccaacctgccttctgtggggtgtgatccccatgtcaggtctgttttcagtcttcgtggtgctattcagctatgttccgtgtgcaccacccagtggcccgtctacggcgtggctgaaggtctattccagtgtccaggtctaacttctttggagtgctggttagggtcagatccacgcatgcgcagctaggggaggagcccaggaacaaacttacggagctgtttcctccaaattcctccctctctgtgatctccctggtcctttcctgatcgctgggctccctttttcgggcctctggccaaaaacttggtgttgtagttaccctgctctgccgtgcacttcctacaactgcacccacagtcgcggccaagcagcgaagatttaagaaagtaagaaagcgtgacggtttgctccactcttttgggctatagctcctccaatcagaaaaggaaggttctctgcatgtcccactttatgtgaaatctaacaaagttgaactcgtagaagtagagtgtagaaagagattggggccggggaggaagggaatgggcagttactggtcaaagggtacaaagtttcagataggtaggaggaatgttttgaaatctattgcatagcagggcgactatagtcaataataaagtattgcatatttcaaaatcactgaaagggtaaatttcaaatgtctaccataaaaatgataggtaaaagaagtgcatttaatttttcttttaccacttttcttactctgttatcttcagctcaggagtatctaacctgcaaagatcttaattaaggctttggctttcgacttaaaagtctccataaaggaacgctacgcatcatcctgaaaataaagatcaaagtccacagccagtggtgaagaaacattaataagagaatcagtcagcctagtttttttgaggaaatctgtgcacagatcccaagtctacacataaaccaaaaagccaaagtaaagttaactgtatttgagcagtgtgggcagcccagccagccacagtaactgaagctggaagaattactccctacacacagggctcgtgttctctagatcaaccagacacatcacagactctgttgttgaggttctttcatttcctcaggccagttagcccttggctagtagccagagctgtacattaactgcccctacatttttaaaatcattgcttatgaatttctatgtattaacttagagaaatgtaattctagttcccatcttagaggaatggtctcttcttaatgtctttgtgttctaaatatttgatcatgtcaacaaaaaatggcttaatcatctttgataaattcctggaattatgaaatttaattaccaaaggccctgacatatttttaagtagttataagtcattactactctcagtattttggtgggaaagagcatattctgtctgtcatctaaccatgttcaccattttccctgtgtttttaaaaagcaggaaaagaagttctcttatacaattaag

SEQ ID NO: 40059 - DNA, 1657 bp, Homo sapiens
atcatttaaagaaaaaagaaaggaaactaagaatccctgtcaccaattaaatgtaagacaaaaacaagaggtatgtgagcatccgagggtttttcctccacctggcatgattagcagaggttctttgggtgaataatgggtgaaccccccagtccctgagttctgggagagggtttggtccagcagaagagctagcaacagggcagagccgctaacaagccagacaattcctcctcctctgggtctccagtcactttccgcccttgcctcaggcctgtccccaccccaagccagggggcgtgagacgctggaagaaaagacttccccgccagggccatgtgtcaatcataccattcaggacacaaacaaagttgatttatctcccctggacagcgctttggaccagaaagctttgggctcagccttgggcgccggagcagtacgcgcaggggaactgctaagccggagcaagattcactcgcggggacccctgcctccccacgctctctcctttctcgccttcccaccatagtcctggacctcagataacggtggatgcctaagccccagccgctgtccggttagggacgtttacccctgtcgctccggcagattgcaggtcaccaaggcacagaggaaggattaaacaactgagcgcccggggcaccggccatccgcccgcgtcctcccacggggagcgcaaggcccccgctcccgccccccggccacctcggacgcccagcgcttacctgccccgaggggcgggcactgacagtcctggcctgcccgccgcggctgtttacaccgcagaggctgtttacaccgcagaggctgtttacacccgctgagcagcacggccgagccggaagaagcctcccgtgcctgtgcgctaacaggctatatttgtaggcggataatatgatctggaggacatgtgctaaatcaactatctatctattctatgtgactcagcccagcctgagacaaaacagacttcgtaggggagggcttggcaccctgcgcgctgcagccggccagcgcgagccccggcccagggactatctgcagcctcctacccagggccagacattttcacactggagatcccggagggtgtggaatggaagggagctggttccgagtgctcagcacgctaagctgggaacccagccagacgcaggctttgaaagccatatgaccaagggaatgtaaaagtgttttcgatgttggaagcagcagacatcgaaggtctcaatttcaccgttacattttatctttttaatatcctaaaatgtatgtgagtttaggttctctttagatactttactaattggccaaatatgttttgctgatagccgacatcgtgaaaatatgacaagttaataatcagtaatcaactccctggctgctcccaggagtccatgtgaacacgtcctgatccttaatggcaatggctcctcatatcccttagcctaaactgaaaaataccttttgtgtgatatatgtgtcatacttctaaaattcatttccttaaaaatcattattttcttttcttttctttttttttttttttttttgagaggagtctcactgtcgcccacgctggagtgcagtggtgtgatctcggctcactgcaacctgcgcctcccgggttcaa

SEQ ID NO: 40060 - DNA, 987 bp, Homo sapiens
tgggtgaaaaaccgaaactccctctcaaaaataaataaataaatacagtagtttgtaaaatgattcatcggtaacatgggatgcagctattttttaatccttatatgaaaattgtatgcaggggaaaacatgtgaaatagaagataaaagacatatacctacttaaaattaggtacttatgtgaggacagggcctaagaaataataatatatattaaaaagacttggatattggtgactttttttcaacatttttctttgttacatgaattagccattaaaaaaagaaagatggtgctctacaatttcttttcagtgatctgtggtcttgtccttgtgatgagaggacctgggtgttaacttgtaaggttttatttcctttgtttggctaactcatgtctgacttcctcttcctagtgtgatttggatcatggccatttctaaagtctttgaactgggattagttgccggtgagagaccttttgttcttttgatcactctcaatttttatgtggcctaaaatacagactccatgaattgattttgtcgttaagggctgggccatcaggaatttgctcgtccatctcggggatacctggccttcagagatgacagcatttggccccaggaggagcctgcaattcggcctcggtcttcccagcgtgtgccgcccatggggatacagcacagtaagaactgcctgacttcgatgcttctgccctggcccttcatgtgtctcctgagtatctttccaacactctttcacctaaaagggcacctggttctggaactgtgcaggtgctggactgcttttggttttggaagtgagacaaggattgtgtattttacttccctagagtgcagttttcctcccctgagtccacttcacactggggaacccagaaccaccactggcctatgcatgaaaatgacttctctgctcaaaggcacagagacttactctgatacaacacattggtgttgtatt

SEQ ID NO: 40061 - DNA, 459 bp, Homo sapiens
atgggttcttgatttaagccacgtcatctgtgcttatgcttttctttatatcaacttatttttatggtggtaaaatatacataacatttaccattttaatcatttgtaagttcagtagcatttaagtacatttgcattgttgtgcaacagtcaccaccatctatttccaaaactttttcatcatcccaagctgaaactctacctattaaacattaactacccctttgcccttccccaggccctcggtaaccacacttactttgtctctgaatttgactgttctggatacctccagtagggggagttatacgctatttgtctttttgtgtcacatcgtgtcttcaaggttcatccatgttgtagcatgtgtcaaacttttttttttttttttttgagacagggtctcgctctgtcgcccaggctggagtgcagtggcgccatctctgctcactgcaagct

SEQ ID NO: 40062 - DNA, 2418 bp, Homo sapiens
ccttgggtaagtggactcctttgagttaaggacagttcatacctaacacccccagcctctgggagaaggtgggtctcatcacagtccaccgctcatgctgctggttccatttcctccaggattctgaatgatcagttttcctgggtgaacttcaacagagtaggattggtggggcagactacagtcccctctcctgcagctgatctcagagcacaacagaaaactgaggtacatgtccctcctgtacccattctgcctccccttgccctgagctagcacctctgctcttgtatgtggcttacctggtgggggtgaccaaaccttcatccctagggggtctaaatccctgattcccatgcccttctcaagctcaaattgggcagggagtaccaaaatatacccctgtggatcacctgagctgaaactttgtacccccacagcattagagtcttccctgggaggaagcacctccttggcctcagcagttcctgtcagtcaagggtgagtcccagacagacactaagccaggagcagccaacatgctctaatccacccccaaggagtgcccccatgaccttctcacatgtatactgcctggcccgtgctgcttcaataactgaacatttagcttctctgatcacaacttctgtgctccacaattatccttctacctcacagctaactcctgagcaacacaggggttaggggaactgacccctcgcttagttgaaagtccatgtataactttggattcccccaaaacttaactactaatagcctactgttgaccagaagcctaattgacagtcaattaacacgtattttgtatgtcatgtgtattatatgttgtattcttgaaataaagtgttgtattcttgaaactaaagaaaagaaaagatgattaagaaaatcataaggaagagaaaatatatttactattcatacagtggaagtgggtcatcataaaggtcttcatcctcatcatctccatgttgagtaggccaaggaggagaaggaagaggaggggttggccttgctgtctcaggggttgtggagatgaaagaaaattcgtgtataagtggattcatgccattcaaacatatgttgctcaagggtcaactgtgtattattttatgaaactatatgtgccatttcacaggtcacctcaggacttagctgttgcaataatcatgcaacagttaatgtttaactgcttctttcttagcttagacattaatcaggagccatgcactactcccatttgtcaacattctctggtagggctcctctctggcctcagcaaagtcttaaccaaaaaaacaaaacaagaaaaaaaggttgcgtggggagaacccagggagtctgactcttcatacttttctgcaagaacatctcccatctgtagcgcccccagagcatgggtgacagtccatgtctgtcccctctataaatgcgggagcagggacacagtcactccaaattctaccagccagtggggagtctccaggtgccttctatgagcaaacaggaagaatgcagttacctgtgagctcactgttttgtcttggagctatcattttgtaaaagcttcacctttaaacatttctacagctgacaaaaccagttggccctacattgattctaccaacattggagagtagtcagctgtacagattttgtcagctattgcacatgcactcgttaattaaaaagaataaaaagagactaccaaatttcatcaaaggagccaacaggaggaatggaggggaggccctggggaaggcagcactagagccaagggcagggcttggcagctcagggatgagccctctatgactgtttgctaaggaaagagctgagggtcagccctgctgagcacctgaggaccagatagaggaaggaggaacaacccgtgagaagacttgaaggtggaggaagctttaccgacctggcgagtgtggctgagaagtcaggagctaaaggatttgaacccccatttaatcagaggcagcccacaacacacaatgggaaagcatcctgggctgccactggcaccccagggctgacaacctcacaggctgttcaaggagcacagcaaagacagcccacattttaaaagctggcatggatgtcaataggccttacgaagtggttatgagccttaaaatgtagtgctgagattgcagctccaactcggatggacagagtagcatgcggaggctcacatggtgaattttagctccagaacgagtgcaaaaacaaaccggcaatcccgagaggacccacagaccctctcaaggaagtggactgctcctgcaggacctgggagacaccccaaatactgtgctggtatccatggctgagagacccatagatggttcatatcacaggactctgtgcagacaacccccagtatca

SEQ ID NO: 40063 - DNA, 605 bp, Homo sapiens
gtaataaaatagtacattgtaatatttgtgaattataaaaaggcacaataagagaatttgaatttttaaaaacaaaactggcaaagatttttagagatcattgaacctatatattttttactatattagatagttgttcaatgagtatccactttctcactctctatctccgtgggaggctgggcttggccccatgacctgttttagcaaacagagcatgagcaacagtaactggccagttctgagcagaggcctctctgctcagagacattgtgaaattcttcttgcccttctggaagcttctgacctctgtgacagaaacacatgctccagggagctgcccctctccagccttggctgcagagagtggcattgcagtgcagatctgaactcagcctgcagcctaaagcaagccaccctagcagactcagggccccacagcctgaggcagagctacccaaccaacccttgaacactggagtgaggaaaaaagtttattgtatatgccattgagatttgggggtcagggtttattctgcaacaaaaggctgacttaagacacaaattggtacctagaagtgagtattctataacacaggcctaag

SEQ ID NO: 40064 - DNA, 2762 bp, Homo sapiens
atgttgacgaggctggtctcaaactcctagcctcaagtgatcaacccatcttggcctcccaaagtgctgggattacaggcgtgagccactgcgcccagccaaagaggatcacagcttttcaaactacttaagtctcccctcaaaaggacaaacaggtggaagggggcttctctgggtgtggggatctggtccttagactccccaccccacaaagcagcctatgactccgggggtgagtcctccagactcaagttggcaactgttaatctgggagtcttccacatctgtggccccaaagggatctataaccctgggaaactgagtcacaccacccagaggaacgggcagaagttaagcatggctggtgaggcagtgggttgggggaaggccgcagtggaagctgggattctggttaggtgaccctgagggacccagctcccaggctagggagtctggggcttcatcctggaagtgatgaggagagtgtaagtgcaggggtgaggcagcgtgaatgtgcatgagtgtgcacgtttgcagggcaggaggaggaggtgctgaaccttaatatgaggaggatcctgcaggagtacccccctccccaacccctgtcccatccctaaccttcccccttccagtcaagggcatagcttcctcaccctctccctccctccagttcaaaggttccttagtgacaggctgtgcctaatgtacagatggggaaactgaggcccaggaacaatgggagggtccagagacccttgtgtagaacttgtgcagggctcagacccagacttctggctccagcccaccaggttcacctagctagatggctcagagagggtgggcaactcacctgaggcacagagcaagatcctgacgggccctgcctcacagctgtcctcaggcagccctgatgctcaccacggggtgcggtggggtggggcagggtgaggacagaactggccagtcacggcgtgcccaggtgagtcagcggctgcccctgtggcgctctaaccagtagccagacctggtctctcctctgcattcctggcctctgtccacgctaggtccctcccgggcagggtcactggggccttccctgtcctctcccaggcctggctccttaggcccctgacacaccttgtcgtgacactcactcactctggtatttcctggtctgaacaggcagggaagttctgcctgctgtggaggctttttcatgggctgccgtggcagccccttcgttgtctggtgcccagtgggggagagtagagacacgcactgccccagggagggggcgctgaactgtcacacctgatccctcagtctcatgctcgcctctccccgctgcacccttcctcggccccaccatggctacaagcctcttgtcctagacaagcacccctccctgctgtcgcatatgtcccagcttcccttcctctccctgcccaggcacacactcagtcgctggagtttcccagacccgagctcctgttccggccgccaggcatttgccatgccgctcccatgcgaaaaggccacctcctggaatcccgggtcgggcccttccgccctaaccagccggcgtcacctcctcctggcagtctctcctgctggctggggccccgtggccctgccaccacggctcaggtcaggcccggggcgctgccccgaacccaagcaggctagcagccaggcagggaggacgacgctgtgagcggggtatcttacgagggactcggacggccgggggatgactgccgccgggaccaaggagctgggcggggaccgcagcagccgaggaggcgggagcccccacctggacgagctaagcgtggagcgcagacacccgtccgcagacgcgcgcccttcgtcgcgcccttacctgagcgctgtggttgccccgcgccgggactgcctgtgcggctcctcgctcgcacccccaccctgccccctgccagtcccgccccctgccagccccgcccccttcgcccagccccgccccgccccgcctccgggtgttgctctggagttgcgggggccacgggcgggccaccgaggagctggcgcgcggtattgatccgtcccgccgccccaagcctctcctgaggcctccctctggcgtcccccgggatccggaggcccctgggacccggcgcggggaggaaaagtgggagtcttgacccctccgccccctacgcacccacgcgcacactcaggctcgcctctcgcgccccgcttcccctgcaaggctccgaggccgccgtgccaccacctcgccccgccagtcagtcgctctgcgagcctgtggtgcagccccgtgacctcccgggtctgccctgagtcacagaagccagcacacgcggagcgctgtgtgggttcgtggaacttggagcctgtagaggggtatactgaggcgccctgcggccccctgggctgggtgtccacggccggccgcccctcctgtgcgaccttggggaagtcccctttcctccccactcctgagtctcaacaggcctagtagagcatgaagccggccgcgtgtgctttgtgcgaaggcctgagaccttggaaagggtggctgaagacttatctgggacagaccccccgggagcgggagggaacttagttcaaacctgtaacaaagaagccccccgtcagcagcctgattccccctctggccaccaggttagtcacccattgctctcagtggcactcaggttccagtgagggggaggctcagggtccaaggcggccgtgga

SEQ ID NO: 40065 - DNA, 1372 bp, Homo sapiens
tatggtgggttcaaggggctccttcagggatgagcacggtttagaggatctatgggtcccctagagcatgggtgtgggccaccaggcatccctggggcttaggagggaggcaagggctggagagtggccatggcctcaggaggagcatatggcctcaccacttgtgacgaacagggacaggtggggcaaggccccgagcaggacagatctgatcttatgctaggtgtctctgggcctcactttcatcatctgcacgtgcagctgagggaaggcagtgctgcctgggctcgagcaggaagggaagggctcccacggcttcctccctagagcacagacttcctgttcagccacatctaggggaatagaaaggctgactgagctctgggcagcagaccagtccttcccccattccctgggtgacctcatgggcattgcaagcccagttttcctatctgctaaatggggcaagacctgcccagcctctcttacagctcattcttggcttggggccaggtaaggcctctggtagtgcccaaaggacagcctctgctgagtccacctgccttcagtcccctgcagcacagccaagggcccctagccaatcccaccacagatgtgtatacccacccacaccactcccacacccgctgcacacagatacaattccacagtcagggaatgggtgggtccctgtgccacatggacccatctaccattgaacccactggtaaggactccaagttgcacaactctagtggcagccctgggtatgcgtgtgcagatcatgtgcccatccacagggacacagacctgcacactactccagggaacacacacgtatgtgaatggcacctgtgattctggagccattgagactcatacccagccacacacaaagctgcatgcagaatgcacatgcactcccatgtgcaccagtgccttagtacacaaagcacatgctcaagcacacgcaggtctgacacaggcctggcccagccccacagctattctgagctgagcctggggctgatgaggtcagggacagccaactcccagcaggccccagctgctgtggcacaggcctaggctgcccagctcccacccccaccctaggctgagtccctggatcctagcctagctttgtgactgggggtcctcatttcctacccccagctcccccagagctaaactttaagccctgggatttcaggctccaggagagaacattccacagggtcctctggccactaccccctgccttgctcacagcttccagttcagaggccctggaggctggactgggtccctacaggaaactcacaggagctaaaattagtacaggagggagaagcagggatctgcagaccagcat

SEQ ID NO: 40066 - DNA, 2338 bp, Homo sapiens
acagtgcctcaggcagagtccccctaagatatcctgaacccgactgcctgcttctactctcctccattctgttccccccattccaccccttcacttgttccagcgtccaggctgttgccttaggattctgctcccaccctgagaccccccaccccaccaacgccgccacattccacctaagcgcccatcctctagaaagcctttgctgacaccctccccaaccttttggtgcccacagcctccccccgaccccccaccgtgctgatcccttacgaagcactctcattctgctggaacctctgtgctgtccctgtctcccccaaggctgacaatttcccaagctccccctcctcccacaatgccccacccaggaagcccagggcctgatctctggcgcctcagctcctgagacccccctccccctgccgtctagaaacgttcctggaatccaccgaccctccccacagtgttccctctctaatccccacaacagtctcaaccctacagtggaggaaatgagtggcgagaggttaagcaatttgccaagatcacacgaggcaggagtaaagcggggcttgaacccagggccctgggcagggctggggtgcgggggctggcagggtatcgacccagggtacacaacacagcagtcaaacagatagacagagttttggatgagccaacggctgagatgggacgagaagccagcgcctcctccctgcgcgtctgtctgcaggccaggggctcacacgggagccggctcctgccccctggcccagggccagccgtcatccccatgaggtcagccacagctggcgatttcggggaaataccagctccttattaaaaacaggcggtggtcaggcccccgctgctttcccagtagaaactggagtgtttgttccaaaaggaacaagagtgggcagggcctggccagggccctgaggcgggaggcttgagctgcagtacctggtcagggtgtcccgggagctgcggggagaggaagtggaggggacagccccagtccggcagtcgcgggtgggggctagcaaaggcagcctgtgtgaggggcgggcaccggcccgggaggggatggtcccacaacacctcgaggctgcgccgaccagggaggggttgtggactgtgacctccacagctgcaccccccaccccggcccggggacaaatctcaggcagtgggcaaggcctgagaaaaagcaggctcatggcgataagtccctcctcttccggggtaggcagccgccacccgcgcccctgtgcccagagcctgcagcccccgcctccaggagatctgcggaggcctcccctgcagggggcgcgagtgggccatgcctcccccggccccggcccaggccccggcccaccccgccactctccgcgccagcacaggccgccctgcatctggagcgagttagggttggcggcctggcgggcggcggcgtgagctcatcccggcccgccccgctgcggtttccacgcggctgtgaagggaacagaacacagaaacgccgcgccgagggccgggccggaggagcacagaggagcggccgctcctcccgggatgtgggtgggagtgggagaggcgggagtgtgtatcactggcgcgtcgccgagggaggctgagccctgggagccggccaccagcatgcgtcgctggtgtcaccgtgtgtggtggcttgcgagggtgtgtgtgtcccgaagggaaaacactgtgcgtgtgataagttgcacacctcccaacacacactcctcgttttacaaaaatcagcagctgagggcagaggacaaggagggctggccagtgcacaaactggggcttggctcccacccggggcctgtgtccctgagtggatgcagaagctctggaccaaccagcccaggtgtctggcagggcccagggcccacctccccagacacacacatacttttcctggtcactgcccccctcacactccccccaaggagcccaggcatcttctccttcaggaaggagaaaggaacccctcacaccagggtattggctaacagagacactcacagcccacacggaaacaggaacacatacctggacacaggctcacacctggaagcacacccaaggaaagcactcctgctcttggaatcctagttgggagagcccaccagcaggctgtgaggcagtggcaaggcttgaaaaggcttcttggtgagatgccccttccctctgccaggggctgggaacaggaaggctggaggtcactgaaccttgaaccttagcggccccagcaccttgtgatgggccctgagggtaccgccctgtgtgaagggcctcagaaccc

SEQ ID NO: 40067 - DNA, 1353 bp, Homo sapiens
ccctgtcctggagtgggcccggagagatggggagatttgccaactgactgacaggagctctggcggtgcagagggcactctgggacagtagtgcggccagcagctgcctccaagcccacccaccacttccccatgcccaccccaattcaggcgtgctcttcacagactaaagaggtgagggtgacccctgtggtacaggcagtgactggaccacgatcagccagcagggggcgcagaagggatgggaaccgacctttggttcctgaactcaaaccccagaacccagaatcccaacccagaccccagatcaggaaaccggaaccccaagctcagaccccagactcaggtctcacaatttgagtgccaaactcagaacccagaacccagattccaggactagaccccactgtggagacctagacccagatcctggcacccaaaccctgaccaaagactccaagacccaggatggtaaacccggaccttcaacccagactccggaccccagaccccagacacaggaaccaggattctaaacccagaccccagatccaggactcaagccccaggactctaaacccagacttccaggactgcaaacccaaaccccagacccaggacccaggacaagggctgacggatttccagatcagcgtggccctgtgtggacaaggccagtgggaaggggcaccggggggtcacactcttggcaacagcgggggtagctgcttggcagacctccctggtagcgttcagaagggcatgaagaatgtccatcatcctgtcagagccaatttggggagctcagactatggttgccacgtggagggtgggcagaaggaggtaagggccagctgtcccctgggcctaagagccagaggcagggaaacagggtcgggctccccacgtgcccttgtcccctgggccgcagtctccgcaggcagccatggcccgccctggcctgccggtcccgcccctcctggcccacagcctctgggctgggacgcaggcccacacttcccggaggagtcgagaacacggcctgggccagacccagagccttagaagtaggtcaaatgttgccgcgcagcaggtcctggggaccctgtcctggtgtgggcaggcccgtaggctgcagctcacttaccagggcccacttgtgtgtccacatagatgtgaacccaccgctacacactggacacccatgaacacagaccccacgcggggcccctaggtccctgtccagttgcacagatggggagaccgtggccccaaggaggcaagagctgcccagcaattctgactagagatggcacgaggcaggtacaaggaccagcagaaggagataaattt

SEQ ID NO: 40068 - DNA, 513 bp, Homo sapiens
gctgccaagggtttgtgggagctctggatgggtgaggttcgggataccggggtctgggatgggaggagggggtgccaatgtgctaatcaaaggaactgagaaaacaaaggcctggggcttgggtcaggaggaatggagcaagatgcagccctgagccccagctccccagctctgcctgctggtccagcttccggacaggggcccggcccctccccccacagcatggcctgtggcctccctgaactgccctggacattccctgccactgggccaaaccctgtactctcccaccagcagcttcccaaagagcaaatatttattgtccttggaagaaaaaaaaagactccccttttaggatcggggtctgggagctgctattgaggtttgcaggggctcagcagcggcctgaaatgaccagaagccccacctagacgggctgaggaagaaaggagggtgttccatgagccggccttggaggagactgcaaaggctgccctgggtgctgggctgggg

SEQ ID NO: 40069 - DNA, 2536 bp, Homo sapiens
tctcagcctcctgaatagctgggactacaggcatgagccaccatgtccagctctgagtgatttttacttgcttctctgattttctgtagtttccggaatttctaatcagtattcttcctacacagaaacaaccaacgaagtactcaaaaacataaagaggaaacaggcagaggggccataaggcagcagaagactgtggcagggttctgagtcaggcagcaccagcacctcagctctgctggtggccagtctctgtggcttagggccaggctgtcccctagccaaagggaagcagagaccaagccatgcttttttggggctttctgcccccagagtctatgggaaggagggcagcccagaaagcccaatggcttctaagacactatcctttgcaccaaatgccctaggccacccaaagtccaccctataccggcagccagtgtctgggtggagctttgctgtctctccacaggagcagacacatcagccacctcagtgcctccactggccctccctctgactcagggaccccagtgtccccaaaacaagtctaagcttcttcacgtggtcctggccccacagcctgctcaccccctcagctacacacttccccgtccatcacgcttaaagagccagctccaggaggtggccctgtgggcccctcccagtgtccctactcaccctgaggcacagtaaccgcccttctcctgggccccctttgccccacttgcctctctaccctctccacagcaggccccactccatgcacgtggccctgtgtcggctgcatgtctgtctttcacagcctgccctaaatgcaccaggcagctccaggaggggctcagcatacattgcctcaagctggataaaggaattcagaaggcactcaagaaagagctttatgggtagcctggggctctctgagcctttcaatgacttgagaagacatttggaagcaaagaagttgtgcccagcagagagggcaggaatgtggctgggccggggcagccaacccctaagcaacttctttgtggcaaagcaacagggaatgccaagtttgcattccatagagtttccttctaaaatgggtagctgaccttttctatttactttactctgcttcaggccagctgcaggagcccgggacatgggctggccagggaggttcaggggaaatcacccctagggtgctttttcacatgtgccaatgagaggaagcaggtggagaaagttgatgttctctgtcaagtatagaaccagagtagagttctagaatggcgaaatgaaaggaagctttgagattatgaatctgatccaaccccatcactggcaaactggcctcaaagcctacactgctcatgggggtttcatggcccctggtccacttcactcactcatgctaccaggcttatcctttggggcgctagcctcccttctcatcccttatatcttgaggctactccacattcacctgctgccctgggcccctggagggaggcagagaggataaggacaggacagtcccacatggcctgttccctgagaacaaggtcctccacctggccaccctggtccctcctggccatacaggccccatcaagggccagagagagaactgctgtgaggcactcctcctagtaacagaccacagggaaggccacgcccaggatgcgcctgcaggccttgcagaggccaccactgaccagagagactggcaactttgatcaaagaacactttcatttttaatattcagagtacagagacactggagctctgccaggaaaacacactcatgacactcagacatgcccctaataatcctctgtttgctttaggctctgcacatagagacctaccccttgtccccaatataaataacaaggcttcagttgctgctgccagaggccagactcgacagaagcatgaaaatgaggggagaggcaactaccccaaatgaggtacacaactgctctagaggctgatctggtctttctttcaagggccattaaaatgttcaaactccctgacccggtaaccctgctctggggaaattattccatagaaatagtaacaagacaggagcaagcaaaacaaagcattctatatacgcacgatcctggcagcataattcataatagctacaacacctctgggatctcttctggcagagtgccctagagtggcctaaagtaccaccaggctatgagggcaaaggacaatttagtacagggatgtttttgtttggtggttgatatttttctttagaacactcaatggctggctttgcagcaaatgagacttttaaagagcccagtggcttccccactcgtgggcagaggagactgtcctccagctgtcacccagcaaggcaactgtggccccagcctgaagaacgggtacagtgtaaggcaataaaacctcccttcccttctcttatccagcccaccccaagcctcctgtccttctggccacacaaagaggacaaggtctattggagcacatgacacaagaagtgaccatgggcaggacagggcc

SEQ ID NO: 40070 - DNA, 3218 bp, Homo sapiens
atgaaaaaatgttacaaaacagcatgatatgcacagatacatgttgatctgtagtttctaagttttctacaataaaaaaatctataatttatgtaaatatcaattgaaaatttttttttttttgagatggagtctcgctctgtcgtccactggagtgcagtggagcaatctcggctcactacaagctccgcctcccgggttcactccattctcctgcctcagcctcccaaagtgctgggattacaggcgtgagccacagcacccggttgtaaatatcaatttaaattttaaaacaggagaggagtaaacgtttatggcagatgagctaagccccaaagggcccataaggtgagaactggattggtcacactggccatgtgggacccagatgttgggggacaggggcctgcatagcccactgcccctcaccctcccagggcccaatctagcccacagaccactctgggaaagtggatggtgctcaaccccataaggctgccctgagtggcaaactgccagcagctgctgcactctgccaaagactcttttccccacacagggaggggtctcagtgccagctccactccctttcaaaagttggaggattttagccaaggaaattttagccaagtcacttcacctgcctggactgtagtttcttcacctataaatgcagatcacattagtcccagaacagaggtgaagacttcataagaggggctttggaagctgagatcaggacatacaagatatcaagacttaatgcacacagaaaggattcagctgtgctcctaccccaccctacccagaagggaggtgcccggtgccagcacatggtgagtcggcttcaccatcttccttaaaccagttctctcttgattcattctcccacattcccaggcctattcccaagaaacagggtcaggaaaaacgaggcagtcgtgggtccctgtgctgctgcttcagcaggagatctccactgcccatgactgggacatcaccagatgtagacatcctctacagtgggactgaaagaactcaggaggcgtgatgggagccgccctggtcggtaccactacggtggaacaatgcatgccaaatcaagctgatgtcatggatcaaacaaccatgatctgtgatacaccctggtgtgtggaaaccatcagtggggcccagcacacagagcagagaggcctggcattggctggactcaagggtttgggcactgggccagggctgggccttagctggggtgggaagtctctccacaagagggtcatgcacacattgagctggggaacagattttccatctctgaagaaggaaggctagtggcctcattgcttttgcaatatgtgacacccagcaccggtcaaacaactatctctgatggtgaccgacttttccagctgtgtgcagacctccatacaaagccacagggaggtggtggctgtggaggttgggaggtcgggacttgcttgttcaggcactttctggcataggaggaggcgagtgctcctggttaagtgcctcctcccttctcctcccacctgtcagccccaacccaacagtccatccatcccacaaggcagggtggcaatggctgtcagccacaaacgctgccctagacatgcctccatggcacatatcagccaacctcccatcaggaagaagtgacggagagctttttaaaaaaaaaaaaagcagctaagcagctgacactgacatgaacgcccctgaatgccctcttccatgggccagctttccagggcacatcttatctgggcagtacacagggggctgggggaagggagctgccttagggatgagtcatccatgcctctacagagttagctacaagagggctggcagagacagggaagagtcagcccagagaagtagggcccatctaggggtaggaatgcatcctttcttcccacagagcctgggctggtggagctgctggagctcactcccacccaatggggatttggttgtatggggataggacaggatttatcctaggagaataatacaaattttaaaaaggaatctggatctatagattcaatgcaattctatcaaaatcccagcaagctttttctaatagatattaacaagctaactataaaatgcataaggaaaggcaaaggaactgttagaatagctaacataattctgaaaaggtctcctcaggcagtggggcaggaacacaggcaggcaggcgagtggctcttcaagatggctggtgaggggcaaggtcctggggtggctccctccaatcctgctggattttcatttacttagccacaaaccctggccctacagtgtatctggttagacaaatgaatctgcaaaatgagaccactcagcttatttccaaggactatctaatgcagcaaataagcgaggctctacaaagtggttcctaatcacaaacttctaagtcacatttccttatttctactcccatccattgcctcacatttcccccaactgttgccttatttgcaaagctggcacatgctttatgtaaaagttacttctgccttttcgaggtgtgtccagagtcctttcactctctcgggaggacctcacggtgccttccttctgcccagagccccagcactagctgggcaaacaggtatggcatttgctctgttcgtcaggtgaagcaagttttatttcatttttttccacctttggttgaagattctgcggctcactgaggcaatgtgacttgcccagggttagaaaattaactggcagggcttggcctcaaacccgggaactgcttccaaagcttgaccttactccatctgtctatgtcctttcatttcagggactgctgctgaaccaagaatcttctcaacatgtgttcttcccctaagtccctaaattaaagcagaaaaaaaaaatttaaagcatgatgaactagctacatcaatatatggaactgaccaccaggcaggggacactgagtgacctggagagtaactgaggcagatggaccctgctctctgccagctaatgggacatagggagccgagacactcacaggcagcaggccctggggtcacccagtcattagagttcagagctgagtggccgtgtgggatggaatgactcagggaggaatcctggtcagggcataagaggagaaactagggaacaagaggaagaggagggcgccccctccatctctctgtagggcctgg

SEQ ID NO: 40071 - DNA, 3062 bp, Homo sapiens
agaaaggcttctgtcatgagaacagatcaacatgccccccaccccaactcagggcagctcatctcatggcaacgaggcagcgagaacaaaataactgaccaagtgacagcagctacacgagagaggtcaacatggaacgtggttcttgggcgatgggtgagaggtttcctactgagagatgggctgggcagaattgggtgatacagcatagggggagagaagtgggaagggcattcccggtgggaagcagagcttgaacaaaggcagggtgtggtctgaagagcatgcaggtgactggggttgggggagggggtgacaatgattgccaggtaagacagtcaaggcaggcaatggccgaacacagagggctctggccggtgttcttaagcaatggagaaaccgaggagagactggagagagttcactgacctctgctggggaaggcaggccctggggtggacaggcagatgcttggtgatggccaaagagggaagggagaacagagtataaatgcttcactgagaaacaagtcaggattctccaaatggctcccagggctgctgggacctggacggggcttccacaagggccctgctgacacatgcagccctccctgactaaagactagccgatgaagcaagccagagcctgcaaattctagcaaaaaattccttcccaactcccaaccagcggacaccctgaaggctactccctgcagtgcctacctcaggggaaggagcggcagacacctgccctgggtaagggcagagaaggaaaagcagaaagggctcttctttccccacactgggctagtggggcaagacccccagccacaaagacgactcctttccacaggggttctgttaacccgaaccacctggcagaagtaggtggggactacgggaaagtgtccagcctttgggaggagtgctttgcaaataccatgccctttctcggctctcaagcaaggtcaaacagctgtcaccaccctcctggagccccagagacattcaagtgcctcagcaaaggccaagttattcattaataaatgagaaaacacccaactatctaaatgacttttaaaaatgcccagcaatctggtgggtggggggcagcactagctctgcagacagcatgaggttaaaaatgaccccagcctgggatgctgtgcaaagagcaggggctcaaaaaagataaagatccacatctgtggcaggagcaggtgaacaaatgaacaggccacacaagtgggggagataaggtgtacctcagccttcctgacaaagagtgattcataaataggacaatgggcattcacgggaaggaaaatcgcttttggtgacactggcctgaatcacaagataaggccctttgctgcccgggatagtggagggaagcgcagaccacttgaagctcacccctacctgagagactcaaagagcctcagacctggagggctcgcaggatcacccattctaggtcctcagtttaagccatgggaaaacctgggaaatggcagtcagggaaaaggaaaagatttgtccaaagtcacagaacccatcagcggtagctgcaagtctggatccaggtcgtcctgatgcctggccctcagtcttgccaaggagacgagagagaggctatcaagagtggaagagtggcgctgagtttctaaagagctctgattctacccgcctctcctgcgctccccacacagttcagacctggtcccatgtgctcagatgcggccacagccagcccaagtccaagcctaggccctgctggacactcagtaggaaagcaggcaaggccctaggtgcacagcctccccaggaatttagagacacttcgctcaccctgagacctttaaatcagactcaatgcctcaccacccccactccccactcaatacccttcccaaatcttgccatcttctccctccttcccaatccctagtctcgtctaccacctccttagctccccaccacaaccaagcccccagccattcccctccacccctgcctgccagccagccttcccctctactctggagaatacagctgcctcctgcatttttccctctctttctccaacctgtctcccctaagtctctcttcaacttatcaatccacattcctggcctcctcttcaaagatactggtcagaccacactgcacctccgctcaaagctctcactgggtctccacacccccaggacaacagccattcatctcgacctcacatctgctctgtccagaacactcttacaccccacattttgtctcaaatcctgaaatatctactctgataacccccaagaaaacacaccatctggccagtcctaaaggccaggccaaaggccacctcctcaaagcagccttctaagattcccaggcaaaagaatcctctgggcctacccagtgcatatcagggtctgaccgtaggcccagggcacaggcctgtggccattcctattcacatgtaggctttactaccccttcccttcaagaacctctcagcacggggcatctcctagagcacctcaaggcctagcccagagcctgggctagacaaccttcagaaatgctaccaatttaactgctaccctctccaccaactccagaagagtaaacctcaggaacgctgatggctggagggcaggagagtcatggtctgggctggggccctccccatagcctatctgcctattaatggaggtactcccccatttctcacccctgcccacatctccacacctagaccttgcacccctgccctcacctcctcccagagccttcagcaggaagaagcctttgaggcaggatttcagggggtctcaaatacagccctgctcaggacagagtctgactgacctgtttcctaatgtttgaaatcctttttatcagggacaaaactgttacaaataaaattagagctgtgcaaagttggtattgtttcttccttaaatgttcaacaagacttcagtgaagcaatcttggcctgaagttttatttgggaaaatatttgttataggactgtatagattttctatttcttctccagcc

SEQ ID NO: 40072 - DNA, 4071 bp, Homo sapiens
gtagtgatgttcactgatattgataatttgtgtcatttttctttatcagaccagctagaggtttatcaattttgggacgtgcctccatctcatctcctcagactcggtgtttcaacaatggctttgctcctcagtcacctctctctggaaggatccctcaatggatgagtacacctgcctctggatggcacatgaagcgtgggggcagaatcaatccacattgctgtctgaatgtagtaccactgctagaagcaggtcaatcaacaaccaggcctacaggaggagggaggaagaagagaggctgctctatgtcctcctcttgccccttcccacccacagtaagatgaagatctctttccttgcacccctcagtctcctttgtgggccaggtctaccttgggcacaaagataaagtaagaaccctatcgtcaagaatctcaagtctactcaaaggatcagacttagaaaatgtaactctgtgccatgagtagtaaggaaagctttactaaatatcttgtacacttagggaattagcaagggataggtgttgtcggggaaggaagtaatgcttaaactcaattctaaatgtccactgggggattatgaggcagctaaagaaggcagagcattcctgggagtggtaactgcctacaaagacatgagagcggagcaagagcactgtcacagcctgcagagcaggcccacatggctggcccagcctcacctgatgctgtcaggggcagggctcacagggcattcctccagcaccgtgggagggctgagcccagcatgagggccgacaccctgaacgggcactgtggtagcctacaagatgtgtcatgggaggaacggggaagaccagaagtcaggtgagatcctccactcccagcctggacctgccccagcctgctgctgtctgtgtgtctgtgtttgggaggggggttaaagttaaaatgagggctgggaactgtcactgggggcgggtgtgccgaagcaggaggacttgagttcaggggatgaggaataagcccctccctctccctaagacttcccaaggactcaaacttttaggagctgctgactagagctctcccttccagaaggaaataagagaagcaggaaagggttaagagagagacattcaacttctcatctagggtcttcccacccttctttagcttcctgaagaagctagagactcaccaggaactcatgggtacagaaacactttccaatccccaggtgatatgccccattagctctgagtacgcctgctataatgtccatgggaaactgccctctgttcaaaagttaaagagaaaataagacctcgaaatcctagccccctaagaagaggccaaactggccccactttgagcctttccagttctgatttgggcccagggtggggaaaaaagcaaaagagatgggcacatagtgcctgaaggtgacaggaagagacagacaatgctggggcaaacttggcaggctccccagtgtcaccttgtgcccatcctcagggccactgcagccccatgccggggtggagggacttcctgtcgggtgctgccgtggtgggagctgtgttccaagggcacttagcgggtagggcagtcacccggagtctgactcaccctgaagatggagtgataagaagtgagctgaacaccaccatgcctgggaccagaaactgcacagatctctactgcccagagactggcagggggaaagggggagagactctgcttctcctgggcaggctgagatctcgtcaggctgcagagctcctcactctgggtcccctgcactcaatgtgctgctaggatgacttggtccgagtatccactctatctgctgaccagaccaagagttcctagagggcagacgtttgttgtaccagtttgcacccacaggcctgacaccaactacagcaggcacagcactgtggtagaggagtgcacaggagcggggaaatcccagctccatttcatcttggctgtgtgaccttgggcaagttatatgacctgtctggcctcagtttcctcatctacaaaaatgaggataatcatactgacatcatatcaccattacaaggaaatgatgaaggagaaaagcctgcagcttagggagcctgaagaacagggagaatcaggccagggcaggaaggaaagggctgcagaaaagccagcggggcacaggcccagaacggtgtgcctctgcagaggtcatgggaagctcccatgcccatcatccttatcagatgttctcagcaatcctgtaagcagacagggcagtgttgtaatacctgcttcaccaagacattaggagatgacgtcagatgatctgtgcagtgtagacagatctgattccccattcagtgcttcaccaagagtcagcaggaacaggtggtgactaccatccaagaggctgggattagctaagagccactgctctcctgtgggttcatgtgttccctaaaggcttctgagcagagcaagaacaaagcgctgagcgggaggctgggagaacagcgaggctagagataaggactggagataaggacgggaactaggtcaacagcggtggactagaacaaggaggtgcctcaacgctgtggggagacagggaggagcagaaacaactgaggttctgctggtgactcactgggggaaggaaggcgcctttgacaaaaaggtggtggcacttaggggacaaagagaaagggtgtggcagccttcaggcattctaacggtgaggcttgacacccaaggcctgacgaaggttggtgccaagggatagcacctgtcaaggtgccctcagcggtggaaaggagggcccgctccactcagaagagaggcacgctgggccccaccatccatatggcacctcaagggccaggccacggcatgcctagtgcagctcctcgccaggcccgtcacacggccctgcccagatatcctccatgtgtctgtcaggagtgtggggagccagcccaagtcaactctgatcctattcttgctgcaagtgctcaagggaggcactacagagctcctccagcagactttatcagtcgacaaatactgactggctcccctgtggtactccatgctgtactcagatactccatgctgggtactgaggaggaagaggaacgagtaggcacctagtgcccacagagcagggcaggggttcttatcctcggtgcacagattccagaggtcaatgaccagacagaaacacaggcgagtgtgagaaggtgaatcttagtggatgagaaatctggagctcttcagattctcaagggggtggtgacccacaggggaaaagggaaggtgtcaacagccagggaaggcagtgtttttttgggtggcattaagaggtgtctacagaggctttccaaaggaagtgtcaccttaaaggatgagtgacagtggggacagagggacggagggggaagagagcagagggaacaaccagaaccattagtatgcaaaaggcccctcccactgccctgagacttcacccacactggccccagcaggaaataacctcttgaaaggtcacacagagggcagggcaaagaccagtctcttccccttccttcatatgcagccagactggacgagttcctctgggaagtctggcctggctccaaactccctccagggtcctccctgtaggggcactgtggtatgcaggaagcccagcctgcagccctggactgggcaggtggtgggaacatcaggacacactgcttaccagtggtgggacctccctgaggctctgtctcctcccctgtcaaagtggggctggcactactttaacaggggcatgtgaggattatacaaggcaacttgggtccaccatgtggtacagggtcccgcatgaccctgcaccatgaaaaactgcctgctggccgggcacagtggctcacgcctgtaatcccagcactttgggaggccaaggcaggtggatcataaggtcaggagttcgagaccagcctggccaatatggtgaaaacctatctttactaaaactacaaaaattagccgggcatggtggcgggcgcct

SEQ ID NO: 40073 - DNA, 1138 bp, Homo sapiens
tcaaaaaattagggctaggatgagtaaagccagggtgcaggagaaggacctctttgcttccactggaaccgggccagttccacccactgtcacccagcggagaaggctgcaggaccacctggatgtccccacttacaagagggtaaagaagaaaggacaggcatccacgtttataaaaggcctgtgtgcaagatctcgagctagacacttcatagacagcatctttctctgttctcctagctactgatgagttcagaagctgtatctcgattttatagacaagagagaggctcagatttttcaaggcttgctctgagtaccatagatgcgattaatggagcagaggtttaaatcagatctgtctccaaagtccattctctccactccaccactaggcctccacctggcagcctggttacagtttatatgtgtgatgggtggaggctccttcccgggaggtacttattcccaagcacctgggggtgagaggtgtagagggatagaaggccagagcctaagggacaatctagggtcagcaacaactcaaagcacgactgtgggatgttccttcagcccagggtttcctggtctatcagacagggatgaagcaatacaccctgcttcaaagtcctgcttcagggatggaacacgattctgccacaactgccacgcaaatgttatgactgccaacctgccaaaagctgtcaatacaggcggcagtgatcgccttggctgactttgcaaccaggctgctgggcctggggatgtggccacatgggatgtagatagaggcaacttcttgagacatgatcaggacacggacaagtctgactcctcacccagcatactaggcctctcacccactgcctctgttcctccagcaagacttgctagcccctccctctggttccctcttttaccctcccccaacctggccagggaccctccctagtactcccaagtcagagagtactagtgcatgccttctaccttggcattgctcccactctctgcactgtgcatttttttctttctgtttgttttttaatcctcccacctcagcctcccgaatagctgggactgcaggagcgggccaccatgcccggctaattttgtttacttatatttgtagagatgg

SEQ ID NO: 40074 - DNA, 1046 bp, Homo sapiens
agggaagccagaagattggacacccctggataacaggcatgagccactgtgcctggccggtagccacatttcaagggcttgaaagtcacaggtggcccatggctacagtactagacagtgcagattaaagaacactatcactgcacaaagttctagtgagcaacactgctgctctaatctctagagccaggtgacaaccaggaattgctggttgcctggaacctgcaacttgacagccagacctcagccccaagggctggtcagccagacagccagtctccctgtctcagagcagcaagagacagcccaattcagggcaatcgctcaggaaagcttggcatgtttatgccaagttaatcatcacctttagagagcctccatttggctgctgaagaagaaagaggtcaaaggaggacagagtggcctcacactgccctgccggacagcactgtaaagagatgccagagtttcatccacacagccttgaactgttcacctactcacccagccaggaacttctggatgagcatcaggaaatgaggttcaaatacaatacagaaaagtgtgcccaggctggctaccatccctgctggaaaccctggctcttgcaaaacttggctaccagagtaccccagtccagcactttcagactgtacccctgcccctgtatcactgccaagtgcttgctgtcaaactccctggagcatctccactctcacctctatgcacctgaatgttcccacctctaaaatgctccctgggaacactctcctttccagctacctcgatgaccttctcccacttccccatcctccgtggctcagctcaagttccatgctgccttcccatgaagcttcctcaggctctgcctggctttcccagaaaatgaaccccagcagtactgtctttctgcgtgtcaacgggaactggctgacctacaagatgctgcttcaggcagtgctgtgtcctctacagaatccccttcccccagggggtcttgcatgggctggaatcctggaatccaggagacattacttcccctcctc

SEQ ID NO: 40075 - DNA, 1620 bp, Homo sapiens
tctcgatctcctaacctcgtgatccgcccacctcggcctcccaaagtactgggcgcgtgagccaccgcgcccggctaaatcttttattttcgattttttttttttttttttttttgagacggagtctcgctctgttgcccaggctggagtacagtggcgagatctcggctcactacaacctctgcctcccaggctcaagcggttctcctgccatagcctcccgagaagctgggattacaggcgcgcaccaccacgcccggctaatttttgtatttttagtagaggcggggtttcaccatgttacccagcctggtctcgaactactaacctcaagtgatccgcctgcctcggcctcccaaagcactgggattacaggcgtgagccaccgtgcccggcctctttttgatttttgcacgaaacgactccggctgtatacccactgctgtcacttgctgccctgtccaaggagtgctgccggactggggagtctgtctgactcagaatcgaaggcgggggttaaagaccagctaggccatagaggaacggaacaaatcacgcctaacccaacaagcatctgaacctacaggcagccctagatacctacacgagcaacacccgggaagcaggagtcagatggactgcgggtcgctgaccactgccttgcccacccccgcgcatgcgcgacgaccgcaccagcgccagaggagtcccacgccaagcagccccagacatcgtgggagggcgccgtcttctcgcgcatgcgttagcgcccgcgcatgcgcgccctcggcagctgtctttccttattagccctttgctctcctcaagcgcgacccggaccccgaacgctggacgcctcaactgcgaccctcactccacacttctcaccttgcgcccggttttctcccgtagggccttcagccgttcctttcgccgcaacgcctcttcctctagccggcccacaccagccgtagttgcctccatcttgcccgcgtacgcccctccttttctcccgtcttgcatcgcgcaggcctaaggagagtggataaatgtctcgcggccaatccaaggacgagaatgagagactgggaggtcctgaaagccaatcaatgcggggttattatgggcgagccctccccgccttgccccgccccgccccgccccgcccttattcttccggacaacttgcctagtgggtggggagccagcaaaaaaaaaaaagaaaaaaaaaaaagctaaggctcgatttatccaacgctgatcagtgaaagagcagcaagtggaattcagacctgagagaaggagaaaagagtgcgtcgatcgctccggttttgcccaagtactaaccacactaatcactccatgctggcctcttggaatgccctgactcatccttgtccacttgacctgacaaggctcgaatgccttcaagaaaccttccctgggccgggcgcggtggctcacgcctgtaatcccagcactttgggaggccgaggagggcggaccacgaggtcaggagatggagaccatcctggccaacatggtgaaactccatctctactaaaaatacaaaaattaactgggcgtggtggcgcgtgcctgtaatcccagctactcggg

SEQ ID NO: 40076 - DNA, 1937 bp, Homo sapiens
ccagaccatcctggctaacacggtggaaccccgtctctactaaaaatacaaaaaattagctgggcctggtgacacgcgcctgtagtcccagctactcaggaggctgaggcaggagaatcacttgaacccaggaggcggagattgcagtgagccgagatcgagtcactgcactccagcctgggcgacagagtgagactctgtctcaaaaacaaacaaaaaacagagccatgaggcacccacctgttgaggttaaagaaacaacatatgtgaagcaagttctgggccctggagttggggaatggggggagcccctccactggagcgtttgggaaggcttcctggaggagggagggggacccgtggcaacggtctaagcctctctgggatctgggagggcaccgcggccccgaaggtatttcaggctagtcctgctactctctaacttcccgccatcacactccacaaacagctagagctcaaaagttgcgtttcggtcttcccataaagcgacagagtagcacctggcatttgataagcgctacaaggggtcgtcatggtggtggtggagattattgttgaaggaccctcgccacctccacgcggcccgccgccccttccctgaatggcggcaaatgcagtcaggcgagcagcgtcctgggcggattcagaccctggggaagtctggaattcctcaccccgaccctcgtcccggaggctcaggctggcccttccaatggcactggtggggcagggcagcggggcaccctcccgggccgcccggcccataggcccctcctcctgccaggctctccgccctttacatggtcccaggagaggcggggcggcggtgactgcagcgaagtgcaggaagctgggcggcggccggcagtgaggaggaggagcgagcagacttgggtggctctgcgccgcggaggccacagccgcagacttccccagtagtaccgcgccgctccgccccggagtgacgccctccgcccatgggcctggccgagggcaaccggcgggcggcgcggaggaggcggcgacaggtggcgcgcagcagggccggagccgggccgggccatggccgcctcggagcggctgtacgagttgtggctgctctactacgcgcaggtgagcccgccccgccccgcgcccgcacccgcacccgcggtgcccccagcttcgcgcgccccgcgcctgctgcacctggcgccccgcgccgctggggccgcgtagccgcgcgcgcgggcgcgcgcgcgcagggcatgctccggctccgcacacacgtgtgtgcccccagcccgccgggtgcctctggcacttatgccttggggacagagctcgcggtcgtgcacttcatagcaacccacccccgcgagcaggaccgtgcagcctgagtctttcttgctagaggagagtggcctgggccgaggcggccggacacttggcctttttacaaatggggaaactgagacctggagagacctggagactggccaggaggctagggggagggggactcaatttgtctatgagctgcctctcccttgggcgcggcctgattgggtggtcgtggccaacgggtctgggggtgtgggccaaggtagggaggtgtgtggaaggggaatgctcccacttcaggtccttcttgagttgcatccccccacaccccagcgaacaggctgtgataagctcttccctgacttgaaatgacccaccccaccccacccccattctgaggggtagacccaggacctctctaggagcagaagaaaaggttttcctctggatgcccagggtgagggtgggtccttgaggccctgagggatgtctgaaaaggttggagggaggcccgttcctcctgagctccccacccatctcagaaaatacttcaggtggagtcagaaggtgaggggagtgactcagacgtgggt

SEQ ID NO: 40077 - DNA, 639 bp, Homo sapiens
tcaatgcttctctccagccaggagaaagtatcaagggagaagataaatttgcctttctcttgactgataattaaccaaaataaagaagcctagtgccaaagaggccctagatgctgcttcttttgctctggaatgcatgtgcaaattgacccaatgcctgagcacagccaaaagatcccaagcctacaagtgtcagtcacctggcaaatgtgcaaatgtctgccccagtcatagtaggacctgtggagaatgaacaagtcctgtaataaaatccaatcacagggattaaccttggacttcacacacctaaggccactcactatctctccttcttccagtgacatcattacacacaaatatgcttgattaacttttagggaacacacatgccaagttctttaattgattttatttttttacataaaaagttcagtaaaaattggataaagtaaagtgattttaagcagtaaatcaatcttatcaacatagcacaaggctggccaaaaccacaaggcagcctgctttagaatatttacatgataacaaattaaaccttgcaggagaacttaaactgtccttacaaagtcttcctgtgatcctagcatgtagaggctaaaagcaaaacgaaaaccaaacaaa

SEQ ID NO: 40078 - DNA, 937 bp, Homo sapiens
gagagagagagaaagaaagagctaaagaacacatgacattccaatgcatttgttcatgttgggtggtggaaatacaggtgtttgttatataaactgtccttttctgctttttttaacggacctttccaatgctttttttaactttttttaactgaatcttcttacagaattcagattcttaatacttaattccctcaaattaatttgtgctcaattgatgttaccttttaaccattatactctcatcacctccctcatgtctttttctatctccccatctaaacagaaaaattgctgtcatctatagttcttatgagtattaagttcctgaaaagtccaggaatgagctaactgcaaaagaatcacaggggaatttgctgactaacaccggtaaaccctcagcccttccactaagattcacaggtctagagagtagcccaaaaatgtgcatttttactatggatccagccagctggttctaaagaaagtgatccaaggatcacatttttgaaaaacagtgctctagcaaagggatcctcaaaaaagggaggagaatatttttttaaacacaaagtcctttttgcaattgatagtccctttagtaacaggatattccccaccaacaatcccatccccatcccaggagtaactcaggcaagacagggtacaaaatgaggctatcaactgctgtttcattaaataaaaagagcatctgtgactactcctgttggtcttaggttacctacttcctctcaaaacttttctcacactcaaaagaggattttcagagatttgaagaacactcaaagtttagagtaccaaacaaagacaaaccaataacaagagattagaaacgtacagcagacatagtgagctatcagggagaaaagatatgttttacttgtacttaggagttttaaagaatctgaaaaactat

SEQ ID NO: 40079 - DNA, 1181 bp, Homo sapiens
ctctgagttaatcttttcaattatccatttgttttcctcattagcaaaaagtgagagaggaaaacctccaataccaaataagcctcaaaagataaatatgcataaatgctgaaattcatctttagtacaagccagtgaatcacacagaaagagttgactggccaggtgcagtggctcacgcctgtaatctcagcactttgggaggccaaggcgggtggatcacttgaggtcaggagttcaagatcagcctggccaacatggtgaaatcctgtctctactaaaaatacaaaaattagccaggcatggtggcagtcatctgtaatcccagctactcgggaggctaaggcacaagaattacttgaatcccagtggggtggaggttgcagtgagctgagattgcgccattgcactccagcctgggtgacacagcgagactctgtctcaaataaaaaattaaaattaaaattaaaaattctaagtatcgaatacgaagaaagacatgagataggtttctgagggagatggcttgttataattagactattataattagactgtagactctaagctcgcttggttaatattgtttttttgtgagacaggatctcactgccctcacccaggctggagtgcagtgtcatgatcttggttcactgcaacctcacaccacccacccccgccccattctagtgatcctcccacctcagcctcccaagtagctaggattataggcacacaccaccatgcctggctaatttttgaatttttagtagggatggggtttcaccatgttgcccaggctggtctcaaactcctgggctcaagcgatctgcctgcctcagcctcccaaagtgctgggattacaagcatgagccactgcacccagttggttaatgtttaaactgtacctatcttgtattgtaccagactaagtacttatgtcagccttcctgtcctactcttgcttaaccacattaaatgagaatacaaaaacagctctttcaagttacagcctttcatgcaaattagctctgaaaaacccaccttctaaataaaaacacagaaataaaacctgtgatgtgattaaatggaaagacatgagaaagacaaggtctctctttttatacatatttcagatctctttccatcataaataactgcttactttcatcttaatacta

SEQ ID NO: 40080 - DNA, 2710 bp, Homo sapiens
tggtcataaaagtttgacagtttcatgtgaaacccctatcaaccgataagttttaaatcaatagtatattcctaggtctaacaccagcaaacggtgtttaagaacggcttttcaaaacaatggtctcgtgagggttcagggaaagaagtgactccaggctttctgagatagcagatacagcagcagattcagacctcaagagaaatgtaaaggtgtcctagactgaaaaattactattgggcaaaactgtgtgtcggttttccacaacattgtcttctttagagaatcctcaaacgattcttggtttttaaccaagtcttcacaagaaatagaaagtcatccgtttagggtaagagattcctgttaccaagaaaattgtgtccgaaagtgtgaaaatctcacaacctgcaagaaaatgtatgtccctcaggaggctttcattttcaagcggaaaaacaaacccggtgtcacctcaacaacgggaccacacaaacctcgccattacaaaacccaagtgccaaaggtgcacaatgtgaatccggaagcactgcaaggccaggatcgagttcccaggaggaaaaaatcaaactcaggagtgcagcgcgggcccctccacggcccgggggccaggcaacccgcgctaggcccttccggtccgaggcgccgccgtcgcggggaggtcgggcgacgggtcgagcttccacccgagcccggggattcgcggcctaccctcaccggcgccctcttgccgggcccggcaccggcagctcctccgactctgccctttggctagcagcggggcccggacgagccacgaggagcccgagaggaccgccgagccccgggatggccgggtcggtgcggacacggcggtaaccgtagggaccgtggccgcccctcccccaccggcccggcccaaccgccgccgcgacacgagcagcggcgccaacgccgggcccaaccgcgggcctgctgcggccccggccaagcggctcgaagtggcggcgcgggcctgctcccgacaccgaccgcgcgaggccaccgtgggcctgttactcctcgcgccggcccgcgccgccacccgtcaggacgcgccgccctcggctggggataaggcggccgacagcagcggggggccgcggagctgatacttactcaggggtcgggtgctccgggtcgtagaaatcccccatcttcggaggcggctgcggctgcagctgcttcatcgggagcggctggagacggcgacgcgagccccctccccgcagcagggcgacgcgggggaggggaggggaggaggccgcaggtccgaccgcggcggcggcggcggcggcggcggcggcggcaggggcggcccgcgtcgctacctcgctcgtcgctccctccctccctcggacgcccgccagccgctctctccctctcaccctcacaccgggagcgacgcacaccccacccgcccctcagcttcgcaggcccggccccttaaagagacacacacgggccaccgatctgccgccagtcggcgtgccttgcagctgttggcttgaccccaggccgggacgggcagagcggaacactgcccggcgggtccaggccgaccgtgcctgtggctctccggaacaataaacccccggccccagtgatgtgggccagaccggacctggagaggcggcaccgcgacccctcccgcaacccgcctggcggccgggggcagcgtgacccggcccgctaccgtgtcacagctggcgactgacaaacagcaggcgacgtcgggagaactccccgagacacccgagacatcagccttctcgctccgcggccctgcaggacctgcccgccgggagccccggagtccgcggcagcgccgagggcccctcccccaggcctctgggctctgaggtaacgcggccgcggctgctcccgggcccctcgtcccactcgcccctctcttttttatttttcctcgccctctctctcccttgcccgttcatctcgaccctttagcaagcatggaagcccagcgaggcgggggattgctcggaggccgagctcccggcagcctcctccgccttccttcccgctgtgccctcggggctcctacctccacctcggcgcggcgctctgcccccacccgaagtctccaaggcggcagctcccctctcctgtgtggttcttggggccttagaggcaatgtcatgaaaaaaagggtattaatcactttcctacagaaatgataagatgagactaagtagaataacttgaaagagctacgagttgttatttttggaaggagagataggaacgcgtaaatccaatagctaaactttctagacgctgaagagtttttggcgatagatcattttgacattgggggttcatagggttagcgttttttgtgttgttgttgctgttgtttttccactagaattttgaatcggattttaccagcaattggtaacggaaaggaaaggatgtgtcttccaattgagaaacagtggttaaaaactgaaagtgggccgggcgcggtggttcacgcctgtaatcccagcactttaggaggccgaggcgggcggagtaactgaggtcaagagttccagaccacactggccaacatggcgaaaccccatctctactaaaaatacaaaatttagccgggcgtggtggcgcacggctgtaattccaggtacgcgggaggctgaagcaggagaat

SEQ ID NO: 40081 - DNA, 1130 bp, Homo sapiens
tgaacacttgaaatgtggctagggtgcctgaagaagtaattctaattttaattaaatagccacatttgagtagcagttaccgtattaaacagtgaaactttagaacttacctatttattgtgattattattatgtatctcccctattcccatcagactgcaagctcagagatttgtgtttctgttcatgcagtcaggtattccaagtgctttaaaaagcacttggcacatagtaagcactccatagattttaggtaagtaaataaatgatactttttttttcagatcagacgggtaatgtgccaatgtcgtaacaaggttcaagggtggcacatctcacacaagcgtatgaacacacaatcatcacactcatgaactacaaaaggatcataaatgacacattttgaggagaagaatcgctaagtcattttatactcgatataccatctgagtgtcttccctaaaagaggcacaaggaacttcaagctgagaaccctcgctgtgaacaataggacttcctttagttgtcataaaagggccactggagggagcccctgacacctggatcctgggactggtgaccaaaactgtgaccagtccactgccccactggccctctcccagaccaaaggcctgctgtattctagccctcatccaaccaggtcacctgggcactgaggcccaactgccctcacatagcaagggtcaacagaacccctggcatcctgatggctctgtggcaattcaggcacaaagcctgggacccaaggcatgtgaccagtgtccagatcctggatctgcccctctggaagccccacaaaggtccccttcaggtgtggacttcctgtggggtcaacaggagaggcttgctggccagtctcacctgtccacatgccatccttctcccagctctagaaaatgtatcatggcccagctacagaaagttcgactgagccatcagggtcctccagcttgatgactctgttcagtgaggcacagcagagccaaacttacatgtctgggccaatcagaaggtgatgtaggaggctgggtgcagtggcacatgcctgtaatcccagcactttaggaggtcaaggcgggcagatcacttgaggtcaggagttcaagacc

SEQ ID NO: 40082 - DNA, 2105 bp, Homo sapiens
cttgaactcctgagctcaagcaatccgctcacctcagcctcccaaagtgctaggattacaggcgtgagccacggcgcccggccccctccctttctccctcaggaccttgtggggaatgtctctccttggggaaccaccctttgatatttctggtataacaaagcaagtctctgaatggccaccaggagacttctgtgttaaggcgctcgaggtttcctcatttgtctttagtgggaatgaacagaattggcaacaagcagccatgaagactagacaagaggaaagggagcgtttggtggggtggaaggcaccaggtgggtccctatcttccagtgctcccgtccagatgaggggctgtcatggggaaccctcatagctacccgtagcggcagcaccaacacccgaatccaaaacactgggtccaactgcacctggccttggctgaacaagactaggatgcaggcaaaactagactttctcctttttctcacccaatgtgccggacccccgcgtggagcctgggcggcagtgggctttggacccattccggtccctctctggagaggtttcctcacctgtaacacgaagggctccgactggtgatcccaaagccccctctagttcgaaaactgactagtacggaagagtccagacgacctctggctccctgcctcacggcctctatgtcctggacgcgacgtgggacccctttgtgggaccaatgaacattagctccgaagaccgtaagccgcggtcaggttgaaaggactcccgcgacgtcgagccctccttcgcctgggtttcagagatgagcgacccagctgggaacccccagataaagcggtttttggaccccagccactttcagcagtccgggcgcacacccttttcccgtctccccactcccaccggcgagcagcccctgctcaccgttcaccaggcagcgacgctcccgggacgcgactgccgcaaccgaaaccacctgcactccccacgcggggctgcctggctgtgtacatagtcgccatggcaacgggtcgcttccggggattccggaagtgtcggggtggcggaaatgaagtccgaggtcctacgtcgaggatacgggtgaggtcatggccgaatcgggaagacgagagatggggccgattgatctagaaagacttcggcggatgcacatgcgaagtcaaggtcgagatagcgagggaacgaaggccgcacatgaaccaggaagcggagtggcggggcttccggcgccgaggagattcaactacggcggccgcggaggcccgtccgattgctgctccgcgctccgagcggctgtcggcgtgcgctatcgccccgccctggttagtgtctagccggccggcgaggcctgcgcagttgcagcggccggggaagatggtggaggacggcgcggaggagctggaggatctggtgcacttctccgtgtctgagttgcctagtcgcggctacggcgtcatggaggagatccggcggcagggcaagctgtgcgacgtgaccctcaaggtaccgcggactgggcggcagcgggctgagggaaaaggggtcgagcggggagtaaaaaggggcgggggacagagaaagagaggtctagcagggagaggggtggggagaagaggtgtgaggggggccgagtagtggggagagaggtgccgagcaaaaggggatcggggccgagtggggagaggaagaggacaacctttcagcccttgaaaggaaaggttgagaggtgcgccgcttaggcccttggagtgggagacacgggtgacagcctcctttttctgtcatgcagacaagagaaaatggacttaccttctatggaggcaggggcggtggccggctccacatgctgatgggcaccactgaagaaccttctcttgtcactacagatatttctttgtgcctgtcgaacttggctgtgctgttctagaagagaaggcttctccttaggaatcattgcccttaattgttgaattactactttgtctcttaagagcttttaaaatcttctctggaaaatttttgaggtgggaagccaccctgccccatactggaaggcaccactcaccaccacaaaggtc

SEQ ID NO: 40083 - DNA, 3038 bp, Homo sapiens
gggctctaccttgtgggtgaagcctgtcttagaatcccagatcccacccacatcccacggtctccataatttttctttttcttttcttttttttttttttaacacatggtttcacttttgtcgcccaggctggagtacaatggcacaatcacggctcactgcaacctctgcctcccgggctcaaggttcctcccgcctcagcctcctgagtagctgggactacaggcgtacatgagccaccatgtcctgctaatttttatattttttgtagggacggggtttggccatgtgggctaggctggtcttgaactcccgggcttaagcgatccgcccgcctcggcctcccaaagtgatgggattacaagcgtgaaccaccgcacccggcatcgtggtctccacatttcatccagaacgagtcaaaggccttgacctcgagcttaacacggacctgaacctttgctcttcccttgttttcccttatcagtaaacagccccacagccacccacctgcacaagccagaagcttggaaatcatattcgacgtcctcatgcccttacatccatccattccaagttctgatacttttgtctccaaaatattcctcaaatatttctcaaagtgggcaaaatatttctttgctcactttttacttccctctgctccaagccacaatcacctgtctcctggaagactacaaaaggctcactgatctcccagctcgcacttttgcactcactatctccaggccattctctgttatttctattgttactattattattttgagacggagtctcgctctgtcgctcaggctggagagcagtggcaagatctaggctcaccgcaatctccgcctcccaggtcaagcgattgaacctccagcctcagcctcccgagtagcctattatttatttctaaaagtaggtgatacagccatatgatttaacaattcctgctctataggtcccctctccagaggcaacaggtgctctccattccgtggtctccttccagatactgtgggcgtccctgggtgctcacctggccgtataccttcccccacccacttccccacagggcccggggcctcctcactccgcttgagaccctccatccaggcgctccctccctatcgtccgtctcccttgggcactgcccggcctcccaggctgggctgagtaggccagtctccggtcagtgattctgttccaaagctcgaaagccttcgcagcactgggactgaaacccccagctctcagccccgactccttcaggccaggtgctccctccgcaccctctctaaggcccgttttcgcgtcatctctttccagcggcccgcccgccacgtcatctctaccacagcaccagtcctccacggctcttgacaatacgtgggagggcaagttcataggtgaggtctcatgctcttcctaggagggaggagcgcggcgggcgggacccgcagctgggcttggcccgggagcggggaataagctcgctccgcgcctctcagtttagtggatgaagactactatcccagaagccgtttcgcctcgggctggcgagctcctccccgccctactccctccgcgcgaagaagactgagcatgcgcaacagggacagcgcctgcgcaaaagactacgcgagcgggtggctgggttcactgcaactcccggcaggccgctggcatttttcattccctcccgtgaccagtgacttccggcacgaaggggcggggctgggctcgtggctgagccagcagctgcagcagctacgggagtggccgggtggccggcgggtgccagccgccatggaggccgtgccccgcatgcccatgatctggctggacctgaaggaggccggtgactttcacttccagccagctgtgaagaaggtgagcttgccttccatcttcccccctatccgccgcgtatctccgtcgtctgcaagcgcgtgacgcccccctgcgcgcccatcacctcctcaggcccggtcgcagggtccggtgaggccaggaggggccttcgccggttttcctcagcctgtcccacaccccggcgcccgcaggccattcttctcctccccgatagccccgtgctagcacctgcatcttcatctgaacccggttcccgacttctgccccgagtcatccgctgttcccactgaggcagcacacttcctccttctgacgctcggacccagttctgccccgcccctcctccatgccaggaccgccccgcgcgggagcggtgggcggccctgaccgtgcggattcttttgctgcgcccggccctcggtgcgctgtcaagtccacgcccgcctgggacagacactggggatggctcaggggcgtgtgtttaagacgtgagccccggtggcccagggagatgcccgacccctgcggtgagggtttgttttacaattgctgcgattctgtatggtctcccattcgggagtctctttggaccaaacaatacaatcccacgacatttttaggagggttactgcttttcgtaaccgactggagggcataaacagtgttgtagagctcagagaaatcttactgtgttggaagaacagacgggcaggtttggcgttgactaaggcaaggaacttctgtggagaggttcaggtgtggtgattgaacacaggtgccctccgagacatccgctgtattggtagcactgagggctagagcagaaatgaaaaggaacaaccaggaggccgtcgcaggtggggggccttgtgggcttagcacagcagatgccagagtaagccccaatctagatggtgcaccacttagcgagacgcttgggaagacaaataggaaaaagaaaatgggtttggaagtagtttcccaagaagctgtctcccctctaatcgccatacaccattgccttagttcagacagtgtttgagtccatcatctagcctcttggggccaggaaatgagggtaattgatccaaaattctagaattttgttaacggttatccagacgttgctctcttcttcatctgctgtttctttttcctac

SEQ ID NO: 40084 - DNA, 545 bp, Homo sapiens
ctcccaaagtgctgggattacaggtatgagccgccacacccagccagacccacgtaattttttagtggggaaatgctgctggccttgcatcttcttaacttgtgctttggaggccagagtgctgattcactggaaactgatgatggatgactcttgtcctctttatcagtgagtgatttggcctcaggtatttctgtttgaagttctttattctttctggcccaaacacttgcccttaaccagctgtacttgagctcaagtccagcttacttggactgagctgttacgttcatccctgattcattcattgaacaaatagttattgagtgcctgtcatgtgccagccctgggtacagtggtgacaaaaacctgtgtcttggctgggagcagtggttctaacctgtaatcccagcactttgggaggctgaggcaggtggattgcttgagtccaggagtttgagaccagcctggccaatatgatgaaaccccatctctactaaaaatacaaaaattagctgggcatggtggtgcgtgccttgtaggcc

SEQ ID NO: 40085 - DNA, 2052 bp, Homo sapiens
aggactccctcagtacagccagggctgaggaggcgggcagggcagggctcagcccactcctacctccatccggcgaatgtcaatggacaggacagtggtgaaaaacagcatctgaaggaagaagtcagacaccagccccacgacagcaaagagacagaactcctggaatcagagcacatggggatgggggggtgccgtgacctcactgtcccagcccaagaggagcagtacccggactgcagccacctcataaccggcagggcagcagcaggcagggcacagcagagatgagagatgctggttggtcctcagctcacataccagcagcagctcaccccgtctccaccagggggcagaagaaaccctcacactttcttcagaaagggctgaaagggaaggggaagtaccttccctgaatcttccggtccctctagaggggactgaaggcctgatccaacccggaaacctctaagccccaccagcctgctccccaaaaagtccttccccactgagcccccgccctgctcatgcatcaccaacccagctagagcccaggcctgattcaggggctctcagaaaggttcccagccagcaactgccccggaacaatgaagagagagagagagggattaattctctaaaactgaaaaagggtgagctctctgctccccaagctctgtcagcagacaaaattttctgagatgtcggtgttgagacctctagcacatcaccacagtgctactccgatctggggtaagaccatggagtgcagatagtggcacagtggttgtctcagctctaacgtcccaagactgtaccctatcctgcagatactactgtttttccaggagaagcagcccacagcccatctgttctctgctcacccccatccctcagctggcctgccagccctgggggaaagacgggcgagaaaagatggcatcctccccttcctgcaactccttctggaatggctggcatcagtctggggttccagctcagtgcagggccacctccacctctgctcacagcccacagctgagtgagggcactttgccaagagcagggtcactctgggcaatgggtggtggccctcccactggtcaggccaggcaaggccatgcgtctggcgactgcggcacaggccagggccaagggaggagaccggaggaagggtctaggaaccccacggtgcttctccctcaaaaatgggaaacaggtgtgacaaactgcacagccagtccccagctcctgccatgcccttgcagcctcctcctgccacttggctgaaagggaagcaggcagggaggggtaggaagacagggtcaagggcagagtctgcctggctaggtgctcaatctgggaacccagccagggtttgctgagcacttctgagccaggcatgccaggggccatctgggtgctgtagtgatctgcttgccaggcaaagaggtcccacctcagaagcaaggatgcctgtgctgaagaggggagcaccctgcccatggctgcacagctggggagcacagcagttgcttccatgctcatccaggtggcaggccttggggccttacctggatggcgggcactagggtgaagtagccgatgaggatgatgcccagctccgtggccatgttcttcatgatggaccagctctcgctgcttaggcctgcagagggcagcaacagggcacagggcaacacatggccactctgcgacatgactcacacaacctcatgggcctcggagtggcagaggcatggcaaggccccccagccctttgaaggagccattccaccaaagcaccccaaccctcagggtcctgctaatgcccagactttaaggggccatcaccaccacacagctgctacggggaacgggtgttcacagcctggagggtgcagaggagagctataatcatcaaaagagggaagaagcagagtgtggagatgagaaaatccacaaggaaagccaagtgccacccacaacaaccacatccaacctccgcatgtggttcttgtctggtctgcacgggccagcatgacagtgtgc

SEQ ID NO: 40086 - DNA, 3225 bp, Homo sapiens
agagtgaaaccaggtgacagtaacacaggtgcaggcgggcaccagagtccctatggcttggatttgaatttgaaccccagtttccctaattattagttatgtggaccagacaaatctctaagtccctacccctctttgttaaatggaaacataactggaccacttcctaatgttatacctgaagcatcaacacagcacccagcaagaaactctcagtgatgttcatctttcttttttttttttttttttttttttggtcttgctatgttgcccaggctgatcctgaactcctggcctcaagtgattctctcacctcagcctcccagtgttggaattacaggtatgagcactgcacctggccaaagttcatctttcttactgataatcagggaagagcttgagatcattagcaactgaactgaacagggagttccctcctgacttctcatcctcccttcagcatagcactgaaaacatctataaatgttttagacaatgaatctgaagaacagaattctttccagagaaaagaataagatgggctcttttcacagctgtcagcattttagagttaaaagggtcatcagatgtcatctcatatcaaactcctcctttacgacgtcattgtcagccatagccttcaggcttctatgaggccttgagaaagacagacaggaacaagggcagctacagctctcacaactgtccttggcaagtgcagctggccacaagaatcaacaagaagtctgaagcaagctccatgtgaacacaagaaaatgactagagagcaaagaagcaagtctctgaggttagcctgccacaggttgtccaagatactgttctaatggactttgcctcgcaacacacaaaaaaggctcttgcacttaaccaggtactaaaacgaaaccactactattgagaaagaaaactgaagtatcatatctttcaattatttcagtgtcttagaagtatctaaacattattttgagatagagtaccagtgatatgaataaatctggtgaatcagtaggtcagggccagccaggactattttattatattagctaaccaggccaggactagagttctccactcacagttataaggagcccaagctcccattgtgtaaaaagcatacagaggccaagggctccatagtggttagggttagaaaacctactgtcctaagacactggcccaccatatccaaggcaacccaaaaacataccagcaggctaagatgcagaaccctgtgaagaggatgatggggatgggataggatgcacagaggagcccatggttgtagaaggcccgagatatcttctcacgcagcctttcagtcagggtcatcctcagccgaagtcaccttgctgccatcccggaaagtgaccatggatcaccctggcacacacttgacagcactgacaaagaacaacatgtgcaggtacctggtaagaagggagaaaagccagttaacaaagagtacttggctctgcacactagggctgctggagggaggcgatagttatgtggctggggaatggtttcagaatgcctatatgcaaggtctagtgacctcaatcccaaaatacacacacacacacacacacacacacacacacacacacacacactctctctctctctctctctctctctctctctctccctccccgcccaactccctccctcctatattaggcaatgctaaaaggccactccccaaagggcatttttctcatgtgtggcacacgaaaccatgcctgtgtaacagacgtcaccttcagctgctctctgtcaaacaggcattcttcccccccctcctctatgcacaaatcccactgagaaaagtcctttacatagggatacagagaaaccctttacatagggatggcctcctcaaaacacactgttgtacaaatagtgattcactcgtgaagaaggtctagcgaggtcagccctcaacataaaaacgctaaaaagcttaggtctctgacataatggtcaccaagcaaaattcactctggtagaactctctgctcttggtcctatagttgttcctgggagtgcaaaggcagagagcagctcctgttcctgcctgcccagtacccgtccccttccataagttaacagcagcctggtatggctcaggggaaccacctcgctccacaggatttaacctggattaactatgagtcaaggtgccccgtgccgacccaagctacacaaattgggcctctctccctggactttgacttctaaacacaaacaaacaggaacttggatattcatgatgtttattcatcccacagaggttcctgctcccaagatccccaggctgttctggctcccatcctttctgaggactggctcatcaacttttttttccgttttgtaagctattctatacccttctaataaattatctttttgcttatgttggccaaagttaatttctggtgctttcaaacaaataacattaaaccaataaaatcagaatagaaaactctaggaggcccagggatctagaattatcttccctactgagccctctgatggaatccaagtttaaacctacttctcttgttccatgttgctgttttcttcggtctgtgctagagggaacctgcccagacacatttcttggcttgactgtactcactgatgaaaacccagactcaaagatgactcctcataagtgtcaagatcagaaacaagaagcaaaaggagtcacaccacagccaactcaaaagccaaaaggaatgcctattgctcgttctacctttccgaaagcagaagcgttaagcgcacatgcaagtttccaatccaggaaccctttattttttttgacatagaatctcactctatcgaccaggctggagtgcagtgggcactctcttggctcactgcaacctctgcctcccaggttcaagtgattctcccacctagttttccaagtagctgggattacaggtgtgcaccaccatgccctgctaatttttgtatttttttgtagagacaggttctcattatgttttccaggctggtctcaaactcctgggctcaaatgatccagctgcctcagcctctcaaagtgctgggattacaggcacgaaccaccacacccggccagtacttcattacttttttttttttgagatggggttgcccaggctggagtgcagtggcacaatcttggctcaatgaaatctctgtctcctgggt

SEQ ID NO: 40087 - DNA, 2039 bp, Homo sapiens
cccaggaaatcaaggctgcagtgagccgagatcgcgccactgcactccagcctgggagacagagtgagaccctgtctccaaacaaacaaacaaaaaacaagtctttaggcatcactgaggaacacctaaaatggatacagcactaactagacaccctcgaccctgactccctaataaaagcgtcagtcttttgctcaatatcctgacctgacagcaaaccaataaagacacggcataaccaaactccacaaatttttggccaaataaaagaaacacacgcaacgctaacattaaaccttttctatggccgcttcacgataagtattacaaaatccccagaaagagtttattcacctagctccgactgtcgccatacaaggtggagcagtgagtgacccgaaccaggggctgacccctgccagagcccccacagcgactcactgcccccccctccgcattcccatctgcacaactttctgtgattcaaacagtccggagccagggctccctgcaactaacgctatcgtgacattataagccggttaaatactgaggtcataaacccactcagaagtaaacagaagcaacattagtgagcaaagttgaggtttaagcaatacggaaaactagaaaccaagcaaaaccagcaaagcaactagcgttgtctctcaataagatcttccaaaagaggcaaagtggagaacctgctctcccccgcactccggaaaacccaaacagcaccaaagcaggttctacaacagcttcccggagcaactaggccaggggatgcgacgccgcgcatctccccccgtcacaccaggggcccgcggaggtctggtggggacgcggagctccaggggccggccggtgcagggacacggccgggttgggggtggggacgcgcggccctgcctccttgccggcctgcggtctccagggccggcccgcacggctgctggacagcgccatgcccacgcacccccgaacctagcggcccccattccggaactcccagctccacgcggctggggtcgagctggggcccgcgggcaggcgccctgagcacccgcgtgacggtacctgtggtggcagcacctcccaagctgcggcggcggcggcggcggcgacgggggcggcagcaggggcggagcgcggcgtgcgcgctctcggcccgcagtccggtgcgtggcgccctccctctctctcctggccgccgggtgcccgccccttcacctctcacctcctacctttaccctcccgccccgccgccctccgcacgtgcgcccagcggcgtgcgcatgcgtagtcgaaccacattcgcgtctcccgttcgccctctggtggacaccggagggaagtatggacggccgggccgggccgggccgggcggagcgtgaagccgggttagggcccgccgggtttgggcccaccggctctcatcggtcatcaagaacttgcagaaagccgggcacggtggctcgcggttgtaatcccaacactgtgggagtccaaggcgcgaagatcgcttgagccgaggagttagagaccaacttgggcaacgtaggagacctccgtctccacaagtaaaattaattagccggctgtggtggcgcgcacctgtggtcccagctactcaggaggctgaggtaggaggatcacctgagcccgggaggtcgaggccacagtgagacaaaaaacaaaaaacccaccctgcacaagatgctcatgttccctgttttataatggcaaaaaattagaagcagctgggccgagatacactgcaaatgcagatgagaagaataaataatgtccataaaactagtttccctatagacatttaaaagcataagttgacatttaaccattttccacagggaacaggtatttgttataatagcaacagctacgttcactgtttactaggtgtcagttgcggagctggtattgtacatgtcctcgcatttggccctcctgaaaatccgaggtaggtcttgttacagggcctcacagaaggggaaggggaggctgcctcccctcga

SEQ ID NO: 40088 - DNA, 1863 bp, Homo sapiens
gagatcgcgccagtgcactccagcccaggcgagggagcgagactccatcaaaaataaataaataaataaataagccaaaagatacactcctgaaagaggttactcctacgttaaaatgtgaaaggtttcaaggtaccccggagtgtgaggagggtggagagaacaggccagcctggggtgcccaagacggacttggtccaagccaatttggctctgtcctgcttctaacagttctattagagatcacaaggaggaagagtaagaagaacagcagcgttcaatacaatgtgccaattgctccggggcgaggtggcggttaggaagctcgcccatgaagacggcggcgaaacgaactcccctctcctctcgggcctattctgcagtctcctctgagcgcctgggaccccccaccccagtgaacatgcacagcgcgccacagttcacgtccgcgaatataacccaaccccactgtcggccatgcttcccaggtactttttttttttttttttgaggtggagtcccgctctgtcgcccaggctggagtgcggtggcgagatctcgggtcactgcaacctccgcctcccgggttcaagcaattctcctgtctcagcctcccgagtagctgagattacaggcatgagccaccacgcccggctaatttttgtatttttcgtagagacgggggtttcaccatcttggccagacttgtctcgaactcttgaccttagatgatgcacccgcctcggcctcccaaactgctgggattacaggggtgagccaccgcgcccggccgcttcccagggacttttaaggacacgcacagccgttgagaatatgcgagatggcccagaagcccactttcggcgggcccaagcctccagtccaatccccgggtcgatcctctgcggactacaactcccaggtaccccgtgccgggtcgtcgcgccattccccggggtcgtgcgcaccgcctcccggatgcagtattccgctgccctgccaggtcccgcccccttccggccagcgggacctcttacctgctccgccctgtcgggggtggtgttaagcaggttattaagttccacgaacattccgagctcctgggactagcgctctggaggagaacccggagtgctgcagagacgacggaggctggagagcaaaacacacccgacagcccggctcgcgcaaggaagcgcgcatgcgcaatgccacttttgcgagccagccacagccaatgaggcgggtgcctcgatgggaccgctgcgcacgcgcgtagacgtccgtcgagtcccaggtggtaggaaacgatgggcttctctgtgcgactgccagcggcctctggcggctcattccgcgcagatctgcgtggcgcccgagccctcccagtgggcccccaaggctccacgcgaccgagtattcttcttcccttggcctcgctctctgcccagccccgggctccttttctccacacgtggctgtcaagcgccttctgtatgccccacactcctgggagcttgggctacatcgatgaacaaaaacaaaggacagggaatttattattattattattattattattattattattattatttaattgagacggagtcttgccctgtcgcccaggctggagtgcagtggcgcgatctcggctcactacagtctccgcctcctgggttcacgccattctcctgcctcagcctcccgagtgtagctgggactacaggcgcccgccaccacgcccggctaattttttgtatttttagtagagacggggtttcaccgtgttagccaggatggtcttgatctcccgacctcgtgatccgccggcctcggcctcccaaagtgctgggattacag

SEQ ID NO: 40089 - DNA, 1628 bp, Homo sapiens
ctgtttttaatttggctactagaaaattttagttatatatatggctcacatatttctgtccaatagcactattctgaggcatttaataggttagggaagtataacatttttgcttttgggggcagcaagttctgtggataaacactacacactattatttgcaaaaactagatggaataagcatgagaattagcctaaaaatctgggcctttggcagagggccgactggggaaaatccctgtgaaattgagtgagaagcatcactggttataggagtagcaactggggtatttccatggacagatggggtgtgggaagacaggccatgaacacagtatgaagaaaagatgcatgagcaggctaagaggagaacaaataaagagagtaaacggtatagcttatgtcctggattttggtaactggcttgtagactttccttagggagagggagattttctgaaacaaaacattttgagagaggttgagggttaccaggaacaagcaagacagggttctaccatggtcctaatagtctagtgtgggctcttcattttctgggaaaggtaatctgaagagggtaaagcctagcctggttcagtttcctgtgtgcatgatgagaagggagatgtaatatgtaaacagcaagagaatcttctggaagtccagttctgcaggaagactaatcagattagtaagtaagaggcaaaatgactgtaaaaggtggggtgggaaatctaaatattctggctacagatccttggttttgctttcttctaatcattctttctaggaatttaggactctgaatttgcttaagaggtggccagaaaacatcctcttatctgtttttgttgagtgactactggtctgaacagcttggctgtagtcctactgttatgtaagaactatggaatttaggtcaagatatgctttataaggaagctgaactgctactggagggagcagtgactctaaaaggaaattctggtctctgcattacctagctgaattttgggttctgcttttaaccaaactagcctttctttgagggcttaccttagtatcaaggtattaaccttggaaagaaaaaaagaatctactaataagaggatgagagggccaagctgggaagaaaaatttgcccaattttccttgcctacaacatgagctagcctgtattatcctctttattttctgagtttcatctgtcattttaaaacttagaaggtaatttaaaaaaagtaattagaagaattagaaaggataagtgattaaacacatacataaacctgaaagagaacccagtttaaaccaaaagttccaatgtggggccaaacatgtcctatgagttgagagcaatgcccaaataacaggctaccagttggctccataagggccatctctgttctgcggcagatgcagcagagcttgccaccatgtactggcctcgtcatgcaaataaaataacttttcttgttctagataccttatttttattaaatcaagttgaagactgcattcacttttgtggcaatcagaaagaatgttaactaggaatttctgagagaaaattgccagtactggtcatattttaaatgcacttaaccaatgacccagtgattaggcat

SEQ ID NO: 40090 - DNA, 2799 bp, Homo sapiens
ctaggctggagtgcaatggtgcaatctcggctcactgcagcttctgcctcctgggttcaagagattctcctgcctcagcctcccgagtagctgggattacaggcatgtgctgccacacccgactaattttgtattttttggaaagacggggtttcaccatgttggtcaggctagtctcgaactcctgacctcaggtgatccacccgcccggccttccaagccgcgcccggccagaaatggtcatttctgaatgtaccacgtgtaatgccaaaggaacccaagatccctgcccatgcctaataactgccaaacactgacaggcttcactgagctgctgaggccaaaaaaataggttcctaaactagtttatgttttcattcattcaacaaatatttactaagcagccactaagggtaaggcaataagtatcagccacgttcccggatacactgcagtgaacaaagcccttgcttcagtgctatgattctcaataggagaaagtacagaactaaagagggtgataggaaaacttcagaggctggggagccttttcggctacctgcttcattacaccctttaagggagtcctcctgaatatttacacaaaagggaagttggaaaaaaaaaaaacatttgttataaacaaaggattaagtcaaaactttgaaaactactgactcggcggaacttccgttccaaaggtaggagaaatcagtaaatgaataatttcaaaatgtggtaaacactacgaagaaaataaaggtgacacaagaaaagtgctctaataaaaactgggttcttggggaaggcctccctttagaacactttacgtacaagcgaccatcaactctcacgccacacagaaccagaagcacgatgaggtagaaccgtcgttaatagttctcatccatcctagaattcatattgcctgttattaattaacgaatacaatcatcccagtcgtttagcaattcaacaacaggtagcaaaccccctcgagactttgaatacgctctaaacaaaacttgaagctgcttttaccacgcttgctcggtctttagggatcattgttcacacacctaaggcagctgacaaaagagagagagtcacactcgcttagtggctgagctcgacctgctctggcacacgagactgagcaggggctttcaccatgggtgcgtaggctcagaggagagagccccgaaccccagtcaggccccgggatcgcgggcgcccagagcgggcggcgggggcgtggcgggcccggcgcctgcctttgttgtccctcgtggcgtgcgggggggaggggcggcccgaggcccgcgaggccagctgccgcctccggccccggtcgcgtggtctcccggcccccacgggcgcgcgaacccaccttcttgtagtgcttgcccagccagacccgcaccgaatccagctgggacaccgtctccgggctctcccaaaacttggtggccgggcccccatccttccgtcgataaacagctaggcctgcggctgccgccgcaatccccgagcccgtggcgcctaccgctgtccccggcccgccgccgcccgccgctgcggccatcgtcgcagcccgtcgtccccacagcctggcccaccccggccctcgcggtgtttcccggtcgttcccgcgcgcacccccgcgcgcgtagccgccactgccgcttcccggccccgcccagccaaccctcttccggcgcggacgcccggccccgccccatctgggaactggcactgtatctgacgcgagccagcgcacgcgcatgcgtagcactcgtgcggccgtgccttggaatagcacgtcctgcggcctcagccgcctcttccgccatcctccgtaggctgcattctgccctagtgagcgccggtttttgagccttgctcttccctcgctaccgacgtcgaatcattatgcggtcaacaaccgcaggtgggttatgtgtcatagcccgcctccgctggagggaaaaggcctggtgcgagaaatgcccaagggaaagcctgtctagggtatcgagtgctggccgagggccctgcacccggactgggactgcgccgggccccgctttccctcaggccctccacccccagcggcccggcggcatttgtgaacagccatctgggactcccacgcctaggcttttcggcttcacagaccttccactccctcaggggtccagccacagcggctcattcctgccccaggggcccttgcactggctctttcgagacctcagcaggtcttcccttctgatttgcacttacgagacgcgttcagattcactgcttcaaaggacttcagaaagtagttgtcagatcttaacaatcttgaacaactgttcacacccatacactttctgcatagcgctcaccacgacccggcgtttctagtttctcatttaccttccacataaattacatgagaacctaatcttaacttgttcacaggtgtatcctgaacacctgagacaaggaacagatgtacagtaaatacttgatgagttaatgaatggcccacatagaagccgaaaatttttaaattattaacaaggtatattggccgggtgcggagcactttgggaggctgaggcgggaggatcaattgagcccaggagctctagaccaccacacccatccccgtctctacaaaaaatacaaaaatcagccagcgttgtgttgcaagcctgtggtcctagcctcttggagggctgaggtgggaggatcccttgagctggggagatggaggctgcagtgagctataatcgcgccactcactac

SEQ ID NO: 40091 - DNA, 2311 bp, Homo sapiens
gtagagagaaagaaaagagatacatgttgaactgtttgcacacaaaagtgacgggatatggcactaattcttcatacagcctcaaaggtcacatctttttttttttttttttttaagtttcattcttgtcgcccaggctggagttcaatgacacgatctcggcttactgcaacatccgcctcccgggttcaagtgattctcctgcctcagcctcccgaagtagctaggattatatgcgcccgccaccacgcccagctaatttttttgcatttttagttgagacggggtttcaccatgttggccaggctggttttgaactcctgaccgcaggtgatccacccgccttggcctcccaaagtgctgggattacaggcgtgagccaccacgcccggcctaaaggccacatcttaaaaccatactctgtaaaatcctgacccagcttcagagctacgccactgcgttgtttccttttgaagctgaattccactgaacctatacttgaaccttatctagaggactacagcgtgtaattgggacaatcccctttctcattcctaagaggtgatgtggccgggcggacctccagatttccagcaactatgactggcactctccccgcgaccagcaagtgccaccttgtcctttgcctaacgttgtacagtttacgaaatcaacgaaccaacacgttgatttcatcttccctgcaaactggggagacaagacaaaaatgctcacctccctaaaaaaacagattagaggggagatggggaagagaagaggcgtggctacgagctgtggcggggaaggcgggtggaatcccggagcccgagctggaaaccgttccccgctcagccatgacccgggctgtttattcgcatcaggaggcgcgggtggctcgcagagggcgagaagacccttcccgctttcacactgcaggcagctaagtcgccgagaaaggcagcaacttgacgcccgaccccgccacccaaacccgctcgctctgcgaccccagagcagccggcgccaacccgtccccttcgcgactccgccggaagtcccgcctgcaccgccgccgcgccccattgggccgggtgctggggcatcccgggcgctgggtgccccgagcggctacgacgagtcccaggtggggccgggctccaggcccgcgggggagcggagccgtgcgccgcaggcgggctccgtgacgccgggtggggaacgccgggccggtggcgggacttccgccacgggactcggaaggggccgcgccgccgctgctgggagttgtagtccggccgtggttgggggagccgcggctcatgcgcggtgcacagaggcttgtttcacatctgtaacaacaggtgaattgggctttttattctcccctttcgtgccctcttgaggagcctgccgcggccgggggtggtcgtcgtgaggagggggcccggtccgaccgccagcctggcggagagtggggcggagacgccggcgggcccgaggagcaggccgggcatcctaggcctgcccgggaagccggcccggccgatccgtgggcagccaggcctcggcctgccgttgccatggagcccgggcgggggcgggggccagaccggtccgccggggcgggcctcgcagccaggggctccgcggaggccgtgggagaggccgcttcattggcgcaacgacgccttcgcctcgggatgcgccgtttccccaggcagggcctggaggaagcctcctgagtgccccgagacctttgtctacttctcctccttcccggtgctgcccggaccgttcgtccagagggaggcccggtgccttctggcccccctagtttgcccccttttgcaccgaccttgtcactgggggaggccaaggggtgaggtattctttgtttgctggtggtaacttgtcccatttagcaggggaagaccaaatgcatgttgggtcctttgtttgcagtgaactggagtcccaggggtcctcagaaaccctaagccagggatatggcatatctagtcgttgtgtagcaacattggtcacttgaattatgatttttcaaggcagaggctgtttcactttacaaccccactccatgagggtttgccatacactagcaggtagactgcagaaggccacttacaggctttcaacctggttttagttgcagcttatgggccagagtgaaatgagacgttgtctggtgatttcccttgaagtttcttgcaaggtggtaaccccactgtcattgtgggttttaactacatcttgtaatttacacttaaatcttagagatttaaggcgatgtgca

SEQ ID NO: 40092 - DNA, 1839 bp, Homo sapiens
gcctcccgagtagctgggattacaggcgcgcgacactatgcccggctaatttttgtatttttagtagagatggggtttcaccatgttggccaggctggtctcgaactcctgacctcaggtgatctgcctgcctcggcttccgaaagtgctgggattacaggcgtgagccactgcgcctggcgaggaacagcactttcactgctggactttacgctggaccagctcaattcttggcagtttccaaagctgggtgttttcaccttcccctccagccctggggattaaatctgtttcctgaagaggtcttccttggcctggctccagattttctttttcgttttttaaacttttaatagagttggggtttcactatgctgcccagactggtctcaaaatcctgggctcaggggatccatccgcctcaacctcccaaagtgttgggattgcaggcatgagccacggcgcctggccctggctccagatcttcaccaggtttactttgtaagccgttaaataagatggggctgccaatttgccagaggcacgtgagaggtagttaggaacaattggtaggacctagagggaactaacttcgcttccttagatgacattgagctaaggcctagcattattttccccccaacagcctcattccatcttcctgccttccatccacacgactgctggtttagatttgctggagagtgagctctgcagggtcctagccctgggcagcgccgagcccgcctactgaaggcccagggctgtggtgagcgaggacgggctgctgatgccctcgcctaggcttgggcttcgggtccgcccggcccgcagggggcgcgcggcgctcgggccggccgctcccgttctcttcgcccggtccctgccgcgcacaggcctcggggtcggcgggagcacgatggcggccgctaggagactcatggcgctggccgccggcatctctccgcgcctgcagccgctgggtccccgcgctgctgggcgacagggtcgctcgcgcggcttctcttcaagctgcgcccaccccgaccacaccaaggaagccgccgaggccgagtcagggatggcccccggcgggcctggggaaggcgacggaagcttggtgaacggtgagggcatcggcgggggcgggcggtccgcagcgcccttgactcctgggatggcagagctaggggcgcgggccgaaatcgggcctggcggccgggggtcctctcttccatagtggccaagttcgccatccgtcggcgggcagcggccttgctgtttgtaaagcttagcgtggcacaggcccgaatggacccttagagtacctgctcccggcaagaataggtgagaggtgcgagacctcgagggagtggggaaaacgagtaaaagtccaactcctgccaggatgagtggccaagggctagagcttctagggacaagcatgccctcaccagtgtgagaaatagcccaaagtaactcctgggacatcaggatctcaaatagagacagaatgactgttctggtggattccagctttgtgcctcccaaatagtgcagaggataaaactgttgaaagcatcaaggatgggtagagagcgccagcctccaccaaccttatagagctgaaggtgggggcggggtggtggtctcagtgcagctctattgttaaaccagtgggtgtaatgggctactcgaagttgggtccctctgtgacgaaaccccccccgccccggccaagtccacttagatatggtttcttaactgcttaactgcttgactcttagttgctttacaagttaccgcttagagggagacaggatcaggtgtcctccatcc

SEQ ID NO: 40093 - DNA, 659 bp, Homo sapiens
ccatccttcccttcaaaaggtgggttaaggatttcttccttcctctccattctagcaggctgtgtggaataattatttttaaactttttgcttttgccttcattgcctctctttttaggcttttcagaaatccagggagctgcctcatgatccttccatggacaccttccttccttgctctggttattgacacccatatctttgactacatctcctgtttctgtgctaacaccagaagtctgagtcatgcctgatccactttccaaaggaatcaatgcctgcatggtgcctgccaccttaggctgagtcatctctttaggctcccccatcaccactgcctccgtgagatcagccttagtgcctggttgctttgaagaattcagccccagctcctcactcttatcctgagtagtcattccttcagttttagagactggctcactcggtatgagaacagcccttccgtccttctggctgtccagaagaaatggcagctcagattttgcttttaccttcccagaatctgttctcattttcccagaacttccccttcccttcctgcttttgccatcacctgccattctcttaaatggttcattctctaccccagggacctgtaccaacacttggccctgcagctgctcagaagtaaagatgct

SEQ ID NO: 40094 - DNA, 411 bp, Homo sapiens
tcagcctcctgagtagttaagactaccaccacacccagttaattttttattttttttttctttgtagagatgcagtcttgctgtgttgctggggctggtatcaaactcctggcttcaagtactcttcccgcctctgcctcccaaagagctaggattacaagtgtgagtcaccatgcccggcctccctggtatttttgacctaaaatgtgcaaaagggaatttctgattcataaaatgtgactttcatataagatgcagcagaacacatttcaactggcttggaaaccagaaaattattcaaaagctatttgcttagatactaaaatagtaggtgaaagttggattagatacaggatacatacatagcctcaaaatatctcctcacaaattacttattcattacaaggagaa

SEQ ID NO: 40095 - DNA, 506 bp, Homo sapiens
gccaagattgtgccactgcactccagctagggtgacagagtaaggccctgtctctaaataaataaatgcttttttttaattggaaaaaaattacagtaaagaaaacaggcagacactaacaagtgatgaaagttattatcaccaataatgtgatttagtgacatcatgtgcttcctgatgtggtgcacttaggacacatcatatttacatagtactactgccaaaaatgtggaacttgaatctaattatgaggaaatgccaggcaaacccaaattaggggacttctaaaaaataacttgcccatactattcaaaatattaaggtcatgaaagacaaagaagagttgaggaactgttccaattaaagaagactgaagagacatgaaaactaacgtgattccagatttaattgcagacaagaagaaaaaaatgagaaaggaatgtgttgaatctgttgggacaactgatgacaatgaaataaggttcgtggattagacaggaatatct

SEQ ID NO: 40096 - DNA, 810 bp, Homo sapiens
aatctggatgttcaggaggatcaaaaaatgaacccttgtgaatgagaagcatttactctaaaaaaaaaacctctcactgaccaattgaccatttatactattcctcttctatccatacagataataaagttaactttaaatagatttgtgagtaagagtcaagagaatttgaaagctgggtacagaagtctgtatgctttactgaagcaccagtttaatctgacactcactgtggccttgaatgagtcacctttcagggctgagttctctaatctgtaaaatgagagtgttatgttaaatgtttactgaggttgattattctatcagctacttgtaattcagctgcatcatttcagttagctataaataaaccccctaagaccctcagtgtgaatatgaacaactatcatttcatattatttcatatatcaagtattctcatttataattgggttgaggtttattaaaaaaaaaaaaaaaagctttttggcaaagggagggactgaaaacaaattcaccactgcatggtgccctgcttgagccaatctgactggagcttaagaaactccacccagttctggctaacatcaaaggagactcaacaccactctgccagaaaataagccctgtattatctaaccaggcactaagggaacacacagttttcaagcacagcactttgtatatctgatctttcattctgatgacatgcctgaagtgaaactattagtgagccgggttttttaaaataggtaaactaaggcaagaggcaactacatggcatgatgataaaatactctcttgactaca

SEQ ID NO: 40097 - DNA, 635 bp, Homo sapiens
acccctctctactaaaaatacaaaaattagccgggcgtggtggtgtgcacctgtagtcccagctactcgagaggctgaggcaggagaatcacttgaacctgggaggtggaggttgcagtgagccaagatcgtgtcactgcactccagcctgggtgacagagtgagactctgtctcaaaaaaataaaaataaaaaagaatattcacctattttcttccactttctaaacacagtttgtacaagagcaagcatgttgtctggaattatagaaagaaagccagtaaggagtaaccgtacgaaccagctctccatgctggtcatcttatcattattaggcatagcaataaaaatagctctctctgcttttagaaaagcatgacatgatgcaatgtggcaaaaacaaatattcaagatggtcgaccagttactggcctggcatggtgactcacacctgtaatcccagaactctgggaggccaaagcaggaagaccacttgagcccaggaattcaagactagcctgggcaagatggcaagacaccatctctacaaaaaaaaatgtttttaattagctgggcatggtggtgtgtgcctgtagtgccagcctctcaggaggctgaggcagtaggattccttga

SEQ ID NO: 40098 - DNA, 1546 bp, Homo sapiens
tatagtcccacctatttgggagggctaagataggagaattacctaagcctggggaggtaaaggctgcagtgagccgagatcataccactgcactccagcctgggagacagagggaaactctgtctcaaaaaaaacaaacaaacaaaaacagcaacagaaaaaatagttggcagtgagtcataatttgaaaaatttcagtcctggtaaaaaccaatctcttaacagaaagaggtactattaaaactggttttcagttttccagtgctgacgatcccctcacgagaacaggcctctcacaaagaatctccctccctctccagaaaaaaagagcaagcacaagaagtgcctggtgcagagccccaattcttacttcctgaacgtgaaatgcccaggatgctataaaatcaccatggtcgtcagtcatgcacaatagtagttgtgtgtctggctgctctgctgtcctctgccagcctacaggaaggctctccttcagatagagacagcactgaaagaaccctgaatcaagatgagtgggaaactatatcaataaacacatatggatgccaaaaataaataaaagtagttttcaaactttaacgtggacatcccatggaaaggtggtttaaaagagattatgaagttctattcccagaatttgatttagtaaatctgggtaggagtccagaaatctgtattttaaagcagtccaaatggttctgatgcagatgataaaacaatccttatcagaaacatgcttacataatttaagatttaatctcaaaagtcatagcttgaactcttcttgcactaagttaaaggttaaacaaagtatctgcaagaggattctgtcctgctaacagactggtttttaatctgaacattgtttggctcaacagtcctttcatagacttcctctaaagcaacttggtaagccactaaaatctaactgttcctcttaactacagccctttgcaccaagaaaacagaagaatgatataaatgaaaggcatttctgttgcccagtcattggctctataactgaaagggcttttgaaaaccagtcacattgactatacaagtgacatatgcagtcatcagtttggaatctctaaggactacagctcaaaaacaatcactaacagctcaaagtctgaccccaaagtgcttaaaagccattgatgaaataaagccttcataagaacattctacaatccacgcttctactccttgctattacaagccaataggatcttaaggttttaaatttgacaaaatcatattatttatttttatttttttatttttttttgagacggcatcttgctctgtcccccaggctagagttcagtggcgtgatctcggctcactgcaagctccgcctcctgggttcaggccattctcctgcctcagcctcccgagtagctgagactacaggcgcctgcagccatgcccaactaatttttttttattgttagtagagatggggtttcaccatgttagccaggacggtctcgatctcctgaccttgtgatccgcccgcctcggc

SEQ ID NO: 40099 - DNA, 3013 bp, Homo sapiens
actgtccagcctgggcgacagagcaagaccctgtctcaaaaataaataaataaataaaatttaaatttaaaaaatacccactaagaatatctagtgcctttccaattccataatcaactacctttttattactgattaggcagcccagaacaatggaggtgtcctggtcagtggacaattaaatccaattgtgcacatggcacttaatacttccaacatgcattaactggtatctggtttatcagtctctggtgagtttgtttactttgcatgaataaattctcaagcacttgaatcatcccaatgtaaaccaaaattctgaagtttctgaactactatgtgggggttggagagaccttggtttggttggataccatttttgccacttaactatctgtgtgacctcttcttcccatcagtctcaatttcctcatctgttaacaaacatagctagtgcctgggagatggcaagtgctcaaaaagtgacagctttattattttgaagctaaatttgaaaggaagtgtgtaactgaggtgaaaacatttcatttgaaaagtagtagtacggatcagcaaactacgttaatttaaaagacacagcctgaagagagatgtcccaatctttggagttgagaaaagcaaagtttaaaagttgcaagtaaagtacacactgcacagtacagatgggagtctcctgcttagcaactttaatgttgtctaccaaacacccagcttgtaatagagcatgacaactgttcactctaaatccatgtgctcagcttggattcaggattgatttataaaaatagctgctggtggtgctctttgaatctctttgggctgatgactgggcagtgttaccccaaaggcctagagcagctgtattccctcaccacacccatttctctgtctacccagccaagctgacggcaccctgcccccgccccccatctctacagcatactattcaccctcctcctgggctgagtgagcaaattacaagcacaaatatcccctgatgcaatgccacaaccatccctgggaaagagcagaggcagttgccaaaagcacagcagcagggaaatgggcgggagacgcgcgcgcgcgcacacacacatacacacgcacgcgcacacacacgcacgcgcacacacacacacacacacacacacacacacactgcaagaaacactgcaatgctatgcaaccagggagagagaatcgagaggccctggggagcaatactgtaacaggaccagagaaggcaaaggagaaaagggggtttccagtagaaagctgggtaacactaaccttcgcgaggaacacgtatttcatccgagcttgggtcctaaagcacaaacctaaaggtaatcaatcactgcctcttccccaaagcagcaaatgcatttaatttacccgttcctggaagtgagcaaaaccctcacaactcctccacaggacaatttcaccaaagggatctaactcacaccggcggagaacttgttccatgtgctaaatcacaatctctgttctgggtaatgtttccaactgcctctcctagtccctgtaccctccccacccccaccctaatgtgaccctttcgcactcccactgccagacacacgctttagtccccacacagtgtcggggcctttgcaagggggaagagccccgcctagggcccggttctccagaccacccctcagccccacccataatccctgactggacatactaaggctcacctcagcctcacatcaactgacccccacaaagcctcagaaaacgacccctgagttctcctacacctccgaaccccacccagggccccagactgcggccgaccctcgctccgcggctcagccccatccagagcccaaggcatgtcgctcggccccaccgccccgaccctcaaaagctggacctctcagcccccctcactccaaagacccccctagatcgcgcctcaaagactccgaaggtcaaagccgccagccccccgcctggccccctccctcggacgcccccgcgtctcgcaggccggcggccaccgcccttccacgcctcgggcgggccccgtggggtacccagctgccgcagggcaaggctcgggcagccccgggacagtgaggaggccgcccctccaatcggaccccgcctgcggctgcacctacccgccgccgccgagacggagctggggcagaagggagccaggagagcgccgggaagagccgtgaggaggtaggagacgtcgggaggagccgggagccagcgagctagccggaggggcggggcgcagggaggcggccgcttcctcgtcgcctcttgagggccggcgcaagggagggacgccgccaccgcctacccggcgagcgccgccgctccggccaataagcgtggcgagggggagggcggagggctgtggcggaccaatgggtgctggccctgccgccacgacgtctctgcagagctgcccgagccgcgggcggttggggcgaggtgcgcctgggggctctagcctcccgcctgcggcctgcgaatgccgaagcggaccgcaggccgatcgactgccttcgctgttctatgatggccgtcgctctctctcagagtctgggcgcccggagcgaggagagtgcgagagtcggcgcacacgcggaccgggccaccagcgggtggggcctgtgggctctgtgatgtaacttgggaggggcgcggggcggggcctaggtcgcgggccatctgggctctggaaggaacccttagaggagcgggaggacgccacaggtcctcggcggggctccgctcccgtgagccgcatgtggctggtgagctctgaaacgtggctggcccaagttgagatgtgctgtaagtgtacaatacacaccaaatttccaagacttagtaccgaaaaaaaaaaaaaaactcatctataatttttaaatggttacaagtgggataattaattataacaaaattgatgacagttggggtatatttggttaactaagaaata

SEQ ID NO: 40100 - DNA, 1158 bp, Homo sapiens
gtgtatttctacattagataccacacagcagtgaacacacaatgaacaggtcaacacgtgtcattatagaactgcgcaaaagagctagtagcaggcattgtaagtgtatttatataatgtttacaaccatggaaaacaacactatattttgcttatgggtacctgtggtaagcacaaccccaaatattgcggccgagggggacctagaaggtcaaagtgcgcctcagcattttctctcgccctgcacaagccgcatttcgccccgagaactacgcttcccggcaggctgcgcgccgcgcggtgacgcacttcacccagtcctgcttctttcttctggcgccgccagtggcccgcggtgcgcattctaatccgtttcacacacggtgctgctacctcgtttgcttcgtgcgtgcgtgcgcgcgcagatgtgggccccgcgggagcagctactgggctggactgcggaaggtgagtcggggccgcgagatcgcctcccccattcggtgctccagccgcaggcgccgcgcaggcgtcggccgtatccaccagggatgcgcgtggggtgcgagctgtgtgaggcgctgactacccctacagcggctcttactcccctggggggccaggttcctccctaggtgtcccgtacagtctccacggtgctcactccacgactcttcaccgggcatcctgcacttgtgcactccggcagtcattggccataaatggctgctgagcatttgagatgtgtggagtgcaactgaagaacagcattttgtattattatattatatcatatttattttgagacggagtctcgctctgtcgcccaggctggagtgcagtggcgcgatctccgttcactgcaatctccgtctcccgggttcaagcagttctctgcctcagcctgccgagcagctgggattacaggcgccctccaccacgcctggctaatttttgtatttttagtagagacggggatttcaccatgttggccaggctggttttgaactccagacctcgtgatccgcccacctcggcctcccaaagtgctgggattacaggcgtgagccaccgcgcccggagtatattatatttttatattttttgagtcggtccggagtgcagtggcgggatctaggctcactgcagcctccgctt

SEQ ID NO: 40101 - DNA, 1976 bp, Homo sapiens
ggttctcgtggcaagaacacgcggcctgtagggaggacatggttcctttactaacgcagctaagttgtggctgtcttgactcttggtttacaacaaactgacaagtcgagaatcctgttagacttaaaggtgactccatgagaattaaaaattttaggcagggcgcggtgtctcacgcctgtaatcccagcactttgaaagaccgaggcgggcggatcacgaagtcaggagatcaagaccatcctggccaacatggtgaaagcccgtctctactaaaaatacaaaaaaattagccaggcataacggcgcgcgcctacagtcacagctactagggaggctgaggcaggagcattacttgaactctggaggcggaggctgcagtgagccgagatcgcgccactgcactccagcctggcgacagaaccagactccgtctccaaaacaaaaaaaaagtaaagctgtcggtacactgccaccccagcactcgagggggccaccactcgcttcctggagggcggcggcccagccctggtccacccacgcgcggccgggacctgcgcccctacccccgtggccacgccctccagccccccgggctcacggcctcaactctcgacccagccccctacttctctaggcctgcaaccgcgcagccctcacccctcgtacccggggcctaagcccaccccagattctgggtcattcggagccccagtgcagcagaagtccggctgcgggttcaccttgtcctccggcacagggcccggccaccaggcgccacgctggatagcctgcggccctcgcagggtccttcaggcgctccctgggcagccctgctcggggtcctagtccggttgcgccgcggcgtgaggtgaggtgtgagttgccctggagggtggcgggttttccaggcgcatgcatttgccgcggacgggacgagaggatgaagccgttctgggcgccggaactcgcttgtgggaaccgcccctcggaagccggcctgggcgccctcggaagccggcctgggcgccctcggcgggagggagtgctgggccgggtgctggcgcagcgctacgcagggtggcggaacccagaggaccggacgggctcgttcagggtggcggcccggcgggggcgatgcccgccagcagagacaccgatggaaaccttgcccagttattttctttgcccagggtagttcctggaacatggttgatgcccagtatttgtcaaaagtacgcggagggcaaagaacttaagcgctcgatagcgaaggcacaggcccttcaaagtcttttgagctctgagcgatacattagcatgaaggatcgtagctaatatgggggttgatgaaggaggatccttggctggagcccaggtgtgcatagggcatgaggaaagcaagtcataacggcctttcacgtgtcattaggaatctgggcagcagggtgtggtttgggttactctggagtctattgacgcagcccagggtgaggagatgagaactgggggtattcctggtgtgtactgtgatgtatggagaggatggggacagggagaatggatcgggggtcagctgtggcaggtgaccagaaacttggtgacaggttgaataaagatggttaaaaaaaaaaaaagtgttttggtttcttgggtttttttttttttttttgagggaaatcactgagaatgagaagaatgaaaataaacgataactgtcatcaatgtaaagacttacttgcacatttaactgacttcggtgtctgcctacacaggtgttgccctcttggaaggtttatccccaactcatggcttctgtccctgcagcaataagaagccacttcccaatagtttcctgatacccagtcacctttgggaacttacgaggaaagtttttccagtctctccgcagacccttgcatctcttctctttttgtttagacccttgaccaccaccccctattctaatcttaact

SEQ ID NO: 40102 - DNA, 2328 bp, Homo sapiens
cccagtgctcccccacacatgccctggagtctcttctggggccaccctactctgaaccttttcagggggcgcaagactgcccaacttctgtctgtagagcaagcacctcccggacccccgtggagctgtcctcgacaacaaaaggggctcacaaaccccgccattccgcacctgcagaggggccataggacagcccacatttgccttgcctgccagttagtgggaaaccggccttcccgtttcaccctcctgctcagctcccagggttcactacagaggtgagttattcattgacagtgcagtggtgcccgctgcccgccctgttttctgtgtgttgaggaggggtggggagatccaccatttaccaggcacctgcgatgacccaaggcgctcatcgatcacccacttaatatgtctgtgtgtggagaggagggtcccccccacccgcccgggggtcaggaggctcgaggtccgcctttgtcagtcccaccgggagcagccagaaagggctgttactactgaggggaagccccgacctccccactcggctcgtccttgaccctccccaacccccagaccccgaggcgaggaccccatcactggccctgggagggcggggaaggggccggccggtcccccgcggcgacggcgaggagggggcgcggaggagcagctccacctcctcagtctcccaatcgcgttccaggcggagtcgccagagtttcccttcgcgcggagaagtgtggtcccaactctcaaaaccaaagccgcccaccactcacccaggccgcccctgcccggcgggatcggggccccggcccgttccacctcgggagccccgttcctcgccgccctggccccgagccccgcactcaccacccggccgggccccgcgggatgtgcgcgccgaggcgggcgtcggccgctccgggctcgggctccgcgcgcagcggcctctccccgggtctggtggagccgcagctgttacccggagaccgaggggcggaaaactgcgcccgctgcccgcccctcccgcgcggcgctgccaccgccgggaacaaaggagacaaagccgcgtcggccgggctcgtctccgctccttccccctcgcctgccgggctgccctccccccgcccgccgcccgggccaggccggaagcagcccggagagccgggcgcgcggccccgaaccgcccgggaccccgcattccagccccgcgggctccgcatcggccgagggctggggacccgacccctcccgcacgggggagggcgggggcgggctgcaccgcggcggtcgccatggcaacgcgggtcgcccggaggggtgaggagtgaaccccgggagccagagccgccccgccccgtcggcctcacctgctcgcctccttggaaccggaactgggaactttcctggttgccaggagccgaggcggggggtcgcgctccgcacccgcaggtgctggtggaacagcgtcccggcctcttcccgcccgtccagagccgggtagcacccgagtccctcaccagcccgacccgttcttctgccagcgcccggcctcgccccgcgcccggagctccctttcccttccttacccggctccggtggtcatcctccccaactttctttacctgaactccaaggcgccttgtttctcccctgcgcacctggccctgcccaccgcccctgctcaccgcccctgctcccactactccccaacagccaatccctccttccggcccccacctctggctgtttgagaagagcatgggctttggacctgggcttgcgccatcaactaaaccatgtaacctgacaccaaccccccccagcctatttgctcaccagtaagtgggggtgatcccacctctagcggggctgtgaaggcagggaacctgggctgcagaggcgcacaagcaagggctcacttccttcctttcttcccagcccaggacccagacctggacccaccccaagctgagaagcgttgggcaagtctgggctccctcactggcaaacacctgggccttctgcgggaggaaacgctggcagaaaggttctctcctggggaccatttgtaccctgtgcagggcccttcacaccctggcatgcccacggctaactcaggaccagaacctggcccatcctattaggacttttggaggactttggctcaaagccattggcacagcttcctgggaggcaaaaacgtcacaggcatcatctgaaagcctccaaggcctccacaggctaggggagcctcaatcaggaggttcaggtcatccacactggctactgccctagagctagagacaccctcttcccacc

SEQ ID NO: 40103 - DNA, 1536 bp, Homo sapiens
tttttgaccattttcatagatgaacaaacagaattcgcaaactgctgcacccctgactatattataaaactccttacagggttttccaaagctataggaccacgtgatataactcccgtccacttctgccatctccccgcctaatctccctccacccaagctgtgctttccttggttccaggaaagcgacgagcttgaagctctttgcacatgcacatgccctgctgtctacctgcagtgctcttcccgcgcacggccacaggcctgggaggccgtccggttaagtacccctcctacggttccgattctaccctggcaggacaaccctagctcctcgtacctggcgtggcccgaccaatcgtctgccactcagttgacctctgacctgttagtacccgcccctggagcgccgcatccggtagcgagagttcaacttcctgactaggagccaatcagcggggccgcctcgctgtctacgacagagggtggggcagacgctccgtttccggtggcagggtctggggaagcggcggcaggcgccatgtccggccgcgaaggtaagtgttccggaaccgtgaggactgcggggacggcggggtggggaccgggcggcaggggcaggccgaacgtgctcgtgtcgcccacaggtggcaagaagaagccactgaaacagcccaagaagcaggccaaggagatggacgaggtgagggcgggcgcggaggcactggcgggtgcgggggcgctgggagacaggcctgagttgaacacgctctgcctctccccaggaagataaggctttcaagcagaaacaaaaagaggagcagaagaaactcgaggagctaaaagcgaaggccgcggggaaggggcccttgggtaagtgggggccgaatggagctcaagctggccaaacgctatgagcacctattgggatgagggcgcgggcatgtctttttcctgcctcctgaactgcgaggtctcgttttccgacgtccgctgcagcgaatggtctctagccagtctaggatttgcagcggcagtaagggccgggagctggaaacgaggtctcctgcctcccaggcagtctgggcttccattccttaggaagagctgcagaaacggaaacagtgaaatgtatttacctcagacgcagattcacagttaagtttctcaaagtctgacgtcgtccgcaatcttttgccccaaattcgtatttcactgccttctagtgtttgaaccttacttgacttagaagtttttttgttttgttttgttttgtttgagacagagtctcactctgtctcccaggctggagtgcagtggcgtgatcccggctcactgcagcctccaccttccgggttcaagcaattctcctgcctcagcctcccaagtagctgggattacaggcgcctggcaccacgcctggctaattttttttttttgagacggagtgcggctaatttttgtatttttagtagagatggggtttcaccatcttagccaggctggtcttgaactcctgacctcgtgatccacccg

SEQ ID NO: 40104 - DNA, 1558 bp, Homo sapiens
gctaacttgactcaacttgtaggacagcgcaggtgccatttacagggggacttccttgacctcctgagccctattctatacaaccagagcttaggaaaaaaaaacagtccagcactcagaggaatggatgttaacagcctgagcagctcccaccccctcccacacaagaacagctccaaacatcattcctccttggactttcctcctccctgggcctacctcaaatgtacacatgtgaaacattcactaaacccgaagatgtctgcacacgacagctctattcatactcctcacccaacaaattccactctcctcaagaaagcctaggggtttgtgggaggtgggtctggcggcagaaggaaagcgaggtcacggagaccacatccctgaatgatgcctggctcgactcaaacgcaacacgcgtgaatgctagggcaggctgctcctgcgcggccctcctccacggagtgccagggagggagcgcaaagccaccagcgcggcggagctggtgcgcctccggcccgcctctccggtaacgggtcgcgccgcactgagtccttgcagcaaacctgccgaatcccgcccgtggacctctaaacaccgggcggggccgggtgtggcggcgcgctcggacgttcgtcattcctccgcgccctccgcctgccagctgattggcccctgggccaggggcggggcactcgcggcggaggcaagcggcggcgcgcggacggttggtccagttctccggcctggcggcaggcaagtctagctcggcgctgtcggatacttggggtgagcggaaagcatggcggggacctccgcgccaggcagcaagaggcggagcgagcccccggcgcctcgccccggcccgccgccgggcaccgggcaccccccgagcaagcgggcccggggcttctccgcagccgctgccccggaccctgacgacccgttcggcgcgcatggggacttcactgccgacgacctggaggagcttgacaccctcgcgtcacaggccctgagccaatgtccggccgcggctcgggacgtgtccagtgagtgctcctcgcggccttttgctcggagggagttgtcaaccgcgccagatccccttgatggctgtggcttcggaacctcgcggccagcactgccttttcgcctttttaaaatatgggaacaccctgatttaagcagcggttgtcttccagaaggtcctttgattttagggggaaatgcattagccaggtcaaacagccgatttgaaacacagaaggctaagttgacattttacgttattttctaaagtttaggccacttggttcttggttctaagcagagatccttggaacacacctaccaccaccatcagaaccatcactacccatgcatggggacccattcttgtgacaagtttgagcggctttagatcttatgaagcccactgtctcccttgggcagtgtgagcatgggaggagccagacacaggcaagagatgaaataaatttattcttttatacaaccagtaaactgtgctaggtgcccaaacgtgaggaactgcag

SEQ ID NO: 40105 - DNA, 1990 bp, Homo sapiens
agtcagattcctgggtgtcccctcagcaggcccccgcccactgcagcctgttccagcactggggccattttcttttatcttcctgcctcagttcttctccaagcatattgggatgccttttgcatctatctgttgagtgtgcctggcagagccacggtttttccagaaatagccgtgtctgaattgcctttgtatcactttgtttgcagtagctgagggagcagggcctgggtgtggaagggactggttagttcctgcggacgttgggggaggagaggtgggacctgccctaggccctggcacctttgggccctcaccaggaacctctcctttttgtctcagaggcagccctggatgacctctgtgccgcggaaaccgatgtggaagaccccgaggtggagtgtggctgaggccctgagtgtccagccacatggtggcaccagcaccactcctttccttaccacatcaactgattaaagcagtgaccagcaggaactgcccagagaactggctggccttgtttcctgagtctgatctgtttggcggagtgggaggggtggagcaggacccggaccctgagtggctgggatccttcttcctgtccctggctgttgctgagcccgtccccatggtaactgatctgccttgaggaaggagccctgccctgcctgtggaattgtcctgagtcattgctttgggctggggccatgggaagaaaccattgtgtggcagggaaggaggtggctcttggcccaggcctaaaccaggaaagcctgggaaactgggacccacaggtgggcatgaaagggccgcagcaggggctcccagcagtgtgtaagaccgggagctggtctggcaccactgccctggtccttccagctgcctgtcactggtatgatggccccggtgcattgtgccaccagcaggccacagctgtggatcttggaaggcctctggggtcccccgggagcaggggagtgggtgtgggggggaacggatggtggtgagagggacagaccaggcaggctgacgagcagggcgggcctggctcacgtgggcctgtaggcgggcccacgccaagtttcacttcccgccactgctgccagcgagagccgcgggagagtgtgcagccgagtcactactgcctgcctgcctgcctgctacggtgagtgtggcccccacaatgggatggcgcagggcaggagggccatgggttcccccaccccagactaagggggcactaggggaggggccgagtcatgtgaagagggagaccctctcagacagtcgaatgtgctggtcccactaaggaaaccacctcaccctctccaacttcctgcctgaaaatgggccctggagctcgcagacagggcaggattgtgcagggaaggcctgagatgtgcttctgcccaccccctaccccactccctccccttcggatcttaacactgggcactcacacacccaccccatgctcctctccaggctcagcagcaggtacgtacccaaccatgggctcgcaggccctgcccccggggcccatgcagaccctcatctttttcgacatggaggccactggcttgcccttctcccagcccaaggtcacggagctgtgcctgctggctgtccacagatgtgccctggagagcccccccacctctcaggggccacctcccacagttcctccaccaccgcgtgtggtagacaagctctccctgtgtgtggctccggggaaggcctgcagccctgcagccagcgagatcacaggtctgagcacagctgtgctggcagcgcatgggcgtcaatgttttgatgacaacctggccaacctgctcctagccttcctgcggcgccagccacagccctggtgcctggtggcacacaatggtgaccgctacgacttccccctgctccaagcagagctggctatgctgggcctcaccagtgctctggatggtgccttctgtgtggatagcatcactgcgctgaa

SEQ ID NO: 40106 - DNA, 947 bp, Homo sapiens
ccagatggcccattggcccaggtgtccctgctgccagaacaccgtggactggggtacaggagttgttgcatattccatgaggctggtgtcgggaagcagggactcacagttgccaggttgtccatctctgagccaatttccctccacaacccaggggtttcagtctcatatcaactatcatgtttgaaacagaaaacaggcaaaatgtttggctaaaataaaatgaaaacactgcagggaagagaactgagtgtgctggtggacaggagccctgctcacctgtgggaagggcagggccagcaagggcagcagagctccctgggggcagctaggctgtgtgtgcatgtggccctccagctggtcccaggggagatgcggggacaggggacagtccaggcagacaggtacagctgagtagggctctgcctgaggtgttctggcatcaggaggctgcctgatccccaacaggcatgacaggctccagggagcaatgggacatctgcccaaaggatcaaagtccaacttggccagatcccaagcttcgcctgcatcatgtccctggctctgcaacgggtacccccaactccggggacgagccatggcctcaagcagcagctggctacgctgccgaaaccaggacacatctgcatcacacagaaagctgcgccaccctggtgtgacaggccctacttggtcaccctagggtaagctggagaagaactccagatgtgccctggagaggcccccacctctcaggggccacctcacagggtgccccccaccaccccattctttgagtttggcttgagattttaggaagcataatttcaggtgaggaagagaacaaagtctggtcccagcccactctggcaaggattgttccccaccttgtcagcatcagaggaagccacatatacaggcaggacacacacagcacacatggggcg

SEQ ID NO: 40107 - DNA, 1783 bp, Homo sapiens
gttcatgcctgtaatcctaacactttgggaggccgaggcaggcggatcgcctgaggtcaggaatttgagaccagcctgggcaacatagtgaaaccccatctctactaaaatacaaaaaaaaaaagaattagccgggcgtggtggcacgtgcctgtggtcccagctactggggaggctgaggcagaagaatcacgtgaacccatgaggcggaggttgcagtgagcagagatcgcgccactgcactcctgcctgggtgacagagcgagactctgtctccaaaaaaataaaaaataataagttttttttaaaaggtgtcagccaccatgcccaacccaagctttattccaacaaaaggcaaatgcttggtaactgcatcaaacacatccaaaaactctaggagctttgttagctgtagggcatcccccagcagcctctgcccaacagaggcccaaggagggtgtgggtcccaccctaccccgccctgggactgcacaacttcagcagggccccacagcacagcccagggacagagctaaagactccaggctcaaaagcacccctcaggactctcaaagcaggagccatcagccccaggccgtccaggacaaggccctaaaacaggaccagcagactacaggtgtcttccggcccaaccagaggcaggaatggagaaacgcacacacattcacacgccatcaatgacatgcgaccgcaaggccgttatcatccctccagagatctctcagtgtttgtctctcaaacacacacgcagcatggcgcccaagctcaccccatgttagcctctgccttcacccagaggcctcctgtacccctgggctttcccctcttcccatcgtgggccactcagtttcaatttcctccccttttggagaaaaagaaagcaaatctcctccagatgacgtcagccacaggaagcacagacgcgaagccccgttccaccctcttaaagacacaggatggccccgcccagcagccggctagcagccaaggagccaaggggcgggggccggggaggaggggaagcagaggtgccccatttgcctcccagagctgcctccctgagccaagcctacagggcctgacctcagaatgcagcctggccactagggggtctaagagccaccccagcctcagtgggccccaaccacactctagctcagcagcacccccacccccacttccacctaacccaccggccctgttccaccagcctccaggaggagcttctgcatccatctaggcccagagggcgaccctggggccctggctgacacacatgcaaggagcaaagtccagcctgtccctttagctcctcctctcccaccagcactctctccaatctgtctccccatgttctcccggccaccctactggggccaccatgcaaggtccatcatgtcaccacctgctcaaacgccagctatggctcctgtagctcttgcgattacaaaggaatttgctttataattacatgttaaactgagtgtgtctgtgctttcctgtgtatgtattatagttgacaataaaagaagaaaagaggccatgtgcagtggctcacacctgcaatcccagcactttgggaggccgaggcttttgggaagcttgagcccaggagttcgagaccagcctgggcaacatggcaaaactccttctttacctaccaaaaaatacaaaaattagccaggcttggtggcacgcacctgtaatcccagctactcaggaggctttctccagcctgggagactgagtgagaatctgtctc

SEQ ID NO: 40108 - DNA, 1240 bp, Homo sapiens
agggaaccctaccctagcctctggggactccatcccctggaacatgggcgggagggcagacccctccccaccgttccaggacagacaaaggtggcagctgcctggtgtctaggcagggttgttcaggcaaggagggtgctggggtggaggaggggtccgcagtcgtgggggttcgctgacggcctcggggcaatcaggggtcagtggggggcatagtggggctggtgctgcccggctcgttggagaggcagcgcggggaagtgtctgcccggtcccagggcaggacgggccgcccccacccccggctcaccacccggaggcggcgttagcagcagcagcaacagcaacggcaacaggatccgcggcgcggggaccggcgcagtcatggctgggcgggcggacgggcggacggacgcgagcgccgggcgcagtgccgccacagcctcagtgatccgcgcggccgcccctctccctcgccccgccccgccccggcccggctggttcccggaacctctgtccgggggagcaggaggaggaggagggaggaggagggaggagggaggagggaggaaggtggaaggaggaggaaggaaggaagcggacgacttcccagcctcggggccagcttcgcgcccggggtctgcgcgaaaacttggtaccggttcccagactcggacaggcgccgggcgacgcacggagtttccttctgctcaccggatgcatggggggcggcggcggcccccagctctcaggcctggagggcgtccccgggaatatgcaccctgacactgagcgcctactgtgtgggctgggggacagccacagccatccctcccagccgcagtcccggcggatcctcacttgcccgagggctacgtgaggactaggtgaggcggtgcgaggacagtgcccagcgcagaccttggcactcagtagacactccacaaatgccggttcccttctacaggcccagtcgccagctcagaggacactcgatctcctgccccctgggactgacaccatcatcccaaggtgatccccagccccagccctggcaggctcagcgctggcgcagtgggccaggactgagctagaaactggcagctcccagggcacacagccaggccaacttcccacacagggctccgccccctcacttcggggcaggggtccaggcagaatcagggatgttgagtcattcttccttttatgcccagagttcctgacccacccccactct

SEQ ID NO: 40109 - DNA, 708 bp, Homo sapiens
ccacctcctcccagaggaccccgcctcaccaccgcgctggcaagcgtgcagagcgggccgcccattgctgtatggcatccagatcttcttcagggggttctgtgtcaattcccgtggggacgccatcccggggccgggatgagtcggactgcgccgcttccaacccagcagccgggccacctcgggccacccgaggtcccgccccttgggccccgcccctcctcaagccgcgacagcccatgtctatcttcccgcaggtcccgccccagagtgagtaggctccgccccagctgaaaggggcccggcctccgaccacgcatgcccaactcacctacccgcccgttttggaacaagtgggcccagttcttcaggccaggatcgagaatgcgcatgctcaactccggattgtactggtcccgccccagttcaaggcccggattgtgcaggcccgccccggatgcgcaaactcagctctcccaacctgcccgcgctgatttgcataggccccacctacgggctccgccctggcgctgcatccctgagcagcggcacgcgtgaattctgctacctccttgctagggagcccagggcccccaggagggaggggttttcatgcagtgggacgaggcctacgtgacccgcacggccaggttggtcagagccgacaggggccagtaggcctgcagtcccagccgtcaactccgctgc

SEQ ID NO: 40110 - DNA, 1288 bp, Homo sapiens
attttttggaaaatcacacatttcattgtactgttaaaatgcatttgcttcctaaaatgtatttctggtctagcctggagattatgaccttgggcagtgaggctgacagacctggacccctgcaagtcacctaaggtgtctgaatcccattttccgcattataagaggagacatgatcacttcccttatatgggctccttaacaaaaggctggaaaagaatttggccgcctacttaacgggcattatatgctaaataatgttggcttatagtgaagattgtcccgtgaagccaaggcgtggctagggtagggaatggggccattctcggggtgagtggtcctgggtccgaacccaaaccacaaacgggaagactcgagcccaaggtcacaccccaaccagggaaaagacggcaggcccaacctggaggccctctccccaaaagcgtccccaactcaccgtgcaagtgggctgagaggactgctcggaggccacacgcaggccgttgtccagcaggctaacctgcgtctccggcacgaactggagcgcctgagcgaaggttgccgtactccgcaaggctggcgtccgcagcagggccggctgtggaagggaacagccgcgagtgaggactcggtcaggggatcgctccccacctcccaggtcctcaggaggacccccgaaccccgcccctaggcaagcggcgagatacctttccccgccctccgccgtgaccttcccacggccctgaccccgcgtcctccccacctcgacctgccactgctaacagcccacacctgtccgcttcccgaagccctgtcccgaagccccgcgctctcgccaccacctcaccgagcggcgggcgcgcaatagcacttgtgccccggcggtagcggcccgacagaccacggacgccgccatcttccagctgcagtcggccctgttgcgccgcgcaagcgtagactgggcgcgttggcggtcgcggcgcaggcgcagtaccgtacagttggtgctcggccgcctcctggcgggaaccgggacagtctattgtgctggcctggctttggctgactggctctgaccgcgctgccgccagtccctgcgcacatcagtccacctgccgtccatcagcccgagcaggtccgcccgccgtgcagtccatctccccattccacgcgtggaagtcagagtgcattatgtttctcaccagccgcgctgcgtactgaggtctggcgggcggggagttgcagccacagcgtgtccgcaggttcgagcccagggctaaagtaccag

SEQ ID NO: 40111 - DNA, 918 bp, Homo sapiens
aggaaggcaactggggccagaaaggccggagcgctcactccgggatcagtggagctgggtggactcgggactcagctgaaagcagctagtccacgggccgctgccagggactcccgtgccccacgcacccccgccggcacatctcctggccgggctcctccgcacgcagctgcctccctgtggcccgggatggccctcgggcgtcacaccagcggctttccgcacagcccaagggactggggtcgcgccggctcccgcccccaccccttgctgcagaggggcagccgcctgcagaaaatcagcagaggtaaaccgaggcgtcgcaagcggagaatgcctgctccagcgaggcgtcgcaagcggagaatgcctgctccagcgaggcgctcgcgcggggccaccgggaatgtgcgctgaactcaccccgacgcatccgccagccccatggctcgcaagttgtccggtgcgggctgctcctgctgctcgagctagaggccgctacgctccggaaggcggcgccgggaccgggtgaggccagctgcgctctcccgggggctaatcccggggcaggacggggaggcttgggccaatcagcgcgctggggcggggcctaagtggcgcgcgccgggcggggagagactggagaaggaggatttaaccgcttcctccccggcgacctggcctatgaggcctctcgctgctcgcccggccctctgcccggagctggatgggactgcagaactggaactaagcacccgcgccgggctggccgcagtcgcgcccccaggccctgagtaggttggagctgatcccaggtcctggctcggcggaaggtgctcacggagtgggaaaaggaaactccactggccggtgaccccagccttaactcgtaggggatccaggtctgtggggcctctc

SEQ ID NO: 40112 - DNA, 1602 bp, Homo sapiens
ggccggagcccctccggcgtgcggccctggctttttccgcccccaccacagcatccccgacgctgctgccgcctcccgccgctccaacatggctcccggccgccccgatggttcgctccacctctgccccggcgcccgaaacacggtggtacaacccatcgcgcatggcagctctgaggaccgaagatgttgccgccatctttattgaggacgtgagcgttgctcctggtgctgaacagagcgcgaaggttcgccgtcgttgggtccgccctccccactttcggtcgccgccttcacccacctccctccttctagggcgctgtcccagctccgtctcccagcctttttctgtccttccagatctcttgttcccccttcctgaccactagttctgaaccgtgtcccggattttggtctgaaattttggtgcccatgagcgttctcatagctctgggagggggtactgtgtgaaatcctggggtagaggggacgatggctggagaggggtctggggtgccagcaccccgaacaatagctttaactatcccatcagctagttttatgaaacatgtcgcgaccacctgcttgtttggatcgcccctgcggagcagggaccagagatgaccctcccgaggcgggagcagaggccaaattcttccctgccttgctggtccccagcagtctcccgggctcggggccccttcactggaggctgcaccccctcccaggctgcgagtcccgagtgctctgggatgccacgtggagcccggcgttgccccatggctgcgggccccgcttcttcgggtccccgcccctcgtccgtcacgaccgcatgccttaaccccttgaagggactgacacagaaactcagtcctccccccaccctcggtgcattccagctctccctgcgtaactcctggcacgcgccggtctcgccaggccaatgggtggacctggcgcaacagacgtcacgagaggagcggaggcgaggggtgaacgcggagcactccaatcggtcagtcattgtttctattggcacaatgggaggccccgcccctcacggcggactcatcgcatgggggagggggctccgcgggttgccggctaaccgtgagagagtccgggaggtacactatacggaccggcctccaaaggcggaatcgataacgagctgcagcgccgggtgcagaggacgcgggcatcccgaagcccaggaagaggtcagggccgggaccccagaacgctccacagggtgcggctcccgcgatggggtggatcctggttctaacaggcgaggaactcctggccaaggcctctggcccgccccgaacggtccctatgacatcaccatcaaccaatcagtcggcgcatcctttcgccccttgactgctccgcttccgggaggcggggcttctgcgggttccacctcccgagcgccccttgtggctaccaaggtcaggcaacaggtgtccagttgttccctctcctgtctacgaatctgaggacctccccaggatcagagctctgggcctgatacacggccggggttcctacgggtttgtgagtgggggtggaagatctgcagaggcacttagggctgaa

SEQ ID NO: 40113 - DNA, 1208 bp, Homo sapiens
acaggtggtgtccaaggtggtccaggtctcagtggtggctccaacggggggcaaggcgcggggttgggggaagaaggaagggagggagggagggagggagggagggagggagggaggttggttgtggggtcctaggaatccagagaaggggcatattaaggatctggggtctcagggatttgaataattggccaggattcggtggggctcagggtcgccattcagatggcggactcgatactgaagggtctggggtcctgaggagtctcagtcccagagttaggcttttggtcgatcgggagttggtctgtcaagggcctggtcttttgtgggtgatgctgacacttggggtctcagtccccgtgggtccgggggtctcagggtcaggttctcaaactccctgtctgatagaggtcctggcctcgggtcccggagagggtggggtccctgggtcggttccgcggggctgtgaaggggtcctgccccaggggcgcggaggccgggcgggaaggggcgcactcacctgcaggcggcgcaggtaggctggcggcacgtagcccgtctcaccactgcgcgcccgcgcggccagccaccagtgcgcgctgcttcgctctagcaccaggaaggtctcgcccgcggcgaacgccagcgcgttgggctccgccgagcggaacgcgtacagcgcgcggtacatgaggccgggcagggcaggtgcagggaaggtggcaagggctgcggcgccacaacgccaggccgggagcgccgagccgcgccgcggttgtcccgccccgtgacacactacgcaggcgcgcgcgcgcccgcccgccgaagccccgccccgggctgtatcgttccacgcatcggagagcagcgcccccgcgcggccccaagaggtgcggcggggctggggtcgacagctcgctgtctcctctggtccctcccggctccaggcccctcatccccggacaccgcaccctcactcctcaccccggcctcagtttcacccgtccagccctctgctccctttccccgcttaagtccgagcgctgcgtcccgtcctacctcccggtgaaagcgcgctccgctcgtagcgggtgcgcccctaccgccctggggcagtgggtcccatctactaattgcaaggacggcgacctcgaaaggatgatcttgctgatccgacacttggaagcccccgcggggcccggctc

SEQ ID NO: 40114 - DNA, 1294 bp, Homo sapiens
gactagttctgttttccctggtatttaagagcactggattttactggtttctacattttattttcactcacttttctgctagtgtagcttagttgatatatgagaacgaatacaatcctaaaatgaaataagccattaggatgcaaaagacaaaagcggtctgtaatcaaacgtaaagagtggaaatatcactataaaggtgtcctcttatccatttaaaggcattttttctataataaggttaagtgtgtagattccctcatcgaacaccatctgacgggcccaaatggcattcaacactcaaaatggctgcacatctgccgaccccaggtaacagtacctgaggcgctgagctgactccctatccaaagatccgggaagacccctccacccgccaaatatctggggagatcgtggccgccaatgacctggggagacccctcaatgacaccgtagatcttgcgcttcccaagacccggggagatctcaatgaccaggaaagatcctgccctcccccaaacccgggagaccccctccaatgaccggggaggatgctggacccccaaaaccacggaaatccctcccccaatgatcagaagaaaaaccctcctcccaaatgacccagggaaatcgaatccacagggaccccgggagatttcccccacaatgaccacggaagaagtctttcccaaataacctgggagactccaatgatcagagatcccgtttcccagtagcctgaaaaaatctccctcaaagctcctcgggcactagggccataggacgcgagctttacctgccgcctcagccgggttcctcggcgtttccgtcctattgtttctctcgcaccaaaatggctgcggccaggccgagccccgccccctgcacctcgctcccggtgcccctcactattggctcgtcctaggagctgcgcacgcggactggacagcctgaaaggcgctgttgctagggtgccaggattcgctgcagcagcttccggaaaaggcggtgactgggggcggggccagagagggcggagcattgtcctccgtctgggagggtgggccggaggtctgacgggcggttgggtggatagactagctgcgggccgatggacagcaggatacctgggaaacagatggattgaccaacagtcttggtttgttcagtagtgagcgatttcgcaggatgcaggaatttcaatgctaacacagagacagtccactacaaactgggaagttggtcactctagcagatggacagaagactggatgtgaatagacggaaagaggga

SEQ ID NO: 40115 - DNA, 1866 bp, Homo sapiens
agacaggaaaattaccaagaaaaggatcccacaaggccagggttgggagggttcctagtatatcctggacacacacaccctgtccccagcacgtccaggcaggacaaagctggaggggccagctgaggtattcccattgtgctagaagcccgcccagtgtcagtgggccccacccctgcactcttaatatgcccttgcatgcacctggcccttgaactagttccccagtgccaagtgagggccttcccggttttcagttgtgaggccagctctgcgttaggggtgggggctgcttttgctgtaagccagagatacaaaccttgaggtgagcacaaaggcagagaccacagcagcgagtggaccccagacaattgattgcagttgggtcttggcccagcccaggtaggcaagggactcaggcaatgccagggtcagtgggagtggacatcctcccataagcctgccatcttcgtacacagctgcaagcggaggcccaggatgagggtcccaacccgtttttgtctggctagactgagacaggagctgtcagccaggtggaaccatcttgagtcccgagggaggtgcagcgccccaagctcagagtctgagggtcacatgctcttccacccagctatgctctggttggaaaagagctcagggacccagtgccaccaaggctggagcttcctggagaacaacccctcgtgtggggtctgggctgagacttggaaggtcagcgggggccctgagccagcgcgcagcctcatttgtcaccctgggcttggggccggctgcacagttctggggcaggatgctgggagctccaggacagcccggcccctgctggccaaagtggcaaaatgcagtactgccactcacgcgtgcttccagcatgtcccgcgtcccaggcttacccgtcccaaaggccttctccctacctggccacaggccaagactcagctcacagcagacatgggagtgtgtactgcagctgtccactcgtgcccacgccagcagtttcagaatgaaagtgaacagtttgaccatcactggatgttatactctaaagtgctggtttgcttatctggtgggtctagattttagctcctttttatctgtttagcagacaaaaaacaactgcacacacctcccctccttccgggagttggaggacctagccagaaagggtattgctggatcctggcttatagcagagtacacagtgacctttgtcccctggctcagtgcagttctgcagagggaggaaggggtaggcccatggccaagaaggctacaggggatttggctggtatcttctgtttcagcagccttccccaatagctgcctgtcaaatgtgcatttgtctgcctatcagcatagactgactggtgaagagtcctgctggttttcctagtgggtagtgccaatcctctggtctcatactgtagcctggctagcctcctgccctgtggtgtacaaatgggctgggcacgcctaactttgtgtactgaaagacatgccagataaatggttttatagaacagaaagaaatgcccacaagatcaaggattctggttgggaagaagtgagagggagggttagaaatgttgtaagtggctgggcgcggtggctcacacctgtaatcccagcactttgggaggccgaaatgggtggatcacttgacgtcagggattcgagaccatcctggccaacatggtgaaaccccatctctactaaaaatacaaaaattagctgggcgtggtggcgcatgcctgtaatcccagctactcgggaggtggaggcgggagaattgcttgaacccgggaggcggaggaggttgcagtgagccaagatcacgccactgca

SEQ ID NO: 40116 - DNA, 518 bp, Homo sapiens
ccagcctggccaacatggggaaaccctgtccctactaaaagtacaaaaaattagctgggcttggtggtgggagcctatagtcccagctacttgcgaggctgaggcaggagaatcgcttgaacccagggacggaggttgcagtaagctgagatcacgccactgcactccagcctgggcaacaagagcgacactctagcttaaaataaaaaagaatcaagctaccttcagctactcagtagggtgaggcacgagaatcgattgaaactagggggttggaggttgcagtgagttgagattgcaccactgcattccagcctgggcaacagagcaagactcactcaaaaaaaaaaaaagagagagagagaaaacaaatccagctatcttacagacagtaatattcttctttttccatacttattaactttttttttttttttttttgagacagagtcttgctctgttgcccaggctggagtacagtggtgtgatctcagctcacgcaagctctgcctcccggg

SEQ ID NO: 40117 - DNA, 2152 bp, Homo sapiens
tcgttttcaaaaatgaggtagggtgtctattttgcccaggctggtctcgaactcttggattcaagcgatatttcctcctcagcctccagagtagctggtatagactataggggcccactgccccggccggcaagataattatttactctcaccaaatttgattcaatcgttttggccaagtttttaaaaataggaatattcccagggaccatgtttgaagaaatacaaactcaagtaagcagaggtgaaatgacctgagagatttgctttaatacacttcggcaaagaaagaaaaaaggtatggatgaaactttgtgacaaacgcaactgttaaatgtaggtgatggcatatagggattcatctcacctttcctcttttgtctatgcttaaaagttttcacagtaacttttcaaaaaaaattattatttccaaacaaacttactgtcctatcaattaaacacaagtcactggatgagaacgctgttgtcttcgaagccaaaactggtgaagggtcttaagcaaaggcgagggatcctctagcagggccgacagcgcgcacgtttccttcaaggctggatctgacaaatcactcggtgcgctctagggctcgcaggatcgcggagctcaatttggaagtggcgcacgcgggctcacgccggtgtctcagggaaacgctagaaacgcggctacagagctcccaatcccagcctgcggtcggcttggctgcggcgcgacacctggctccctgccacccctctagacctctggagacctcctgcaccactccccagggccccgcccacagcctaccttccaagtcctcgtcctcctccgactcgctgtcccctttggcgtcggcgacacggtccgggccgggttctggcggggggtggcccaggctctggcgtggggtggcggcgggcaggactgaggctggggcgcgggcctcgcgcaggcgggtgaagtactccactgcgaattcgacgaggtcaggcggctgctgtcgcagcacctccaccgtgtagccctgcagcagctccgtgagccccggcgggatctggatgtggctcatgccggcggcggccgaagggatagacgggttgggccgccggcggccactgtctccgcgctcactcacgccggcctttcgctccgcgcccgcgaggtctcttcgcgcacggccccggctcacgtcgcgccgctctttggccggctctgcgtttccgggccgcgcaaccctacgctaccacggccgacctggcaccgccgccgctgtcactgggcagccgccgccgccgcggggaccgacgggcaggcgagctggacgggcggggcaggcgtcctggttgtgacgcacgccaccgcgggcgtgcgcgtccccgcttagcaccggccctcagtgcgcttgcgccactagatgacccgccccctcgggctgtcggggggtcgagacagtggagtgttcctgatgccagctcacggagggaatccagggaattaggtaatgaacggtctacccatgaaggggaccgattagtgcctctcgcctggtcctgaagacctttaaattattctttcagctgatgccaagagcctctttttggccagcacttactaagcaccagagacacagcgagaagcagaagcatacgagcacatcagtgtgattctgctgtgatgaagggcaagagagggctcactttccggcgtgacattcaagctagccccgaggcctgagcaggacccgcccaggggaagatctggaggaaagccatctgaacatacaacaagagcaaaggcctggtggagtcaagaccaccttggctgccaggtggaatggtggaataactcaggagtctgtcaggtctctgagatgtcaaacgggtaaggccttgtaggaagtaggcgtttgaatgagatcataatttgagagccacagacagaaaaataaatttgaaagagttcactcagccaaatgtgtacagtgagaaagggaaataaggccaaaagcagcaaagacctctgtgcctgttcctcctggagcactttcaccagggtccccagatctaggtctgcccattcctctccccacattctacactgggccctaggtcaacactgcttgatgaagttgagcagaccacaggcatt

SEQ ID NO: 40118 - DNA, 431 bp, Homo sapiens
ggcagatgcctgtaatcccagctactcaggaggctgaggcaggaaaatgacttgaacctgggaggcggaagttgtagtgagccgagattgcaccactgcactccagcctgggtgacagagtaagactctgtctcaaaaaaaaaaaaaaaaaaaaaaaaaaaaagcaacaaatatgtgaattaagcaataggctttgtataaataaaactctaaaatatctgaggattacaaaataagaggtcaataaaaagagtcctaattctagttgggaaaagttttcaataagaaagatttctatttttctaaaaataataaatgtaagataatgtcaattgagtatcaatggttttttttttttttggtataacttccccaaagtatccagacatatgtacctggtatgtctgaggaacagaaggaaggtcatgtta

SEQ ID NO: 40119 - DNA, 2665 bp, Homo sapiens
ttgtcttattttataatatgatccccacttgcaagccacactcaccttcactcctgccttcccatcagactgtctgggtctccctactccttcagtctgaactcacccagcacttgaatgcctgttctaacgcaccaccttccatagagccttttcatgacccactctgaagcgctgcagcttttgccttgtcaggacacacagcccacagctcagttacactatcttggacttcttttttttcttcttctccttttttttttttttttttaaccttggaactctgaaagtaccttaaggtcaggctttgattggagcccacccagctcactaaggccaaaaacacagcagtcagcaatttgtggttttggtttaagctaaaaagaggctttctggttgctaaatatgccagtgagcatttcagttatttgcacttcagtgcagaggtcatccagtccttcttgggagtgacatcaaggacaaaggtgatatggaggtaggagcaatatttgtgtgtgtgtgaatatatatatatatatatatattttttttttttttttttttaagggcggccccagaggcctagaactaataagatatctgcctatatggaccaagagcaggaagaaaggccagacaatcgtccctcagtagacagtgccgcttggaatgaccacagtctgggaagcactaacacatggcatttaccaccagctaaataaacatttgatttcatgttgcacaatgacctagccagtccagctactttaaccctggtcttcctatagaatgaccccagtatgagctctacttcagggcagctcctctcttggatgaaaggcagcaaagagcttgctgcccaagctggccaagaggaagtgcccacaaaactatttcgctgtggaagaaatctgacccaacatcctaacaaaccccctcacatgggcttccaatcttttaaaactcatgtctgctccccacaggcccaccctggcaatgacttgtcaatttccttcacgtctacgtctagaaaaaaagtgagaaaactggatgcagcttcgagtgctaagccatgggggatggactttggtccccaagcaaagcattaatgaaggtgttgcaaggggaatagttgagatatgatatgaggaagaccagagaacaattcctgatgaacgtcctccctcccaagcctcagtctgaccatagcttcctcatctgggagttgtgagaatgaggctggccttgtgcaaagctgatcaccttgctttccgtggaaggggctcggtcactgaggtcatcattgcttctcacagggatgcctctgcccaggaggctgagcaggccaccgttgggtgacaggccgaagagtgtcaagtatctccccgggccgggaaaggtgcgaaagagatgggtactcttgccccaggggaatgtatcaaaggacacctccagaacaaccgtaccgctctgtctttagttgtcttcctggggcaggctttacaggggacctgtttcaaccttaacgataatattagtgttggctgaaaccaaaactatggagagacgtttattccttcccatccctaaagaagtggcgcagggtcagaagagactgcgggacagggaactttacatcagagctcttgacaggcagttagaggctgctcactttgcgccgccgcctggctctttggggcgcaaggtacagcttcctgcccacccctgaaagagagattccctagacttctcacggaagctcacacatgcccctcttctgcccagcgtccgcgcctcgcgggggaccatgctttccgcgccccgcccgggcctcctccccaaagcctgcgacccagcctcccgcaccttgaccgtgtccagagggtgaccgacgaacaccaggcacacgccgccaaagccgccggccagcaggttcttgagcgggctgatgggttttggctggtcggccatggtcagtccgtctgtcactccgtctgtcagttctcgggccgtcctggcttctcagccccagctgcagtgccggcgccgccgacctttcacccacttttgggtgggcggggcacgagcccggggcaggtcgggaggagggcccagttggcacggtagggcttccgcccggggctgcttccggcctcggccccgcttcgatgggcgtggcagagcgcaaagccgcatgggcggggtttgggagtgtgggccagcgggcctattcctccaggaagccttcccagacttccatgtttcctctgagctcccattcatccactcactccagagagatcaattgcgccctgccatatgccaggcgtccttctaggtgctggaggcacccctggtagtacaacacacaggtccctgtcctcctggaatttacagaccataacaaagataaataactaaaaaatgcatagtgtatcaagtagtaataagtactacggagaaaaatccaggaagagagttagagggtgtgtgggacaagtgatttgcaattttagttcgttgaataagggagggtttaactgaaaaggtgacaggattcaagacctgagaagatgagagagggagttctgttcacacataacagggtcaagggtgaggaaccttccacccagaagaaaaagaaaatgcaaaagccttgagatgg

SEQ ID NO: 40120 - DNA, 2200 bp, Homo sapiens
ctcccaaagtgctgggattacaggcttgagccaccgcgcccggcctgcacaggtgtcttgaatatgtatatacgcgactccagtatggttggaaatgatttgatttgttgtctatggaattgcacaacctggagccttcctaacatcagcggcttcatactggcatttccattgtggtgcagcaacaatctgagtgagcctccgtctctagccacatcatttgacaaccggtcccagaaggtaactggaagtcatgatgacaactcctatactgtgaaaagaaactgcaagcaaggcagttaagatgcaatcttgcacggtgaccgtaagtcggagaactgcgcggcgaacgaggcctcggcaggggaagcgaaagcctggtgtggttgcggctctggggccaccctgcgaccgcctcggggtgtaggcagaatttcccggcccagctcccctctgaccagatagcggccgagaaacaatggttatctgctccactgacgccaggatgtcttctccgtgcccgatcccggagtacaaacagtgaaatgagaagccggtgagaaacgcgctggttaaaaacatctcgacgggagacgctggtaggcgaatagtggctccagacgcggtcggcgcctgccgtaccctggtcagactctgggtcagagcgctaagtttcaaggaggcggcgctaaacaggccctctagccgggagcctgtcgcgacccgagcgaccgtgggtcgaccccgatccggaagtgacgcaacggcgccaagcacttccggagctgtggggacgactcttctggaggaagcagcgcgggcttgaccggcgtcggcccgccgcctccgctgccgcttcgccccaatccggtccctctggcccggcctgacccggtctggcttgttcgggctcagcggccgcgaggccgcagctcccggtaagtgcgcggcgcacgtcacggccttgtttaccttggctggccgctgggggggcctctccgcgcgcctccctggccgggccgggactccgccttcgccgtcgcccgggaggcccgggcgctccccgtcgccggcacgttgtccgagcattacccgccgtcagcggccgggcgcccagcgtgtgtctgccttttttcctcccgccgccttctcagctctcggaaaggtcagaggccaccgcctctgaccaaccggcgccggcacatctaggccctctctccctgtctggcgcggcggggaaacgcgccgcctcggggctcaccactcgagtcatctttgggagctctcgcagcgctgcccgcgcggtttaacgcccgcctgtggagggtatccccagctcgcgggctccgcgtccgcgcgaatatcccggagcccgcggcgcccctagggatgtgcggccccggagctgtgccgccgcctcgccagaagctggttgggcagccgcgttcttggatgacttctccttagtactgttcattgcctggtcccatagaactttctgtcatagcgacatgttctttacctttgctgttcagcatggtagctactagccacacgtggccgttaagcatttgacctgtaggctagtgcacctgagaaactaaattttaaattttacttactttttaagtgtaattaaatttaaataaccacatgtggctagtggtcaccgtattagaaaagacagatacaaagtgtaggattttgaaacgaaattgctgatttctagttttgtgccaagtcgtttttcttcggaggtgtagttagtaaatgacctgaattcagcgctagtgatcatatctggagtaaacgtcttcagactcactaaaacttacgtgttctgtgcgtggtgggcaagcccaggatggttggttgttaggtcccctgaacatgtgactttggctctggaggaaattttttttttttttttttttggtgggcgggacaaagttgctgtcaccaggctggagtgcagtggcggcgatcacagctaactgcagccccgactttctgggctcaagtgatcctcctttcttagcctcctaagtagctgggaccacaggcacgtaccaccacacctggctaatttgtaaaattttttgtggatacgtgatcttaataggttgcctaagctggtcttgaactgctgggctcaagctatcctcccggtttgacctcctaaagtgctgggattacaggc

SEQ ID NO: 40121 - DNA, 2324 bp, Homo sapiens
ctgccttgacttgaggggactagaaaatgcagactatgctttgctatggggaagggagaggagatgggagtagaggtagtgggggtcttaaccagggtagggagaaaccaccagtgtgacctgccttaaaagtgttgctcttgcctgcaagtccacctcggggaggggggtcagcttctgccctgagggcgtgtagtaatctcttcctgaggataaccagctctagaagagcagggatgccttggcacttgaccactggtaggtatgtcctccccccacccccgtttttggtgataatctgtttaatttttctctgaggtaatggtgtctcagttatggaagagtcccttcccgcctcttcacacgtgccagctttgatgcaaggagtgttccatatacctgagcactggttcattcctgcgggctgccatggggggctcactttcctgatgccagggctcctccaggatgccccctctgacggcctatgaaaccttgcacatcaggcagcttcttcctaaggcctgcctgactccggcgagacttcccgggagatccggaccgaccgcggaaccgagctccaagaatgcctgcgaggaggctgtgggtcctaccctatcgccgcttacgcagtcccagcctccgcggcgcccccaaatgccgcactgttgagtcatctcagcgctgcctcctccgcgctgcgctccccacccccgctcctggagcaagaagatgcagacgatacttttcccggaggcaagagggcgtcttcacgcaggcaccgagaagctcccactagtgtatgccttaatggtgccgctcttgtccgcgtctacgcttgggaccttggcttctgacttggagagtgtacagctctgcccgacggcaacccagcttgggaagagaagccccagcgtgggctggggctcaaggcgcaggaaggccgagcccggcgcggacgcaggcggctccgggcgggctcagcacccccaggcaccgtctcctagtgaccgcggcgctcgcgggcctggcggccgttgtccgggcgactgcgcagcgcgggcacccccgcggcccctcccctgggcgcgcgcgcgacctgggtgccatggcggcagcggcggtgacaggccagcggcctgagaccgcggcggccgaggaggcctcgaggccgcagtgggcgccgccagaccactgccaggctcaggcggcggccgggctgggcgacggcgaggacgcaccggtgcgtccgctgtgcaagccccgcggcatctgctcgcgcgcctacttcctggtgctgatggtgttcgtgcacctgtacctgggtaacgtgctggcgctgctgctcttcgtgcactacagcaacggcgacgaaagcagcgatcccgggccccaacaccgtgcccagggccccgggcccgagcccaccttaggtcccctcacccggctggagggcatcaaggtgaggacctccctgccccgccgcgctccaggccctgcacggctgagcccgagaggaccggcgctcagcccgggtccccacgctgcccccggcgctgctctgcgtcggtcccgcgcgctcccactcactcgcctgctgtcgctctccgggccggggcgacttggcccttcttgggcagcgcggtctggcgccccagctgcccgctgtgcgccttttccttaggtggggcacgagcgtaaggtccagctggtcaccgacagggatcacttcatccgaaccctcagcctcaagccgctgctcttcggtaagtccgccagatactcctgggaagggccaggggctgcggtttggtggccaccttgaggctcgttgtgaccacgtgacctctattttgaaaatggctgcttcagagcagcccttccagaggattaccaaagtgaaggaccttccccgtcctcgaaatagggtaacactccctcttatcccaactccctgcagtccattcttccatcacagggctggcagggtgagcctgaggctggtgtctaaacgtttcattgcacctgtcttccgtgccaccattaattctgtcaccttctagaactgggaggaaggtgggagactgataaccagctttctgccgacctcaggacctctggggaaaatcccactgccgaagtgggccttgtggtctgatgagaagcaggccgtccaaatgtagataaactggtacccccccagcctcctccactggagtaccagtcagaggctcagcttttgctgccagcactctgagattcttcttaaggtgaagtctttgttcagccatcatgggcaaagctttctagggtgactccagttg

SEQ ID NO: 40122 - DNA, 1850 bp, Homo sapiens
ttagcagactgccccaggacctgtactgcttattgggttatatccatccctatcattccctgatgccccagccttcctactccctggggcttgggacacatgtcccttgctaacccaggatgggaagggatatggacaggcccaacagcaagaaagctggtttcagagggccagtagtgttgactatacattagtgggctgagatgaggagcctccaaggaagctttaggtctgggtgtttgctacacaaggaatgcatagctggacccaccttggtcatgctcttggtgcctatgaggccaagctctggccagcccagcctaggatctcacgtcaccctcctcttctaggttgggtgggtgacgtagacgactactcgctgcacgggggctgcctggtcacgcgcggcaccaagtggattgccaacaactggattaatgtggaccccagccgagcgcggcaagcgctgttccaacaggagatggcccgccttgcccgagaagggggcaccgactcacagcccgagtgggctctggaccgggcctaccgcgatgcgcgcgtggaactctgagggaagagttagccccggttcccagccgcgggtcgccagttgcccaagatcaggggtccggctgtccttctgtcctgctgcagactaaaggtctggccaatgtcttgccccaccccgccagccgcgatacggcgcagttcctatattcatgttatttattgtgtactgactccatctgccccgtcaaataaaaaaccacaaggttcgagccgccgggcccgacaaactccgggtcggcgaaacagagtccgcgataggtgcagcgggctggcagctgggagcgccccgcaagcgtcacgtgagggggcgaggggcgggatgcccctccgcgggccccgccaatgatgagctggattgcgtgggacgaagggtcgtcattggacaaccgccgcgggcgccctggtctctgctacctgtagctgagggcgctgttgatgggcagcgcggcgcgctgggaaggctcgttctcgcgagagttcagctcccttcttagccgtggctgcctcagcacctcgaggatcgacatggacgctctcgaggactacgtttggccgcgggcaacctcggagcttatactcctcccagtgacgggtctggagtgcgtgggggaccggctgttggcgggtgaggcttggcttgaggcacgcctggtggaaagggggaaagaaacagcgcctcccaggggcggtgccacagggacaaaaggggtgccctgaggagaaggacgggcagcaggttgaggccgatcggaggtgggaagggagccccggagatggcggggacgagggccaacctgaagagggcggggcccgagagacaaagctgatgtggccgccgcggcgcttcataaacttcagcccgcgtggaaagggcgggtggaaccgcgggagggtgcaggggaacgcggccgcgcggaggcggaggcggaggcccgggagctgagggttgagggggtgtgctcccttctaggagatgggcgggggcttggcctctccgaaggagacggggccgagctggggggggcggagggaggaggaggaggaggaggcggaggcggccccggcccctcagggggtgtggcctcttggggaaggcggggccgggagagggcaagggtgtggcctctcgagggcgggatgagtctcttccccctaaggtgggggtgaagatcctctgaggagggtggcgtcgcggaaaacggcggataagacctttccgagtagggggcggtgcccggggaagcaggggctgagaccccctcctgagatggttgaggtcc

SEQ ID NO: 40123 - DNA, 557 bp, Homo sapiens
tgcccatgtggtgtctgcgggggggcgggctgagatgcactgcttcagcatcatggttactccggaccccagcaccccaagccgcctcgcctgccatgtcatgcacctttcgtcccaccggctagatgagtattgggaccggcaacgcaatcggcatcggatggttaaggtagacccagagaccaggtaatatatgctcctgggcagggtgtggtatgggtcatgcagatgctcccaggcttgcaggctccacctgacagctgcatgttgtctctgcaggtacatgtcccttgctgtgtgtgaacttgaccagcccggccttggcccccttgtggctgcagcctgtagtgatggggccgtaaggtgagagcatagggcccagtgggacaggagacaaaggaagtaaggttgtctaggatgcgttctgagctgggccaccccccgccccccaggctctttcttttgcaggattctgggcggattctgcagctccttgctgaaaccttccaccataagcgatgtgtcctcaaggtccactcctttacacacgaggcacc

SEQ ID NO: 40124 - DNA, 1293 bp, Homo sapiens
ggccagtccacccgcagttgctgcaggaaggtcagcatgtgcggatcccgcacagctggcactaggcgcacgcacaccctgcgaagggagggcggccgcctcagtctgagcacctggtccagctcgccacgacttcccacctccagccgcagtccccacgggcggcgccgctcgctttctaggtacccggcagtcccactttctccattccggccccgcggccccgctcacccgtgagcgcgcagggctcgcgccaggtgatcggccacgagcaccgtacgcagctggctcaagcggagtgcgcagggggagctgcgcagtgctgggcagtgtagtaagacgcgctggcccagcgaggcaggcgaggcgggcgtggcataggcggccacggcgctgaggacgcgctcgaagacggcggaccgctgcagttggagagacagacccgcgggggtcggcgcgcagcgcagcaccggggccacaccggggccctgcaggcaggcgagggcatggagcaaatgctccggaacctgcgggagaacgggcgtgtaaaagagccacggcacggggcccatctcccggccgcacggccccgcccggctcacgcccacctggccgtcatcgaagcgcgcctgcagcgcgcggtgcggtgccagaaagtctcgggaacgcaggtggcgggtgcgcgtctccttgatccacaccggaccgcctggccccagggccgcgttgagggcccccagcgtctccccgaccccaaggcgcctggtcgccatggtgaccggaaggagtaagcggaaccggaaaaaaatttagggaggtggaacttccggaaaggaccgactagctggggcggggatgcggcggtggtccccgtaagtggacaggtgcgccagtggtagccctgtcggctgctttcgacctaccgcccccagcgccccttccgcgtggtccacctgcacagccgggccccggatctgaaatctcggggccctccctgggcctagggttctttcgctgtgacccaggccttaaccaggaaaaggatcctcgcgacccggtgggcgcttagaccgggtaccgtctcttctcatcgaagtctcacatgtttgttttaataacatttcatttctcccattttacacatgatgaatattcgtcactggaataaggcagtataacattaaggccactttcacgacctacttaaaatatctcgttttaaaaagaatagtgttccgcggtttcaggttatttgcaagcattttctcgtttgagatatgggtgtttttttgt

SEQ ID NO: 40125 - DNA, 2878 bp, Homo sapiens
cattctgaaggtgcatgacctggagacaactgcttagcagggttgggaaccctcagtcaaactgaggacttcagatactctcatccacgaagacggttggggtggtttttccccaggaagtaagagggctatctttagcgagatgcgggctgaggcagccctgggggagtcactaccattgcagccctacccagaggtcctgggtccaccctccctcgccaatcctccccagggttccagagatggccaccagcctcggctctcccacgtctacacccatcacctccagcctgagggcgcaactgagaggaactgagacccaagcagctcagtaaagtatgtctgggggtcaggggcaccccatctgggccagggcgctgctcaggcaggagagcaggggacgaaatccaagcgcagctggaatgctctggagacaacagctgcttttgggattccgttgcccgctgtccagccgttggcggggggcgggggagctcctgcccccaggtcactcgccctggggccacatcagaacccgcccatccccagtcccaggaggaagacccgggagtaggttgtgaaacggagtctagagggaacaagacgctcacctgggccacagaacaatagaaggggaggtgggggcctcccctgggaccgggtcccgatccggattagatccgtggggcaggattagccctgttggtcccacgaagcctgggccactggtgcggtgacggtggtggggcgggcttcggaatccgtcaggagggaagcgcgcccgtggggccggagaggaagtaaacccgcgcgtccacctcggggacacccccgcgctcggtggcctttgtccggtgacgctgccagcgcccggagcaccaggggccgaaggggtccacagagcagccgcgggacccccggaaacccattgcgaccggccccaggagacccaccaccaggctcccactgtgccgagcttcccgctcgcccggccccgcgggtagcgaaagcgacaatgttcccctgaggccacgacagagccggcgtgccgagatgcccaaaccccgcgcgggggccagcgactctcgcgccagtaggcccttgacttggatcaagacgggggacgggggactcccaggacgcgagcagagtgaacgaggacaaggtgatgctccacgcgcttctacttcaagtctggtccggttcggcctggtctgggccagccgaacagccacccaaacactatcacagcttgcccttccgcttgctctggctgcctgcagacttggagccattttaaggagaaaccacctggccacgccccctagagaacccgagaagccaatccacgctcggccacgcccctctccgcgcgctgcggagaggccaacggtcgcgcgggtgacggttagggcggggcgtgcttccgcgtctagccggagaaacttgagccggctgccccgcccacggtgcccgaagccccaaaggctggaattaggggctagaagtctggcacccaccgcctggccaggtgttcgggacgcgaccaggtgggcggtcgccccgccccgggagcgcggcttaatagctgagagcccgggggccaggccgcggctgcggcccaggcaacgccctgagggtggccacgctgccaggtgttccactcccccgggactatgggcaagggcccggggcggggagggcggcaggtgctgacactggagctgcgccggaggtcggggaactcggcctcctaagactgaggacactcgcctgctgggccggtcgagctgtgcggtgccctccgggacgcagggggcgctgcagccacgctgggtcaggctccgcagggccctcccaacccggggactaacggcgccggtgacgacttcgccgcgcgttggtcagccatggccaccgctctcgcgctacgtagcttgtaccgagcgcgaccctcgctgcgctgtccgcccgttgagcttccctggtgagcttggaccccgcgccctcgaccatccagccccctagggccggcgactgccagcccagcaccttccggcctctcgggctgcccggcccggccccgcgcccctgaccctttccctccgcagggccccgcggcgagggcatcggctctcgccggcggatgacgagctgtatcagcggacgcgcatctctctgctgcaacgcgaggccgctcaggcaatgtacatcgacagctacaacagccgcggcttcatgataaacggaaaccgcgtgctcggcccctgcgctctgctcccgcactcggtggtgcagtggaacgtgagtcctggcccgcagtgtggaaactgaggcccagagtcacaggccctcaccctgcttggtccctgcaaacttggctttcctctgtctcctcctgcagtggatggagatggggagaggctgcgtggatttgtcgtattaaatgtgcctcctccctgcacaggtgggatcccaccaggacatcaccgaagacagcttttccctcttctggttgctggagccccggataggtactggggaaggggagggagaacagaggtgttctgggccccagaaggcgacccccactgcagcctctcaacagaactgtagactagccacacccacccttccctagagatcgtggtggtggggactggagaccggaccgagaggctgcagtcccaggtgcttcaagccatgaggcagcggggcattgctgtggaagtgcaggacacggtgagtcccgggactggggcatgctgcggggagcacaggcctggcgctagacaggctgatgctggccttttctttgcagcccaatgcctgtgccaccttcaacttcctgtgtcatgaaggccgagtaactggagct

SEQ ID NO: 40126 - DNA, 948 bp, Homo sapiens
aagcccaatctggtgagttagcccagagaccaggtgatagtagcaccttagctcaccttgatgttcaggacccaattcctgatcatactcaccacctggtctgcagtgaagtcgatgtacccagggagaatgagaaagtcactgcgagggaagggagtgaattgggagtaaagctctcagcttagggcagcatgagactccatccccatgtaccaatcaacccgtaacgcatgtgagcagagagtggcactgacagagtctgtgtgtcacaggcacagcacaaggtggaaatgggtacaggggaccttttctgccaccgagctgtcatcagtgctcctggcaccctgacaattccatgtgtctggagcatggaatctccggcctgagattccaagcactactgagatgcttctccgtaccccaagcaccgctccagatgtctcaaagtgagccccggaggtgggtggccaattcccgaaacctgtcccccacgcccacgcccaaggcggctctcggaagcccccatctggccttttccccagggtgccgcccctctcttcgcccaggtgagccccataggcccgcacttgtaggtgaggccgtctccgcagttgaagagctgctgtgctgtgagtccgtcgtctggcacgtaggacgtgcccccactaatcaggtagtcggccatggccaacacaggacaccgccgcgtgtctccgaggaccgcgccgcagagacctctgccgtctgggccgcgccaatataaaccagccgatttcgtcactgcgctgcgcgcgacgctgacgtcagggcgtagtgcgcgcgggcggaacctacccgcctcgctgcggcgggggcggagctggcgctgaagaaacagcgcatgcgtatagcacatagtggccttgtcactgaggagctgccacttcacgtcccaccccacactccccg

SEQ ID NO: 40127 - DNA, 2315 bp, Homo sapiens
ttgtttaaggccaactttttggctgaggcaaaggtgggcctttaatataataaagtaagcccctcccacttacgcaaaagaaaagctgcgtttaaggatttaaactggcattttagagctcggagttcacatgggccacataagcgaattcccttccggagcgcacagaggtgacgtgtatgaattacgcttatggacgtattagtttctaatgaaagataagcaggtaccactcaagggccttctaatattaaccttccctgcccggcagaaagcccagtacaaggtgaggaaatccgaaggggctcactgccctctcaaaccaagagggcttggtttccgaagcagagaaacaccctacccaagcacccgcaccgtacttgggcctcaagtaacggcattcttcgaggagaacgggcaatctcgcccccctcacagaggagcggaaccgcaagccagacagcaaagctggttggtttctctccaggccgaggccacggatgcccgggaacgtcaccagaccagaaaggacccaatcctcaaccttcccagcgcaacgagccgcggccggccctctgctcagcagaagcctcctgcgcgctctcgaggcagcaccgccacccgatatcagagcgcgcgccccaaaactgggggtcgtcacgggcgcgcgctccagaaagccgcggttgcccacgggccacagctcctagagcagagatatccgggccgggaacgcgcacgtcggcggccacgcgcaccgagagccgcacagcgcgcgcgcgtaaaaacaggctcagccgcgcgcccgcaccggcgcgccatctcgcgccgcgcccacccaaatccccgggccacccctcccccatccacagggcggggtgcgctagcccaggaacgttttcggctccggagccgccccgaactctccagggcccagcggtagtggcccgcccgcccccgcccgccgttgtgtggggtgggccccccgtctcaggcctacagcttcgccgcatccccacccgcactggagccctcacccggcgacgtcactgccgccgccgccgccgcctccgctgcacccgccggccccgccgcaccgccagggaccctggttctgccgtcgtcgctccaagaccgacagggttttctcctcacagctccctgggcgccatcttacattcaaccctcacagccaataggagccgattgctcctctcgcgataatcggggcgtcggatcccgcgagatctgggactgcctaccggccaaaattaaagtgaacgcttcagcaggggaaggtggccgcgcttctggccgctagagcggatagtggatcctagggtatggagcggctcgctccgcccatggacgcctctccatgtggggcggagctagggccgtggcttggcctagtagtggagtctcggaaggctagggctccaagctagctctttggacccaccttccgtcgcccgccagagcctcctttggtcgagcacgcccacgcggggcggggcctggccaggctcggcctctcgcttaaggtggaccccacaaacttctgtcctgggcctggcgtccccagccgtgccctgcctgggaagcctctaggttgctcacctcctggaggagtcagcatctggtactcccgctgtctgctgccatctgagttcagccttccgcagttgggtccaccttaaagcgggcccccgggtagcctagtgtttgtatacagggaaaatgtggaaggcgttaaagctgcaggcacactcgggcctcagcagcagcctacactgcccccagagggcttccagcctgctgtagactctttttgcctcggagcttttgcccttgttcctcttatcctggcaaactccccgtagtctttcgtgattcccttcagaagtcacttcgttagagtaatgttttctgaggcccaggctgggtcaggaacctcttccagtcttgcacaggccccagggagaccgctcccatacagtgcttggtcacccatttcccctcccgtgaacttggaaggccaccacagcacgtatgccccatctcactttgcctggcacgtagtaggcactcaaaaattatatgccgaatgggccgggcacggtggctgaagtctgtaatcccaacactttgggagaccgaggcgggtgaatcacctgaggtcaggagtttgagaccagcctggccaacatggtgaaccccgtctctactaaaaatacaaaattagccgagtgtggtggtgcatgcctgtgatcccagctacttaagaggctgaggcaggaaaactgcttgaacct

SEQ ID NO: 40128 - DNA, 1302 bp, Homo sapiens
tgagccactcctttccatggccaggactggggaggcagacgatgcctggggaaagactcacagcctcctcaatctgctctggggtcacaatgacacccacgccacattcccgctcgaagtccacagtgtcgatggggtccaaggggtgactccgcacatactcaagggcagctgagaagaaagagcccgtgagtttgtggcatctctgctccaagaagtggacagacagggtcctaatctcatgaaactccaaggatagtctggcctcctgaaaagttaagccctggcaccaccaccctagagaacacagggaagaaagaagcacgtgtcgagagtggatcccccctcagaccctgacagttcccgtgtcagtctcaccataggccaccccttccatgcctcagtgcctgtgcagaactaggtgtctagaaagaaactggaggacttggcaaaaagggaagacaggggtcttggctgaagggaggcattggtgcgaactggcaggacaggtaggggtctcaccgcttagctggggctcagtgtggatcttcttactggctatgtagcttacaaggaaggagagacgccgggtatccctgagtcgggaggccaagccatataacaggatcccggtagctttgtcaatggtggaacccagggtctgctgagcctgaggtcagaggggtcaagagagaagccccgcgctcagtgagaggaaagggcgggacaaacggggcaggtcgggatctggaccccgccccgcgctgcgttgcagcatggtctgcaaaccaggccgggggcagaggggctcgcacctgagtagcggcctcgcgcagctgcgcgctcagagccgagttcttgagcgtctcgcgggccttctgctcgctcaggccgaggctagtgaagagcgacagggagtctagagccgccattgcagagacaccggaaactaaaagaaacttaggccccagtctgcaggtcggcattcactcgctgaccaatgagagtgaagcctccggggagagccaatggggtccttccttggcgggagggggcggggcgctccaaggtcgtctatcccctttaaacaacacagggcggacaaaccggcctttccgggggctttgcttccgcctccgtggaactgggaacttgaaggggtgttggcaggcggcagggcttttggagatatttgccacggacctggaaggaaggtgttcgtccctgaggcaggaggaagacacaggcgtggttttgctctgacttttctacttcagccctggtaactccatctcaatatag

SEQ ID NO: 40129 - DNA, 2095 bp, Homo sapiens
agccacggctccagcccacagggctggcactccgagcagggtgctcacttttccttcactctcactggctgcttagtcaccactggagaaatagaaggtggaggaggaaggcaggacaggagacaagccgcaggagaaccaggctctgtggctgtaaacaggctcaacccaggttctaccattgcccagaaaaagtcctggggctaaggcactccacctgcctcctgccagctcccacccttggcaagaacctgctcctatgtactgcttggtccttcttcatttcaagagaaagtcctctccccagctgctgtcccaagcagaaagggactgaaaagtgtatctagatgtcacgctacctcttcagcagcaaccctgctccagtactaaggcaggatgggcatccagtttgagactggaacagaaattatcaccttccttcccagatgccttcactcatgagctctgagccacaaggaccactacagtttcccacagacccaccagtggattctggactgtttcctcctccaaaatgaaggtcttgaaactagatactgagatgaggctggggaggaccacagatccaggactcctggcagcctcaagcctggcctgaaccagtagcaggacagataatgactagtctgtgttcccctaagtgtgtaaaggaggaaggagggatggcaggatacccttctacaggtcagatgtggtactggtgggctggatctttaatgacacctgccaccggcgcctccttcttgcacccaggccccagccgaaggtcgcgtccctcccccatgccccagggacgtcgaggcgggtaaggggctgtttagagacccgagccggcctgaaatggcagcgcggggttactgaccacagatcagcgccccggtcgagctgcgacccagcttcagcctctgaaccccgagcccgccaccacctctcccacgaagttgccctcgctggccgccagtcctctcccaggtgggaggctggccacaggcatagcgtaacggccctgccggcatcagtgggctggcacgctgcggggcactaggggtagggactggcacggcccgtgaccttgaacaggccgccgcggccgcgcgttgcggcctccccgctgcggccaagccagcgagttgcagcctgctccactcaccgagcgagaccgccgcagccagccctcttcgggccctggcaacccgctctccgttccggttccggcgcaggtcggttccggttccggcgcgcccctcccccgtcccggcgccgccgccaccgccttagcggcttgttttgtttcgacttctagctaaggccgagggaggcggagcgccaagctggtgacgcacttccggcgggaatgggctcggagcgacccgcagctccggggcgggcccgagcggaaggaggcggtgctcgggtggcttagcggtgcatgggttctgctgggggcaacctcgaggttcccctggagactcccccgcccgccccaaatcagagtccagacaacacagtgggggttcacactggtttattgggggccctgccgggccaagagctcttcagtgcataggcagacatgcatgtggggcagtgctaggaactggggtaggccttgggcaggggtcactggcaggtgttgtagatctgcacctgcaagttgatggcttgaagcacgctgcgcatcctggcctccaacccgtccaactgggctgccttactctccagtgcccgctcattttcctcataggtgccttccaattctaggaagggcaggtgtcagtttagggggggtttcccgcagtcttgtgtctctggtgccccatttcttaccctgtagccgctgcagcttgtcctgagcggcttgcaacaggtcccgagcctcatcccgcagttgttctgcccttgcctgtgcagccagcacaccttgggccttgcgctcagctagggccttcaccgtctggtactgatcacccagaggaccgcgtagcagctgcagatgtagagggttaggttagcgtggtagctcagtggaggcccatcttccacccctaccttctccagctggctctgcctcaac

SEQ ID NO: 40130 - DNA, 2407 bp, Homo sapiens
acccagcctgggattggaaaggcagaagagcatgtgcaaaggcctggaggcaaatggaaggtgtgaagggatgaaggagcctcctgcatccatgctcaaggaggctgtgttaaggagctgaggctctgtccaggggcaatggagagccaagcagggtgattcgggcaggctcccagatatgcaggcaccttgaaggtcataatgaggtgtgtgaaatgaaactcagcctccaggtccagctggatggtgaccgcagggatacctgggacaggaatcggaagtcaaggactcaaagctactggtgggcagccctgctcacttttgccccacccatggcctcaccattctctgactgccaccaggctgcccgccgctgtggtgcaaagctggtgactacattctggatgcgatggctgtgtgggttgtctctagcagagaaggggcgccgggagtcacaaaggaagcacttcttttcgtcctgggttggatggggattagaatcagtgcctcaggcagtgccagccccaccctgactcggcgtcacaccctgtccccagccacacctgcaggtgactgacgatgcagtagggctgggggccattcaggccacaagtggatgaggcagtcagtctgtcagctcggcccaccagcaggtcgcccgtggcggggtagcagcttcccctggaacagccaggcacatccggggcaggggcctgtgccagtgtggcagccagcactggggacagtagctcagtcagttccgctgagttcctatccagtggctccacctcatgtgccccaagggcaactaccaggacctaccatcacattccacaacccccagcccccaccaggccctctcaccgcttagcagtaggcccagtcgaagttcccagggcagaggctgtcccctccctctttcccttgaggtcagctccatcctgaagaggggaacagggataaggggaggtgaacggtctcgggcccgagccctcctccttgctttggggttccgtgtcaactctgcctgtgggtctttggcctgtttccctccaggccctctgtcagttcccaggtctgtccagcggtccctccgacagcttagagtccagcgactttgagcaaagttgggaatcgcggcaggaaggaaaggccggagcggattctgggaaggagcgcaacaccgggcggagagcgcccccaccccaaccctaccccttccctccggaaactgccttcgccccaggaaccagagacagaccacttcacccacaaatctttattgtgcccccaagcccacacctatacgagggccaggggaaggtaaggggtttggtgctttaaactatccttggaagagggctcacgaagttgggggcatggcaggagcaaatgagagatcttcgggatctccaactctggaccaaggagaccgtagccttttcccctcagcgtcatgggcgccgtggaaattaccatcaactcagccgtttgatcccagggctccagcatcaacagagaggctggagggcacaagcaggagcaacacatgcccctattcagggctgtggggggctctcgggtagtcctagggactggacagaatggggctgggggagagatggggaaagtgcacacccagcccgaagcacagctccaggggggtcactgcctcccccactagtcactacggtaagtaggcacgagaagtgctgcgggtttccctgtatggaaataggctctgggtggtggaccagagctacggcgagcgactccggatcttgtggctatttatccgctccagactttttggcctgccgggatcgcaggagcctggggttggaatgtgcgcggcggcgtggagggggagagaaggaggaaagtgggtgggggatatggggcgcgccccacccagggccctgggaacgggaagctgggggaaacatggggtcctccggtctttagggctgggtctggcctgccgcctccacagtcccggcagggagtgccctgagctgccatccagggaagaaagctgatgatagttcctcaggggaatcaccccacttcacaaaggagcatgggggcggcgggggtgggggttgggtgagggttgggtgggggtcagtcaatccgttggactttaggcatcgctgggagttattctggatatccggagtagaggtctccagtcaccctgaggatcatgtagtcaacctgggggatcagggatactagaaattactgagaattttaattttttttttttttttgagacagagtgtcgctctgtcacccaggctggagtgcagtggcgagatctccgcttactgcaacctctgcctcccaggttcaagcgattctcctgcctcagcttcccaagtagctaggattacaggcgcccacc

SEQ ID NO: 40131 - DNA, 2492 bp, Homo sapiens
ttcaacagaaactaaaaagctgatgagtagcaggtgccaatgacatctctctaggcaaccaggcagaccagggaccaggaagccagaccaagatcccaaagtttaaggacaatgggagccaaaggctgcaagtaggatggtgagtcaaggggacattagcggtatgcactgtcctacctaagacttggagggccacagacctcagtacagcccagatggaggtgactgagaacacctaactactcccagacttctttaaagaagctgtggacatcaatcataactaacatctaatacccaacccaacactgagggttcccagaagcaagaggcagctccccagctgcaccagagcattaaaagatcagccaggatcaggcaggtccctcgggccatgaggcccgtctgtgtagtttcttcccaccgctctaatgcagcagatgaagtcttcagaataccctggaggaaatgccctagggctctttgtttggaaacattcttggatcctcaggtgtcttgggcacttcccctccccagagaccgttctccaagcacaatccttgcacatgactttagttctttattaatgttttttgaagggatgtagttcccagagctgtgaactgtagaagagagagggacctatttcccaccctcacacgcgccccagcgcaaatatttggggtgacctgggggctcttccacccaggttaggctgggctcttgggaggggttttctgggctttcgagaagcttcggaaacagaggctcctgcccggcctccgacttcccttcacacgtgcccccggggaaggcaggagaagttgacggaagatagggcgtgagagaggcgccacacaggcagaccgggggagggggcagatcggggccctcaggctgggaatgcacgtccttagggcccaagccgtgaggcgggggtcactgaggcagcgaaatgtacagggtgaacggtgctagccctaccgggaccgcacagccccagggtggggtcgctgggcgcggggtgggggtggggtggggggtctcggccaggccggcggaggacgcgggtccgggaagagttggccgcttgcccgtccgccctgccgcctcgcgggccgcccctccgcggcgcggctaggcccgcggctccaacctaccggcgccgccgcggggacccaagacgcgcctctgcgccgcctccgctgctccaacatggccgcccgctgcgcgccggaagtgcactgcgcttccgcttccgggacccagcccgccctaccgacccttgacccctgagaccccatttccccacaaagtctgggggcggagcagattgggtaccaaggaggactgcctggaggtggtggccgcggtgactgctccaaacccgttcggccctgtgcagaagtctgaagaacagaggtgccctctgacgcggccccaggcaaggactcactagagcccggccaagactggattaggggtcatctgacaccttttctgaggggagctagtggtgcattgacatctgggaggggctcctgacaaggttcaggccatcttccaccctctgatctatctttagccactgacaatgcccacttcagtcccagacacctgaccagagggtgaaagaggagtgcctcctgacagggagtctcaggtgatctcctttgttttgcagtaagggtatcttctccgaggacagcaggccttcctctcttcctgagaatagggcctgtggcacatggcatgaaaggctggtgtgcacgtgatcacaagtggtgcacgcaagcccaagcgcacatggagtctgggggctccagtataccactgtgggcctgagtatacttgctcaggcaggtgggggcaggtatagtcactggcccagcctcagcccctcaatggaaggaagtcctgcttccagtcttaacactgcccagaacccctttccttttgcctaggagtctgggacctcagtctttttatccatgctcttgggctagtacggggtggtggttataggacacaggtcaaaatcaaccctaggggtctgtgacttcagtgagaggtcagagtggtctccacagctctgaccaaaggtcccattagtcagaggtttgcaagtccaggttgggaaccatcctgggagccctggtttcatggatgaggtagtgggggcatttgcactagggtcagagcctgagccaggaggcagaaatattgccacaactcttggactctgacccttgcagtggtgccttatttggtagttggggtcaggtggaagcctattggcaatcacaggagggtggcgggatgcttcatttagggactgggtactagccctttttcctgccctttttccaaccaggatcctctggttgctctgtattttccctgcttatacagaggggtccaggcactcctaaagacaagtgcctagtccacccagcagtgccataggcctcatctggtgcctcttagcttcc

SEQ ID NO: 40132 - DNA, 1412 bp, Homo sapiens
tgctcttgcttgaccccagaattggttagaggcaagctcaggatactaaaaattgatagttataatgtgccttgggtcccagagtagcccaggtctctcaggccctacaggatgaggccagagtgacccactgggaggtcccctggcctctgactcttccagcacattctctgctcagtatcactccttccaggaattctccccacccaggtttgtagaagggccagtgccttctgttcctccacccccgctagcctcagtgtacactgtaagacctattcctgctttatgcccaggtaagggcgccccaggctgcccccacacgacagaggcccaggccatgtccccagtggcctccagggggcgccgccgggaagcctgtaattgggctcctgggagctccgcggaggtgggcaggcgccggcccctcaagccctcgggttcggctggcctgctcgacacagcctgcgcacccaggctgggtcgggctcagaactgccccttgccatacacgtgttgtgtcgctcgccgctgcctcatttctactcttgcccgaggtcggacgctaaattctgtcaggcccagtgtccaagtgtccgtttatctgtccgtttgcatatgaccgtagatcggcacgccctgctccagctgcggcatgtgcagggttaaggcgagaggaggtttccctgagtcggagggggaggggggcgaggggcggacctggcccagccccgccccgcgccggagcagtgccggagccccgccagagcccgacttcagccccagccagatcccgcgtcaacggaggcggaacggcggaccccgtaccctggcagcatcggagcaccggcgggtgagtcccgcgggaaccgcgctcaggggaagtttggggcgcggggtgtagaaccccaagcgcgttagcccagacccgccccccacatccttgagctggaagtttggggccaagaggccctcctgccaggggtccaggagtgtagccaccaagagaaaggggtggctggagaacttggggatctcctgcgagggaacccagaagtccagctgcccattcctggtggaaacgccctggactcagaccctggagtcctgtggtcatgagatttctccaacggccccccgccccaaccccacttctggacaccagggaatctggcttctgggggggtttggaatgggcaaactcctgaggggggacctcgagaggagagtgtggaaccctggtgtttagtcctccccctagtctgaaacacaccctgactctggtcttttactagtgggaatggtttaaattaaccctgtggaatggcccccaggatgttgtaaggatactctggagtctgacccctgacagcaggcgtggggacccccaggctgcccagggcaccctggaa

SEQ ID NO: 40133 - DNA, 617 bp, Homo sapiens
aggctggagtgcagtggatgcaatcttggctcactgcagcctctgccttctgggttctagtgattctcttgcctcagactcccaagtagcagggattacaagcacatgccaccacacccggctaatttttgtatttttagtagagatgggatttcaccatgttggccaggctgatttcaaactcctgaccttatgatccgcccaccttggcctctcaaagtgctgggattatagacgtgagccactgctcttggctgcagttatacctttttcagacaatagtggcatagagccaagtatgaacttacacaaacaggttatataacaagtggagttatgtgcttgcatgccaaacttgctgagtcatgcaggcctggatatctgcctcggcctattccttgactaaagcacatccgtgtaccttacaatgacaaaaccctgtctctacaaaaaataaaaaaattagctgggcgtggtgatgcatgcctactagggaggctgagttgggaggatcacctgagcagaggttgcagtgagatgggatcatgccattgcattccagcctgggtgacagagcaagatcctgtctcaaaaaatgaataaataaaaaataagag

SEQ ID NO: 40134 - DNA, 1370 bp, Homo sapiens
ctccaagactctctttcaggtgccaaaatggaggaatgcatcaatacattttccttgctggttagaggttttctctcggggcacagagcatgtggttttgcatttaccggggcatggtttgttgcaaaggcagggttctcattctcaggagcacatgggacagcagcaaaaggagcagcagaagagcaggctgccagaggatgtcttctgcagaggagcctgtgcacgggcagcgagaaggagagcggcgcggcgctcagttccagcctctgctggcctgtgcactcctgggaataactaactccttcaaaggcccggtcaatggctgcagtcagttcctttctgcatcttcttagtttttcagacatttctcctaaaagcgaccatgtctttatgtaatgcattggaaatgcacaggacaacacaataatgttacaaatgaggctgcaaactacccctgaatggccacgatttcctggagcttggccctggctatagcaggacccacaaccctcgggctttcctcctggagtaggcggttctcggctctcgcggaggaacccgccatctgccagaagccccaaagacgccccgccccacttcccacagcttcctggcccgccccgccgctgcctcccgccccaccgcggctcccaggccgctggccctaccggcaccccccctttggcgagtcggcagccacgtccttgtcctcacccgcagcgcagtgacgccgacccatccaacggtcatcgcatgcgcgtgccccgcgcaggccccaaacccccacggattaggttgaaggtcagacaaaaaatcccggacccatacgtccggttccttaaggccttgcccacacgcagcggctggccccgcggtgggagtggggacggggctttcgaatgggggccccgggaagagtcttggcagggatgaggaaagaacccgttctagaaagcatctgggtaacaccaaaatgtattactaccctaaatcgccatgaactggagccctttcccggctaactcccacaaagatttctgttctcaagccaacatggaaacaactagacgggacacagcaccgggcagttttatgtactgacttcctttaagcgttatctaataaaaagtgtgttatctaataaaagttccacacagtatttaaccgtcttaattcatctagggtagcaggggatataacagaactgctgggttccacaggaggttgaggggccaggatccccaacactagatatcttccttagcggggagaaagctggaaattacaagatgactcaacggagaaatgggcttcagtgggtaactttcagaaaattataaacccatatcagtgcacatagcgaggga

SEQ ID NO: 40135 - DNA, 1758 bp, Homo sapiens
ggttgccgtgagccaagatcacgccactgcactccagcttgggcaacaagagtgaaactccatctcaaaacaaaacaaaacaaacaagatgggtaacaatcatactcgatgcaaagtctagccttagtttttctactcctacacaattacaccacccaggaatctctccagtagtacaaagtattgtcccctctactaaacaatctattaagatgcctaataactcagcctgggtcttctaaattctggacccttcatcttctatctagctccaggacctaggctatcctcctctcccactccaagacactgctgccgcaaatatttttgacacttgctaccaaaataatcggggttctcagacatttgttcagcttctgaccttgacatctgttggcagtttacaagttacaaagtatctacttctgattttcccctcaacccactgaggtcggtgagccaaatattgctatcctggttttaacagtgaggaatccaggtctgtgacaccttcgcccaaggtcacacggcgagtcctcatggtaaagggctctccccacccttagggtccccaccaaccttccccttctccacatccctcctcctggcccccgccgggcccgccccctagggctccaaatgaactgagacgacactcaggccccgcctgcgctttcccagagctgatcctggagttattctcctgaggggcaggtgtcaggctactcttccagggtcactacataccatccccgcccagcccctactctagccgagaaaaaggaggcccctttttctcggcccctggttctgcatagaggaagagcgagccgggagctcaccactgcgccccgcgttggagtgtggtcctcattaagggtccaagctcggacttctgagtctccgcatccggtcgctcacggcagcctccaccttccgccatctcctccgcggccccggcccagccggcccggacatccgccccgcgcgcggcgtgctatagaccgcgcccacgcacgcacgctcgcgtgcccgcccctgccccacctcgagccgcggccttcggctcctgcagccgctgtcttttctcccctccgctctcgcgccacctagctcaccggcgaacagtggagcggaaaggcacacgcgagaggggtgggcggggagcagcagctgctacttcctcccgccctgccgcccgctacgcggccttcgggcgccccttcctctgctcaggatggcgctacacttcgaagctctgttcagcccgccgatctcagggagttaggcagcaagcccacgacccatcgggcaccccagcctggccttcgaggttatcgtggtcctaaataaatgcaggccaggtgcgagaagcccggtagttaggtctgctcattctcacccctgcaattccgctttcagctggaggccttaggcgagtcagctgcccaaacgtgggatcggggctcctgctccagcggccctacagggatttcgggaagtaccatgtgcaccagcgccttgggaccaagactcaatggtgtgttgtagtcattaacagtcgccttaaacagtcgacgccagagccacctggcccaccgcagaattccgtcagctcttcatactgagctacttgccaagcagccacagaggggcgatagcaacaggggaaggagaggtactccacattagttacccaggcgtgtacttagttcctggaacaagatacaacgtcctgaacactatgttttccagtcg

SEQ ID NO: 40136 - DNA, 2181 bp, Homo sapiens
tggccccttggggagatctttagccagtactttttactctatcttatccaaaagttaaaatgtaagagatttattagacttatcaggccaggaatgcttttctgaaaataaacttgttttatttattttgagacagggtctcactctgtcttccaggctggagtacagtggcgcaatcagctcactgcagcctcgatctcctgggcttaagcaatgttctgacctcagctgcccaagtagctggctggtaccacagtcatgtgccacaaagcttggctctttttttttttttttttttttttgagacagagtcttgctctgttacccaggctggagtgcagtggcccaatctcagctcactgcaacctccacctcccaggtttaagcgattctcctgcctcagcctctggagcagctgggactataggtgcacaccaccatgcccagcttattttcgtatttttagtagagacggggtttcaccatattggctggactcctgacctcatgatccacccgccttttcctcccaaagtgctgggattacaagcatgagccaccttgcctggccagtatttttttgtagaaacagtgtttcgccatgttgcccaggctgttctcaaactcctgagctcaaacaatctgcccaccttagcctcccaaagtgcttggattataggtgtgagccactgcactgagcctgaaaataaacttgttttaaatgttgtttttaggactacgttgagtcagaataaggaagtcatttgatcaactgctaattgtgcaagaaatgcctgacctaattttatcagatttaatgtttgaaaaaaaaccccaaaagcagcccttctgtaagaactgctgaaatggaagtttctgaacctaggtcagtggcctaaatgctgtatgtgttttctgtgcaagcaatgctctgcagccatttctgcttttaaagccaggacttcacataggctgaatgtgatttctactcttttacttgtttatttgagctgctgattcacaatggggtggggtgggtaccagtcagagcagcagcagttgcatggttgaatgaaaagaatgtgtatgtgtgagagtgtgtctgtgtgtgttgggggaagacagtgaagtcttaactggctttactctgaaacttcctggagaagagagagttagaaaggactggccgggcatggtggctcacgcctgtaatcccagcactttgggaggcccaggtgggtggatcatttgaagtcaggagtccaagaccagcctggccaacatggtgaaaccctgcctctactaaaaatacaaaaaaattagtctcgggtactcaggaggctgaggcaggagaattgcttgaacccgggagacaggttggagtgagctgaaattgcaccactgcattccagcctgggcaatagagcgagactccctgtcaaaaaaaaaaaaagaaagaaatgacttctagttgagagaggaggcatacagcttaaagtctgaggagaaatgttctccagccaggatcaggcatactgggagttcagaagttccctttactgaagctgagtaatttcaggggaaaccaaaaaaagttcccttcactcgtagtccaaggcataaactgagatggtgggggtggcatggggcaaggaggggtcaatcaccaggcatcctggagagaagttggagtttattggaaagttctgggttcctatcctgtagcctaaccagagagtgtggcctaggccacattgaccctgtacaggaaaggggagagttgaagtgggatgtctcttctcacaggtccagctggtagaacactgagtaggaccctaggtccctagactttccactttggtgtctctggaggtgggttgtggaacatatattttcacaagtacctgggtgactcctgggcactgtatattcatctcctagaataggacctggtacctcctagacacatggctttctagctttggttccagctgccccgagactgcaggcagtccagaagcatgggttccagctaactattctttaggaactgtcccttcccttggctccttgctccaaccttgttcctccccagctatttctctctgccatctcatctggaaggattgtgaatctataggcctcaggcccaggtcccctaatctttttcttgccactttc

SEQ ID NO: 40137 - DNA, 2281 bp, Homo sapiens
ccccccgagacagcagcactgcaactgccaagcagccggggtaggaggggcgccctaggcacagctgggcccttgagacagcagggcttcgatgtcaggctcgatgtcaatggtctggaagcggcggctgtacctgcgtaggggcacaccgtcagggcccaccaggaacttctcaaagttccaggcaacatcgttgcgacacaccggagaccaggtgatgagcttggggtcggtcataagcgcggtggcgtcgtcgctgggagctggcagggcctcccgcaggaaggcgaagagagggtgcgcccccgcaccgttcacctcgcacttctcgaagagcatgaagttgggctcgaacccaccaccaggccggacgtacttgagggaattcagaatctcttcgttcttggcgttctcctacaggagagaagggcagctagaacccggggtcaagaggaggagagaaacgttctaaccacaaacaagggagattttctatgagtcaccgggattttgccctccatgcgcaatcccaagggcggagaggaatttcagcagctacgagcaacagaaaggaaacgagagagtagccagactctccgcgcatggagccgacggcacccaccagcacaccgccggcgcccccagccactactgcacgtccgcccccgccccgccccgctccgcccggcgcacctgatgcccaaactggttgcacgggaagccgagcaccaccaggccccggggtccgaggcgccgctgcagctcgttcatctgggtgtagtcccggaccgtggtgcctcagagggacgccacattctcgataagtagtaccttgccccgcagggagcccaggctcacaggctccccgccggccagcgggcgcgccgagaaggcatacaccgactgggccgccgccgccgccgccgctagccgagcagcacacatggcgcaattgtccaagaagccagcggagcgccccgaacaagcactgtaaggggaggccagcaggcgcctccttttaactggccggcggcgggtcacgtggcacaggcagttttccgggcctgagggtcccgcctcatccggcccccgccctacccggagggctcggcccctcctcagccaggaaaaggctggagagtgcgcccgagcgggacgcgtgctcctcctaagccggaaggagcagcaggcatgtctggtctggcccaggcaaccaggcggcagcggtccaggttacccttccaagggctggggccctcgagggctccgttttttctcagaggttcctgagttaggatgtggggtttggcataggaggctggtgggcgacggcagcagctgcaggagctgcccgtgcacaaacagccctcctctcctgtgccatgttaccggcagtgcaggggacagccagagggatctaggcttccggtctccctcctccctgtctccaaagcggcaccgccctcgtgcgggttttctaaccgggcagagtcctggaagctctgccccagcctccttaagtggagcccagtagctcgccgaggccaaggaaacgctgccggagtcctccctccctggcctcctcaggctgcattcaccctacccccaaatctgaaccagaatgcggtacagggtaatcatttccatgttgttgggagggaccagattagctgctgggtgggtgggaggtggggcacaagctagtcctttgcactcaacaaacctctccagggtgagctaggccaggaagtccttgcatcctcctacccccagccctggagagagcaacacaaacaacaggatacaggaagtttagaaaactgcctttattctattagtagttggaaaaattaactggtacagaaaaaaagtttagtcagctggagagaagagagactgagtgccacccatgagaactggtggctcctctgggagggaacctggatacagtgaggagaaaagagcactgtgaattagagccagatgcttaagtccaggtgagacaggttatgccatcttccaaagtgtctaattgcctcaggcgtgaaaccaattcctatttacttagcccagctccatggggtactgagatacatggggccgaaaaggggtaatatggccatcttttatcagaaaaagtgacaaaacgggaatttaaaaaatgaattttccatctgactttatttccaaatacactttcttttttaaaaaaccaatacactttctttgaggatgacagtattaggaaatccaattatacaaaaaatactacatctagtct

SEQ ID NO: 40138 - DNA, 3640 bp, Homo sapiens
caaatggggttggacaaccagtcctgaaagattcctcttagatctaaaactcaagaactacacagtattcctactctcttcttccctccaacacagatttttatgagaacagagaggataaatctagcactagactttaactcaaaccaaggtgcaccttatatatttaatgtccccaagagccatcagtgctccacaaaagtagatggaaccaattaagacaagttatccagagatccttcaataagtcattctttacaattaaaaactagtttttcagtccaatgtcacttgtgccaaatgctcaaaacagtatctccgccaatctagccacatctaaggtgacaatcatccgcatggtacacattacacatctgggtgatactaagtggttgaaaaattctctccacatacaacattttaaattatggaagttttttggtttttcaatttttctccttcagaaaggcagagtgaaatatctacttacacacctgcaagaaacgtttaagactttcttcaagacagaaccaaacaagtcaacaacagaggtaaaaatttaaaatcagaactattaaaaaacacaagtggaaccaactttgaggtaaaaaggattccaattttccaccgtaaactactaaacaaggtttgtgaacaaatcaacttggatgcgaatagcgctattcaatgaagacgacccgtaactgtagatccaatcagtaactaaggtacagatatttagatcattcctaatcaatacagcgacttcgactaagcaacattgcatctattttcatgcaacatcgcttaaatcatttacagttttgtgtgttgttttttttttccaaatggaaaataccccttttccactcaaaacagaccccaaagctttcagacgagttcgggcgcgttccaggtggtatggccgtagatcatacccctaagcgttcaatacaatcttttacttacttacacagtctccaacaagtctgcattaaaagaaaacctacccaaagtgtaactggactttaatcaatatgaaacagtgattgtcgtttctcgttaaacgtaaaaagcaaaatggagttgtaaagagtttctttcccatttcaactccgacagccacgcgcgctttcagcggccggctacactgcgcggtcgcggggcccggcccaaagcccccgccctgcccggcgccgctgggagaggaagctccggggaccgagggcgggcaggcgggcagcctgggctccaccaggcccggccgggcgggggaaggggcacaggagactaccgggcgcgcttccggggactgcgcgggcggggtcgccgcttggggcgcggggcccgggctgggagtcaggtcaagggtcaggggccaggggcggctcggccacgagcagccggtggggcgcggccgcggcggtgcggcggcctgccggccggaagagtaccgggctggcgggcctggggccccgcggcgcctggagggaacccttccgctcacctcaggcaacgaatccgagtccagcctcttcgcgccggggacgccggtccgcgagtcgcaaactcggagacgaaggcgggtagctgaagaccagaccgtggactaacgagagaaccgacggaggaccgcgggcggcgggagggtagcgcgagagagcgagggcgggcggcggcgggagggcggggaacgacgtgcgcgcctccgagtgcccagcgggctcgagccggcacaggtcgcggccccgcgcacgcgcgcgcactcacagctcatccactattgctcaggagcccgtccacgccctaaaagcaaaacccttaaccaatcattgcagccgcgtggggcatcacgggaactccggggctataaaagacctggttgctattttgtactcccggagtcactcatcccttaagcaagcagggtggggttaggtgcgcgtgcgcggttttaatactcctccccgaactgccaactcttcacgcacgcgaagtaggccccaccctggctgggtttacgcgtgcgcactaacgggcctggtcccggaagaccacacgcgtgcgtggtggggactacggtgacagtaccccgggtggggcgagggccagtcatggcggagtcctggtctgggcaggccttgcaggctctgccggccacggtgctgggcgcgctgggcagcgagttcttgcgggagtgggaggcgcaggacatgcgcgtgaccctcttcaagctgctgctgctgtggttggtgttaagtctcctgggcatccagctggcgtgggggttctacgggaatacagtgaccgggttgtatcaccgtccaggtgaggcttcctacgaacctccgtgggctggccgcccccgcccccaccctctcccgactgtaccattgggttccccactatcctgcaagaggctcatcagaacttaacattggttcacggccttactaccctgaacgcatctgacctcggaagctaagccaggtacttggatgggagaacttaacgttgtgccctgactcatgccaccataccattttacgccagaatccccaccagtccacccatcacattgtatctgttcctcagaactctcacctggcaataccattagtcccttaggaccctcaccagacttcaccaaacaataccagtggtctctaacctgacctgggctgatgcctgctcagattcccaccccagccttctgcagctctggatgtgtttctgcctccaggtctgggtggtcagaatggatccacgcctgatggctccacgcatttcccttcgtggtgagtaaatctgtccataccgcaaccccatgcttggcattccaaggacactcctgtgctggtgacagagaggggagttctcaggctttaagcccaccagcttaatggcctttgcagcaagcttcaagtctgcacgtagagctcaggcttcaagttagggtgacaccaaggtctggacagtccatcatcatgctgttcagcagcctgtaggataggtggtggtattgtcataatttcagagagatgaaatgacaggtttgttggattccactctgcacaatcccctcagttgggaaggcagtaatctctgtcctgagcacattgacctcatcagggtcagcctcctcttctgcaaaacatgcgctcactaatcagggcattcattcagataatctctgggcccctatcacgtgataggggccacacgaggcccagagaacaaagacaacccgggccctgctcatggggagccagggatttattaggggagggcggcagtgcatggggcaagggtggtcagggaaggcttctcccaagaaagacacctaagccgagatcaaatgccacagggtgacaaagtgtaccaagcaaagggaatggattgagcaaggctaagagggaagaatacgggtgacatattagaataggtaagactgtgatgctggagcttgaacgtgagagcttgttggaccctgggagccattgaaagactaactcagcaaggctgtggtctgatctaatttgcctttataaatgcctacttcatggcaagtagataaaggggtccaagagttagggctagaggttagaaaggctgccactgcccaggtttctgtcttaga

SEQ ID NO: 40139 - DNA, 1003 bp, Homo sapiens
agtagagacggggtttcaccatgttagccaggatggtcttgatctcctgacctcgtgatccacccgcctcggcctcccaaagtgctgggattacagatgtgagccaccgcatccggccaacatctgcagtttctaatgggcaaaggcacagtggcaccttcagggaagggaggctcaggaaggcttcaggctacataacctttggatgagtcatgggctggctagtcttatcaagggtcaccctgacctccaggaccctatcctttagtgctggcccagctcacccagtgtccaactgaggctgccctccacaggtgtagtgtgttcatcaatgtcattcccatacaggcagaggcctgcctccaggcgcaggctgtccctggctgccagccctgccagcttcacctctgggtttttcagaatagctgttgccaggtgaactgcccccgctaccggcaccgagatctgtatgaaacaccagagggcagatgggaagctccctgtaccacatacccccaacccctcacatgcatcctgtgccctgtactgcccccacaccacttcttgacacacctccacaccatcctctcctgtgtagccacagcgggtcacgcggcagccagacacgccaaacacctccatcacagcactggtcatgaagggcagtttcctcaggtcatctgccacgccggcctgtagtacctgggctgcagtggggcctgggcccagggagccagtgaccaagtatccaggtcccagcatccctcaaagctggactaaagccttattcagggaccagaacaagccctgagcatgtcttactctgcaagtgggagaagatgcccttgtccctagcccatggagccttgtggtaggtaggaggagggcaagatacaaaacttaaaattatggcacacaaatatcacaccttccacacattcttcttggtatggcctctgtgctaagcagtcaatgaagccaggaaggcaaaggttggctccaa

SEQ ID NO: 40140 - DNA, 3163 bp, Homo sapiens
agcagccagcgttggacaccacatacaggtggccctcagaagtattggttacaatcaagtcatctaagatgcctccagcctcgttggtaaacagcgacagtgtcccctaggaccaaagtggagcgttttggcttccaggtccaggagggcaaggccaagggtgagccagacacaaccctggacccacttagttaccaaaaggttatgaaccctaatgtgaaggactcagggtgtgcaaggtacaagtctgggcccaagtccaaggtctttgatcctcatgcatcaagtaagttttcatcccctccctaccttggggtgcttccctgatctggtgcaacctctgcacccctccccactctgtactgagagtcccatctgacacttaatctatgacacctaggacctgctgcttcacctacccaaacctgggacgacttagcccatgtggcaacccacaggacaaaagcttcaaaggtcatcttgatgatcgcaggctctcctaagtactccatagcaatgcccccaaaaaacttccttagcctccccactggatggacaaaaagcctgaggttgagggggtcacatgaatcacctggggatcttgttaaaatgaaggttctgattcagcaggtctgcagcagtgcctgagactatattcctaacaagctccaaagatgctggtttagagaccacactttgttgttgttatttttctttttagactgagtctcactctgttgcccaggccagagtgcagtggtgcaacctcagcttgctgcaacctcagcctcccgagtagctgggactacaagcacgcgccaccacgcccggctaatttttgtgtttttagtagaaacgaggttttgccatgttggccaggctggtctcgaactcctgacctcaggtgatccacccgccttggcctccccaagtgccaggattacaggtgtttgagtcacgtcgcctggccagggaccacatgttgaatagagaggggttaagcagaagggatggccagagagcagcatattaaccttggtttctggcctcctagcctgatgtagtaagactgggatattcccctccctacaaatgtctgtgtctctggaaatgactcagggattctgtccaagactgcaagccctgagaagctgtgtttgactcatctctgtgcccctaagcctgaggtagggactcagcccatttgctggctcatgactaagaaaactcatagagcagaaataaaagggcccacctggtttggtcttagctctgcaatgtctccaaccactagactctccatcagcttcacccggtcactaccaagtatcttggtctggggaagagattgaaagcctcaggccattgcaacagctacaatccaaaaggctactaagcaaggatgcatcctccctgccatccacagtgcagtccagcccacccaaagtgactaaccagtcttttggttctacacgtggcaaaggaccaccttctgatttcctgacctcccccagtcactctgtgtggggggactgccagggaactggacaggacctagcaccttcctgaaataaccccttttcaaaccaacatccagcccaatacatgagagtgggtgtcagccctggaaaacccgggacattaaggcacaccatttaatgggggcaagctagaaggatgagatgatgagaccctctgagctcatttccttggggccattgacctatccatgacacccccatgacctctagctcttctgagaaggctgtccttggaatccagttcacagcaaacaaagccaaggagtggaccactgtaaacagggaggaaggcctgatcagatggccagtgtgctcccctggctcacctgcagcatatgagacacgtcaaagagcgagcagtgctggcgtgtgtgcaggtgcgagtcagtgtgactgtcccggtactgcactggcagactccaacccgcaaacgccaccattttcccgccgtgggccaggtggaagtcatagagcggtgtcctgcggagcacctcctgtgggcggctgggcttagtgccaccagggccctagcccccagccgcttccctcccccaccctccaagatcagcaccctctatcccacctgtgcgcaactaagtggacgacacaaggccggggggaatgcctgcaggcgaaagcccagacgggccaccacacttacagccctctgcatcgtcgcctgcaacgagtgcagacggcgcacagaggccaccacactgccaggcacgccgggagatgtagtccaggcctctgctcggacaggtctctctccggagcaaaggatctgaagggggcgtgggcagccccaagggcaggctgggatttagagcagagaatgcaggaacccgcaaccacagggaagaagcctccagctctttcggctgactcttcagggcagctcgggcaatccagagctgattgggctgcccagaacaaagctaggggctagaccgccccctgcagaaccgccctgtctccagagggtcaaagttctggaaagggctgaaaggtctgaatcatacctttaggacctcaagagagtaaggtcaagtgggggtggggaaggtgggccagcctggcaggtaggcagcaccacagtagtctgtcctcatgtggacccctagttccacagctctcccaccaggcagacacaggcagccagcagtcatgcattccacaagtatttattgatcttactgcataccaggccctcagatggggacacagccacgaatgaagcatggtccctgctaccacaaggtcctcttcacttacacacacactgaggactactgcttcgtcacgctttccgaagcagctgagtggggctatgtaagtgaccttgcagatgaagtcgccacctgcaagaactcacaggtgagaacagagggtggccaccaaaaggtcactgaactcccccgagaaaactgttgagccacacacatgtccaactttccaggtccaagacatactgcagtactgctttgtaatagccaccaggtgcaaagccaggaagaaccagagggaaacaggtttttctcacatgagggaagagcagcctgcatcacttaatggttggactgagttaatgcaggacttaggcctcttaaaaggcaacaatg

SEQ ID NO: 40141 - DNA, 2465 bp, Homo sapiens
aattgcttgaacccaggaggtggaggttgcagtgagccaagatcaagccactgtactccagcctgggtgacaaaacgaggctacctctcagaaaaaaaaaaaaaaaaaaagaaatgtagataatgtaaaagtagcatatacaaataattaccaaagggtgagagaacctggtgtgccactggaacagccagtgattcagcttgactactgcagtggatcttgtcattggatactcatcagaattacccaagaaaatgtgttaccaaataaattgtcctggcttcaccttagtctactaagtcaggatttccaaggttgggctctttaattaagtttcccatttgatggtaaggaacagcttgggggagaaccacacaccacagcacaaagctcctgagacaagagagacagggctgggcacggtggctcatgccgtgggtggatcacctgacgtcacaagttcgagaccagcctgtcccacatggtgaaaccccgtttctactaaaaatacaaaaatttagccgggcgtgatggtgggtgcctgtaatcccagctacttgggaggctgaggcaggataattgcctgaacccaggaggcggaggttgcagtgagccgagatcgcgccactgcactccagcctgggcaacaagagtgaacctccatctcaaaaaaaaaaagagacagaaacaggtggggcacagacacagagggctctcaatgccacgccattggaggtgggttttgccctctttgttgagtcatacagtgtccagtcactctatcaactgatgtggaagtgcaactggagattggcaactcgagtcattgggggtatggtgatgaggtaagtgacctctgggagggactataagaatggggaggggtggccgggtgcggtggctcaagcctgtaatcccagcactttgggaggacgaggtaggcggatcacctgaggtcgggagttccagaccagcctgaccaatatggagaaaccctgtctctactaaaaatacaaaattagctgggcatggtggtgcatgcctgtaatcccagctacttgggaggctgaggcaggagaagcgcttgaacccgggaggcagaggttgcggtgagccgagatcgtgccattgcactccagcctgggcaacaagagtgaactccgtctcaaaaaaaaaaaaaaaaaaatggggaggcaggttttggggtaaatcattgcttagcgatccccaactgtggccagggacaaaatgacccctaacttctattttggttcactatttggtatttccagcaaaacctagcccactctcgccacctgcatgccagcgctgtcctggatgtgggcaagagacatagcagagaacaagacaggaagctcaattctaggaaaaatgtgttaactgaaggactaaataaatgaatgattaactaatttgcaagggcaaggaagacggcagaggctttcccataaaagattaaatgcctgggaaacgaccgagattccaggtcggccccgcccgggagcctcggtcgcgcccaccaggcttgctcacctcgaagggagcgacgctggggaaggtgacatcgatgaccagcacgccaggccggccttgggaggtccgcacgtcgcccacctggagggctacggagcctttcacatggcaaggcaccaaaacgcgggacatggtgacagcagccgcaactaagtgcaaccgccgctctaggcccccgaccaccagcccttcccggcatcctcagccgagcctcaagaactacaaatcccgggaggccccgcgtacggccagcccagccaatcaccgaagctcaggatcggccgggagtcggaagtgcctgcggaagtttttttctttttcgtttttaacacggaatctcgctctgtcgccccagctagagtgcagtggcgttatctcgactcactgcaacctccgtctccgggattcaagcgattctcctgcctcagcctccctagtagctgggattacaggtgcccgccaccatgccctgctaatttttttttttttaatttttggtagagacgaggtttcaccatattgtccaggctggtctcgaacccctgacctcaagtgatccgcccgcctcggcctccgaaagtgtcggaattacaggcgtgggtcaccgcgcccctcccactgaagttcttcttcagccaatcactgctcgaggcttagagcctacccgcgagccgcgcccagcaactgcccagcctttctgtatgcaagccattcggctccctttgggtttctttcactgcttagggcggtagtctgttaaaggcatataaatacataaacacaaatcagcagtgattagcctagattaacctcaaaaatacgtattagccgttggaaaaaaaaaggatttgaacacgcgctttgcaaaagtagataaacagccaataaacccatgaaaagatacttaatat

SEQ ID NO: 40142 - DNA, 612 bp, Homo sapiens
ttttgctgcttttttaagggggtgagccaacctggaggcctctgccttttcttccttactgatgttgccctgcaacctcttctctctgtctctggatcctaactactcccataattcaacagtgtcaagactccaccaaggtaagttcaaagtagctgctggccacatgcccaaggtgggagagggacagaaacctagccttgttcttcctggactggtctggaagccccttacatggctccaaggcctctgtgtcctgggccctagggttggataggtcctggtagctatagttttgatggaattgtatccattcattgactcattcagcaagcattagtggaattcttattctgggccaggcccagtaaaggttacaaagataagcacagatccatagcttggccacttactggctatgggacttttagtaagtgacttaacctttgggcctcagttttctcatctgtaacgtggggccaataataactgtgacagagggttgctggaaggcatggtgagatatcgtgtgccaaagatataggacagcgctcagtgatggtaactttttttttttttttttttttttttttttttttttttcgagacgga

SEQ ID NO: 40143 - DNA, 1049 bp, Homo sapiens
tttcctttccccaggcagttgacgctgggccctctctgatgggccatgctgggtctcccctgaagtccttacatactgagtataccaggagtatatccaggcccaagggagcccttcctccaccatgtcccttcccctttgacctttctctcctggggctggaaggaggggagtggcctctctgcattccagggaaggtggaggaaggacaagtgagaaattttctctctaaatgcttgttctgacttgacttccctgatgcctgttgcccctcctccacatgacccccatctctgcctccactctgcctgctctctcctccccaacccctcctctgtgctcccacctttcttttcccacctacaggggaaagaagggctgcaagcctggagctcagctgctgtcccctcacccctcacccaactgcattccttcctggaggcctgagggcactgcctgccctggccctcccaccctccttctcctcctcctcctcctccttgctcccatctttcagctaccatgccccttgctcctgggatcctacctttctggcaaagcccagcctggttaaatatagtgctggtgcctgctctcccatctgttgctttctctcctttatcaccactccattcactgctcaggccttggggatttccaagatctttcaggcctgccctgcccactttctcctaagccttcactgtggcctttctctaggcttattccattcactctccagaaaaccccagggtttcctccgtgttcacctcctataggctctgccttcaaagagtggatttctcaaatgttctgcaccacacagtacaccctggttccccccttccctctcatcccctttgtaactacctgattattacatttgtatttacttattttatttactgtcttatttgtctggaatttgggctccacaagggaagggcttgtcccttttatttcttcctgtgttcctagcatacaatagactcagtaaatatctgtggattcaacaaggcatggatggatgtttcaccctggccgtgact

SEQ ID NO: 40144 - DNA, 2457 bp, Homo sapiens
catccacctgcctcggcctcccatagtgctgggactacaggcgggagcacagcacctagccccttccttttcttgtctctgtgaatgaggtttggagccgagacactgaagtatagataattgcaaaaaggtatgtttttgggagatggggcattcctttcttatctctgcaacttgcatctcccagacgctcctgaggagggagggaaagccagggagccccagagctctccgggatccagggaggaaaccatggctggtggcagccagttctgtgttcagaatgtgcttgctgtcaagagtgcaggcctggaattccagcctggccacaggccaaggagggaatggacccatcctgcgcatggtgtggggatgagaagcagagcccaccacgggtctcattcccagacccatccggtaactgtcagtttcagtaactgtgaagtctggggcttttggggtggggggctgcaggttaagtcctggggagagctagagctaccttaggaccctccccttgaatgttccaggcagcaacccccctctcttatttcttcccccaccaaaagaatgcaggccactaggagtgagtgaccagcgcctgcgagttagagctattttgggcaggagagcaggcgtcggattccagtgttccaggcagggggaggggacgagggttaggcctgaggcgctttccgactccccagcctgctgtgggcgaggctctaggagatgagctagcttcccgctcctcctgtccctggcctcagtctcccatccgtgtaagggccgggcagcaaggctttcatcctttgcaattgagagaacgcttcctgattgttctcatggcttagaaataccccttgatttgcattcgaaggaaataaggagggctgaacgcagtcgacgggtggccagttgctgggccagttcgcagtcctgactgtcccttgattagtcttagaggcccaaaggcctgaagttgggcggggagcccctcccccacactactggttctgaaggctccgagtgaccgggaccgaccgccggggtgtgtcccgggacggacttccctggccgtgggggcgaggcttccataatggggcgtgacttttagggcgggggagtggctagccaatgagcagagaggtgctggccggggcggggcttgcgcgcgggtgcggcgcgctgcggagcggccgacgcaggcagaagccggcggcgcgcggacagccagtcggcgccgcgcggagctggccgctggattggctgcaacactcgcgtgtcaggcggttgctaggctccggccgcgcgccccgcccttgcgctcagcgccctctcaccgcccggtacgtgctcgcgcgaaggctgcggcgcggcgctcgcgcctcttaggcttggcggtggcggcggcggcagcttcgcgccgaatccccggggagcggcggtggcggcgtcctggggccaggaggagcgaacacctgccgcggtcctcccgccggcgctgggtgagtgcaccgcccgccctatccgctgtgcctggctgcttgggcccccatccctgctgccggctgagccttccgcggaacacctgctgctgctcgctgttcggcccggggcggggacacggccgcggacgtccttgtgggtgaggaggcggtgccgcccgggcggagccgcccctttgctctgggtcccgcaggcaaaggctcggagcgttcggctgcaaggcccgggccgcgcgccgcggcgatgggccaggccttagctcggcccgcgctcccgggaacgtggagcctgcgccttggccgcggtcgtgagccgcctgcgggccgcctccctggcttccaataggggttgtggcccagttgggccggattccgactgtggggagtcgagccccgctagaggcagggaagggcaccgctgccgccactgctctgtcagagctgctcagagccttggtgggttccgtcatccttacttgagctcctttggaagcttgtttacttactaccttttcactttgtatttggcagacctggttcacctgcgagtgtatttggatagtgtctccacagaaaatgtcgtctcggcttggaatctttttgccataaattctaagttagtttcctacaaactcaactggtaacttaaaatgcatcctttaatctctataacttgaaaagttcttatttttgtaaatcgagttgcttcagaattagttttaatggtgacgatgaagttttgactggttgaggcaagagcctgggacagcaccttcatagcgcagagtctaacttaagattctagcctgctgcttccctaaataagcgagtagaagtgactcctggcatagaagccagactccgtgaagggaaggtggtgtttataggacataattccagataaagagctggatgtgctttcaggtgttttgcaaagtctggtgtagat

SEQ ID NO: 40145 - DNA, 4829 bp, Homo sapiens
cagtgtatggacttcagtggaatgtagaaggaattctttcagtgagccccattacgtaccatgttaaaatctactcagattaaaagccatggttcagtggagaatgactgttctgggttttgaaccttgcttttcttccctttccctagaacatgtctgcacctgggtggatttatacctaggttttaaacctttgcttctgtctttgttggaaaaaaccaaaccaccgccagcagaagccactgccctttgtttatctgtgataagtgagaatttgtaagaattttccaagtgagagaagtgttcaaagtagcttttatgtttgatagaatgtgtagtgcttgcctctcaggggtggtattttttctcccacgtatttttacctttaaatctcttgctgtatatgtgaccctggctccctttggttggtcctccagctccctgatggtcctggggctccctccatatcactggtggtatttccacattgcctgcagtttaggtaggaacctgtcccatgtcagggaaaccctatctgtcccctgaactgagcacttttaattttagggtgataccttgaatcttcaccagtcacttgacttcagacctttctcatctgacgccaaggagtcaaaaaggcctgtttttaactagaagcagagacatttgccatttttttttttaatatttggagctcaaataaacaatgacttcacaccactgttttccactgtgttgagtacatcctgttggccatgatattgagcagttttaaactggttaacctttcagaaactttatattaatgttggactgacagttaatatttaacttgtcaaagtgatttttgctagattgaacctgaagtggttaatatttctgctttttatgttttccaaaaccatttaaaataggaacatggtattttattattttaatctggtttcaaaatgaatatcccattttctttattattattattattaattaattttttttttttgagataggttcttgctgtgtcacccaggctggagtgcagtgttgtaatctcactgcaatctcaccatcctgggttcaagcagttcattcacctcagcctcccaagtagctgtgattacaggcatgcgccaccatgcctggctgaactttgtacttttttgtagaaacagggttttgccacgttgcccaggctggtcttgaagtcctcagctcaagcaatctgcccacctcggcctcccagagtactgggattctaggtgtgtgccactgcacctggccattccttaaatgttttaatgactgtggcaaatgatagcaatttaacagcttaactactatttttaggtagcgtagctatttgggagtaggggctcctaggagtggtgggatgggctacctctgccaaattttgtgtggttaataatgggttgagtctcccaacttttcttttattcttgggaagcaaaaactaatagagagctgttgtttcagagtttttaggttaagatgtgtgaaagtttcagagccgggtacagtggcctgtgcctgtagtctcctatttgggaggccgaggcaggaggatcactggggagttcaaggctggtgagctataattgtttctgtgaatagccactgcacactagcctgggcaacatagtgagaccctgtcttaaaactaaaaacagaggtacttaaaaatatatatatctgaaagtttcattcactgtgagtttttctatggatgaggaaacattaagtttatggcaaattgagttggtgccccatgtgcatttgttcttcacatctgttgagtggaaagcatttattaactgagttccctgtgtgcgtgggcactcatagctctggggaggcagcctgagtggaacagagccgcctgttccataaggctgtctggacagaatggggtcataagggcctggctcctcatgggcatctcccctttcctcccaccaagcaacatcctttggttgcatcttcctgggggatggtattggtggtggtgatgggaggggccagtgggatccttacctgctgaaccttacccttggatgcctggtgtccttgccagttactgtataatgtttttgatttcctagttatatccctgatgactgatctgataaactttaaatatacctgcctctagggtagctttaatatattttggctacaaaggtcactaccttttaggtattattgataacttgacattttacttcttcttctttttttttttttttgagacagaatcttgctctgtcgcccagtctggagtgcactggtgtgatcttggctcactgtagcctccgcttcccgggttcaagcaattttcctgtctcagcctccgcttcccgggttcaagcaattttcctgtctcagcctcccgagtagctgggattataggtgtccgccaccatgcccgactaatttttgtatttttagtagagatggggtttcaccatgttggccgggctggtcttgaactcctgacctcgtgatctgcccgcctcagcctccaaagtgctggtattacaggcgtgagccactgcacctacctggcctgacattttacttctgcccatcacttgagagtcccacatatcacaactgggaggaagggagtgcctggtcattggcagatgcgagccacttactggccctaccccaactagctctggttcttctggctgagggtgtttatctgcagtgagtctcagggtctggggtctggggcagtgctgagagcttagactcagttgtgggtactgcactgggtgctggcacagaggaataaggttcccattcccactactcgaaaaagagcttctgtagctcctgtcagccagtggtgaatccagctaagacatgttcttgggctgccttgagcacttcctactctcttttagaggatataatgtgaatgagtgtgaggtgttaaattgggtagctgtgtcaggaagactaggtggctgtggccagaatcttgccagaatctttctgtggttcccaagcactcttttctcccacaagttctggccaccaagctgtatgtgaccacgactgagtatttacctctgtttggaccttggtctctgaaccacgaggaggaggatctctgtagcgtctctatctgaatgactgagtgtatgagtatgagactgtgtaaaaaaaacttccagagggacattctgatacaagtatatggatgcagcctatcagattcctagcacaggcagacatgacccttgcttataggaagccagcatcagaaagacaaaagggtgttttattaccaagttgcaaaaaatttttctccttagagcatggaaaaccaacacatagtagttggagttgtgccctgaacatcgcctgcctgctaaatgcagagcacttagtcatgcccatgaaacagacaccccatgtcgtcatgtgtccgcagatagcagacagcttaagttcctggtagggcagggtgtgtctcataactgactgtttttaaataagctgagaattttaaaattgagaatgagattggaatagtgaaagatcagctggatctaataagtgaagtaaagactaaagatgatgggaagaacctgaaaaaaaggtcctgtgtctccccattcattcattaggtgtatggtgtatgtctggcactggatgagtgctgggcacatattagtgattgcaacagatgtatccctgctctcccacaacttatagtcttgtgggggtgttggttgagctgagccatttactaaattagaattaaaatgcgtctgggcatggtggctcatacctgtaatcccagcactttgggaggccgaggtgggcagatcacccgaggtcaggagttcaagaccagcctggccaacatggcgaaactctgtctccactaaaaaatacaaaaattagccaagcgtggtggcaggtgcttgtagtcccagctacttgggaggctgaggcagggagaattgcttgaacccgggaggcagaggttgcagtgagccgagatcatgccactgtactccagcccgggtgacagagtgagactccctctccaaaaaaaaaaaaaaggattaaaatgcataagaaaggaaaaggccagtaaagaaaacactatgcaacagtaaagaaaactgtaggccaagcacagtggctcacgcctgttcccaacactttgggaggccaaggcaggaggattgcttgagcccatgagtttgaaaccagcctgggtaatatagtctgtatctcttcaacaaaatttacaaattagcctggtgtggtggcgcacacctgtagttccagctacttgagaggctgataggaggttttcttgagcccagaggttgaggctgcagtgagctgtgattacaccatttccagcctgggtgaccaaaaaaccaaaacaaaaactacacagaaaagagttgaagaaaaaccttcaacttggagcactttatagagatctgaggagaagaccctcaccagagtactgggactgctggttgttgagaaggagttcctggtggaggacccctcagacatcactggaagttaaatggttcttggaactgatgcccatagggctcctccatctatgtacatggtcatttggtcccttttgctgagtgtggcacttaacattgctggtgagcctgtggtgggcaaaagtgacccagccatctactgatggcagggagggaaggttcctgcggaggaatgggtctgaaatcctgtgagccacctggtcccatgggccttggagtgtggaacaaggtagtagagaggaaagaggacaatgt

SEQ ID NO: 40146 - DNA, 622 bp, Homo sapiens
gacaaagtaaaatagatgatgtcagggctccagattgaaggactgattctgaggattttattagtggctctaactatgttaagctgccctttacttttttggggaaaaagactaatttttgcttttagatgagaacagtgaacatgagataaaatgctttgtagctcagaccagaagggcattgactgggctgaacagtgtgttcagtattgatcctgtggcgttggtgtttgtggcaggggccaggttctgctttgaggtttgcatgtctaacagcaggaccaatgatgatcccttgtgggtgtgactctgctaaggccgcatgtacttaacttccctcatgattttttacctcaggtggggacaaaggcctggccctctgaccttaagctagaggctcttcctgttggtctgtgccatctccctgcagcacagccatgtgactgcccatgttcctcattagcagaaggccacagagcagatttatctcattgtcttagtccatggcacagacacaggataaccctgagtgtgagtcagcaccaaggctgatactccatcagagggtccatctcctgcttccctgagcagaggacacacagtcagcttgcaatgaggaggc

SEQ ID NO: 40147 - DNA, 851 bp, Homo sapiens
tctgaagcgttattttgggtactttttagggaggaatgcctttcgcaataatgtatccattccctgattgagggtgggtgggtggacccaggctccctttgcacacagagcagctacttctaagccatatcgactgttttgcagaggatttgtgtgtgctgcctcaggaggggagggctggtaggagggggggagaggtctctgtcctactgctctccagagggcatttccccttgcgccttctcccacagggcccagcccctctcccctgccccagtccccagggggtactctggagtgagcagtgcccctgtgggggagcctgtaaatgcgggctcagtggaccactggtgactgggctcatgcctccaagtcagagtttccctggtgccccagagacaggagcacaagtgggatctgacctggtgagattatttctgatgacctcatcaaaaaataaacaattcccaatgttccaggtgagggctttgaaaggccttccaaacagctccgtcgcccctagcaactccaccattgggcactgccatgcagagacgtggctggcccagaatggcctgttgccatagcaactggaggcgatggggcagtgaacagaataacaacagcaacaatgcctttgcaggcagcctgctcccctgagcgctgggctggtgatggtcgttggactctgtgagatggagagccaatctcacattcaagtgttcaccaaccactgatgtgtttttatttccttctatatgattttaagatgtgttttctgcattctgtaaagaaacatatcaaactaaataaaagcagtgtctttattacaacgccgttgcatctgggca

SEQ ID NO: 40148 - DNA, 1603 bp, Homo sapiens
ggaagaggagactcagccaggtccacttggggttggcccagtggcctccatgtaagccttaccatttctgtgctgggagggctgggtgtgcactccagaaactctgccaacatgtaatgcccccttcacccctcttctgcctgtgaatcagctaagacaagtctcctacatcctcagttcctcctctgtaaggggtgggggatagcagagaaaccagtgagactggctgggaaggaggatggtgggaaagtgtcacgggttttctgccccagagtgtgtcagcccctgtacctcctgggtagggttccttcaggccaggtctctgtgaagatggggacctagggatacctctggctgcagctctaccccacctcctgcctgcattatcttgtgggcttgggactggctagtctcccaggtagtctcaaggcaggtttgtgttggccttggggtgggaacaatggtttctggccaggctgctctgccttggttggcctgtaggttctgggggttggggggtgaccttcagtccctggcttgggatggacagtccagctgggtaggctgatcatgactcagtgcccaggaaggggcagatgggttgtcctaggacactgctcggagtgtgggcggcaggagatgcagcagctgtgtttcaaggggcaaaggggcagaatcgagtgattggtcacagaacaactggtgcctcttctgggctcaactctgccatccctggctccttaccatgacccctgctcctctgctcaaagacccacagaggctggtccgatattgcagataagagctgattcccagggtgggggggttgttgaaggtccaacaactacttggagttaggacctgaatgtgcaccatgctaagtgccaggaaaggctgtccccagcacacacttcactccctaggcctagcagcaggggcccaggaaatgaccccgtcgttattctcttgacctcaggaacttttgcttaacatctaacctgaagccactgggtaatgagtggactcactgttctgaattcaagtaagggaatacttggtcttggcagagaacattaaggccagaaggacctctggcctcagctctgccctgcctcttttgggggatggggtagtatccgctgtttagcccagcagacccttgacccctggcactcctgccagatccctgttccttgatttggatgaggactgctcaggtcttttaagctggggttagagggtcgtagacaggagagtaggaaagaaggaacatcagacctacaggaatctgccttcccacattcctctgacttggaatgactctggcctggcttggagacagtgctggtctctagaaaatgctagaggaatctgcattttctcttgtcataaaggcactgccttaggcctagatctttgagctagtcttgggataagggctgttagctggaaaatcttgtggtgtgtctaggccagcctggcctctagaatactaccaccagtttgggaccgggcgcggtggctcacgcctgtaatcccaagcactttgggaggccgaggcaggcggatcacgaggtccggagatgagaccatcctggccaac

SEQ ID NO: 40149 - DNA, 1505 bp, Homo sapiens
ggcagacaatcctgagtagcgggcagaaaccggctgtaaatgtgagggagcggggaagtaatttggaaagctctcagggtaatgcagaggcaacctgcggccccgcatcgagacagctccaggcctgagaaccatcaagtcctcttttccatccccaaggtcactctcccagggctgactgaggtggcctcccagctggcttcacacagccctgtcacaccttccatctgtgcccggggcgcttcctgagactcccagttcctcagtgtgaatcccagatggttcccatcgccatctggataaaggctccactccccagctggccttaaagaccctcacaatccggcccgaccacccagcaccctccctctccttccctctacgaccttgcgtctctgaatacacttgttcctctgccttcccaactcctatgcatacttttgaggccattctcgggtagcccctctcctctccgaggcctgtccttatgacgcctgcccgctgtggcactccggttacccggaggagagttgctactctcgagttcaccgaggcggaaagcccctctgactccaaagcagggctcagcgcgacgtcccagaggccgcttctagtggcaggtgcccctcctcacagggccctcgcagccccgccggcccccgcccggctccttctcagcatgatacaaccgcgtcggccctggacagcgcatgcgcgggcgccggcggctgtttcccagcgaccccgaggctggcgggagcgcgcacaggggaaggggggcgtgtgcagggaagggggcgcgagacgcgcatgcgcagcggcaggcggcggcgcgagccgagctgggagatggcggcggcagcggcggcgccgagagtgtgagcaccgcccgggagccgccggcccgggcgcagcgcgaccccgaccccgcccgcccgcctgcccgccatgggcaacgaggtcagcctggagggcggcgctggcgacgggccgctgccgcccggcggcgccggccccggcccgggccccggccccggccccggcgcaggaaagccgccttcagcaccggccggtggcggacagctccccgcggcgggagcagcgcggtcgaccgcggtaccaccggtccctggccccggccccggccccggtcccggccctggcccgggcaggtaagcgcgtgtctcggcgcccggggggcggtgagctgcagcctgaggccgggacccgggcccaggatcccgcgatctagtgtggacagcgaggttcgacgtccggccgcactctgaaccctgccggattggcgtgaactgggtggtcgcgggaagcggcccttcctttccagctgccccgccttggcgtggcaggatgacgagcgcagggtcagtcggggcctgcagaccgtgactccgtcacgaaccccaaattcgcttctccccaacgctcgggcctgactgctcaggaggggcttatgtaaccttaacctggtccctccgcacaggaga

SEQ ID NO: 40150 - DNA, 642 bp, Homo sapiens
ctgacaatccattaaaggagatagagaataaataagtttaaaaataaaattcaattaaaaaggtactttctgaaagtgatgagtgttataaagccagagaagcagagctatggaagcagtggggtctgctctagacaaagtgctcagagcagaagatatgtgagggaagcttgagggaggaggacgactgcggtgggatgaaaaaaggggagggaacagcactgacggatgatcggatgctgggatgggaccagggacagggcaaaggccagtatagccagggccacagtggaggggagaggtggtcaggggtaaagtccaagggggtgggagccagctggggtgggttgtgcaggccaagtaaggagcctggaatttattctaattacagtagccatagtgcagcccttagcgttcttcctgccttcaccctcccacagcgggcttcctgcggcttcccgctcagctgatgtttccttggagttgccctggaacagatgtgaaatcacaagtggtgctgaaagtgggggaaggagggacagcccatggcctggattcatgacagtacctaccttgggtttggggccagggtatggctcctgagcagggaaaggaagcacagacacagctttgttctgcgtc

SEQ ID NO: 40151 - DNA, 928 bp, Homo sapiens
acgtgtatacctcataaacatttttcttttgtttctctctccccctttctctcttctcttggctcactcccttgcctctccccctccaccaccaccttgtgactgatggtttggtttcctctctgctctgcccctgctcagcacagggagaatgttgacttagaagcaatagggggcagcaggccaccaagagcacaaccccagggcgaggtctggggaggcctcccagcccgcctctgtttactgtgcaattccagtcgttcttaagccatcaccagtgggtgtactcagagcagaggggccaggacttctgccagccaagggaaaggcccagagccctgtgcgggggaatgtggcactgtctatccatccggtggactgggcagcattcctccccagggctcttcccttgggggcctcctttcatctggggcacagccacaagtctcatctctaacgttctatgcaatgaaatataaaccctcaatgacaactgttaatatttaataaattccatgttatgtataaggagttaattgcaaacatgcaattgagaaactggatagatacactcataaaacccccacccctccccaccccacccctgctcccattgtgtgtgtgaaattctcagtctgtggcatgtttgacctgtggcaggactcgctgctgccaggtgagtcaccgcctgtcctgcagtggagcatgcacagctcgcagcctctttgcacgatttcatccattttaaatgcttgaccctcttgcttggagttctttttgcctcagaacctctccttcaggagcacttctagctgacttctgcacaagctagtgaggacctgccagaattgttgcctgagcgtgccaggctgcagggcaggcagtaaaaggcccccacataccctgcagttttctctgtccaggacag

SEQ ID NO: 40152 - DNA, 2355 bp, Homo sapiens
tatttttagtagagacagggtttcaccgtgttagccaggatggtctcgatctcctgacctcgtgatccgcccgcctcggccttccaaagtgcagggattacaggcgtgagccaccgcgcccggccggccgggacttttttttttttttttttttttttttttacttaactagttatcttgagtaagtaatgatgcggctgatgggaaaggggaagctacaggccagacaagtggactctcaatcacaagcacgccatggagcagggagccagggccctgaatgtggaagaccagccagactcaggtatatggagggaacatccttactgtccagcctctcctgatctctgttggcaccttagcccagccaatcctgtaccacgtgcacagggaacctgcctgcctaggttttttccacaggaagctccctggtcctgggtggagtctgagcccaccaggcctttcacacccaagagctcagggtgaggcctggggaggaaggcagggacccaccagctcacggtccccaacaaggtgccactgagaaggctgggtaaaggctgcggggatagatagctcttgcggcaggcctggcgactgataagtccgggcagcaccctaagagttggcacccgcccctctgccccgcaccccagggctttgcttcgcgccctccgcccggaccctggcccttctcttcttcgtctgcgtggaactccctccagggcagggcctggcactgtgtagtgaatgtcggcctcgtggtggacccgaaggaaccctacagtcagccccagagccgcgggagatccacgctgcggccggctccgccccgcccaaccctcaccctcacgctcacgctcacgctcacgctcacgctcacgctcacaggctcccggctccacattcctcgcagggctccaatccggacccgcccgccttgcccttcatcctcaaagactcattggtcccattcccctcgggccccgcccttcgcgtgcttgggccatgcccgtccgaccgcgctgcttccgccttgcagcaccccctcaaccccttctctcgtaggcccttctaccctccccgaagccgggctcccgggttccgcttccacagggccgccccctctcctccgagatccaacgcctcgcccctcggtaagaggcccaggactcagcccacggccccgccccccacttggctagtccgcccctggcgagacccctgctctcacccacccaggacttctcgctcccaggccgggtcctctcaccgtcaaggcccgccccctgccaacggtcctcacccattagccgaaggccccgcccctcacagattgccgcagggcaggggcggagacagcccgggccgtcccaggctccgcccccggaagcctcacttccgggcgcgagcacgccccgcctcgccccggcggcagagaggagactatggaacgtcaggtgagggctcggcccgcggtccccgtggtccctgcagcccgggccgggcctgaccctggtgtgtcccctgcgcaggtgctgctgagcgagcccgaggaggcggcggctctgtatcggggccttagccgccagcccgcgctgagcgccgcctgcctgggcccggaggtcaccacgcagtacggcggccaataccggacggtgcacactggtgtgtgtgcgaaggggaactggctggcgacggggtcgcgcactggggtgggaaggaagggggtgtggagggctcgctgcttgacagtgcgtaagggtatatagggagccggcctggacttggaggttacactcccacaggtccctgcacacaggtgtgtggagggggggagggggcgtgcggggcgttatcgaatggcggccatgagtgcacgagatgacggcgtaggggtagaagtcaaacctgggctcagggcgtggaccttgtagggctctccaccaacacgccatcccatacacatgccaggctgccctcaagattccagggtggatgctggggttactagggggttctctcaaagaggctgtcagctcaggctctggaggcctggactagggttgtggccaagtgttgtccagcctgcagccagggtgtcagtgtctggagacagattgagagattggggaagatagatctaggccttcctgggtcaggtggggctgggggcagtagccaggagtagccaagacaaggtgagcagtctcatgcctcccctcacagagtggacccagagggacctggaacgcatggagaacattcgattctgccgccaatacctggtgttccatgacggggactcagtggtgtttgcaggacctgcaggcaacagtgtggagacccgggggg

SEQ ID NO: 40153 - DNA, 2135 bp, Homo sapiens
gaaagtgtcaagagagagaagacctggcgccttaccaggatggagccctcctggccatggtgccggtggaactgcaccatggcttggaaggggaaatcgcagatcacgtcactgttgaggacgaagaaagggtctgcagtctcagagagtaggtcacgggccagcgccaggggcccagctgggggaaggggacaggtcaccaccttgctggaggtctgagtccctggattcaggctcagcaggcccactccaggctgggtcttacccttttcctggccttaaaccctcccccaagggacctttctgcctctactgacctgtccccaaaggctcctcttcatgggacatggagattcggattcccagctggaaggaagaggcccccccagtcaggttctaccaggatgggaagttgggcggggaccgagaataagggccaagagtctgtgcctcaccctctgctcctgtgccttcatttccttctccagcacctgcgacatgtagctcacggccaggatcacgtggtccacgcctgcctgtcagaacgcaggccgacgggcgggctcagtcagaaggtacgggagcccctgacccctagtcgctggccatccctagtcccgccagatccgaacgcgactctgatcccgacccagggtcttaccgcggctagcgcctccacttggtgcagcaagatgggcttattgcagaagtccaccagtggcttcggggtgctcagcgtcagcggccgtagccgcgtcccatagccccccactaagatcagtgccttcatcgcgcctgcggacgttgagggggtgtcccgggctctgaggtgcctgcagcccgcctggccggtccctgccgcgcactcccaacgccgtgcccggccccgcgcccttcaccaacccgcctgacagactctggctccacctcgtccgcccggtcgccctgacgccggatccagggccgccacaacacagaacgcgacaccgggtagacggctgctggccccgaactcaggccggacccggcgcgggcagtgacgcgaccaccgcgggccaatcggctgccgcgtacgtggcacggccgccggcgtcggaacgttggagcgcagcgctgcgacagacgtagccaatgagcgcccgagtacgccgggctgccatggagacccgggccgggacccgcgggtcagctggccattggcggatccaaaggcggaactggcgccaagggcgaggccttgttccctgcttcgccgcggtccagcagccgccggccccgccccacggccccggcctcgccccgagggtgaccagggaaggctcccgggccacgggattttcacaaagacagactcgcctccgtttctagcggctttatttttgacatacacgacctcagacacaagcggggcgggcagcgctaggtgtacagaaaggagcgggctcggaccgagcaccccctcccccgcacgcaaggtccaaagcaaacgcaactgcggcgggagccaccggcgcaggcctcgggcggtggagacaggcttagcttccaggaaagagcagcagagagcgattcccagaacgcgagggcttacagttccccgagaagcaaaagaaccaggtccttcccagggttctccattattttttcctcattaaaatatattttaagtcagcacaaacataaccaaattgtacagctttaaagttcaaagcagtctgcatctagggaacgtgcatgtggtcaggagtgagcgcgtgagcagcggctacgtaactagcacaggtgccaggccccttgatgggaatccccatgctcactgcacaggcccagagagggaggggtggggtccctggcaagttgctacactggtccccttcctcttttaagcaccacccgtcccaccccaccctcaggggctggtgtcagcttggcccagggaagcactatagagagggctcacctgagcaccccaacccatgatcccatgttgcactttgttcccaagttggggctaagaaggctgggcctggcagggacagggctctctggcatggggcagggagaaagcagtggcagacagtatgcacacacacttgcccactaccattaaataacagggctgggtctccaggtgt

SEQ ID NO: 40154 - DNA, 1084 bp, Homo sapiens
ccctggccccggtcaggctgaaggaggcctatctctggctgtgcttctccctgggaatgcttctgactatggacacaaggagagtgctaaattttctagcctgagtcattgggtggctgggaaaagataggggtcacagtgccaggtgacccagaagaatggtgcaggaggagagtcaaggaaataggccgggtgcagtggttcacgcctataatcccagcactttgggaggccgaggcggacggatcacctgaggtcaggagttcaagaccagcctggccaacatggcgaaaccccgtctcttctaaaaatacaaaaaaaaaggtagctgggcatggtggcacatgcctgtaatctcagctacttgggaagctgaggcacaagaatcacttgaacccagaaggcagaggtttcagtgagccgagattgcgccactgcactccagcctgggcgacagagcgggactcctcaaaaaagaaaaaaaaaaaaattgaaatagcccttcccctgactctgagagatctgtggcaacttctgcagcttccacaggactgagggcagagtccactcttcagtctatctagacatttggtatttgtttccatatgatgtcaacatgaagtcatggcattgtttttgtgtttgaaatagtctcctaagagtaaatataccacatatctgtaactctgttttgatggtactttcttaataaccctgaaatctgaaatagtggaagtaccccagaaccctctcaagctctgtgaagccttgctttacaaggtgtggatggagcctcataagtcacttaacttctccaagtctcctcacactcctaaccctgcaggatttgcagatgcaggtaaagggcttgggcttgcctcgcctagtgcccatccctggaaatagcaacggctctgactccttttttttttgttgttgttgttgttgttgagatggagtctcactgtcgctaggctggagtgcagtggcgcgatctcggctcactgcaacctctgcctccagggttcaagcgattctcgtgcctcagcctcagcctcctgagtaactgggattacaggtgtat

SEQ ID NO: 40155 - DNA, 1482 bp, Homo sapiens
cgccagaaagcaaactccatgcttatgacacaaggtgcccaccttcagctgctcctccagctttgcagcagtcagcaccaccacctgggtggacacagtgatcagcagggccaaaaccattgcccagcccttcctgctcttgagggctgcaggcctgagctgacctggaagtccaacagcaggtcctcagtgatgtcacccgtgtgcacgacgacctggacagctctgttgagctgagccaagagctcttgagaggcctcggctctgctcctttccaagtcctgctctgagaggagaaactagggagagagccagtgcagcctgagcaaagacactcctcttgggccgtgcccccaccttggtctggcagcccatagccccccaggacacttacctgggcagccaggtcggaccagcaggtggggtggggatcatgcagagtgaggctgcccacacccatcagaaccaagttcttggccacctcggcccccaggccctgcaggcctgacaccaggaccctggctccctgaatcctctgcatggcaggtgagcccagcacatacctgtggatgggaagcagaaggcaagcagttgtagatcaaggtctgaagaccatcccactctccaccccccacctcgggcctcacagctgtcttgaatacagctcctcatccagtagcttcgaagcgtccagggcatccatcctcaaacctggggctgaacagtaggctgcagcgctcagagatagggtctttgtgtaggtggcggtgacagtaggggccagtgccctgctgtagccagtgcaaacaggaaccaaggccaagcgaataagggacgctgctggtcacagctctcttcctggagaaaagaaaagtgaaagttaaactatgctctgagctggctcctgatcctgcctccagacgccagccccagacaggccattcagggtctaaaacctgggatgagttccaggactctcaagaggtgatcagtctctgagtgtcagacctgagggtgggaggcatggggcagccacattcacacatgttcttattttccttttagacttttattttgaaataattatagactcataagaagttgcaaaaaaaatagtgcagagaggtcctgtgtctccttttgccttcttaggaacctggggccagttctctgggagatggaccactgtttgtcacgaaactacgtaatagccaaaccaagtgctgtcttaagttcttttttgttgttgttgttaatttaggtgaaattcatgtaacataaagttaacaattttaaagtgtacaattcagtggcatttagtgcatccacagtgttgttcaaccatcacgtctatctagttccaaaatatttcatcacccacaacgaacataccaaacacattcaataattaccatacatgtggccgggcatggtggctcacacctgtaatcctagcactttgggaggccaaggcgggtggac

SEQ ID NO: 40156 - DNA, 2615 bp, Homo sapiens
agtccgccttggtctcccagagtgctgggattacaggcatgagccacggtgcctggcccaccccgtacatctcacagatgaggaaacaggctcaagaggtttggtctctggtccaaggcatcatagaccctcaagaggagagcccagttggaagtctcagctccgcaagagtcttctcctgccccctgctggctcttctctgactctctgtgtgcacttcagcaaaccctgtctcctctgggcttcggtttccccacttgcataaggggctgaatgctggagttaattggccagcacaaggttggggacatggtccttctccctagactccaaaggtctgcctgtactcctggctgcttcctataccccccttcagggtacaaaagggataaaccaaacccctacagcctgggtgccagaactaagttctggaagctagggggtactaacctctcccctgcttttagcaagggggtgtttttgggggctgcaatcacgctccaggggaggactgtggaagctctgggaaaccagtacaccagggtatgaactcgcggtgttggagctgagtgcgaggtgcagacggggctcagtagccagccctaggtgcttaggactctctctcaccagcccggagggcactcctcgaagcaggagcctctgaaggctccatcagaccacagaggcttaacccagtcctgagacctcagcactgattagtagccctggaggcaaaagtagatgtggagctgagcctcgaaaccccatacaccttgtgcctacagcttggggtgggtggggactgggattttgtcctcacttgaggcaggaaatcggcttggcttggcccgagccggaaggctgccaggtgtttctagcatgactcagggacaggtggggctctgaaggggaatagagccctaccttagtcaggcccacaccctagcctgcttgtccctagccccaggaccttagctctacgttcccaggcttaggtaggggcccccagctcctgaaaacacgtaagtgtccaatgtcccatggaggacaggcaccagctctgagtccctcaggcctcctgaggccaaccactatgtgggtgctgccctagtggctgcatgcccagagttgctgggcaaacactgcacggggtgattcacacacctcctgggggcctggccagcctgtgagcagggaccaagattagtcttcctggagcctggcactgcccagccgtgctgggtgtcttctgacccactgaccactaggcaagctggggagaggttctgactccccattgggaaggagaaggggccaggcaggcctgcccaggcccagacaaggagtccccaaccctagggcctctcaacccagatgtactcagcagagggagggaggctaaagacccccaacctcacattgggtgtaagttctcccatctccgaggcatcaataggagcggaaaggagtctttcgagaatgtcacagcaggcccagggccacaggatgatagctagagaatctaagaacagtagctgtgggtcccattccttggtccaatcttactgctgttgcctacacgatggctggagagaacctagatagagtctgtggaaggagcccccagttcagcacaggctttgagacttcctgcctggggtagggctccaaatacagttaaaaaaaaaagtctgggatggaccaattccaaccagcccttcctaggcctttacttatccccagatgtttatagttgcttgcacaagactagagtgaggctcccagaaccttctagaaccaagctgccattccatgagttctgggtactcccccaatcacccccaatcatggcaaaaacgttagtgaagcccaggacatgcaggctccctaacaagctcccaacttccaaggcccaggaggctccctggaacgtggtggctggcagaaggatgggggtgggtggggggagggggtgtggaggaaggggagattctctgacaactcccgtcccaccccctttggaaagcagagcaaaacaagggaaagtgaaactgttggcaagcagctgtgagtctgtgaatctgtgagcatctccctgtgtatttgtgcgtggtggtggtggtggtggcgggggtgggggaggggaggggggagtgctatttttctgcgtgtgtccctgaggatatgggtggtggacaagtaggagggaatgcccatcattctacccagcattcaggagctatgctaacagagacacggttatgtaaccctatcctcacatagccagggaaactacctaaaaaaccagaggccatgatgggcaggtaggggaaagagcaagatgaggcagccacaagggccagcctgggagctaagcctccagtgtagcctttgtctggctggtttctcacaccaccccagcacttaggaactgggtgagagagaatgcttctttccgcctgcccccccaccgcgcccccagatcccctcagtgatggaagggaagcagcctgtgttcagccatgtgcatgcagctcacaagtaagggccccttctttcagcttaccgggttggggcaaaaactgggcgactggaagaagtcgaggcctcgccgg

SEQ ID NO: 40157 - DNA, 1354 bp, Homo sapiens
agaatagcttgaatttagggggtggaggttgcagtgagctgagattgtgccactgcactccagcctgggtgacagagcgagactccatctccaaaaaaagaaaaagaaaacgtagttccgactaggtgatttcccagagttctctcttctgtttatgaggagtgggggtgggggagcctagtcccacacttggatctcagcagctgccccttggtaactggtcccccaacactagactgaggcccctgggggacaaccttagcctgacagacccctcagttagataggcctggaccctagaagacagggaaggtccacagggtgggtctgggctgtgaactatgggccccaaggctgtagataaggaggctgggggagagaggagccctcagcccaacaggatttagcctggcttggggagctatatctcctcactcccctttcagttcatacttctgtgcctgcatccccttcctaacctgacctttgtaagtgctgttcctccttccaggagcactctttcccttttctccttttgccacctaaatggcacctcctccaggaagcctttttgatccagactttgccagtcccctctcctgggtctcacagacccagtgctacactcaccccagcacagtttactctggatacttcacttcctccatccccagtgcaggactccccctccttccagcctggagctccatgagcacctgaagactgaaagaggaaatggaagtgggggcggccacacccagtgcagggttgatactgtgccctgaggtgacataaaagacactccttttccaaagcagaattggccaggaaatgaataaacacccggagaaaaccgtggcgtggttcctgcattccacagtcaacacatctaaagataggcaaggcaaaactaaaatgaaacattctcagcctggcgcacagacaggggttctggtgacccaaatcccacctccagactttcagagggatctctggtggttgggagaagacttcacaagccctcttagatcaccccacccacccctttttgggggtggtgttgcggcaaccatccgttagttctccgctgccaccgtgtggccgcgctaatggctgtccccaggctgaggtcccctgtaaggcagccttggttctcaacagcaggggtacacaggagcaccccttccccctctcgccatctgccgcctctataggagggggcagtcaaggtgtgtgggggaggtcagctaatgggactcttaagtgccaagtacaagggcacccccaagctaacatagctggctaagaacctgctcgactgccctagcacctgacgccttgaaggaatactagc

SEQ ID NO: 40158 - DNA, 1967 bp, Homo sapiens
ctgtgagcaatgtcaccaaacaagttggctcaatcagcccttgtagtgtgcctctctcactcaggcagccttggagcagagaaggccttcagaagcccctccctactgactccctaccactcctgctccctcttcttgcttggatagcacttcatttcaccttaaccctttggagcggcctgtctggaaaggaggtgccaggatacaggatgtgtggcagacaaggcccaggtgaggctgtgctatggctgcttcagcaggatgcctactccatgctgagatcacagtctggtccttgtcacttctggcggttacttccctccctgacaaagggtgctcactctccctctgcaaacttgtgcccagaaagggtggctcacccagtacaagggacaacccagttgcaccaggcaaactggtgcaaagtccggccaggcgcagtggctcatgcctgtaatcccagcactttgggaagctgaggcaggcagatcacctgaggtcaggagttcaagacgagcctggccaacatggtgaaaccccgtctctactaaaaaaatacaaaaatacaaaaaattagctgggcgtggtggcgcatgcctgtaatcccagctactcgggaggctgaggcaggagaatcgcttgaacctgggaggcggaggttgcagagagctgagatcacaccactgcactccagactgggcaacaagagtgaaactccgtctaaaaacaacaaagcaaagacccaagccccttccaggtgctgccccgctcatcccagttacctctgttgctttttgagaagactctaccggccgaatatgtgtacgtttgttggcggggcgggggtgggggagtggggagagtcctacctggccactgccccctaccggatctcgccctcccagccaaaggatgggttccagatctcgccttttgtattccccagctggggactagccggctgagggaccgcagggagacacagtcttcccattgcaaacgatagcgttgatggctggaggcccccgtcttcaagcccctccctccaaagatgacagctctccagtctctaggtgcctccaggccacgtgggctggcagtcaactcacctgtttctcagaggagtccaggacgcacagaaggtgccggtcactgccctctgccggacccatggaggggtaagggtgtccggccggggccggcctgagggcacagcttcgcggggccccggccccctgcgtacacagacatggccacagcgcaggcaccgctccctcccaccgccctcacccggccgccggtgcaggaagatagctttcgccggcctctcgcggccaaggcccagctccagccgctcagcccgactcggcccgcccccggggtgcattgtgggaaatgtagtccttagcgtttggccgcctgcggcgccgagggactggttctgggctcctagtcccagcagagccgtgggcaggtcctgacccgggtccgcgattgcctcatccggcgccgccttctaggggcctgggcgcctcctccgagtctagagtcccacacagaacagccctggactctgggcctctccgtccgagccagctagcagttcatttcaagtgagagaaagggacgttaggattgtttctcccactgattgtggaaggacagtgcaagtttgggggactggataaatgtcattagtgggcccagccacacaggctgtaaaggatgtgggcatgcgcaaaagtcgcactaattgtttctaaaaacatatttgtagccacgttttaatgtatcagtataatgctctagaacggtagttctcaactctgacggcacatagaataagccgggaagctttaaaaaaaaaaaaaaagaactaggacgggcgaggcggctcacgcctgtaatcccaacacttgggagaccgaggtgggcggatcacttgaggtcaggagttccagaccagc

SEQ ID NO: 40159 - DNA, 1693 bp, Homo sapiens
aacggacaataaggaggcctcgagctaggcaggccagggccgtacccgagctgctggcagggagcaaacctcaggaaagtcaagccaccaaaaaactgtaagcctcaatcaactgagaggaaagcacaagaggaccaggtgtcacagggcagaggccaaaccacaactcccagcaggtcacgcggagtagggcgggtaagcgcgccttcttattggatggcgatggacagcgtgctcttacgacccaccccagaaggcaagtcccctgcgcgcggggcacggcgggagtaagagtctgcgggaccggcagctgtacttcatctcccagcgggccgagcgctgaaggcagcggcgcggcgcctttgtggtagcagtggccccgcgcggaggaagttccggtgtccgcggcgctgggtcggtggcggaggctgaggagaaggaggagcgggccgtggaggcttcgccgcctaggtaagggcccgggactggaggggaggcgtgccagagcctgccagggaatagccagcagacaggcccgctctagacatcgcaggcccgcgcagcctgaaagctgtggcttcagtgtcgcggggcggctgcggcctcgctcgggaagaagaccaagcaacggtgagatgagggaggcgccgcccgtggcaggaacgccccggaaccgtcgcgggcctggggcggggcccggcgcggcagtagattaccggtcccgccgcggagcggccagctgtgaggctggggccggcgcgtggttgcggctctgtgctcctactcttcggagctgtaagcgggctgttcttgcggttttcctgtttcagatccaattctgtggcatcactaggaagggagctcttgtgcttagcacgtagcctcgtcctcagacttggacagacacaagggaggctccgctggaccggagggcacaagagctccgagcccggtcgtcggggcggtagaacctggaagcgggagagtggtctggtgggttctgcgcccgttaggcaatgaaggagaaggatgttttatcgtattcacgctttagattccattagcggtgtaaatagatgtttttctctttattttagaattgacgttaggcgaatgggttcaactttgggaatgccttttttttttttttttttttgaaggaagggccctgtttcgtagggtacataaaccgtgagcgtaattgtattttttgcatattccaggtttgcttgtgaaggtcagagtagccggatttaagtgaaggagttcagtagacatgcagacatggtcacctggttcattttctgaaccctggattgtgccctcggcttgctagtttccaccttcctattgagaaatgccaccagcgtgaatgatttaaatatgtcaccattactgaatttgtgaggtctctaacgagaggtgtcaagagctggtgcgtgatggtaggactggcagtgaagaaagtaactaaataatatgttaccattttggtgaaacacaaaagttgaatttgaaccttgtctcagaaactagcatctaactagatacctaacctgcaggacaggtcccaggtctctctggatagttgtagcacctttccttatagaattctattaccaggccgagcctggtggctcacacctgtaatcccagcactttgggaggctgaggtggggagttcgagaccagc

SEQ ID NO: 40160 - DNA, 1454 bp, Homo sapiens
tttgtagagataggatctcactgtgtttcccaggctggtctcgaactcctggcctcaagcgatcctcctgcctcggcctcccaaaatgctggcttgtgagtgagccaccacttcacgcacggtctccttttgaagtagaattagacaatgttttacaccgtgccagtgaaagcaaactgtactctctacggcgctagtagcaaaagcaaagaattattaacatgcctaataggagccctaaaaactaatccaggtctgcaaaagccgatcgacaactctgtagtgatttagaagagaattgcaagacattaacacagagcgtcctaagtgacaggatggtctggcgaccacatttcccggcagccctcgcacagccaggccgcttcgaggattggacttctccgcaggaggcgggtgacagggggaggggataagcgtgaggtactgtgggtaggagacggccgtcggcggaggcgccattttgtgtagccgccgaaccttgttggaggttctggggcgcagaaccgctactgctgcttcggtctctccttggggtaagtgcggcggctgtctgtaacgacggtaggttcttgccatttgggctggcccccaagcctcccttgtcagctgccggaggcgactgatcagctccagccggttctgtagaggggctaaattaccccaggcgttggagggccgcgcccttccttgttgccagctctgtcagtttccagagggtgtccagccagctcagccttgggcctgcttctttctggctgtgactttgccccttgtggatacacgtcccctaatcttcagcccaacggagcagtggagccgtcgcctgtccctcgggcactccttgggagctccctggcagtctctggccgccatcccccgctcaactgcaactgaatcgccctctccgaaaagctgttcggtgatcgcccatctgcgggtttggaacctcttgggaggcgggaggggcatgtgcggggagggcaggccggacgctggagtcggtcgagcaggccgtgacgccgccatctcggccgcgagaccccacggaggtgggtgccggcaccgcccgggagacaaggggcggcaccagtgaatatgccccgggacttgtttccccccagtggttctttttcatttattaatttcaacaaatcgttgagcattcgctctagactaggcttccagagactactggaactgatttttcggacctcgcgctcatcgaacgcggtccagcagtgtgatgtcttattaccaacggggggcggggggccgggctgttcactactcagtggtttgtagtcataagaactggctcaagacgtggtggttattgttacctaggaattaggtcgtttctagctttgctcttgtcttatgcgatacgttattaatgtagtagatttcagtcagctcagtatcccagcttctac

SEQ ID NO: 40161 - DNA, 658 bp, Homo sapiens
gcgcggggtgcccaccgcctgggaaccctgagcccggcccacggacaggtggagcgggggcggggcggtggctgggcgggtcccgccccgggggtggggctgggcgggccgggcggggcggggctgcgctatgcaaatgtcgcccacgggcggccaattgccggcgctccccgcgcggctctgagcgccccgtcccgccggcggccgcgagaccagagcgagcgaacgaaccgcggcggtccggagagccccgagcgcagcgcaggacctgggtacgccgcgaggaaccgtgcagcccagcgcggccgcccggcccgggtccagcagccaggagagcgcagcgcttcgaagccgagtgcgcgccaccgcccgcgccccgcgctggggaatgcgccctcggcgcgccggccagggggcgcccgcagcccaccccaggggaggcggccccgagcgcccctgagccttcccatggcccgggctggggcccgggccctcggctgctgacgcgcccgaagcccgcggaaccggttaagccgcggccgcggcgccgatcccggctgaggcgcagcggcgagaggtcgcgggcagggccatggccccggggggccgctagcgcggaccggcccaacgggagccgctccgtgccgccgccgccgcc

SEQ ID NO: 40162 - DNA, 905 bp, Homo sapiens
ccaaggctgcgcagggttggagcttggggattatggctgattgggttcctgggggcttaatggctgaagcttccccttacccggagtgcccgtgtctgaaggcgcccacttaagcctctagcccctccccctgccattgcccccaaagtgccccctagcccaggggatgggtaagggcatgaccgagccatgcccccagccagggtataaataacccctggcgggctgtcccagcctgggggggctccactggcagccccacttcctctctggccacttcccagccctgggggtgggggaatgtttactttcctgttgtcactgtgggtgagcagccaggcgggtgagcggccaggcgggggactccgagtggcccaacaacaggtgcgggacaggtgcctgggccgccctgcccaggacttcagaggcgccgctggacaggcgggtgaggccatcgccaggcaggatcggccctttgatccctcggcgtccctgcgtcccagcggttggccaaggtcatcacctgcattcccttgtcaccgcatagtcagggccaggcagggcaagacctttccttacccactagtttctcagagtgaggtcctgggaccagacatgggctctgggtcagctggtggaaccccctgaccccagcccacctctgccccaccttcaggctgtgtctagggcctcggatcccagctgttctccccctccaggtgccttggggcctggcccaggcctctcccttgactgccccacctgtgaaatgggttaccagctggggaggggagatgagacatgtgtgacccccttggtgagtgcctcatgtgtggtaggacatgtgtgcgccatgtgcatgcctgtgccacgtgtatacatgcatgcactcttctgtgtgctgc

SEQ ID NO: 40163 - DNA, 494 bp, Homo sapiens
atggagagttccggccctgtgaccagacggggagagcatgttcctggtctgggtaggtgtctgggagggttgggggctgttctctgagtaggggtcctgccggggtctcaggagcagctgctgcccctaactgcaggttgggtgaacccatcactgaccctggctcatgcacgctgcctgttttctgattgttcaacacagtctgcctctcagagcagctgttgggcactgtgccacctccaagcctgggaaaggccctggggtcaaggggcagacattatcctccccctcttggcaagtgagaaggtcccagcctgatggcacagcccaaatcactctgatgaggaaagacagggcctgccctgggggagcctcagatgtggtatgttagaggcaagtacattattaaattttcaggaattttttgagccagttgttaaagacaactattattaaaagttaaggccaggctcagtggctcacacctataatcc

SEQ ID NO: 40164 - DNA, 2523 bp, Homo sapiens
gtgctagtggaggacgacgaagtggtgcgtgccaggcagggcctgtgttccaggggggcgaggaggagctgctggtccctggaggcggagaccgcgcgctgggctgggggagggcacgggaggggatgcctgtcccgggcggcctgaggaggcccggaggcgttcagcaggcccatctggggcagtgcggggagccctctgagagccagctgagcgggaagccccgcgtgcccgggagcccagagagcaggtgctgcgggtcggacgctaccccgggtgcccaacagctgctgccctcctcagaaccgcatgcacgagagcctgcacctgttcaacagcatctgcaaccaccgctacttcgccacgacgtccatcgtgctcttccttaacaagaaggacgtcttcttcgagaagatcaagaaggcgcacctcagcatctgtttcccggactacgatggtgagaagtccgcaaggccgccaggcggcgcccccgccccacgatcgcggcgcgcaccccccgcacggggaaggaagggctgagcagagtgagagctcccgcccccgcaggacccaacacctacgaggacgccggcaactacatcaaggtgcagttcctcgagctcaacatgcggcgcgacgtgaaggagatctattcccacatgacgtgcgccaccgacacgcagaacgtcaaatttgtcttcgacgctgtcaccgacatcatcatcaaggagaacctcaaagactgtggcctcttctgaggtaggtcgctgccctctccaggctcttgcctcaataccccagccccgtccagctccccaccccacaccacggccctggagcctcacccccaaatcctggagcctactgcctccaggccccaccccagctcctcaggctccaccccaccgacagaggccccgccccaccccacaagtcccacccattgaatttcttttggccccgccccaagacctcaggtgtcacagcttccagggccgccccaccacacacaatgcctaaacccatttattttgggtctcagggatgctgactgggtttccttttcacaggtgcctgaattcatgcgtgtcagtcaccctgagacctggtagccctagctgccttgcagccccaaaccccaggaccctatcagccccctgggactccctggccccaacctgccacctcaccaaagctctgagccctgctagccttgaggcgcggaccctcccccatacctcccacagtatcccagcgcctcatgcccccaaccccaagccctgcccttcaccgcccggctgcactggcctctaggactcacagcagccagccccagctaggaacgggcaggacttggggcagctgaagctcacggtgactcagcagtgcccaactgaccaatctcccgcagctctcctgcccctgggggcccacgactcacctggtgggcctgggctcagcaaacagccctccctcccagtatttcatcaaggacagggaatatccctcccacacacaggccagctgctcaccctgccacctccatgtgacaagtttgacacctgtctacccagagccagtgactgtccctcccagcagcctccaaagggtccaaagtccaagctagctctggcctgtgtggcccccacataaataaattagtggggagggggcagacctgggggcccttgggtgccagagtgagacacagcaggacccttccccaaatactaggctcagagcaacctccagccttctccagcaggatctgctccctgtgtccttggacagcagatccacacaccacttccccacccacacacagtaccctgggctggttggacaacaggatggtgtgttaaggggttaagggagggtactgttgacaccagctatggccaatagctgggctgtcctgaggggtggctggggacagagtccagctcccttggatcagcccagaggattcaggataggacaaaggccctggctgtgcccaaaagggtctacctcaggtggggttacaagcaaacctgggtgaccctcttgtccctaccagcagcttctcttgccccttccattcagggttccctggcaggggaagctgagagccatggctgaactatcagggacaaaggcccatgtccccacatccctgctccctccttcctcatccagcaccaaatctttgcttatgtccacaggccagggcctgtgctgcagtcggggacaaggagcttccgtctggcaaggccggggcacaatttgcactcccctcagctagacgcacagactcagcaataaacctttgcatcaggctccagctgtcctttcttggtggaggacttaattatcacaagtcatgggcatttattaagtgcccagtgctgggttgggcatgaagtgggaagatggcccctcccaggaagaagtacctggcctgacaaggtggggcactcttgggggtatgggaccaactcatggcttttcacgggagttgaggagagaggagctgtggaaaat

SEQ ID NO: 40165 - DNA, 760 bp, Homo sapiens
aaggcgctccccggcattcctgggcaagggacagaagagccccagcaacatgcaggggctggaccctgccctccagggggtcccgccccacatatgcttctgaccctggggtctgggattcagggtcggtactcctggatcctgtgagttggggacgctgcctggcctcaaactgccctgtccatggccagcaagtgtggaggggccctgagtctcccagcctgaaacctgcttagctctgctcaccataccagtgtaattacacgctaaggagcaggatcaatgggtgcctgatgcctgattcacagtccagggcagaggatcagagagcactggcccagagtcagcacagtggccacaccccagtcttgtaggtggtgcatttactgtggtcacctctagccaccaccatccctgcctggcctgcaacctcaaggtgcccctgagggcccccacagccttcagctctggctctggcgggactaacctggcccggccaccgaccagagattagacaagactggtggatggttaatgccactgacgtcagggcctggccgggtggccactaggggtttgggccctcccctcaggcagtagcatagtccatgtgaccagggttcattaagctgcttcagtggccagagaagctgggggccagatctcaggagagagacagcaggcatgtcatggctgtgggggccaggccttagccacgaggtcaccagctctgggggcccaggccggggaagggctggat

SEQ ID NO: 40166 - DNA, 1607 bp, Homo sapiens
tttggggggtgtgggcaaagcatttcaggggttaatgtgacacccacagacctcagagagaatctgctttggactgaagcattccccccacaagactcaacggagtccctctggcagctctgctctcccacctaggggctccctaacgctcaggccgcccctttgctcccggcctgccccggcccccgccattcccccgaccagcccctcctcccgcgggccgccagggattggcgggcggggggcgggccgggggcggggccgggcgcccttcatcccgcgtcgctgttgtcgctgttgcagccgagttcagccgggagcagagcgaaccgcaccggcccgagcggagcgccgcacgttcccaaccgcgaggccaggtaccgcttcgggagttcatcccacccgcacaggggaatcgggtgggccgagccctactgtccaccctcctgtccgtagccgggctctgggcagctctcctctaccgtcctgacccgggcaggcgccccagcctccggcgagccaaagccccgcgcgctccaggcgctggtcttggggacctgccagtcgggactcagcgccgagcttaagcagggccctgggggtaccgggagggacacgtcgtcgccttagggcctctcggcggggctgcgaggtacagcaggaggtcggcggcacccggggctgggaccacaggacgccttgttgggggctcgggcggcacaccacaggcttcctgaggcagggcccatggggcaggctggagagggcccgaggggaggacccaagaggggcctggagcagtccctggagcgctgccccgacgggcgcctgacaggcagagcagcccggctggcacgatgggaatccgggtatatttatctcggctgctccggacaagggcttgagggcagatcgggccgggccgcctgaggggccgcggggtacatgctggtcccagagccggtgccatttgcagaggagccagcgggcacagcgggcgcagggcgcgagtggctccctgacctgaggccggggcgccgtgcgagctcctccccacctggcgctgggtagggtgtaagttagagcccgcgcagcgcacggcggagagaaggaaccaagacttggtttgcaagagcccgcccccgcccggttggccccttcgattggccacagcaaatgcgtgcgtttgtttacacccaggcagggggaggccaggggagggacctgcggggacccgcccttttccccccacggggacctgagtcctgagtccaggtatgggctctcaaacaggtctgagaaaggctaagtcaaaggctcttgagccctgaggaacaccatggaggacttccccactcatgcccatccttccttcagcctgccaaccctgtcctttcttccatgaccgactctggccacagagctgcccctggaaaaggcccttggacctttcaccccttcctgttctgttctgtaaaaggtctgggatggggctcatttccttctggaaaggaagcacatccctcggggctctcagtctgggggatagaaagctaaagagacccaaagatggttccattttgaatgggggaaattcggcacagcca

SEQ ID NO: 40167 - DNA, 2435 bp, Homo sapiens
acatgggtctagaggagggtaagaggtgtcttttccctgttctaacaccctcctcccacctgctttgtccctagacccctgaccccagcaatcagctaccaccaattcctatggctgtgccttgagaacatgcagtccaaatgtctccattggatctggtttccccccttactaacaccttctcctagtagggggcatcttccctctgaagcctggaggagcaggtggacagaggggtagctgtccagatgggtaccagacttaggaggggggcaccctgtctcagccaaggaggggagtggtaaaaatgagctgagctggaactgggggcagccctcacccctgagcccccagggataatcacgatggaccctcaagccaggccagctgtctctctcctgagatcttggcggaggtcaggtagcctgggcctcagcaataagctccagagggtctgtgcctccactggtgcaagtcgtcaccaaggtaaaaagagtgcgaaggcctccctgtcaccagctcactactgccgacccagacccacttatgttcctgagcatggggaaggaaagcaaggctcagagtcctggggactccaaggaccttgatccctgggcagagagctgtgcttcctgtagctgcttgcatcagccgccctgaagtggcctgggttcctggggctcaaaatctttaattagccaaactcaacacctgccgaggtgtgcctgatgaattctcaccaggtgatgttcgcgtgggcgggcgttacctgctgcgccatccctgtggctcctggcccctcctggcccttatctcccaggaaaacaaacaggtcccagggcaatggcctgggccattgatttactgcccgggttcacactacatccatgacagatgccattctgatgacctgcccaaggccaccgtgatctccccaccctagctcctggccactctctgggcacccatggactgttctggggatgaaggctttggggaggctcctcactcatccccagctttgaccaagcctcacgggacccctagaggacagggatacactgaggtcctgagctggggagtaccctgcccctggccacacagtgaggcagggccaagcccagccctagagggtctactctgggctttcaccacaggggatcaggctctgctggcagcctttcttatgcaggagcccttccctgagtttaccccgattccgattcccggatacaaaggagcctgggaggccacaggcctgaggggtaggagctgtcaaaaatgggctggcagcctcagggaatggctgggggctccatgccaggccagtgctaatcctcaccctggcccccagcccccagccctcctccctgccctggaccaaagtccagactcctagacctggcctttacagctgtatcaggtttgtctgttgccacagaaccttccttcaacgcttacagcttgcctcgtactgcacctcagggcctctgcctatgctgtgctctctgcctggtacactctttcctgtttgacaccccagggtgcctactggaattttagtactggcttcgcacctcctccaggaagtcttccttgatgcccccatcctttttttttttttttttttttttttttctttttttttgagatggagtttggctcttgttgcccaggctggagtgcaatggcgcaatctcagctcactgcaacctccacctcctgggttcaagcaattctcctgcctcagcctcctgcgtagctgggattacaggcatgcgccaccagcccggctaattttgtatttttagtagagatggggtttttccatgttggtcaggctagtctcaaactcctgacctcaggtgatcctgctctcctcggcctcccaaagtgctggtattacaggcgtgagccactgcgcccggcacccccatcctcttttttgagacccagcattatgtggctcacactcagttgcagcaggagctatagagtagtgatgagggtgctatctggggggatttgtctcttccaggctggaggtcacttaaggagagatattctaaatcctttctgggatctcaggcctgcccaagacccagcaatgactgatcatgattgagtaatagctaccaggccccaaaggtctaggcccagctactgcaggggggatggggaatctggagctcagacctcagacacctcccacggcccatgccacagactgtggtctccctggaggcagtgcctggctgctacagaaggatattagggcagagaagggtgttttgtccagactgccagctcagcacactctgagggcctgtcccagcctgcccagggcagggggccgagagagggcacccccagctgagtgcaggggggactctggagtagctctggacgccagcactggcacctctatacccagg

SEQ ID NO: 40168 - DNA, 1076 bp, Homo sapiens
tcaaactcagcaagtcatccgagcccccacggcgcagcggccctaggctggcatgggcgatgcggagctactccgccctcaggaagcaggcgaggtgcccagcgggagaatcacccacatcaccgtctaatctctgctgtgaagtggaagcgcgagaaggagggagcgtctcatgacggagggtgtgaagacgctaggctggacgaagcagaaaggcgggtgtcactggggacgttctgagggtaagccgatggcggctatcgcggaggagaccctggcgaggtggggccccgcgcggggcaagggggatggggtgccacagagggctagttgcaagaggacgcgtgacggctgcagctctgcggagaccgggcctcgacggccaaggagtggcaggtcggcggaggcgggggccaggcccggaggcagagcgagacaggagagcaggcaaggcgggggccaccgtgagtgggggccgcgaggcgggggctggggcgcggggaggtgctaggtcggcctcggctcccgcgccgcaccccaggcccgccaggaggcgccgctgccccgcgaagccgttccggcctctcccggccaccgaaatcccgcgctccggcctagagaggccccggaagaggcggtgcagcgcaccccgaggccgcttccggcttcggctctgcaggagaggccagaatcgggggaggacgccttgggcggggcgtgggtgagagaacctgggggaggtgaagaactaggaggttgcactgggagtggacaagggggaaaataagaattagggaggggctgcggtgggcagggccaagggcaggtagcaccctgcaaggttgcaccctgcgcagctctcggtccactgctgagcctcctggctttttacctcgcaaaatgccgtcctggtgaggtccctggggagcccaccgctggccaagacccaggacagggcaaggaaggcttcctagaggtagagaggtgcacaaaggcgggaaagcagatacggggacattgggagcccctttagaccgatctttaggtgtctgagccacgcccatttggagggaagg

SEQ ID NO: 40169 - DNA, 3524 bp, Homo sapiens
gactagctgcaacccagagggagaaggcggtaaacccgccttaagactgagaaaaccgcagtccagaaaggctcccgagttcgtagatcccaaaacaagtttactggactcattaactttaacaaatgacaaagacacgcctcctccacctaactcgcccaactcgcagaagctcagagggctggttcctgctctgccctcgagggcaccggatccccaccctcgggttaacagatccgccctcccggctgtccagcaacagagctcccggcgctccgcacccaatcacagcccggtcccgcctgcagcccgcccagtgccgggtcccggggtttggaaccacccctattgccttttctccgcgtggccccgcctgcagcccaggcccgagcctgggctgcgcctaacttcccccttcgctccgccctcgagccaatcaacagcctctaatctcctctggccccgcctgcaagcccgccccggcccagtcacaggcttggttcgcccaggccccacccccggcccgccccgccgtcggtgcgcggcggtagggaaggcgcctcccgcagtcgctcggaactgccgacccgagtgcttcccgcagagggctggtggtgggagcggagtgggtcgggcggggccgagccgggccgtgggccgtgtgggggccgggcggcggccgggccggcggacggcgggatgggctgcaccgtgagcgccgaggacaaggcggcggccgagcgctctaagatgatcgacaagaacctgcgggaggacggagagaaggcggcgcgggaggtgaagttgctgctgttgggtgaggccgcgtcccgcactgggatccttgattcccagctcgaatccccagacaaggactttgacctcccagactagggcttcaaactcccagacccgggctgtctgggaccccacacctgggccaggaccagggttgaaaactctagattggactagacctttgatcctgcccagactctagaccagacccctgtctcatcccagaccccagacctccaaatccagtcaacagtgccccaacacccgcggtccagtgccctgcttggccatccccccttgctaactagcttcacagaacttcagagccccgccatccttccctacactttgcccaaacccccaggatgcccgccacttgttccccaaccctcaggctccgcttgttttcctcacctgcgccttttattcctattgggcatgagcatcccgcggggcccctgccaggccccccacccactccctccttctccttctgtgccccatccctagtctggaatctgtatcctccacctgtgcactctgacccaaggaacctctcgagtgggaaactgctcttgagccccatctccagctggaaccccttcagcgagccctgctccctgcttcctgccctccagatccttctctgcaggcatcactcccgaaaccctctgctgatcctcccctaagtcctcttacactctggccttccccagatccctccacccttcctgcaccaagtgggctgggctaggaggcgggagccctgggttggagagggcctaggctgccttatgcagaacccccacggggctggattgaggctccactggtcacgctgggggagggggccaggcctcaggcttcccaaggaggctctatgttttccagtttcgaaggccagtctgggaagtaggagagagagtggaggagttagggttgtggccgcctccaaggccagaaaagatggtggctgctagaggagtggggggaagtggaagtggtgagacagccgacatattgctgcccctgcgggtgagcccaggagatctgctagtaggtgctgggctgcccacaccccttctgggctgcaaggcctgggatgtagcctctgagagttggggggcttgttggatcttgggaccctgtgaagggggatggtggactagctgaatgaggagttgaggggccagctgggggtgggccagggtgcctctgagcatcccagctggccttttgcaaagacggtgggcctactggctgtccccatccagcttcccactggaagtaggtgtggtgcccagtggcagtctaattttgatttgggggttttagagttggggggagggaggcccttgcaacagcgcagcaccgttgtaggctgagaagtgcatgggggggtgtggcccctcgacttcagaactgtcatagggctcccaggctgtgaaaagcagggcttttcgtgctggacctgtggccgaggaacagcatgtatgtccattatgggccatctgttgactgtccctgcggacccggcctccggggcacagccttggaggtttcaaaatggcatccgcttcgctgctgcctcagggaggaagagaaggggcgggaaggggcggcggcccagcctcctgggctgctttgcgttgggcgcttgcctcttcctgtctctgctgtgagtgcggcagcggcagtgagtgggtgtcgacgcggcggaatgcccgtcgctgctgctgctgctgcccgacgggcctggggagggcacttccggtaccgctgcctcccagtgcccagccaggagtctctagacagcctctccccaggcgattgcagttactgtggtggccgaggaaatgcaagactggaccatagagctgggggaacgcagggcttctggctagttttgtgtcccgacaccagaagggtcccccatcccaccaggcctgctccttggagcccagctcaccttttgggctaaggcaagtgagacctggtaactcctcccacactgggctggcagcagccaggggtgcagggtctggcttagcactttctagcctgggaagttcaccctggggtcctggccttctggcctttgcttactctgtgaaatgggcttcctgggttttggccaaaggagtgccccaggtcaggatggggagggagaacaagagcctcctggtggttcttgttggggatgtaggttgggagtaaagaccctgcagtgtgctgcaaagggctctgaccaagctctgcttgatattgatgacccagtctgccatggctgcctggggagggatcctggcttgagccatgcctttcccatccaggtgcaaggtggtgatgggagcccagctgtggtaagttcagagttctgggcgcctgtcccatgtagcgggagactttgtccaggcaacgggactcaggttgggcaactgccagccttccctcccagccagaaccacgcctgctgccccgcccgcacaccgcctccctcccatcttgggtagccctgccagcaggcaggcacagtccttgtcaccagggcagaggctgatgtggtacacacaggcaagagagtatttcctggcaactttgtagggggagcagataccagtcctattctagggatgctccccactcctacccagctcaacgtgactgatcagctaggcccaggtggaatctgggaccctggtctgggctcttaagggaaaggaagc

SEQ ID NO: 40170 - DNA, 836 bp, Homo sapiens
aggccagagggctgcctggtgctagggtgggggtgagagcccaagggccccccagggctttgccaactggaagggtctaggaggtgaacacctgcccaggcttatctttgcactcctgtgggccattctagtggcggtcactgagttggagccagtccaggtagctctgtaccttgtcccaccccagcaaccatcgggcccaagatcccagagaaggtggtgccttcgagaaggattccaggccccttctttggccacaggaagttgtggctgggagaaggacgctggcgggagggctagcaggaaggcagagggctgctcttagattcccgagcggccattgctctccaaagccggaaggccagccacaggctgagatgaatgcctggaaatgcagcaacagccccgagatgagctcactctgggtttcccctgctggggggcggacaaaggatccctggcctcagcctaaggattctcccctaccagcacccactcactgggtctagggctgcattcactgggcctgtttcccctcaggtgataaccacagctgtctctgattgagccttgactgttgtgtggagctgaattcttcattatcttgtcatatttaatcctgtgaggctgggactgatattacacccatttcactgatggacaaactgaagctcagggactttatgcacttaaacagggaacagagatgtcaggacatgacccatgtagtgattaagcgcctgcctccaactgccatggccctttgggagtctgtgctggctggaagtaacggatcaggcaggacagcaggcagacggtgtgggtgcgtgtgtgtt

SEQ ID NO: 40171 - DNA, 1702 bp, Homo sapiens
cacggtgaaaccccgtctctactaaaaatacaaaaaattagccgggcgtggtggagggcgcctgtagtcccagctactcaggaggctgaggcaggagaatggcgtgaacctgggaggtggagcttgcagtgagcggagattgcgccactgcactctagcttgggtgacagagcaagactcagaacatttgctgccacctgttctgtgccaggcttcaaggacacagtgatgagtggagcaaagtccccatgcagtgacaatttagggtgttagtgaaaaggtagaggtggagttggcccagagacaggattgctgagctctgaaggagagtcagccaggggaggagtggatgaggggattccaggcaggggcatagcatgtgcagcatctcggggtggtggggagctggctgtgcttgaacataggctgtggaggctggctggagggggccacaggggaggaagttatctgggaggtgacaggtgtgtgtgtaggtcagagcccctggacctcagctgtgaccctcgctggccctaggctgaggaattacaaggggtcccaggaatcccagaggcatgacaagcctgcaccctttccacagttctgaactccttccctgtggtatctgtcatgtacttggactggtgcagggtgctgaggaccccacggggaacaggatagacaggctaatagccattgaggatggctgcaggggacatccacaggctttggatggtgtcaccagataggctgctgtccctgtactctagccttcccctatctctgcttaagccagtcccctctgactggaacacccttttgctcctattgttcatccaatcctgagcctacccatagggtggatttcagcaagggtgggtgggaggaggaggagggtcttgcctggctgtgattcctgagccctgtccaagccacatgaacagcctcctcctacccttcttacatggcctgaatgctcttgtgaatatgtaccccctacaggagctgtggagtcacagccaaatgctgtgggggcccccaggcctcaccactgcccctccctgagatctctggcccagccaccagcgagcttggggtcagagcagcagggaccttggtgcccatgatactcaaaggaagcaggaatagagccacctccaggccacctcctgcttctccatcatcctctttctctattctccagacattaggcacccactgtgtgcccagcacagttttgggagtgaatacaggccctgttctcccagtcaggtttaagccttgatagctccccctgggaatgggttgcggattggaacaccacaggaagcagggctccttcagcccctcttcgcagcaaccctccaagtgtgcagcgagtcagggggtccctggggcgaacccacctgttggggaaaagggagaggctggtgtggaatgcaccatggtacctccacattgaggactctggcagtagggggcggggcatggtatgcgggtcacagcacatgcgtcatccttccccatggcccttcctgtttttctgttttgtccctgctactctgagatcatttccctctggcctggtttggcctgggtgctggtgggagccaagggccagccccagcagccttgccccaggaatgaaaagtcagctctgggcagcagcctggaggcctgggaccagcctccagggcatggc

SEQ ID NO: 40172 - DNA, 1427 bp, Homo sapiens
tgaagggtagtgacaggtggccatactaccatgtgatggttgccccaggctgggcctggagagctgcagatcattgactctgaagatggaaggctccatgaggctgtgggaagggcccgcgcgtttctggggaagggaattgcagatggcaaggctggtgatgcttgtggggcgggccctgagtgccatcgaggcgcctggaccttctcccgggggcagccgcggcctgaacgtgtgggggcgggctcgcggaaaggctggcctcgactgggtggggctccggcgttggcgcatccgcctccggccgccagggggcgccgccgcccgtgctctgccctgcctggctggtcacagaggctgacgtcagcgggtcccgcggaggccgctggacacaaaggcagctttgtgaggcggcgacggctccgcggccgccccaggacagagcggcctgggcagagggcgggccggggtcggcgccgcggaggcggggagggagggagggttggagggttgagccagagacccgggaccccgtccccgcacacctgccagtgccccgtagcttcggccgccggcactggcaggagatgaaaggctgctgccgcccggtcggaaggacatcggcgccccccaggcccggtccccgccccagttcctcgggcctttcctgctgcccctgcctgcgagggccgacgacacggagaacaggatcctgcgcccaacccaggtccccgccttctttcagaggcccaggcctggaccccgctgagccgcagatgtgcgagcaggagcgccagagccccgatgcccgcccagcaggaagcgggcgggagatggttccttccttctgtcctgagggggaaccctgcacagagggaccattgagggcctggcattgtctgcctaactcacccagtgcctccctccctgggtgggccatgcggggccttgacaggattgccctggtgccgtcttggcagtgggtctgggtgggatcctgggggcagggcttccctgagtgcagacagctaggcctccacctgccccggcctcccacccaggctcagatttccagggcataaggctccattgtcccagcactggtggaggcggcctgtcaattcagccttgtgtttggtggttgggaaattcccagccatggggggctgcaggcaggaaggggctgcccaggtgtcctgcaccccaactgaagggactccatgaggttggttcctgggcatcccctgctgcctggagctgtcccaggctggacctcaaccattcatcaaccctcaggagcagttgggtgaggagcaccagaaattcaatgctccctggcgctgcatccccagagccctcccagcctaagaagccccatctttctgtctccacgcatggagaactgcagctgtgaggcccaggaccct

SEQ ID NO: 40173 - DNA, 1011 bp, Homo sapiens
cagcctgggcgacagagcgagactgtctcaaaaaataaataaataaacaaataataataataataataataataaagagcaatgggacccagcagaaggatttgaagcaggagtggggagcatctggttatgctagagaggaagattcatgagtgaaggtgaaaccagattacctcatctccctcctaccccagcctaaggtgctgggcgacgtgtggggcgagatcggaggctagccgggcttcacgcctgcgcccccaggtagccacggtctctgctgccccctcgcggctgcttcttgcctcgcaggccctgatcctttggattcggtccgcgcagagcgccaactggacatggtgctagaggttgggtggtcagacactgtgatcccgggtgctgtgcccgcactacgggaaggggaagcagcgcgtgggtctcgcatcaggaggcaaggccaggacccgctgacccatgcctcctgccgcggtcagagcccaagtttgtcaaggtattttggatcccggagagcgagaacccagacgacgacaaaatctacttcttctttcgtgagacggcggtagaggcggcgccggcactgggacgcctgtccgtgtcccgcgttggccagatctgccgggtgaggagtccctgggccacacccggcgaccctgcccctacccctttgcctgccctggtctcgccctcatcccctttgatcgtcccggcagaacgacgtgggcggccagcgcagcctggtcaacaagtggacgacgttcctgaaggcgcggctggtgtgctcggtgcccggcgtcgagggcgacacccacttcgatcagctccgtgagtgcgggagtgggtatggggttggggaggggggcagcggcgcagactccgggagcccccgccgcagcggggctgtgcgccctaccccagctaggccccttccccgcagaggatgtgtttctgttgtcctcgcgggaccaccggaccccgctgctctatgccgtcttc

SEQ ID NO: 40174 - DNA, 3041 bp, Homo sapiens
gagccctcaccaagcccctgtcaaacttccacccgctctcaccaaggctgtcctctgcagtggtgctgagaaggctggggcattcactggcggtgctgcgggcctcactggctgcctcatcgtcactggaacccgagtcagcttgggcactgctccgggcacctggagaaggtggaataggacactcaacttgcctctactgatgagggatggctgggggtacctcactcgacctcataatcccaaaagatagaatggtgtccctctcagagatgaaaaaccaaagccaagggtcagttcagtagggctggtgcactcctgtgtgtggggtctgtccagggccaagggctgacattggcaaggttggctgctgtggcagagttttggacagggtgtgatcaccaggctggccctacttctaagaactactcacacccctcatctgcaggacaaagtccagcctgcgcactggcctctgctccccgccaccttttttttttttttttttttttgagacagagttttgctcttgttgcccaggctggagtgcaatgacgccatctcggctcactgcgacctctgcctcccgggttccagtgattctcctgcctcagcctcccgagtagctgggattacaggcatacgacaccacacccagctaattttgtatttttagtagatagggtttctccatgttggtcaggctggtctcgaactcctggcctcaggtgatctgcctgccttggcctcccaaagtgctgggattacaggtgtgagccaccacgcccagcctgctcccattttatcttactattctacctgccggagcagcccagccttccctcattcactccactgcgctggggtccctccagctgccaggtctttgtacaacttgctctcttctccatcctctcaggactcacccagaagcacttccccccaggcctccctgagtcctaagtctggggctgacaccactcagtgaacatgttccacaccctattagatgtcccccacccaaaacccaccatggtggtgaccagtttaaagttgtgcctaggtattttcctccttcctgtgcccggccctcctcccttccccctcaagaataaaaataaataaatttgtgcgtggtaggcaccccatcccagcagagtaaacatatgtgtttaacgcattaagataggctcctggtctaagctgataagcgagtcccaagactgcctcaggctccaggatactcagctaccttgtggagtcaggcctgccaagctgccaaggccctaaccaggtagcttcccaacagagccccctccctctcttcaccggagcaggccaggactcccgccaacttccttgaccagtccaggaaaggatcagggtttggcaagaggactggcttcctgccctgtccggtgagtttgtccacccagcaggcaactgaggcccggaggggctggccgggtcaccgctgggagcgcggactcccaacaggcagtgggcagcgagctcaagttgggcacgcacgtggccaatgactgctggggcacgtgccagcctcggtagagttatgggaagctgcgtggggctggccgagggggttccccacccagggccctcgagaacaaccaaggggatccagcaggacccccgcccgccgctcatacagctgtcccgcgccccccaccccactcacctcctccacggcgctgaccacccttccggagcgtgttgcccttacgggcgcgaggcatgccgggaaccgggcgcggggggcgcggggtcagggacccggtgggtgtgggctccaggccaacgagacgccggccggtgcgctgcgctgagacttggccagacgacgggagccacacgccacgcgcgccaccatcttcgcgaggcgccccgccctgccaaacaggtcgccgggaaggcgagttccaggccatccgattcaggcccacatccacgaggctaaaactactaatcccagaggcctgagcgcgcaggcgacggcggctagctgcgcgtagagcaccatgggaatggtagtccacgcctggggcccaccagccgacgacgcgctggctgaactatgcacccacaatgccctgcgcgcgccccagccccgcgtcgggaacaagtgcacggtggttaactccgaagcgtccctcagtggagcaccaaggcaggactggcttctcagggcacttggcagcgggacactccagacgagacctacccctgcctgggtctggggaccatgggaagggcttagagcttgggataacaggagcaacagccaaacctcaggcagtggaaaaaagtgactttatgatgaaagagtgcagacaacagcttagcactttaccgaccttcgccaagattttttggggcccatctgcccgtgcacggcccatctgtgacctctccatgggcttagtgaggtgtaggcacaaagccctaggctggcagccctaactagctggaacctgactctccctggaactgcttccttgccatggaggactcacatgatctcagagggcctctggttttataagcgttttttctggccccttctacccctcagggattccaagggaagcggggtgtgtgcttgggagggttgactgtaaactgaatagagcaagagtgggacagagtagttccaggactggaaaagtggcagcagggaaaagaagaggcagtggcaggggccctggctttatactgcttctttaggcccaggcctgggctcctggcaggtggggccagcccagccccagtaacagtggcagctgaaggacttccaatctccaaggctgccgtctggccacaggtgtagaaaggcttccatctgtcctggatctcgccgggcacagcgcccgtggccatggcaccgctggtgactgcaggccatcgctgccctggtcacattgatcacataggggcccaaggtgtccaccaggtagtcatggagatgccagcactcctcctgaggagaagggaagatatgtgtcaatatgcctgctctataa

SEQ ID NO: 40175 - DNA, 3024 bp, Homo sapiens
gggtgtccaacggtcaccaggttgggggcccagacctcctgtgcccaaaccctactgttttcccatcttaaccaaggtcctgccgtccggcaggtctatgctgggggttttctagtcgtgggcgggcagctgagccccctccttctactcacctgctccagagggggcctcctggctccccttacctctcctgagcttgaggccaattaaacactggtcagtaacaggcacccccctcccctcacctcccacaccattcacagggctgtaagcccctcacctgcatcagccacctctgcagcagccgcaccctttggtctagagggaggaagccccaggatccgcccctagggctgagcccggggcttccccgcggccttaaccccttcagtgccgaccccacccactgtgggcggggctccggggtcctcagagagtggcttctccgtctctcccgggcctcggtttccccctccctcctagtgggtcacaggctgtggagcttttgggaatgaggacttcgagagctcgactctgtgggcaggtgtggctcggcatggtctggaaacgaacgactgacgcggggagggcgtgcagggtggcatggccacttggggaccgcacgcgcggggtggacctacaggcagcaaatgggaagggtgcggtactgacatgttgatgctggcctctgggatgttccgcgtcctagctccgcacagctgggtatctcactcagtcgccacctcggactcctcggtccgacaacgttggcccccagcggtgcggcggatgttctgcagccgtcgcgtcctgcggcacgccacggcgttctaaggcctcccagcacccgcgcgtcgccgcttagaacccgcccctggtttgcgcgtcacaacacccgccaggcgccgactcagtctctaccctggctccgcccctgctgagccccaccccatctccatttgagtccgcctcctccccacccggccccatacaggcccctcctccttctccttgcgtcacagcttaggtcccgcctcgatttggcttcttccaggccctgccccagcccagcacgtcacttcagccaggcgcaggccccgcctccagctggctctgcctccgccagccccgccccaggctctgacaagtctagcttcggttcccgccggcctcctgccccaggacagcttggaaacggtccgatcaggtggggcttcctcttgaaatttgggccccaccctgggaagcagccgcccttagactgacgtcagatctggtgagagtgacaagcctttcctgtgccctttggataccggggcctggacattttaggcgctcagtaaacagctaagtaaatcatgactgctttatttgctggactggtgcctctcagcagattcaggggtcgtgcagggctggttaccacaaactcagtaggagtgcaagggctgtacccccggagctagacagcctgggtttgaatctcaacttctcccttttcttgctgtgcaaccttgggcaacgtgcttactctcaatgtgagtgactcagtttcctcatagcctcattgtgaggaatgaataagtccacataaaacgcttagcacggggattggcaaagagtaggcactcagtgaatgtcagcctttgtgattgctgcagttcaaagactggctcagtgtctctggaggaattgtctatgaccttgccaagtagatgcatatggacatggaatgaatggtgtctgctgtggttctaactccttatgccactattccagtctgtaagtatgcatgtgtgtgcagggaatatgcctgtgacagtggctgagtgtactctttactgtgaccatgacttgtatgactgtgcatgtatttgaggaagccctggccagacccagagtgcattaggttctcaatatgtgcaactcagtgtgtggccaatcaccacatgctcttccgctcacaccacggtgcctgccagccagggtagcatcgacatttgaactccacagccatctgtgcctgatcttcaagtgagagggcaccccgcaggctcaggggcccaccaccaggcgtgagctggatggagaaactggcagggttaaggaggaggagggctttggggtggctggtgcggcggacacagcggccatggccggagcacagggcttgactgcagagaagggccccactggtcacgttcaggatgaagggccccagtgtagtgtccatatactccttgatggcctgacatgattcctaggtgggaagggaggatagcgtcagggacaccatggccatgtatggacccacccagggcactgaggcactcacctgctggtcagccaggactttgcaggtagaaagggtaagtcagggtctaccccgtcagcttaatggccccacccctcccccacccccaccctcatgccaggcctaagctcaccttggttcttgtattttcccagctcacccagagcaccactccagctgccccctgggccgcactctcccccaggctgtgctccagctcatcctgggaaggagacagcacagctctgtggggcctccttcccaccatgtggcagactgctggaacaccattagatgggacaaataattcataaccttcacctggggctgctctggccatgggaccagaggcaaactgcttcctcctctagcctatgaattccatgcagacagggactacatcattccaataaatgttgaattgcctgtgcctggcacagaacttggcaccaagtgcacactcaatggatgtgcccatgcgccaggcgcggtggctcatacctgtaatcccagcactttgggaggctgaggtgggaggatcacctgaagtcaggagttcgagaccagcctggccaacatggtgaaaccccatttctactaaaaatacaaaaattagccagacatgttgatggcatgcctgtaatcccaactacttgggaggctgaggcaggagaatcacttgaatccggaaggtggagggtgcaggagct

SEQ ID NO: 40176 - DNA, 2104 bp, Homo sapiens
ggcagagcttgcagtgagccaagatcgtgccactgcactccagcctgggtgacagagtgagactctgtctcaaaaaaaaaaaaacgaagaaaatgtcccaaagctaaagtaccccaaggctggacctaatatctgacaaggcaggttgacaaggtgggcaggttacagaagactcaccaggggcagaaagtggtttgtcgtgtcatagaagatctggacatagggcagcaccggcagattggggtcaccagcagccacagccacacggaatgcctcggccacacggtgttgcacatacatctgtgacttccctgtgccctccagcactgcgggcatgtagatgctgggatagagggcacggctctggccccacagccaccctagctggtcattttgggcacggatgcctgatgggcactggccggtgtagttggggcttagaaagtcatagttgtagcagtcagggaagccatagaagccccagaggccgcgaggacgcagtgcccgccccagctggagggtgcctgccatccaggcccgtgcagctccctggaactggtcctgggctactgcctccacctgaggagctggccaatcagggtgctgtgcctgtaccagtgcccgtgagcgctgccggtaaatgtccttggtgtcccagttgaaggcccagcgtgggcgccatgcctcccagtcgatgactgccagccctgagaagtcaggagcaggtatggcagccaggatgtcctggaatgtgcgggccaggtgggcaatcaggctggcattctggggcagaccaccaaacacaggctccccagtgggcgtgtagtaggggtaggtgcccagctgggagctatagaaaattgtcatgtcagggccgcggaaggtctgccctgggttggctaccacatcgaagacactgacatccacgtccacaccgtgcctctccaggcaccactgggtgtttgcattccagacggtggtgaagggccggttgggtagcaaggggcccctaaagccttgggccatatcgagtaaggtcaggaagagggcgcagatgggaagcaggtgggctgccatggcacgggactggtcgaggacaacctggccaggggaggcagagctgagaacaggttgcaaagtctccgattcccccactgctcagggctggggggctgagcccttgcgcattaatccaccgctgctctggtttctgttaaacattgacctgcagggctccaggagggcaggggagacgcatggaggggagcatggccactggagggcacatccgagttgcctctcagaccaggcctctgccatctcccacaggacttgctctagcctaagctcgcccacccctgcttccccatgagccactgaggccatgacatatgttctgggaagagtggctgacagccaggccctcagcccccaggctgacccgaccaagggggggaggccttcctgtctcttccaccagaaatcctggcagccactggaggaagatccaatggcctcagtgaccaaggacaggtcaacccagccctcctgtacacccgccagtctgcccgctcgtccctgctgaccttggggctgaagggccttatcctccaaatttcctgaccccaggatgggggcctaagcagggcctggccagattccaccccagctgcaccagagactcctggaggaaggagccgctgctggaaattctgagcttttgtagggggtcaccccacccaggccaggggcgggccaaggggcgggccttggattaggaggccaggccagccaggcatcagggctacctctgaatccctggcaaagggatcttggttgggggtggggctgggccaacagtggcccctcccacgctgtcagcactagggcagggctttgtggccttacctaggctggaggaggtgggcaggggcagaccctgctgggcaggcctgtttgtgacactggagaccgggttctttcgtgtcttgtgctcagggagtgttctttgtccacgtggctgcatctgacattgatgggccctaggcactttactttcgtggatcttttcctccttaaaaaaaatattttaaaatatggccag

SEQ ID NO: 40177 - DNA, 2115 bp, Homo sapiens
tgtgggcacgtcccacgctaccacaaagggccggccagtgaagatgggtggtgctgtgggcttgagctccatggcccatgacaccgccagcaccagggccaatgtaacggtggggcctgggcctgcccgcatgctgggggctgcaggaggtgtcacctgcctggcaccagctcaggaactggaagaagggttggggagaacaagtcagtctagggaatactggaagtgcccacctcaagcccatctatgctcccaaagcccatgctgtgtgggggcactgtgctcatggctgtaataggtttgagagaccacaggccactgcagggcagacaaggcaccctgggaactcactgccagaagcacagggctcttttctggagcaggtagcctgtggctcggcacaaatctctattaggtctgtgacccttctaagaactagataatttgggctcaccagagtcacatatatgcctgcataccatccagtacatggtttcagagaaccctgaacagctgatgcccaccctgtacaccgtgaagaacccttgatccagagaaacgacagcatttgggtaaagcagggaacagctcgtcaagaggctacgaaactggaaggaacgctgccgggaggcttctatccgtgtaacactcgcccggcagaagagtgaggctctccggactttctctcgagcgctgacactctcccggcttggaggaggccccgtagggacaaaggggcagcggacctcccacggcggcgccggccgcccggcccttccctccaccgccaccgggaatgcgcgcgctcgcctcccccgcccggccgctcagggctagagcgcgctccgccgggtctttgtgcgggaccccgcccccgccccacacgtggggcctgcgcccggtcgggtgggggtggggtttctgggacgcctctccgcgagcacccccggggattcagaccccagcccaaggggagagagccgccaggtttgcaccgcccgccctcacctcgcgcggggcgccaccgggaccggcgccagggccaccgccatcccgggcccagcccagcccgctccggccgttcgcccaggcgcggcccggctcagcgcctctgctggctccgcccccaggcacgctggccctttaagactccagtgcggaggtgggcccgggattggacttgcggacggggcgggaaggtgtggtccacctttctcggtgccggtgcctcgtttcgggctcgaagagccccaggtcctctgcagagggacgtggccgcccatttaggaccctaatgcccctctgagccgggctttctatgggagtctcagccacgagcgccagtcagcctgaaatgtttcccctgcagcccgaggccggtggttcagtcctcccagctccgcggcgccgccagccctttaaagagacagtgtgagggacaaggcagggggacgggaagggggggggggggaataggaggaggcgttgccccgttcggccatcaggaggtgctgtggtactccgaggttggcagggggcagcaccagatctggctctgcaccccctaacgtagacgccagccgtgggtcccctttgtgtggaaaaagggactttgacctgaggcgacctctggtctcctggagagtagtgccccgcctcccacgaatcaggggcccccttctctggtccgccgtctaaagggaggccccgccccctgccagactgagggaaggggccaagcaccgcttcttagccggcccaggaagggccgaggcagtcgttatcctggcagcccggctctgggtcgcggcgtggccgcagggttggggtcagggaagctcagaggggtctaggaggttggccgcccctctccctgactcgcatcagggcgggacagtcatccctgagatcccgtccttttctgcccagtctctgaggtcctttgggagcccggctccctctcaaccccgaggaggcctccattccttgcagcagtttctggctggacctccgagaaagccagcaagaggggtctcccagggcctccatcccgtatccagcgccccctacgctccacaggcctctcccggtggggggcaggcttagaccctggcg

SEQ ID NO: 40178 - DNA, 1428 bp, Homo sapiens
ccaccaaggccagttctcatccttgatttgttcagcaagggcagccattctaatatcaggactttgccttcacccaggacttctagagtgggcagggtggtggcctgggcatgttggtctcactccagaagatgctgctggcccagtgtcaaagactgaaatagcagaagcctaagctaggaagaagcacaaaggaatgaaggctgcgtctcccctgaccccacaccccaggtggctggtgaattgccactgttgggtcttcctggtgtctacagccaaatctctagcacagggagcgcccatctccaggagcccactagagccaagccaatctggtactcttgtgcgggcctctgggagactgggctgggggttgggtgggtaggtcagcgctctggatctggagaacataactgggtgagggtcttttttcctcagcctcacccccaatactgaggcctatccctgctttcccagccactacgctcaaaggttcagccccactactgtcaggaaaagcagcctaaacagagggttattatccccttggaataactgggggggaaagggaggctaggacccttcagtatgcaggctgagccggaagggatgaaaggaagagatcttatggaggtcttatggaggccctagcttagctttaccgtgcggaaggtccgaccagtgacaagcctcaggcccactcttccctagggagactttcagagtggccaggccgccaggagaccactgcccggctttctccacccccagctccaatgaggctcaaaatatgggggtcgtcctggcttggctgtagtggggtacagcggtggaagttcccccgtggcgcgggacgcctggccgcccgcctgttccccccgccagggtggaacccatgcccttacccgcggcgcgtgaatacgaaggggggcacagctcggccccgaggccgcaccaaagcttgctcagctcctgctgcctctgagccgccgcctccggccgccgaggcgaagggccacaggccccgagctttggacccgctggcgcccatgtcagggccgccggcgcatggcgggccccgtggccgctctgctcacaccgcagtccgcactaccataacctgccccagccgctgatcgcaggtgccgccgccgccgccttccgcaggctcggctgtctccacggaaacctcacttccgcttccgcacgctgccacctctgattggctgttgctcaagtcgtgggggcgggaccaatgggcgcccttagatgctgggcatcccagcatgcgttgcgagatcccaggtcccagcaagcgcgatctgaccagctgggacagctcccaccgaggaaagtggtggccgtgagtcctcccggtcttttgggtgtatttggcggctctgacgtcccccaacacctgagttcagg

SEQ ID NO: 40179 - DNA, 3056 bp, Homo sapiens
atgttggcctggcaggtctcgaactcttggcctcaagtgatctgcctgccttggcctcccaaaatgctgagattacaggcatgagtcaccaagcccagccttctttcttttttttgagacagagcctcaccctgtcacccaggttggagtgcagtggcacgatcttggctcactgcaacctttgcctcccggttgaagtgattcagtctcccaagtagctgggactacagtcacacaccaccatgcccggctaatttttgtatgtttagtagagatagggtttcaccatgttggccaggctgacctcgaattcctgattgcaaatgatccacctgccttggcctcccaaagcattggcattagaggtgtgagccaccgtacttggcttccttttctatttttgagacagagtctcactctgtcactcaggctggagtgcagtggcacgatcttggctcactgcaacctctgcctcccaggttcaagtgatccttctgcctcaccctcccaagtagctgggattacaggtgtgcacctccgtggctagccctccttttcaattggttagtgtcttgtggttttcccacctttccacagtggaaaatggctcaggactgactgacatgaagacaagcccaggggtctacactcaactcaacccttgcacccaagctctgggctaagattttggcgtgctgagcaccacccattttgtaaggaattttgtaaaattttatctgaagcatcactcacaactccactttctttacttaaataaggatttccgccccatttctgccaggcatactgagcttcacagtccctgtttctttttcctggtgcctaggcctggttctctgagcctggtggtcacaccaatggcatctggcacacagttctccgataatggggatacctaggaggttccgagacaccttacagtcctgggttagtaacctggatctctttttccacctctttaggcattttataatctagctttcccccttcctgtgggtaaagtgctcctgaatgcttatggtccaaaacaagacttctttcctatctattcccaaatctttctccagatccaccctagaggaagggaacagaatcttccacattccagcagctggtgacaggccagaacagggaagaggtgagggctcagctggctccatacaggagtgcagatggaggagcaggatctctctctgcctctcaagttttcctaaacatacttctcaattcctggcgaggactcttccctctccacatcctcccctagtctccccaaggagggagcaggagcattcgaacgcggaaatcgaggtgctagtccaaactgctcggtcggctttagtcatagctggataatgcccggctcaggtctaccacaagccatacagctgctttttccgtgttcaacctgtctgtgacagaaaccaagggggccccggcacccagcatctaggcggtggaatcggggtcttacgcacggttccgcgggcaggtccccggccaggacccgcggggagccacgtagccaggagggtggggctgcccaccgacccaggacgcggcaacggaccggggagggcggagctccagcgaccgcttcccctcccgcccgccggcaccccctggctcccacctggtcccggcgcggcctgcgagctagcgaggttcgcgcggtgaagtactgctcgagctccgagtccgagtcctcttggctgcagtagccactgctcgtcgtgctgctccaggtcatttcgaaagaaggcgcctccgcctcgcccatagccgtacccgcccgtcccccagtcctgcgcgtccgtagccgccaaccaccgccccggtcgcgtgcgtgcgtgtacgcgtgtcagtgtgcgcgtgcgcccgggccagagccgcgccgcaaccgttaagactgaaacgtagatcgccgggatctagctcttgtctcattggggcaggaacgccggggcggggacacgcacgcttcgcccccaggaatgacctcatcgctccggagctccactcacagaccccacctaccacagggaacgggggcgggtgccagcgtccgggcaagcgcacaagagtggcctctggccggaggcgagggcgggaaggtgcgggaagtgcgcgtgcgcggagcctgggtcagcctgggcccgggtccgcttgcagcgggtggagtacttgcggagccggcaatccaggctcccctcccagcccccgcgcagaattagcctctctgtgccgccgggaaatcggcaattagaacgctccttgcgcgcggcacccaggcagccctcgagaatgcctgcactgtggcctgcccatcctcgcccttcccatacgccctcggccccgcgctcaccacgttcgtgtcccgctccaccgcgggttcccagcccaggtcccggggcccgcaacagtccaggcagacgagcgcgcggcagcggtagtggcaggtgaacttgcaatctgcagagaggcctggcggtgaggcggaggagctccaggtcggggaaatgtcccggagattgaagggaagccccagggagagggccgctgctcgccaggctccgcaggcccgacctatctcagtgggttacctcacactgctacgcggactctaatgttggccacctgggcgtctggaaaccggccggaaggccacaggcagagaggcctgctcaacagttggatctctatcgcctagcacagaacttcccctttcctcattggcaattaaaaaaacaacaacaaaaaactgcgtcttgcttttgtcacccaggctggagtgcaatggcgcgatttcggctcaccgcaacctccgcctcctgggttcaagcgattcttctgcctcagcctcctgagtacctaggattacaggcgcccgccaccatgcccagctaatttttgtatttttagtagagacggggtttcaccatgttagccaggctggtctcaaactcctgatctcaggtgatccacccgcctcggccttccaaagtgctgggactacaggcttgagccaccgcacc

SEQ ID NO: 40180 - DNA, 1680 bp, Homo sapiens
cgtatgtcttccctgccacattgggagccgggggcctgggtctgactatcctctagcctcacagttgtctgcgaatgaagcagcatgcctgcgtgcagcacgggaaactactgccttcaggcagccagttgagctctcgagaacgtccctcttcccgcccagtcccgcgagcccgggtggcacctgataggtgatcttgggtcccagcgtggggtggaactcgctgaagaatatgcattcgatgcggcagccgctgcccatggcaataaccgggcccaggcccgtagctcctcgttcctcgcgcagaggcgtccccacctcctgtgaacacttgtcagagacagcctcgaggcctgtgtcgctggggcacgcaagcttgccaatccctctgcccaatggcgcctgcgcagcgcgactcagaggcgtggctggggcgggggacggctcgtcccaggaagtcctgggtgggtagacgtcgcacccggaagtaaagcggctccgtgacggagcggcggtgcgcgcggcagggcccggagtatcccgctttctttggaggaaaccaccgcatcagatctgcgctgcggcagaggcaggcaagtccctagcgtggaggggcagcatgctggcagcacttggggaggcggtgcgctaagggattcacgctgtaactgggaccgcagcagggaactacaatttccatagtgctccgcgccctcccagctggctctactgccggcgacggcgtggtacacgctgggatttgtagtcttacatggctttgcgcctcctacctggaaggcgggccagcgattggtaccagttcagacatgggtacacgttgacaggccgccggccgtcgactggcatgttgtgaccattcctggtgctggtcttggtactgttctttcctaccataacttattggaagagggtggcattcctgccttgcagccttttctccagtgaggagtgaacagtgggcacctgagatcctggcccacgctactatgctttcaggctacaaccactagcacggctgacgatggccctttctgcggagaccgagtcacacatctaccgagctctgcgtactgcttctggcgctgccgcccaccttgtggccctgggctttaccatctttgtggctgtgcttgccaggcctggctccagtaagtagaattcatagctgacttctgggaagggaagggccactgttcctggggaggaagggcagtgggacttccgggaacaggcctggctggttgagggaattctgtgctggagcgatgagtgaggtggagcaggtaggtatggccagggcacacagaattcctggtttgtctttccttctctgggtgctccatttggctgcctctcaggaggtgtaagggaaggagggaggactgccagaggagtggcaaagcatggcctctgatccaggaagaggccaggaagagaggataggtgtggggtcagcttgttgcagagcaagaaggggctcacagtttggcagcacctccttgggtgatgggctgctggtattcctcaacccttaaggattggtatggctggtttcttcttgcctcagccccatgaggcctcctcttctcattccaggcctgttctcctggcacccggtgcttatgtctttggctgtaagtagtgggcctgggcagttct

SEQ ID NO: 40181 - DNA, 1501 bp, Homo sapiens
gtagcgcttcaccgtcttctggcatatctttaccttcaccaggaggctgtgcaccaagttcgccagcaaacccaccacaggctgcaggatctcagggaagaaagtggcgaaagcaaagtggtcagccatgtcccctcggccccggctatggcgctggtagaagcgaagatatacccaactggagagcagcccgaagccataggaagccagcgccgggctctggagcagcgtggcgagccgcagcaggagcagcagcgccagcagcagcatgggcatcacactgacgcgcacctggggcactcgcaggaccacacagtcccccatggtttgcttgagtgccaccaggacgccacctaggaagcccaaggcgccgtggatacggacagtgaacaggtagaccaggttgaaggaagccatgtaggtgaggaggtaggcgaaggcccccagcagccctacagacacattcaccactgagaagaagatgagcagctccaaggccccccagaggggctccagcaaacgcccggccaccaccaccgttgtcaggctgatggccacgtcccacacatgctgctccatcagcccatgggtggccagggtccagatccagaagttgggaggaaagaggtagcccggggtgaccgccaggcagcctgtgtccacggcgaaggagagcaggtagaggaatagtaccgccgcacacagagccttcaccaccacgctggcgctggccagaatggcccccaagtgctggcgggcgcctggcagggcacgttgcatcttcctggcggctgtcggcctgagaaaagggtctggtaggccaggggcctccccggggcctcgtcctagtccggccccgatgggaggcccaggcccggcctagtcactggcctatggccctggtaaaggatccgcttccgatcgggtggggctctggtcccgaggggccgagtcgggccttgttgccgggccgcagcgtaggcccctcgcccgggacctgagggaaggccctggacggctgcggcacgcccgcctacccaccctgtaggccccgtgccaggctagcctggttggcgttgacctcagggctgggcctcctccatccactgcgaggcccttcggttcgcaaggggactggtgcctcgttctgtacccgagtcaagcctggtcagctcccgctcggcctggctcctggcttcgaccgtacctcttctctcggggggccgacaaacaggggtgctgcgcctgcgcgtccccggcggcagcgggctgtcctctaagcgcctgtcttccggctcctctgcatgctgggatacggagtccttggttgcagccggggaagagttgaacagggttctggctagaactacaagtcccaggaggccatgagcacggaccggtcccgttgtggtgagcgcggggtgtgctgggagttgtagttctcagggaccgtttccgtcggttctcaggaggtgggaagggatgaattagcatctctaac

SEQ ID NO: 40182 - DNA, 948 bp, Homo sapiens
aggggtcggcaccgcgaccttcgagaacccgcatgctgttctccaccaggtctctcagtcctccctgccccaatccccatgcccgcctccgcgaccctgtgatgcctcccttcttgcacaggagcagtgacctcagcacttacttaatcctctcccggcgccgagctcagttggagaggctaggggtggtagtgactggcaggaggccggggcggggggaacccccaagcccggcgtctggggctgcgggtccgacccgagatccgccctccctgcaagccccgagccgctggccaggcccgctactgcgcaccagccgcatccgcgagcgctggctctgccggcctgagctagggtgggtagggccgggacccacggcggaggtggggccgggccgagcagcctcgggggatccccgaagctacagcgccttgcctccctgcacgctccgcgcccccggcctccgattggctgtcgggcctagagcccgcccagaattggaccgttcgcttgtcgctcgggtctggctccacccccagagggagcctagaacctggtcgcagtttttagagactaccctcaccccgtggcctgcgccgaagttgggcggaggacagtgggtggccaggcccttccgggccagaactcgggacccctgccagctacccgtgccaggacagactcaagcccccaaaacgcggatggatgtacagaggagacttggggagagcactggactgggagtccttgggcctgcactgaactctggctgactttgtgaccttgaagaaactgcttttcccttcctgaaccttggctttctactcagacgggtcctctggtgtgagggttctagacgaagatggggaatcttcgtctacagaagttgagagtggggtggatttattattgggcaccccgacccaggcaagtctacatataccctca

SEQ ID NO: 40183 - DNA, 1577 bp, Homo sapiens
ggcgcaactgaggtccagaggtcccaacacctggaggagttgccaatagagtcaagattcgaatcggtaaaagagcggcccctggggtctggccgccagtcggccgaccccctggtgggctcgggccactgacctcggtagggtcacgacactgggactggaccccaaagttggaccagccttcaacactggaacccgcccatgcacagctccacccggcccccaggctaagatagaccacgcccccggacatctggtccccgccggaacacccgggccctctggtgacacgccccctttccggcaggctactgggctccgcccacacacctcccggcctggttcctaaacgccagctcggagcaatccccttgggctggagccaaatccctgctgtgattttaaggaagaccggcaggtccgggcccccaagggtcaaccccacacacatccccgcactttcctgtatgcaggcctgcgagcgtagagggagtggaattcacagcctccccacccatccgcaggggtctcctgggaggaacccaccagcgataggaacactgaagctgggctacggcgtccgcccgagccttttcttaaaggcgccgaccccggaagcggggcgtccgagggagcgcgcgacgggccacgcacgtccgggcgtccagttcggggcagcttctccggctggtgggtgggtggggcagcctttcaggcaggtatgcatgggaggtggggatcggaacggggtgtttcgactgcaaccgcctggagacctggccggtaccattctccatagtgcagatggggaaacagggttggagagagggggcctcatctgggtcgttaacaatgcggtgcgtagctgtgagggagtttacacttctgacttcgggccttggctcctgggacggcgcactggtgcaagagccgcttctggagtctggtggactcgggttcgtgtcttgcctgggacagtcttttttttcttttttttgagacggagtctctctctggcacccaggctggagtgcagtggcatgaccgcggctcgctgcaacttccgcctgcttgaactgggttcaagcagttctcctgcctcagcctcccaagtagctgggactacaggtgcgcgtcagtatgcccggccaattttttgtatttttagtagagacagggtttcaccatgctggccaggctggtctcgaactcctgacctcgtgatccgcccacctcggcctcccagagtgctgggattacaggcgtgagccaccgtgcccagcttgcctgggacagtttctacctgagtgacgctgggcaagtcgcttcccttctctgaccctacttgtatctgaagatgtggcacttagcaggtgcttaataaacgctagtttggacttttatctggaagcaaaggggaccgctgattttaaaccttcagttaaacttgcttgtgacctctttaaatatacaattgtaaattttttagttggtggtttacgctgatgtcccggattataggttaaattaggaggaaattttcagcatgtacatccatgacagtacacacacaatgt

SEQ ID NO: 40184 - DNA, 2005 bp, Homo sapiens
aggccccatcagtgctctgagtaggctgtcatcagaacaaagggctccactgctgacaaggtttgagaactgctggcttgaggtgagaacccctttaacctctgcgggacagcatgtctttccctatccaccttcgattcttttctcttttttttcttcattggctccttcttagtggattctcttctctactgccctgggcttcagcctttgtgcagtactctcgatgccctgaacacacaccttccctttgcccaggcggtgcaaacaatccacttcttcaagctccaacacaaatgctgcctcctttaggatgcctgctctgtgctctccctgcctcccctagcccatacctctgctggcaccttctgtaccatgccttcagaaaccttcttatccccctcatctctggggccccctgtggatctggcatacccaagttcagtaaatgtctatcagtaagctgatggtacatgcattttctagaatagagctgggacttcccatgtggcccacatctgacctggcagcccatgtattccggtcattagggatgggaagccatgaggacctggccttctgcccgacccaggcagccattcaagttgagcaatggccacttcgaagactcaagtgcacctgatccctgcgcaacagccacaccaggagaacaggctgtccttggcggcagtaggagcaggcgccaggtttcctggagctcttggcttcagccagcccccagccagagtcctggctaggacagtgacctgatctcctcctcatgaccttctgccctggacaagccccctgaactggatttgggactgtcaaagcaactctacccctgctctggtaggctgaacagtgaccccccaaaatggcagtgtcttaatcacctaaaccttaacatgtgactatattaccttcacatagcaaaatggactttgcagatgtgattaaggatcttgagatggaaggagtatcctggatttttcaggtaaactgagtataatcacaagggcctctgtaaaggaggcaggagtgtcagagtgacggaagaaaatgtatgtaacaatggaagcagaggtcagagtgatgcaattgctggaggaagagccatgagccgaggaatgcagacagcctcttctcctctggggcctcaagaagaatgcagtcctgccaataccttgattttaagccctgtgaaactgatttcagattgctgacctccagaacagtaagatcataaatttgtgttgttttcacatgtgtgaaaacacatgtgtgataatttgttacagcagccacgggaaacgaatatagattgtggtgcccaaattagagtgctgctgtaacacacgcctactgattgaagtggctttggaattgcaacgtggaaatgggcagaggctggaagaattttgagagtcatgataaattgccttaaccacctctcttctgataggtgatgtggccaggggaactcttcctcaaccttcagacctaaactgcccaggccccccctttttttactcatatttggagagaggtggccctttcccagagtgagaagactgaaagactgaccagcatgggtcccagaagggagtgggtgaggaatgggactgggatgtggggagaaagtgcaaggctggcctccatggcccatctccagagactgggtccagagaggacctcagagactgggaccaagcctgttcctgctctcctgtggagttatgtgactggcccaggaccccttgggtgtgtgaggatgagcaggggccctgtactctctgggttgcaggtactgcatctgtgaaatgagcacagcagcccctgactttgagctaatgggcctggcccctccatgtaagccataggcctgagcagagctgtgtcaccattctgttcctatggtggagtggggctatccctggggttctcaacctcctggttcctaaaactgaattggccaactggtgccctcagccctgtccctgtc

SEQ ID NO: 40185 - DNA, 1034 bp, Homo sapiens
ccatctgaagctctggtagctgtgggaggagagcaggatttcccccgcttgcggaatgagtgggtgccttcccctctgaggtaattggctgtacagcccccagcctctgccccccagggccctcctgaggtgtctggaaggacctttgggatctttggcctcataaccagaaatcagaagcttcaaattctagaggccccttttcttccaaagactacctctcacacatacagcagtcctgcaggaaaatggtcaggaaaggctaattttacagctcacaaagtgggaaaggcagggaagcctacctcagcttcatggaaagccctgaactgggctgacctccacctgccccagctatgcctaaagggggagggtgagacagcttagagtagccatgccccgtggcaggcaggcctggctaagtggcccccttcccaggggctggggtcttccccaaacactctacctctcagagcagaggatgtcaccttattgctccctcttgtactaggtctgcggccctcttctggggcatgtggctggggaaatggtgggatcagatatcccctactgagcccagggagcagattgttggtgcctgaagcgctcacagagatccctgtggtacagatgaggaaactgaggcttagcaggacaggagcagggctggggcacgagccaggtctcttctctggctcacagctgccagtccttcctttgccacctgaagaccccccaccccacctggctttccaggaacaggcctgcctgcctggagaggcgtccaagtccctctgctgttcctggaagtcagtgtgaggctgagctacgtgaccaagcaaagcaaactaggactacaggtgtgaacaaccctgcctggctaatttttaatttttttttttttttagaaacggggtcttgctatgttgccagggctggcacatggggtttttagttgtccccacattacaaagttgaggacaccaaggctcagcagggtgcagttgcaggtcaggttgcatagctggacagga

SEQ ID NO: 40186 - DNA, 2034 bp, Homo sapiens
ccctctcgttatactgacgaagaaacaaactggggctaagaaacttgctcataggctggctgagctgtgattctggcataggctgagtgacctggagctggaggccttagtcatcacaccaggcttgaggaggggcggataggacaggaatataccaggcagtagggacagtctggacaaaagcctggagttctgcagacatgcgggtagggatatgtaggggtgaggtggtgccgagaggtccccttggctgagctctgaatgcatttctggggaccaggggcctaaagagctttttgagctgagttacagggttagagaagcattgaggctgctctttctggctgccaggaaaaaggggctggggcaggaggctgcaacttgtccagggtctggaggtggctggggtctgtagcagtggcatcagatattctggaacagaactgactcacaaccattgctgagggtttggatgtgagatggccaggaccacagtgggcccagggatctgattgggacctgggggaaatggggccaccctgagttggagactggggtgctggggggaacagtcggggagcttgacagtgtaggatgccttcagaatatccgagaagcagcattggggcgtctggagatgcaaatgtgaccatgtggggacacagtccaaaggcaacccttgaggtagagttgtgaagaccactctcctagacctgagtgctggcgacaacagtaccgggcatctgcagtgtgtaaactagtgccaggtgctgcacacacgtggtcataaatccatctgttggcacatcagggatcccttccttggcccactgtatggatgaagggactgaggcttaacatgcccaaggtcacacagccagcagctggccatgctggagtttgaacctagtcctctgacatcccagtcaggagaggcgtgagcaggctgccgaggccaaatgcagcccagggcctcaaccccccagaggggcctcaggagccagttaggtgccccacagccaacgtgggctccagggtgaaggggaaagtgatgaatcaaacagaaagcagcagacgcagactgagctctctccctgtcggcccgggtgccagattttcacgcccacagcaaaggggccaggcagagcgctaggtgtggggcaggagagggcagcgaaagtggctgccactgaacccagactctgatgtactccggatatgggtggcgtggactgacagacacccagcccagttccagactgaaagttgagtctgtctcagcatgtgaggatatgaagtttgccttgtcatggggagcatttcaggtccctaggcctgtgaggttctgggatgaggcaccagatggatgtgtctaaaaacccttgttgaaggcactccacagctcaataactgaccattgctcactactctcttggcccgcactgaaagccactgtttcttcatcatttcactcagcccgcctgtctcagccccccagaactttggagctcattctttcaaagtacatttcatgtgcaactgaaatacatatttttaaaaagataaaatgagcatctagttagcaaaaatgtattttgcaagtgcaaattctttcttagcatacagtccatcagggcgaagagcaatgaacacaaatgtttgaactgggggctgggatggtagttgtagtcttatgttggtctcaatgtccattttctttcagtgtttgattttggtagcacaggacaaagtgaccgctgattctcacagataattgtttacaaatgctagcactgtgtctgaagcccaccttgcagtctctttgattgacagggacagcaagagaagccttatctcaagctcagcacaaaccctgttctctgagcacataggaaggattctaatgtgtcataatttggtgctgtgcccatttgagtctgtgtgtggtttttaaaattgggttttttttttttcaataattaaaaatatgagctgggcatggtggcacatgcctgtggtcccacctactcggga

SEQ ID NO: 40187 - DNA, 3049 bp, Homo sapiens
acccacacccacacgctgcctccataggtacacatgccctttttttctctactaacacctgtttctcgtcgtccactctgccaggctggacaccgggcacttcagaggtcatgccagatccagcaccgggatggaggagtctaaggaggcacctgcagtcagggagggcttcctggaggcagagaccgaagctaagggctcagtaccctctccccccacttaccccaggtcactggctgtcctctgagcctcactccctggaagggccagcaggttccaggaagtgtcccctcgccctgcagtgctggttccaagaactgcagctcttggcagcatttgcttaggatcctttcctagaacttgagacctgctctgcccagactgctggggtctcagagggcagccagtgggggtagtgggggaagggggtgcactgggaggtgcctctgcaggtagaacattccatggaccaaacattgggaggtgggcctaggctgtcagccgggagtggttggccacactagggtggtcaacacctccaacaggaggtcggtgaaatgcaggtgctttgactgcagtcaaccatggggtgcgggcccatgagttctccctgcacaagaaggaggctcattcccttggtccagaacttccaccagcttgccacatgccaccctccaccccccgactctactccccccactagcctggcaccagggtcccatcccatagagaatcagcacaggccttaccctcagaataggccctcatcagataacctccagaggacaggccagggtgcaggacaggcaggttctgagcagggaagggggatgggatcgtcttggggcccttggaaggccatgacacttgtgttattaatcctgttataattttacctttcctggttagaactgaataaattaccccacctcacaccccccagcaaagttgggtcgggtgaatgagggacaggccctggtaagtggtcaaggacagggccctacttccctcaaggtcaccaggcctccccctggggcgtgtcctccacccgccacttctgagctggcaccaggcctgcccagccgcctgggacctgccagatcacgttgagcaaccagttcctgagaagcgttgaaggcagtgtggtttaaaattaactcccccgctccccctcccgcctgcggcctcctctgagttcttggaagcggcgctctgctcttcctgggaagaggcctccagccccagctgctgcaattctggcgaaaacacctcacccaggctgggggtggggggtgcccacgccaggccttctctgccctacacaaggcccagggatcctctggaagctagcacccaccctagttactcactgagacccagaagagaaagggggtgattgtcaaggtgctgggaggaggtgctcctgcccccaaagcccacagctcccaaccaggcacctctgggtaggagagaaagtgaattgatcccacaacagcaaacccaggaccctggcctactttgagccatatatgtcctggcgagatgcagcaacttcctagggccacccagctttgcctgcccttataagctcagcttgcccactaggtgccaggctgatggtgctgatctggcaaggatgcccgggagcacgcccccgcaggcatgcacacacctgggttaacagtgatctctgccaggatctctccttttctctcacccacacccctcaaactgcccttggaacacctctcctcctggttaagcctcattttctcatgtctcgtgggctccgtgtccctggggctttgggggaaatgtttcctgagaacctactctcccagcagctcctcctcccacagccatccactggaaggagctgagaaaaacaaaggaatgttggccaagtggaaaggtcagcacaagcatgcgtgcgcgcgtgcgcgcgcacacacacacacacacacacacacacacacacacacacacacacacacacacacacacaagtgatgtcactgatgtggggctggtgggggtgggagcagtgaagtgcttcctgggaggaggctgagggctgagaggcactttgaagaacagagctttggcccagtctggactatgagtgcaatccccacctctggtggaggagcccagctctggtgacaggaagggccccatctggctcatgggtgctgggtgtggggagagtccctggagcaggactctgcctgaggagcatttgctggataccaccctccccaccaggcatgtcatcagggcatcatcggtgccagcgcaagcatctcactagtagggtctgtgtgggtgagacagtcctggagggctgcctggaggagtcatggcaatcctaggttcccatagccctcagaggccctgcctgttttaatgaggcccgggccatggaagcaactctctttccactgagcaggaagctttgaccacatcagaaaagctccccttccctgggcctgctgtgtctcctcctgctcagagatgagcatcggtttccattcactccccattccccagcatccaggcccagccactctccaaccactctgaggtctgcattctgaccaaaatcaaacctccagggacctcctctagcttgagtctcagacgtgggaactccagcctgctgccccagagtgactcttggagtgaccccttgggtggtccacgggagccagggagggatagggaggacacatccaccatgagaggctgttgaatttccggcaaagctcaagtctactttatcttaaaactggtctagcaggttggtgtcaaaggctgcccaggcttgcacagggcctacttctcctggaggaagagggcctttatgagagctggagaagtctgggatgtcctatgcacagaccctgagtcttcctgccttcgtagtcaggcctctaggcctttaggcccccggcccctcgccttccacttcactgtgggcaaccgtgcaggacgggagggtccccatctgagagtgaggtgggcctagtcatggaccccagccccactc

SEQ ID NO: 40188 - DNA, 3035 bp, Homo sapiens
ctgcttttctttctttacactctcaaagcttgtcctatgcacccatttgttcactagttcactctctgtctctcccgctagcccacgagcccaatgagtatggggaccgtgtctgtcttgttccctgctgtctccaggacctagatggagtctggcccagttggtgcctttggagcacatgtgctggtggaggacttaatgataaagtgtgaccttcgttactgtttgtatgttgtgcagggtccttgcacccaccagaaggctcatccctttgttcctggctagtgtcaacatgtgtgccccttttactaggccaggaccacacagtggtgatcacgttggccagaggatcttcagcatctgttaggctgagtctctgattggggtctgggcaggcatcattcactgccctggcagggaaacaagaaaagaagatggaacctggaacctgttgggggtcagaagtagctggcagcccctccccagacaggagccgggccctggcttgagctgaggccagggtgaagagaacaggaccttggtggccaggccagtggccaagagctctcagcaggcagggataccaggagatagaaaacagcatccaagagcaacttgcctggaagccaccatccctgtcctccccatctcatgtagtaatccgggggacaaaaggtcagtcaggaccccccagggttagctctgccctgagccccacttgttgagtggccgtggtcagccccttccctgctctgagcctcggtttcctcatctgtgtagcgtgggtaatatttggacttcactcccaaagttgtggtgagtgctacatgaggtgcaagccctcgccccatgcccagcacctggcaggcaccttgagacatttctctctgtgtacaaagcagttttctgtgcttcctctagccacagcagctttctgtccaggctgcagcaccaggtgaggaacagcttgacactggcccctctgtatccactacccatccgctaggtgactcaaatctaggggtgaagcagacagaggggttacctcaggcattctggaagcaatgaagcagctgaaattcagactgaaggaatgaggaactgtaaatacccctggctgggtcatggtgacctggaggaagcgtgccatctggccctacagacagccaagcgctcaggccgccgccagtaacagggaaggcacgtggctggccacctgggtctgggcaccacatccaggaaagacagccctccctccatcacccacctcttgctcactctcacctaacgtcagacctattctttgccatgactgcctccatgtccccagggtcctgtgtgaactccatggttcttgctgtctatcctcgtccttacccctccctgtaatcagcctgtcactcctcacccctccttgctctcaacctgccaacaagtgtctcttctactctaagacttctaattgcttgagggctaagacaacaggaaggttaggattgtttccagaataaaggttagaaagctttagagaagctttcctgtggggccctcaagcaaaggtgcggaaaacttcgggacacaggaagatctcaacagatagtgttccaaagtcagactgtccggtaatggagggtgttttcattgaaattgctcttccacacacttttggtgtgctgaaccctgagagagaagaaaggatcccccaatcccaaccagtctggactagaacccggacacctccgccccaggtcagactctgccagctcactggcccctaccccgattcaattgccctgccccactgcacagagcaagccctcttcagttctgtgtgtcaggaacacgtgcctcccagtcatgccttggtgcctttgcactcactgtaccttcttcctgggagaaccagccctgacttctctgactactagtttcctcatctcaagacactgaccccaggagtagtccacagctctctctccctgggtattctccacttgcgatttggagttggcatttcttgtttacacatctctcagggctgatgcacctctgccaccctcccccgagccctcgcctggcagtggccagggcagtcaccctgcaggcagtctaactggcctttgtctcctagctcccatttcccaaggggacccaggggagatgagaggagaggctgctccctgtctcctccactccttaatgagtccccagcagggactgctcagccacatagaatttctgggcctctccgctagcccaaatatcaaatgggggctaatgataacaagatcaaaggggacacactgtgtacacaactgaaaatcggccccattgagggctctgtacatgaaaggtatcattttattatagaggtaataaaataaagaggtaataaaggtataatgtcattacagaaaaatcagtggaagagaaaagaccaccaaactgttctttgctataattattatttcatgaagtcttatcagacgtgtatttctctcctctcatgtgcaggcaccttcctgggcaggaagcagacctagcagaactgcagtggcggccctcaaaccagcaccccctcttcctgacagcacaggcactccccccggggcctgcgccacagtgagaccagctctatgcagatacagctctgtcctgtgagggggtgagacacaggctctgctggggactgaggctccggctgcattttcttacctattgtagttgtccatcctccccaaatatggctgggggcagaagagagtggacacattcacagacgggtgggtcagtaccaggacatccaggattgccttggttccagcaagatgtctcaggatgggctttccacagggaagaaccagagaagccagggcagagttggggtctctggactaccagggctcagggcatagaggtggggttggctcgcccctgacaccaaccccaaggagaataaataaataaatagtgtataattgtgcagtcccctagcctggcttacccctcaacaaggggtcactagtcactgtcga

SEQ ID NO: 40189 - DNA, 2374 bp, Homo sapiens
aggctcctggggtggaaggcagtggtggggcaggtattcaggagtcccagaatgcagacaggaggaaggaacttgctggagacagcaagggagaagtagtcttcccagcacctccatgtcctcttccttggcctcaccttccaccctccctcacttggcaccaggccagttgcgataagcacagccacccagtcctccctgagtgcagaacacccatttataccttcttcctctctccttggagcttcctgagctcctgtcacatcaccatggccagcatcagaccctttggttgaaggggttgctgaggttcaggacagagtggatggccaggaatgctcagctcaggtcaagactctgtcttatcagcatcccctctccactgtcccttacctcaagtctgggaaatttgaagatgagaggcaggagccaaggtccttctcacattgggatcccagactgggctgagacagggttgtgagacgattgtgggggtaccccaagcaggaccaggccaaacccagggcctcccgagagttgcagaccatcaggtgccagcctgaggaaaggcaaggatctgcggctggcttcccaagaagagcctacttgctagcctggggcaggagaggggacaccaggacagagggggccaggggctggtccaaggttactagcaggcagggcagcaggcaggctagcgtagagtgctctgggcccagaagaatatctgggattgttggccacatcttgggggacgccgtgccgttagcatccatctgctccaatgagaacccaggctgagcccaccctgtgagttcctcctttagccggccagcccccggtttcccaatccacagtgggaattgaggtaagtgtgtgggggcggggagtgggagtgtcacagccccacacagagccttgctcctgaggtccgtctgcgctcagtcacctctggcccgtcaagccctcccaatgcccggcagctagcacgaagcccctgttctcccgtgcgcccctcgtggtggccgggaagggggcagagagccgcgcttacccctgaacgcagaggaccatgtccccgcggcagcggcgactccggagtggggactcggctggacggcggcggctggagggaaccagtgggcgcggagcgcgtgctgggtaggctcccggggcgcgcgggcgcaggacagggactgagaggcagtggcgcggaccgcctgcgagggcgaggggggcgggccagacgagcggggcggggcgagctgctgcctaatcctttgtctgccgcgttccagcccttcccggaagcagcgtcttcctagaaccgcgggctgagcggtggggcccgggcggggtgcgcgggccccgtcgccgggtctggggccctgagcagtgaaaggaaatactttgacagatttccaagaactttccaggaaaacggggcggggccccgcgagctgaccaatcgcgacgctgaaggtggagccgagcggtcggggagggccaatagcagcgcgtggacccggggctgaagctacccagaggggcaggtcggagagatcagtggggaaagaccgggtcggggaagttaaggaggggcccgggctcagcaacccgcgcccagattgccttctggcattctgcgtcgttggggaagggccctcttatctcgcggtggaactcgtggcagggcggggggcggagtcccgggcttgtcctccctgcgagcggctcctccaaggaggtctgtcggcgtgtgcaagcgccccgtgttgggacggccgctcctggaccctaggactctgtgtgtcgggtgtcggattgggtggcatggggtgagatctggagcgggacttagggcagggcggggtgcagaggacagttccagaaatgagtgggtccactgaggtcaagccggcggtcaccacagccagaaagatccagacaagaacgttttctttgaaagagttgaaggagaaagcacgccccaacttttcgaatcaggcagaccatccagtcttggctggcactggtttctggccggccctgccagtcaggggagaagagactacagatttgagaaagcaagcagagacagccccagatggcccggactctgggttggtaccacccccaccccccgccagaaaaaaaatgctgagagagagtcctgcaactcaaaacatagggagataatctgggagtagggtgatagaggttggggcgggatggcgggggcagagtagtaacactcgctcttatctacagggagtacttgctgcatttgatcctctacaactggtgttgctcccgttatgcggacagaagacagccccagggaacaaatgctaggaaatggcagggtaagagc

SEQ ID NO: 40190 - DNA, 2161 bp, Homo sapiens
ttgtagcaccctttcagtcactcattcactcattcattgacagaagatcatctttccaagagctacttctctgatgagcctgcacatgcagcccaggggtccgtgagtgtgcgtgtgttaaccagaggggctgagggggaggcgctcactgggcctaaattccggagccaagagtaggatggctggaagacgcctctgagtggaaccgaggtcctggtacctgcagtcctgtagatggcctgtagatgacagcagaggcccatgcagagcccctgcgctgagccgcaccttcccagttccaagtgagccagctcgctcaggtccctcagcttccggattgggggagtgatgtgatgtgcgcaagtagttcagatctgtcccagaagacagccacagccaccctccctatggctctagacaagttgttttctccccaggggtcccagtttcctcatctgtgaaatgagagttgcttaacagccggtgttgggaaaactggctcaaaatacgtaaggtagtctaagatgggcttaacagagacttatatgtgcaaggcaaaactagaaagctaatggagaatatctgtcactcggatgggagacagagactttttaaacacgacgccaaaagcccaaaccataaggtgaaatgttggcggatctgatcaaatggcaactcgggatttctggtccccaggatgctgtatataccaaagggaagcagcgagtcaagggcataagcgggagctgcaaaaagggggcagtcgccagtgctggagactcccagagccaccagagactaaagagtggcgaattcaacaacgacaagatgccacctccctcggcatgtttaaaaagttgagtacgctgagggttggccaacactaggcaagtcggaagcctagcaagccatactggagggccacctggcagcgtgcagagcaaacacccgactcaaggagagctttcaagagaaataagacgtcctgcgctgtcacgttctaggttgcgagtaaaacccgggacccgcacagtagcggactgccagtacaggggcctccctgggtgtccctggaaaccgaggaagtaaccgccccctcgggaagccacgcctcctattttgttccggctcgggggcgggacccagccggggcccgcctggccctttaaggctgacctagcggggccccaagttgggatgacgcgcagggagcggggggtggagtgggggagtgggggaggggggggtggggaggggggggaggtcacgtgggcgccggcagcgcgactctcggccctgggatttctgcggccgccagctcccgcgaccgcctctcctgcccctcgccggtacctcagcaaggtgcgttgccgccaggtacgccctcgctgggccccctctgcggcctcctccggggacctcgcggccattaggcgcccggccccttcccttcttgacacgtgcccgggcggtgctcgcttgtaccccgccgcgcgaccaccgccccttgctgcacgtctgtactctcaggccgttcgtcccgcactcccagcttgccccgggctcgcagcccagcccagttcagaggctccaaggctggggtgtgttggaaaagtctgggcgggactcactcttcccctttcccccaggtgccactagaagcgccaggctggggccgcctctgagcgccccgcgggggccatggatggtgaaacagcagaggagcaggggggccctgtgcccccgccagttgcacccggcggacccggcttgggcggtgctccgggggggcggcgggagcccaagaagtacgcagtgaccgacgactaccagttgtccaagcaggtgctgggcctgggtgtgaacggcaaagtgctggagtgcttccatcggcgcactggacagaagtgtgccctgaaggtcagtgagccctcactgaggcctggggtatcctggagggtccacagcggaagcctgtgagtgaagctatgtctagcgcccctgctaagcttcctatgctcagcaacatgtttcatcgtcatactgtcctgtaaggtcaggcttgtggtcctccctacttcacagatggggaaactgaggcgtagcctagctaagctttgagtgtcccagtgagcaaggggtggagtcactatggctagag

SEQ ID NO: 40191 - DNA, 685 bp, Homo sapiens
actcgcagacctgtgttctggcaggatgtggttgacctcagcagggccggtgtcaaagtcctgacaaagactgggaagctgagggaggaccagaggaatctgtggaggaagaggcgtttgtgtagggccttgaagggtagagcaccattgctgagggtgctgcagggactcctgggtcacttgggctgttgttcagactatatgggaaggactcagttttcattacaacagaggtctgttgtatctcttctgagcttcacacctggggaagtggagttagatccctcattttcctctgctggggacatcatcatggaagatctctgggtggaggcagtagttggaacatctggctctgtaagcccgcaacctcccttggctccaggctgccatgtctaatggtgaaggcccatgggcaagagctgaggacatccctaggtgagaggcattccaagcatacctgtgccatgagagtgtgcacaaagcgcttcctggagagctggctctgctgctctcaggacagtgagaccatggctcctgtgagcactggtgttttccctggagaacattagttctactgctctccctccatctattggacatcttgtgtggtcccagatgaaaggccccatcttggggttgagagaggaacagtgctctcggcttaaaatgctttctgtgacat

SEQ ID NO: 40192 - DNA, 938 bp, Homo sapiens
aagcatttgctaaactcctaggaaacggggccatgactgagaggctgggtcagggattttaacagagaaagagtgctaagccttgtctctgatggctcagggaatgacatctgaaaagaatataggcaaggaagaaaaagacgttccatggtttcctaagctccagagggaggccctgagttccacagggcttgtccctagagagaaaaggcttcctgatcccatgaggaggcgtgtacattccttggcaggaagttccagtggcaagggcacaggcaaaaaggcaaggatgaggaggagcctaaagagtggacacaggcaagtgggcctagctaaaactggaagtgggtcaataaatggttagaaatgagattcttcatagtcatggggagtagatttgagtagggccttgaaagccaggcagaagcacagaagctagaactaactaacttgccagtaggagatgcccactaaaaatgaacaaatagaacagagagaaaactgtgtaatgaggcccctgagccgtggctgtgattcagtatgactcatcccttggaatgtagggagccatggtatttcactgctgttgttttacataaccttctctaattgttccacacatagagtaagatgttgccaggccttcactctgggtctagtatcaatttaggttcctttggtaatggagccctaagagccagttctgagaaggttggaaaggaagctgtagtcagttgagcaaaaaggaacccaagagctctctctgatgtgtcaatgtctcccaaagcaaggcagcctgtgcacagatttttgggtagctgaaccattctttattaatctggaggctggaacaggtgaccaggccatggaaggaaggtgtctaccagaatatttggctccttcatgctgtggacaagggttattggcttgttgagcag

SEQ ID NO: 40193 - DNA, 3323 bp, Homo sapiens
tgaggggaaatgggaggccagagatgagaaccctttgaaaagattgtaaaatactgattttcattctttcaagcttatttgtaaatacctatttgaatgctgtgtatttgtacaggaatttgagcaaaaaatgtatagagtgtgatgtccaattggtattcagcactataaatgtgtttttaacctcccgcattctgtgcttatttaaaacaaggaaacttctaaccatttcttttgtgtattcatgtttaaagaaaaaaagtgatttaaaaatgatcttacctgtaccagaaaagcaaagttaaaggaaacaaaatttgtaccattgtcccaagaggtattttactgtatatattgtggtagcatgttcaaaatccaacaagtaatgtgaattttagatgtaaatatctgccacttgattttttttccccctttccccacttccttgactgctgtgatgtgaattaaagataaatacgtgatactgatccactgaattcactgaatgggagcagaggatgtgcccctctccaacccttgtcgccgggctccaagccctttttagccctatagacatgtcctttttgcactgagtagagccaacggttcccgcatcctgccttgaaggcaggcagccaggagggcacttgaaaggagggcagtcgaaaaggaaacatcctccagtgcttctctggtgattcccgggaccccactcaggaggtcccacggcagcgggggaccccgagggcctagccggggaggcaggaggaggctggccagccaccaagccacgattcagagcttgtaagggcacctcccgagcccctcaccttcccactctgaggcgaccccatgtcctcgaccgatgatctggcccgggcgcttccctccacggtctagagtggcggcccagctttgagcttggcgcgccttgagcccttccttcagatgtcccgcagtccgtccaccccgcacgtctcctatcagcctatgcacggcgggctccggtcaggtggaggatcagcaggtgggctttcaaaggttggatccgttgcccacgcgaatgaaagaagaaaaaagaaacctctttgagccttgcctgcggccgcccgcccttcctgcctaacctgttgtcttggctgaccccagaactcctgcaccacgagtcggagtccgggcgaggagatcagcaggggttttcgagggagcctggggcccagggcaggggtacgcgggtcaactcaacagatgtaaggcgtggccgaaccccattcagctagcagtacccagcctcagccacagtcgctgcccttacccaagatggcggcccacaccgcttccgtcgctgctgtagtcgcttcctgcggccagcccgggttcaatcagcggccgacaactgtctagggctcagacaccaccagccaatgagggagggcagcgtggagccgcccgtctgggctcgcggctcctggaccaatggggaagtggcatgtgggagggcgccggggggccccccgccaatggggagctacggcgcgcggccgggacttggaggcggtgcggcgcggcgggtgcggttcagtcggtcggcggcggcagcggaggaggaggaggaggaggaggaggaggaggatgaggaggatgtgggccacgcaggggctggcggtggcgctggctctgagcgtgctgccgggcagccgggcgctgcggccgggcgactgcgaaggtgcgggatagggggccgggggccgcgctccgtgaccgttctggcggcggcgctgaaccccacaacatcaccagacggccggggccaagagggcgagggcgggggcgggggcgggggcgacagcaggtccccgcggggcctgcatgaggaggctccggcgcccgccctagtaaatctttcttgggcctagaaaacattggtccgacgaagaaaagttgagactagatcccgttgaaaacttgtcctgaaatctccatcactcctgagttattgtccccaccaccatctagaggttaccgctccccgttcggcgtcgggagctccagggctggccgtgggtgctgcgccctgtctgttgggatcacgaagctgcacctctgggtccgctgttgtatttggaaattagcagcagcattttgatcatttttctcttcaccttccagtctctccatttatgaggtcacagtgagtcccgtctcaaggacacgtgttcaccatgggcttaaacttgatgaaaggagcagggagaagtcgtttataggtcattgggtgatgcttggtcctttgatgccctgggtgtaccaggggacccccgccacttggaaccgggttctgtctacctgtagacacctgagaaaaatcggtgatggaaaagctcacctctaatgattcatctccgtgtctcctattaaaattgctggcggagttcttttctggtggattggaacagcttggtgattgctgagcatctcccgtccctctcttttccagtttgtatttcttatctgggaagattttaccaggacctcaaagacagagatgtcacattctcaccagccactattgaaaacgaacttataaagttctgccgggaagcaagaggcaaagagaatcggttggtaagtagctggtgatcctccccaactggccctggctcatgttaaccctcggcttcaccagccgtttgataaaaggccttgcccacctctctgttcaggaagccagctactctctccataaactaatgtgagaagactgaagtgcttctatgtccttcccaaagcagcatgtgttctgcaactgtgatttttttttatcctgttagtctttattaagcacctactatgtgctaggcactgggaatatcaggggaaagaagtgacagtcggacacacaaataatgcaatgtctgggtgtcatgaagaaaatggaccagcaggtgctgatttagagtggccaagaagtctctgaggaagggttatcattgaagtggggtaagaccatcccatacagggaacagcagtgtgagtgcccagaggcctgaaagagtgtggcatgtatgtggacaggagaaggtgacagggtgcctacaggataggcaagggccgaatccaagacaaaagccctagtgaagcaatgggttttctaacttgaatttctctgacagtctctggcttttctctctgttaaaggtttgaaccctggtgacacttaaattcatttggtggctgtcagcttggactgagcatgtgttaagagtccagggtttacactggctgaatctgactaccagtacaggcagggcaccgaaaaatgc

SEQ ID NO: 40194 - DNA, 1854 bp, Homo sapiens
aggcaggagatgccaacgagggtgatgtggggtttgctcaagcctagtcctaggactgaggggatactacataaagagaccactgactgggtcaatgccccagatcccaacggccatggaagctgccactcctgctccaatcagcgcgggctccagtgcctgcaagaggagatagctggacccagagcggcaaagcacggctgggagcacaaagcgttaggtcgtctcgccggcctctcagggttcactacactccgcgtagcctcaagcatcggccatgcgggccgcgcggtggcgccagagcgcgcggccggtcccactcacccagcactcacagggtcacctggcactgggcgacgcagcgcgatgaggcaggcccggcgcgggtcttgctccgcccgccgcagagtcacgtggcaggacggcgcaccttgataacgcaatgcccggcccctcggcgccgctcccgccccgccccgccgccaccgccgcgccgagtccttttgtccaagatggcggcgccgggggcgctgcctcctcggccgccgcctccgccgccgccgctgtgagaaacctacgggccgcccgcccgccgcgccagcgccatgaagcggcagagcgagcgagactctagcccgagcgggcgcggctcgtcatcgtccgccaagcgtccgcgggagcgcgaacgggaggcggaggcgggcgggcggcgggcggcgcacaaggcctctggcggcgccaagcacccggttccagcgcgggcccgcgacaaaccccgcggcagcggaagcggcgggggcgggcatcgcgacggccgcggcaccggggacgcgaatcaccgcgcgagtagcgggcgctcctcgggctccggcgctggcggcgggggacgcggcggcaaggcctcgggggacccgggcgcctccggcatgtcgccccgcgcgtctcctctgccgccgcctccgccaccgcctggggccgagcccgcgtgtcccggctcatccgcggccgcgcctgagtacaagacgttgctcatcagcagcttgagccccgcgctgcccgccgagcacctcgaggaccggctcttccaccagttcaagcgcttcggcgagatcagcctccgcctgtcgcacacgcctgagctgggccgtgtggcctacgtgaatttccggcacccacaggacgcacgcgaggcccgccagcacgccctggcccggcagctgctgctctacgaccgcccgctcaaggtagagcccgtgtacctgcgtggcggcggcgggagcagtcggcgaagtagcagcagcagcgccgccgcttccacgcctcccccagggccgcccgcgcccgccgacccgctcggctacctcccgctacacggaggctaccagtacaagcagcgctcgctgtcccccgtcgctgccccgcccctgcgggagccccgtgcccgtcacgccgccgcagccttcgccctggatgccgctgctgccgccgccgtgggactgtcccgggagcgggccctggactactacgggctgtacgacgaccgtgggcgcccctatggctacccagctgtgtgtgaggaggacctgatgcccgaggatgaccagcgggccacgcgcaacctcttcattggtaacctggaccacagcgtatctgaggtggagctgcgaagggccttcgagaaatatggcatcatcgaggaggtggtcatcaagaggcctgcccgtggccagggcggtgcctatgccttcctcaagttccagaacctggacatggcccatagggctaaggtggccatgtcgggccgagtgattggtcgcaaccccattaagataggctatggcaaggccaacccca

SEQ ID NO: 40195 - DNA, 1650 bp, Homo sapiens
gcttcatcaaaaaaacagggtaaggaaaaaccaagaccaacatgacatggccaaggacgagtcatttgtgactcaaaaatagctaaatacaaacactccaaaactatttcctcaacaaatggaaaaccagagcgctgccaccgcagtaagaggaaaccagacagaaaaccgtctaagaagtgaagttgttaagcaaacgcttctgacaccccagttgaaaactactataacccccggaaatagactccagggaagcttcgcgggcactctgaggtttgactccaggctgcgggacccgcacacctctctttccaacccttccctctttcatggggatgggaggagcgcccggaaagctccgcccccgtcgcacggtccaagaggcaggcgggtgcagggagaggtggcacgaggccgagagacgggagagcccgcccaggtgactggagctggaggcggagacacagtccgggaaggggcccgccgtatagtacggaagatggagccccgcaagcccgtacggaacagagactaggaggattggaaggaaaaagaaaacaagggaaatgaaatgcgcccctcctccaggtaggggcggacacaccccgcccccccactccgggcggaagagttactctcgggaagcttctcgtggggagtggaggaagaacgtggaggccccgcccccaggacaagaatcaggaggaggaaaagtcctgtcaggccccgggcccagcctcccggcagaccggcccgccccctcctcgccggcggcccaagcaggtgccgcccctcccccaagcccggcgcccactctgccgcccggccagccgcgcgacctgcttcctcgcgcccctcccgtagagtcgcctccctccatttcccactcaccgtccgaggcggctccgccgctgcccccccccgaccccgccagtggccacagttcacacacacacagcctcaggtcccgcactcactctccactcacacacacacacagcgcgaccacggctccacagcggcccacatattatgcgtcactcgcgcgctacgtgcaccgcgcgcgcgcgctcgcgcctacttggcgcgaggaccgcgagcaaggggcgggaagagaacgcctgcacgatcggggaaaaaaaaaaaaaaaaaaaaaaaaaaaaaaaaaaaatcgaagagccccggggacgcctgggaaatgaagttccgcgtctaggggcgggcccaccagtcccaattgacgcatgagctcttcgcctggcgcattgacttctggatttgtagtttttttggataaatgcgaactgctgagtactcattggctgcttcggaaggcggaagtgaaaagtgagggagccaatccttctaagacagtactgtaatcgcctgatactttttcagtgtcttgttctgacctgtgtgcgcaaagagcctctgttttatttggccatttgccttatcttacctagaacataccgtgatctaagaaaatatttctcataaacatatcagaaatcacagcactcattaaatcagaaggcactggttgttttttgtttgttttgttttgtttttttgagacagagtctcgctctgttgcccaggctggagtgcagtgacgatctcagctcactatgacctccgcctccc

SEQ ID NO: 40196 - DNA, 1073 bp, Homo sapiens
aagagagtgtttttccatgtgtgttttcatggtgatgaagaaaaccttgttctggtttctgattaaccaacaagtccctggtgaattttgcctaatcccagaagggcagtcccagatcttttaaactcacttaaaggtatagccaacaataggcaggtgtatgcataaatcactctagggacttcccctaatagaaccaaatctttctacaggtgaattttggggtaccatgaatctcagaggttgttgtgcgggcatgacatcatccaagtagtcagggaatttctagaagggtggggaaacagatgttacagaaggacaatgccatcctgggaggagggaatggaagaggcttccatcaccaggggagctagctctggcctttgtggctcctactttagtgacatgagaaaggtaagtgtctatgttttggtggttgtgccttaagtcttttaattgggggccaggggatgggggtggggggattaacaataggagtgtgtgtgtgtgtgtgtgtgtgtgtgtgtgtgtgcgtttaaatatatctggccaacctgactggtttctttctcctctctttggtagtctctggggctttcatgtgaacctgtttcaactcctgaggccaaatatgctctatgtgtcacccggagagtcccagctaagaggccaaatgagtaaaatgcaagacatgaagctgggaggggtcggaatgctgatctgacctcaggctgctggagagaagttaactagctttttaaaatttttatttatttttttaagagatagtgtcttgctatattgcccaagctgaacttgacttcctgggctcaagtgagcctcctgcctcagccttctgagaagctgggactacagaaatgtgccactgcacttggctggaaccagcttttgaggcattctttgcctctgaagaacctaggatgaagttcctcttacctgaggaagcggagaagcttccagaggctttgactgtgctgctttctaacccatgagcctgctgtttccagaaggaacactctattagtctgttctcacactgctataaataaatg

SEQ ID NO: 40197 - DNA, 2331 bp, Homo sapiens
gtggtggcgggcgcctgtaatcccagctactcgggaggctgaggcgggagaatagcttgaacccaggaggcggaggttgcagtgagccaagatcccgccactgcactccagcctgggcgacaagagcgaaactccttctcaaaaaaaaaaaaatcattttgtcaacattcacttattgggaagaggagaagagaacctgaggctatagtggagagagccgttacagtcccatcagtaactggagcccacatggccacatggcagtaattcccaacttgaggaaggagaacctgcacccttaacctccacctgagtgtcagcaatcaagaaagcccccttttgcctctgcttctcttccagggaattctgaagacagcttcacttaacaggaaacaggatggtaggtggggaccgagggtgaaaaaagaagagttacatgatgcgcataatttcaagggcccttgagggctgagcacaacctatgttggaggcaacagtagcagcagcattggcaggatcagtaacgatcgtaccccggtgtagagctccctatctctgagctaggtattcgcatcacctcattcaatcctaacaagccgcctagattattcccaatgagaaatgaggagaaactgaggctcaattgagatgctaaatggctggcgagtgcaaaaccattccgttggacccacccctagaaccattctcaggcagcttctggcttgggatttctgtgcggcattcattccagaaacggtcccatccaggcaggaatcgccgtacacccggcgcaggggaacggccttcagtcggctctcagcggaactttcctctccgcggcgcgtgttcccgtccgtgcggtcgggcgcgcgggccgggagggggacgctttctggcgcggaccgtgagcggaggctggcgagcgccgccgccggtggagaccgacgcttggccagagccagcccgcggcgcccgggcctggccggctgcttcccgcctcagccgccgcccccgcctccgccgccgcagactttgcctaggcgggcgaagctgaacgtgaggtccctcggccctgcgcggtccggcgcggcccggagccgcggcgcaggaggtgagacgccggtgccggttcctcgctcccggccggggccgccgggtcccgcaacaatggggaccgactggagacgcggcctgggcccctgccatgcagtggctcggggcagctagatggacccagcggcccgggccttcggggcacggggtcccccacccgggaaactccagtggccggaggcttggcgggggtcttgggcctcgacccggggcctcagtggcttgatatttgaggatttcgtagccggggaagggagtcgtagggacacggagacttaactgttgcccctctgcgcttttggctctggatgctggcgccccggaggatgaccagagcgcggtgtggggttgggaaagtatttggaattttaggggcttctgtgtgtctaatccctaaggcgcatctggatgcgtctccccgaccccctctcctgaggtctgggaatttggcagactggggtcgggctggggcagaagaggcattgagagtttagcttccctgaggtaactggtgattagttcctggaaaggcaggagctcagctgggcacaagagagttaagcagagagctggatcctccggggccctgatgcaccctgacgaggagtggttttcaggcaaggaacttatcacaggagtgagtagtggcacacggtgagtagtgctagctgtcttgtcgttagggtgaggccggtgggagttgtggtttggggagtgtagaggagggttgataggctactgagattggagaatcagctttatgtgggtcatggtggtggcagcctgggagatgaacaaggaaactttgcagagtgggcttcctgatggagagtgacctcttactgcgtgggagtgggtgactcagatctgttaggattcctgttgcttgctagggattgtggctgactatattggtggctgaacattgaggtggatgcaactggaagggttatgtggggctggatgagtttgttcccacgtagaggacagtgtggacctttcttactccaagtcagagtggtgactgtcattgacaacattttaagtaaggaatttctttgtggtatttggatccaaagcttttctctgttcatttttttctttcctccgttgtttttgaattgtgactcatactttcttttcagcactgtggctatttgaaatgatagacaaacttagacttcatcatacatgtaagttccaggcgttttcagtcca

SEQ ID NO: 40198 - DNA, 756 bp, Homo sapiens
cccgcctcagcctccctgggattacaggcctcccgagtagctgggactacaggcgcctgccaccacacccggctaattttttgtatttttagtagagatggggtttcatcgtgttagccaggatggtctcgatctactgacctcgtgatccgcccgtcttggcctcccaaagtgctggggttacaggtgtgagccaccgcgcctggccaaggttgtctttattcagtgccggtaggcaggagtccacactataaagtccaaggtcattcctggcagtagaaggttttttcctgacagtttgtatggggaagccaggaggtaactgtttggcatgttcttgtttggaaacagcgggctctcccattgatagaacactaaagtataccaggcagcattgtgttctatatggcccctgatcaggacatttctctggcattcttctgctggcaccagagacctggctttggtgtttttgccaggaattctccagatgcaggagagatttgtcattttctttaattggggctactttggtaaaatctagcactctgttcaggcatgtttttgatgaacagacttagttatagaactttcagttttattttttcccaataagacaggaaaaaaaaaaagtcccactaatattcaagagaaaaataagtagaggccagaagtgacttgaaataactggtctctaatttcttgcagtcttgctgtagtcaaatgccccctccattctgctggtctttaattcca

SEQ ID NO: 40199 - DNA, 428 bp, Homo sapiens
attatttatatattttttcctcaaattcctttttaccatgttttggtgttttttttgtgtttcccatacctagtttattacctacttcaaggcaggagcttgtcttgtttatatcccagcacctgaccatttctggcacagtgtagctacttggcaaatgtttgttgagtgaacaaatgaataacctttgcttatgaaataacaggaaatcattcactgtggaactagtggtgtgatgagagttctgacttcatggctgcctctgatcctggctgaagcagtatctctgcttttgtttttccaggttgctaaaggcaacactttgttgtgagaatgtgttgcttattcatttgttcataattttgaggctggagggctattacttgcttttttgggtcttgcaaacatttcatttgggagtaaatgtg

SEQ ID NO: 40200 - DNA, 568 bp, Homo sapiens
tcccactgcctcacttgagctgatcgctctctgcccctcagggtgctcctgtgctgcctcctaagggtcccatttcctatagcagctgtttacatgtttcccaaaggtgcctttcccccaggctctggaccagtgacctcattttagggcttgtgctctcaaatattttccccattgtttctgtcaccatactttcgtcatccagtctgttgctcttagaaagtccttgaccttttttccctggttacataaacaatgtatgagtacagtaaaattcaggcatttttaaatagggaaaggaaaccataattccatatctcattattaactaccattaagaatttaggcctgctgggtgtggtggtttaatgcctgtaatcccaacactttgggaggccaaggtaggtggattgcttaagtccgggatttcgagacccgcctgggcaacatagggaggctctatagctgagtgtggtggtgcgcccctgttttcccagctactcaggaggctgaggtgggaggattgcctgaccctgggaggtagaggatgcagtgagctgcaattgtg

SEQ ID NO: 40201 - DNA, 805 bp, Homo sapiens
tgtaaactaaattcctttaataagctaaaagtagttgttgaacccagaagctgaggattcattcaaagaatgctgggtggtaaggaactggtttagacatgtatcatctgtataaggcatgagaattaaatatactgtgcctgatgattttaaaattgttactgcacttggccacattcagcctcatgtcagacaggagttcacagtgggccacaagccttataacttgggatgaatgtttgataataaatctgttggtgatattgaaaggtcagcaggttccattctttctcctcccgggaacagcccattccacaaggcagaagccagaacaaggaaatacagcagttggcaaaaagttcccccctgcccagcagatcaatttcaaaccctctggacttgccctctgttctctgactctgtcctatctgcctactctctaatcttgcctccaactgttcctccaagtgattgctcaataaatttgcttgtgaaatagaaacaaaacaaaaaagaccaggagagcatcagaggtcattatcagaatcaggccagaggacccagcaaaacactaagttgaagtgtgccaacccagcctcaagtgtagtcggtatgttgtaggccaagttgcagtattggtggaagtagtcatttagcagtagatatcctctcttggggagtctgctgcccagccaactgtttgggatgaggaatttgatggcctccccttttaggagggaagaattcagggctgtgaagtaggaagaagttgacagcagtattatgtgaaaatgctgtggaagtg

SEQ ID NO: 40202 - DNA, 1251 bp, Homo sapiens
actgtggtgctcctgccaacccagatgccctggggtgttgctaaatcaacctcagcaaccggatagtttgttggaggcgggaaggtacgccgtgggttccgccgcagccagcgctggggctaggcacacgcccgttgccatggagacggggcggggcaggcctccgccctccgggtcccgcgcgcacgcgcccacggccacggccatgtcccgccgcgagagggggcggagcgagcgtgcgcggcgggcgcgcgcaggctccgtaaccgaaccctgagccgcctgcgcggatcggcgtccgcagcgggcggctgctgaggtgagggccgggccagaggagaggcatacccactggggcgtaggtctgggactccccctgtccgccctggcgcgacctcaggactctccgtgtcccctccgtgacccccgcggcccgggccgctctttgcatcttgtcttgcccacagctggcctcggccaggtccgagggcctggatgcgaccttggggcagcccctactcttccgggcagcccacttccgcggccaccggtgcagggcatgccccggggccgtggaggtgagggaaagaggcgcgagtcgcgttttaactccgcccccgtcccccaaggccgcgcctcgcagcctgggctgcaaactttagcgtcctttaagttacagacgtgcgtggggctccgtgaggaggtgggcgaagagaaaggctctgagtaaataggcaaggcccggggtgagcaggggctggaatccgaaagtgggaggcggcggccccccaccctccatagtccttccgccctctgctagcaccgaagtttagcccaggacgggggccgtttaagggcccggccctccgccgccgcgcacgtgagcggcaccaggaagctggctgggcgcagccttccctgaggctcgctggcaccggccgcacgcgtccatcccgggcctctgagcggagggggagccgaggctagagggagggcgcagtctgcccaaggtcagcggcagcggcagtttctgggcgccaagtgtgattggagtactccaggaagaggggcgtgaccagagctctagcgaagagacctgacattgtaaagctaggtttggcttctgatttccacagggggtttgagaatgggacgagggtgctttagagggaccggtaggctttccctgaggacggtaatcagggcatgatggttggctcagtggttatttcctgggcaggggtgactgtt

SEQ ID NO: 40203 - DNA, 612 bp, Homo sapiens
accaagaggaggcatggactgaatgtcacctgttcactggcacttacaaaggcagaaggagcttatggggagagggggtgggtgaagcagggagggcagaggcggagcagctggagacaccatctgctgtcaagcccagcgagaagtcagaaaagggagcgtttctccagtccccggaggagctctggcctgatgggccagttgaggagcccagagcccttgggcatctctggagtttgctgtcagggctcaccagcagagggcactaaggtacatggctgtggccaggcgaccgctgccctcctgtggcctagaaggcagcgggcaccgaaccggaaaacagcagcttctggggagtccccagactgtgaggagcagagggacaaagtcctgcattagccggcagcccagggcatctgttatttttaagtgagctcatttgcatccacaggctagcaaggttgtggaaattcaggtaaacaatttaaaaaacaaaaacaaaaataaacaaagaaaattgcaggaatggcttcttctctcccgtcaacatctgggatgtatggatgacaaatgaaatacagactgcgcagttaaatttgaatgtcataaaca

SEQ ID NO: 40204 - DNA, 2830 bp, Homo sapiens
aggcagtgcctggcatgttaagagacggggagcccagtaattgtgaaattgcaggaaaactggcaagggaagaaggatgcaagaaatacttgacagctttgttctgttttcctgcaatttctcaatcagtccagtccctgccaaaacctaaggaggtctcaatggcctcggattggggcccagggtccttcccacccagagacctcgcagaaacaagactttgcaggaccagaaactaaaggaaacagccacgatctcagagccaagggacagagtcttggattctaggctcagttctgttcggactcactcagtcttccgtgcaccatgggactcagttttccctcccactatgtggaaaagaatagctcacctctcgctctcagagtcgctggagatctcctcattcatcttgccgccacccttggatttgcccctgtcccccgcagagtcggcctgggaattatacggtcttttctttggtcaggggtccagaccaccctggcattgaccaagggcccccccccctcggttccctcagaaccccaggaatggggaaggcggtggttcccgggttaagcgaacggctttctaggatttggcccgcggagagagggacgaagctgactccagcaggggtccagggcgaagggctggggaagggccgggacccaggtcccctggatgggatgacggttgtcccagtagcagggctgaccgcggccctcagaagcgccatgctcacctttcgccgccgcttgccggcccccgcgccagccccggccccagaggccggctttccccgcttacgagcagccgctgttgccgacatgctgcccaccaggcgtgtagcagcggccgcagaactcacgtggcagctgaaccctcccagctccccagccgcctggcaagaccccgcgtattgataggcttccaccgcccgccgggccccgcctcctactgctccattgggtccttctgcaggctctgccacgcccccaggcacccataggatgcacgcttgtagccccgcctcctgaagttcctaggctcccgcaccaggctcgagtaggaagcccgcatctccacggcgcttccggcctgatgctgtggcgcttgcgctctgctgctggcccacttcgaagtcggagcaagagccttctctgtgtttgcgccccttggccgctggggggcgccagagacgcggcgccctttcgcgttctggaacgtgactcctcccctccatgggcagcccggcgctagacccaacggggatccaagcagccccggggagagggaggctgcgtctgtatccgggcccaaggtcaccgcgcgaccggcagatgcgtgctgcaggccccggccacatgagcagcgctacggacgcgactgccccggccttggatatgccagatcgagtgtccacccgtccgtgggactggtcgcctgactcggcctgccccagcctctgcttcaccccactggtggccaaatagccgatgtctaatcccccacacaagctcatccccggcctctggcgattgttgggaattctctccctaattcacgcctgaggctcatggagagttgctagacctgggactgccctgggaggcgcacacaaccaggccgggtggcagccaggacctctcccatgtccctgcttttcttgggtgagtgtcctatggtcctgcccacggcagggcagggcaaggcctggtgggactggcctttgccctctatcagttcaaggccactgatccggagttctggctcctcagaactcttgagtccattgggaagggcttctacagctctgggttctaagctccgggaggataatctggccccaagaatcctgcccccaggatcctctgcccaccctcccccatagctcggtgactcggcccggcaaccatgccagggctgaactagctgacacagggggaggagccccgaagtggaagagagagagcctcctttcactttccctacccctcaggacacacaggtgagctgcagagggtagggagccaggcagaccctgttgaccagagtgggcagactggacagagtcctaaccttgcacttgggactggggaaaggggtgtttctgagtgacaaagagctgggtgtggtctggggctgggaatgccgtcagagtggacacaggatgcagtgggaggccaccgaagggccaacccggggtggggcaagttggtgctgtgctggcccagggcaggggtggggactgagagtgggtcgttggggatgaggagaccatggaggcctaagggcctctctgtgccccaggacagccatggctccaaagccgaagccctgggtacagactgagggccctgagaagaagaagggccggcaggcaggaagggaggaggaccccttccgctccaccgctgaggccctcaaggccatacccgcagagaagcgcataatccgcgtggatccaacatgtccactcagcagcaaccccgggacccaggtgagctgcagtccccagtcaggcccagagcctgcccactgataagcacaaacacacccaggccacccccttaggactctgttctggttttggagcccaaggcccccaggtaagcgccagagcaaggccatgttctcctgaccccagacatcagggctgtgtcccgtcaggtccaggcgggtcacatctgcccttcagaccccatgcaggcctcctcccaccgcacttagggaaaggctgtgactacatcagtctcctgggcgcttgcccatgtcccctcagggcagagccatgtccctctcagattcccccatccagggcccagct

SEQ ID NO: 40205 - DNA, 1188 bp, Homo sapiens
gaagtcgcaggctcgttggggttgatcctggcagctgtcgtggaggtgggggcactgctgggcaacggcgcgctgctggtcgtggtgctgcgcacgccgggactgcgcgacgcgctctacctggcgcacctgtgcgtcgtggacctgctggcggccgcctccatcatgccgctgggcctgctggccgcaccgccgcccgggctgggccgcgtgcgcctgggccccgcgccatgccgcgccgctcgcttcctctccgccgctctgctgccggcctgcacgctcggggtggccgcacttggcctggcacgctaccgcctcatcgtgcacccgctgcggccaggctcgcggccgccgcctgtgctcgtgctcaccgccgtgtgggccgcggcgggactgctgggcgcgctctccctgctcggcacgccgcccgcaccgccccctgctcctgctcgctgctcggtcctggctgggggcctcgggcccttccggccgctctgggccctgctggccttcgcgctgcccgccctcctgctgctcggcgcctacggcggcatcttcgtggtggcgcgtcgcgctgccctgaggcccccacggccggcgcgcgggtcccgactccactcggactctctggatagccgcctttccatcttgccgccgctccggcctcgcctgcccgggggcaaggcggccctggccccagcgctggccgtgggccaatttgcagcctgctggctgccttatggctgcgcgtgcctggcgcccgcagcgcgggccgcggaagccgaagcggctgtcacctgggtcgcctactcggccttcgcggctcaccccttcctgtacgggctgctgcagcgccccgtgcgcttggcactgggccgcctctctcgccgtgcactgcctggacctgtgcgggcctgcactccgcaagcctggcacccgcgggcactcttgcaatgcctccagagacccccagagggccctgccgtaggcccttctgaggctccagaacagacccccgagttggcaggagggcggagccccgcataccaggggccacctgagagttctctctcctgagcaggagaaaggagggtggtttccgtgggggctcatccaacccctgcacaggtcacagcaggtgccctgctggatatctgggtctggaacaggaggagaaagggtgtctgc

SEQ ID NO: 40206 - DNA, 1813 bp, Homo sapiens
aagaagctaggtcagagctgaagggctgaagagctatggggcaagagggaccactctgagcccccagctgtcatctccatacacccctggcctggaggtctgtatctggctcccccaacgactgcggaggatgggaaggagtgtgtgcccagccaggagctacaggggagtggcaagtgagggcagagatggagcagaaccagaacccagggcaggagtcagagagaggagcaggcgcaaaggacagaaacagcgagtgggatgggggcctcaaatctgggatctaaggtccaggaagcccctccctggtgccaagggcgcctctggcagaccagcgcctcccacctgtgcaggcctcagcggtgtgggacagagaacgtgttcctcgcagtctcacaaacctgcgaccccaaccgagggatctgggcgcgggctccctgcccccgggcgaacccccaaacttcgcggcccgccgtgccccgcccggcccgcgccctacctcgctggggctgtcctgcggcggcggcggcggcggcacggcggctgggccgctcagtcccacattgtccccgggagaggcggccgctcacaactgcgagtgacatcagctgcgaacaatgaggggtttgacaggcgcggagcccggccggcccggagcccggctccgcgccccccccccaccccccggcccgcccggcccggcccctccccgccccctccccggatccgattacagagcggcgggcccgccccagccgccccagtgccgcagccgcccgccccgccccgcgcgccgcggtgcgccccgagcggcggccgcttcctggagggctcgggcgacccttcccctgccactcccagagccccacgggttgggggtaggggcgtccggcctgaagcccggtccccagccacggccttccccgcaccgcccgcgctgcgcccggctccaagcccctccgctcccgccaggccagtccttccggcccgggccgcccgcccggcgcctctgccgagccccctgcacccccatccccgccttggccccgccagccccggctccgcctcgctcccggcccgcgtccctccgagctccggctgggaccctgcgccccgcctagctcccggctctgctcgctgcgcgccatcctccgctcgggcttgcgcccaccaagacccgctctcctcggccacccacagctgcatggcccggccctcgtccgcgcaggacaggctggaggaggggcctgagagccgtgtggccctgtgcacccgatcctgtgataaccccaaatctacccccggaattccttttggggatagggtcgcaaggaacgggctccgttgagtcttttactggggaagggatactagtgggggtgatgaactgttctcaagtccgctgggcaccccccgccctcggggaagcaactattccttcccccccactcctccataatcggctcagcctggtcccactgacctccacctccccccacagctgagtctcttggcacctgggtatgtgtgggtggggaggggaatccaatctcccttcctctccatctggcctggtggacaaagggcagggggaccatctggtcccgccggggtgggggaggggcccacagtgttggtcccaggggtgggggaggggcggcgctctttagaagcaggagccggtggggtctaattgcatcactttatttcaccgacctccactctggctcccaccccacaagcctcagagcaggaaacaagcttggctgagatgcctcaggcctggtaacctgaggtgtagagcacccagaag

SEQ ID NO: 40207 - DNA, 2403 bp, Homo sapiens
ccgcctcagcctcccaaagtgctgggattacaggcgtgagccaccgtgcacggcctaatttttatatttttagtagaaacggggtttcatcatgttggccgagctggtccggaactcctgacctcaagtgatccacccaccttggcctcccaaagtgctgggattacaggcgtgagccaccgcgccggaactaaaagcccattttcttcggtttttttttttttcttttttttttttttaagagaagatgtctcgctctgtcgtccaggctggagtgcagtggcgcaatcatggatcactgcagccttgaccttcctgggctcaagtgatcctcccggctcacccccagtagctggaaccacaggcgcgcttccacaccggaaagcccattttctagaggcggaaaccgaagcgcccagtgggaaaggcgacccgccggggatgcggggtgctcaacgcgctgccacctggggcccaacgcgttgacctcgcggtcaggttgcttccgcggactacggttctggctcgctagctctggaagggagcaccgggagggaatggtggcaactcccaaggaggggacccagggatccgagaaaggaagacttggggtaggtggggttggattttgactggagagaagaaagggtcaggagtgcagggcgggtacctggggagctgcgtggactcgcgcagacgggaagcaggcgcgtgctggcggtgacctggggccggaggaggaacgctgggaagaggccgggccccatccagcgggggcggggactgggccgtgctccggggcgccctcttgtggccacaagctcgcagcgtccatagactccgctaaactcgttctcacagcggcgtcagtttcccaaagcctctcggtctcacatgccccaaacgcggtgctgagcacggtttcgaactcttcagcgacctgccccacatggacatggagcagtctgaggaggaaagttccttcgggatcgcatccttgctgctgtcttcctgctccccatcccccttatccccagcttgaactgcccagggcaacttgttggcctggcacggagttgaggcccgacaggtttgagtgcgaggctccgccagtgtccagccaagtggccttgatcgttttcccaatgcccccgagcctgtttcctgccagtagagcgggtcagatgttgccaacctctgcagagtagcaataagcagtaaacgccacgctctgcacagcctcccagtgctgggcctggtcgccacgcggagccttgggctgggacaggccagacgttggtaacacatcgccaaccagggcaggcgccatgagtagacgtgaacgagcccagggccagcccaggctctgaccgtgggtgtgcgtcggggagggggtggggaggagtgggtaggagtcaggaaagtgggtcggccaagacctggagctgctgcataacaatatctggcatttacacaacgaggcctctgctccggacactgttctgaggcttgacccgtccttaagaacctaggacaaccctgtgcggtgggttttatccttaactccattatacaggccagagaactgagccagggtggagatgttccactgagaagaagccacatggctctccgccggctctcaagccaaaaacagttccgaaaatctgggcggggagcgggccagagagcgctggggctctgcccccagcaccccctccacgcagacgactcggtaactgggttgcaggcccgcggctgcggagtgcgcaggcgcgccgagatggccgcgctcctggccgcctagagccggagcggcccgcggagctgcggaggcagccatggtcggggcgctgtgcggctgctggttccgcctgggcggggcccgcccgctcatcccgttgggcccggtgagtctcccgggggagggaggccggccggtggcccaggggagggccgtctttaccccgccccttgccccggcgccccggggcagagtcccgcggaagaagcagacgctggggccgcgaatgtgcatgtgcgcgcgtgtaatgtgtgtgcgcgcgcagggtctgcatatgttcttgggggtctgggtgtatgtgtacgcttgtgtgtctgcatggtgtccgtcagtgggtttctgcgcgcttatatttttggggggggggtgtgttcgttgatgtctgcctgcttgtgtcagcgttatgtcttccgagtgtatttctgtgtgcgtgtgattttaagggtatgtgtctacctgtctgcgtgtgtgcatttctgggggtttgtgtgtgtgtgcgtgtctgctttcctgtgcatgtgcctttcttgtgtgaatgtgtagtcttacggttgtgtgtatgaccgtgcttgagtatttctgaggatcagcctgtggtt

SEQ ID NO: 40208 - DNA, 4110 bp, Homo sapiens
agctcccagcctggcatgagcttggacagtctggaccgccaccctccctgaaccagggagacagcctctgggattggaggccagaggccagggtcagacccagccaggactcctcatttcatctcacagacacaataaaaaagcatatttgtcctgcctgggaagtgacaggttccgtttcctggtgtgctgtgggaaagacgggagtgggaggcaagtctgggactactttgggcctgggagctggaggggatgtccagcagtctgagaaggctaagaatgcgccacttcctaagtgcctggcctcaccactctgtgcctgagtttccttatctgtaaaacgggtatgatggcaacacctaggttggagggtggttataggactgaatgagtctggataactgagtacttggccacataaggctggggaattgctggtgggaggcggggtgtattactgctgctgcatgaccacagggattggtgggaaatccagggtctggacagccaagccaaggaagtcaggaacctagagggtatggggaacgcgatttaacaattagccagcattggccgggcgcagtggctcacacctgtaatcccagcactttgggaggccgaggcaggcggatcacgaggtcaggagatcgagaccatcctgactaacacggtgaaaacccgtctctactaaaaatacaaaaaattagccgagcgtggtggcgggtgactttagtcccagctactcagtaggctgaggcaggagaatggtgtgaacccgggaggcggagcttgcagtgagccaagaccgagatcacaccactgcactccaccctgggtgacaaagcgagtgagactccgtctcaaaaaaaaaaaaaaaaaaaaaaaaaaaaaaaaaaaaaaaaaccagcattagctgggcactgtggctcacatctgtaatcccagcaccttgggaggccaaggcgggtggatcacctgaggtcaggagttcaagaccaccctggccaacatgacaaaccctgtctctactaaaaatacaaaaattagcccagcgtggtggcacgcacctgtaatcccagctactctggaggctgaggcaggagaatcacttgaacccaggaggcggagttttcagcgagccgagaaggagccactgcactccagcctgggcagcagagtgagactccatctcaaaaaaataaatagctaaataattagccagcattgttatgagttaaagtctatttgcccgcatgaataaataggtaaataattagccagcattgttgtgagttaaaatctatttgcccgcatgacagagtgagactctgtatcaaaaaaataactaaataaagaattatccagcattgttatgagttaaagtccatttgcccccatgttatgtgtgagcagccaagacttaaacctcaggaaaggtgggacagaacccttcccacagcgtgcctccttggcctagagattgaagtctttgtccctcacccttccccaagctgactcagcccctggagcagagggcagacctggctgggagtacaaagggcagctggggcacaagtgggcaactgcagctgtggcctgcagggggccagtggtacacctgtgcctgtttagcctccccctctggtggctgcagaagagccagtttcctcacactgtccatccagggtcacaattacatccattcacagtgacttcatcacacccacccaccatctcacactgtcacatacacaatcatatccactgatagactgcacacgcagtggcacgcttaaaccgtcacacgtgctcttgtccatgcattcattcccattctaggcactgtccgggctcggcacggccccgggcagaaccttgcaggaagtggagctcacagcctcctggagttcagtgtgggcagacagacattggccaataacttcagtacaagtggagctgaggcgtcagggaggacctccccgaggggctgaggcctgcagtggggagccgttggagacttgccgaggagggcgagggcgcaggcccagggctttgcagctctgcatcttgagagcctcggggcggccccctttcctcccgccctatccgggggctgaaggaggaggcgcccttaggggacgggaccgtcctgagctcccggcgcatacctgggggcaggagtggcaggcgtgtcgtgtggggcggggcgagcctgtcagagcagggccagcccggagctcgcaactcgcggggcggcgctggccgcggcggccgctgcccggggacgggatccggatctaatcctccagtaatctcgctgaggcccgaaccagaggcgggcggggacatccgcgccgacgcggccgctggcgccgggacggccctcactgacggtcttcggtctccgccccgacatccggcctcggccacgtggtgggcggaccggggcggtcctgagcctgcgacctcgcaggcgacctcgctggaccctaagtccaggccacagtcagggaagggcgctgagaggcgagcgtgagcccagcgacaggagagtgaggtgggggccctggggagggatagagggactggggctccgtggcttgaaagccgggcaactgggaggcgttggggtttttcttgtttgttttttgtttttgtttttgcctttttttttttttaggagggcggggggagtacaagtctgggttcaaaccttgctcagctactctatgagctgtccttgaacctctctgagcctctcagctttctcctctgtaaagtgggcattctgagcacaaacttcatggggctcttttggggattaaataaggaaatgtgctggaagcagacagcccagcgcctgaaacagaatgggtgctccttaatgggggctccgaaacacggtatcctacccctgtgggaagtccgggagccgccgtggggacaggctgtgtgcaggagctcaccatttccagggtcttggaggggtagttagccattcactttgcccccagctcaccacgcgcagcgccatgaccagcaagggtcccgaggaggagcacccatcggtgacgctcttccgccagtacctgcgtatccgcactgtccagcccaagcctgactatggtgagaagacggtggttccagagcctgtgacggggcctaagggacggggactgtgctctaaaccagcctccaacccctgtcacccagctgagccccactctgctgtcccaaatggctccccaacccctccagccattccccaagtaaatagactgaggcagcccctccaggttagggaggaaccctttccccagagactctgctgctgaccaaggttactcctggcagctggttaaagaaaaacttcacctcactctccagggcaggagtggtgggggaagcctgaggcagccacagggaaaggagaggccctccagaagcccactggggctggacaaaggccacagcccttagggagtcaagcttggtggctagggcctgggaggtggctcctgcctgttatcccagcacttcaggaggttgaggctggcagattgcttgggcccaggagttcaagactagcttgagcaacatggcaagactctgtctctacagaaaaaatacaaaaattagtcaggaatggtggcacacctgtagtcccagctactccagaggttgaggtgggaggatcgcttgagcctgggaggttgaggctgcagtgagccgagatcgcaccacttcactcctgccttggtgacagagtgagaccctgtctcaaaaaaaaaaaaaaaaaaaggaaaagaaaaaaaaaaaacttagtggctgggaattgtgtacatgggtccaaattcctcctctgtgattaatcagctgagagatggtgggtgaatctcttcatgtctctgtgccatagtttcccatatttaaggaagataacaccttcctccaaccctgtgtccagacatccccctggacttccagaaagggtcactgagtagccaaaaatatcttctttcttggggatggaaatgcaagcatctctgagggatatggagtgtgtcggggaggcagcagcccatttctgggtatgctccactctccggg

SEQ ID NO: 40209 - DNA, 812 bp, Homo sapiens
gattaatggctaaatttggggtttgggcccctcttcccatccctgcccccaggaacattggagtcacgacccctttgaggccttcaaggattctgagggctacatctatgccaggggtgcccaggacatgaagtgcgtcagcatccagtgagtgtcctccattcctactcctccacaatgtccccactggtccagtggattgaagcaggacctgagggggtgattggagaaactcaaggccaaggaacaccgtgacctcttggacaggaactactgccatgaccattgcatggatagggagattcagaccagagaggggcagggactttctggagtccctatcagggtgtggcagggtaaagtccaggacacaggactccagcctgctggccctgcctgtggggccagcctgcgcatctggtggctcccccagcacctggcttatgccccctcaggtacctggaagctgtgaggaggctgaaggtggagggccaccggttccccagaaccatccacatgacctttgtgcctggtaggagtggctcagatacctttgggaaaggggagggtggggcggggcagcctcctcatctcacgtccctgctgcttttacagatgaggaggttgggggtcaccaaggcatggagctgttcgtgcagcggcctgagttccacgccctgagggcaggctttgccctggatgagggtgagcaggttggcaagccaatgagcagccaggcagggagtaggaggctgctagtggggactgagctgctccaccctctgaaccccctttccctcctcaggcatagc

SEQ ID NO: 40210 - DNA, 1581 bp, Homo sapiens
aagggaaggaacagactggggacatgctcagctctcccctagaccctccagccttctcagctaatccttagaaccccctgacacaggaagagaagctgaccccaactccagcactgggtcagatggaggtcataaggctggtcagtgtgggaatgtgccctgcacgcactcagacaaggccactccttaccctaagtgccactgccaagcaagggagatagccaaactgccctcaggaggcaggttacaccctgaccagagggttacacttcaggctgtggagaccaaggaaagctttattatgggtctggtagggtagaaaaaggaattgcaggctttgggtgggccagttaggctgtgctcaggcagaagccaaagctagagaaaaactacatgagaggccttgactgtgcacctggaaccaagaaaagacacttccatgtgattcagtgcactcacccccttaagagattcgtatctttgtgatcggggtttcttgataccatttctgtgccattttcgggctgtgggagaaaaaaagggaattaagccaacaaagaactttcctctaataagaccacccaacatcacagctggcaagtctgggagaaccaacacttcctacagcagctacacttgagatatgggaaacccttactactaaatgcaaaacactctgtatctcaagtagatctctaaacctataaaccctaaagttattactgggtgaaatcaatcagcctcaggcccacaatggaaacgtgccccttcatctctgtcccagtttgcctgaaccagtccttgccagggtctgggatgtaggcagggcccaaaaaacttacactggttgtgtgtggtgtggttcttggacttggccatgtctgcacctggaagacaaaagtggagatcagggttaagggctcgccaggctgggccacctctgccccccccattctggtcagaatgagcctgcaggcagagaatgtgcagcctccacgagtctcggcttactctgcacgaccaaacgccagtcctggcctcccaaacccaggtaatgatgccctgaaatcaactccttacccccggaaagctgcattccccaataaagtggctttccctgccatccccctcctaggacctagaagcaccattcccaccccgcagcttttgctcccgacagacacacggtcggtcaccagtcctctccgcagcccgcgccccgccgccacccgtaagtcgcggatggcatcggatgccgcgcggccaacactcaccataagccgcggctcccgaagcgcctagaaccggaagagaaaggggctgcggtgcagcacgggaaatagggtcaacaacgccggaaagtactactggaaaagcttccccaggctccgcgaagaaaagttccgaagcccggaagaacgcaagccagacgtggaggcggtgctacgagcttgcctccgcccccttcaggctgcctcctcccttctctgtttctccaggacctgtctcttaagtcttattcaagatactgaaaaagaaaggagtccttgagggatgttgttgggcaagaagatctgtgtt

SEQ ID NO: 40211 - DNA, 1353 bp, Homo sapiens
cgggccccagccgcgtctccgggcgcccgcctcccgccgagctgcgcgcccgccgccccggcctcccggcctcccggcctccgtcccgcccgcccgcccggccctccgcgcgcaccgcggcctgacagccccaattaaacggcggctccggcggccgcgcgccgaggcgttctccggggggcggggccgcgggggccggcgcccgggcttaaaggcgcagcgcctccaccgcccctccccacggggtatgcgggcgcgctcgcgacccgagcccgggagaccagcggcggggccctcccccaccgcctccgcaccgttgccccctggactagctcggagctgactacgatccgcctagggaccccggcctagacgccctcatgggttcactctgcgcgtgctcccaagctcttctggacactgcgggaagagaggccctgggggcgtcctatgcctggcacccccaccccacattcacaacagcatagttttcctgggacggggcgtggtgggggggatggtcaagctgagcaacctctcctcctcccgcctgtcatcccattcattttttctgtcatcgagttcattcaacaaatgagaactgaacgcctactacgtgccaggcactgtgctaggcggtcaccgtttcagaggacctcatcgttcccctgacggtcacaggctccagacctgagggagagcgtctcacgccagcaggcctgatgggaaatcaggacctgggcaactggcggggtaggaagactcagggccgtgccaccttccgtgggcaggtgtggagaaatcctagaaaggaccagctttgggaagggatcgcgagccctttaagaaagctttacaagcggggtggtgacaggcgcccagtgaagcgccacgtgactttttccacggggccggtgggaggggaatgctcctttataatcagctttccttcccctgcctccctctcaacggaccaatcaacttccgcggtaggcgggcgcctgccatgcagatggccaatcctggccgaaagaggcggtggcggagggaggcggggcccgccgcggtttccacccagggcggggaagtgggcggggcctccgcccgccctgtgtgtcgatttgcaggcaggcggggcagcggaggtgaatggacccgcaggtagcgctagaacaaagcggctagacgcaggcggcgcgcttgcgtaggacctgcagtgctttccctacggagccagggtggcagcttgaggctggaccctgccgtctatctggtccattcttttgcctggcggggtgcccctccttggggcttaaccccccgactccgcccgaggctggtcggctctgagac

SEQ ID NO: 40212 - DNA, 1043 bp, Homo sapiens
aaggagaagctataaaaagtgggtccactcagaccattcataaaaccggatgctcctgggacccatggggtgttgctcacacccaaagggaggacctgagccacagccccactgacactggggtgggttcaagcacatctctgccagccatgtacaggccaccagggaagccaagtgtctgaccgggataggccccaaggtgtaggacaccagtcatgcttggccataggctttgctggactctgactccagggtgagtccaaacagggctgagcatggggtgtggaccttgaccttggccgccttctgcaacccatttcttcagaggctgacttttccaacaatccatataaagtagttagttaactactttcccaagacccagcaagacatgatcatcctaagccagacatcttgatagcttgctggaggcctggaagtctcagtatagcctggcgagtcgggctgcagctaccacccaacaaggccacctccgggaggaagaagggcacaagccaccagggatggagtctcaaggctcccccatcctgccaagcatccactgatccacagtgggaaaacctgagcaatcatcttagcgagctttctggagccactggctgggcccagatcagaagggcaaggggcacataattgcttcccaaatgccatgctaagttcaaggcttcctgtgcttcctctgcttcctcagccatggccactgtgggcatgatgaggttctatacccatagtacaggcctggatcagggccctttacagagcgcatgggaggaagcagcaggcccaactacagcccttcctggccctgctgtggtggtgcctcattcaggaaagcaccaagaggtcacggggtcagctgtgatgaagtaggctgtggcttgcttaatctcagagcggtgcaggccagtttggggctcctgtcataacacaggcccctttcttgtggcctgtgtttggcctttccttggagggcccaggtccccgaggagcaagagcaaatcatgtggagtcccctcccttcc

SEQ ID NO: 40213 - DNA, 871 bp, Homo sapiens
gtgtaacctcacttcatccttatgatggcccttcccaataggcattattaaccttatttttcagatatggacccttgggctcaaagaggttaagtaacttgttctaagttacccagcaaataacagaattgggatctgaacccaaagtgcaggctcttcccggacatgagacagcctctggcaggtgacattgactgcagctgggcttccatgtgcacagttcctctccaacgtccccatggaggcctctgaatcctaggtctaatgctttttgcgtcacttccccaacccagctgccctggaatgattgcccagcacagagctgaactcagagcaggccctccacaaacactcaacacctcaaagagcagggcccaccgaggtaaaattcctgtgtaatgaatcctccccaatgtctgcactgcagcaaagggccagcagccccacccctcacagctctgtagccactcacctgcatgccagcactctggagctgtggcatttccctgagagctgggcaaataagcaagaaagcagagataagaaaatgacacacaagagtgggaagagacagtcgtaccagagccatgagtaatgacagtggcagaataacccaagcagcatttaaatgcaaaagtcacatcagcattttgtctgttcaacatcaaagagtcctaggggttttgcctggtggttctcagttaagtataacatgaataaaataacacaaagaggccagacacggtgacttacacctgtaacccaaccactttgggaggccaaggcaggtggatcacttgaggacaggagttcaagacaagcctggccaatatggtgaaaccctatctctactaaaaatacaaaaatcagc

SEQ ID NO: 40214 - DNA, 1580 bp, Homo sapiens
cagaaacccagcgcagggcctggcacgcaggaggcgctcagaaagtgcccgacccagcgccccctgcgcagacagtaaactggacctgaagaggaccaccctggaacctggcgccccgcccgcccctcgcagccatcgctctggccattaggcgcccagtgtcccagcggggagactgaggcctggggagttgctctcggctgggcttaccgcgcagggcgcagccatggcggggctggcggcgccgaaggcagctgcggtggccgttgcggcccgttcagtttccgcgcccccaacggccaccaatagcaacgcgggccgcgtcggcacgccccgcccaccgcaattaaaggagaagcgcctcagctttttgcccgacgactggaagcagagctgtatgaccggcggccggcgccacggtctccgtgcccagttccccaagcccagacaacccacagacagcgcagccaaaagcctctgtccgccgccactcgttccgcctgagaaattaaaagacccaggatgaagggttcaccccaccagcccgtcgtccggctactctaacggcgagcgcagcctcctgggaaatgcagttccaagccgcccacgcccctatgtctggaggaaggtggagctacacttcccaacatgagattgcaccattgcattccagcctgggcaacaagagggcgggccgggttttaccacccgaagcgacggccttaaggatcccggaagcggaggacacgtgggttgctgtaaccagattgcgttaaagcacccgcgcgcgccggcgcagccagattttccccgcaggaacctattgagagctgagtattcgcccctcgggaactctcagtggttcgccgtccgaacgttcttaagacaagtgtcgatttaaaataacatgagttactcggaatcacaatcatggagtggagagatcaaggttcgattctcagttctcgccctgattggctgtgtgatctcaggaaaaacgcctctgctctgtgccccggtttccccatttgtaacacgagggagtgtggtgcagcccggccctgtcaggatccttaaggcctcagaagctgttagaaacccagtctttaaaagaaggagaggccgggctcagtggctcacgcctgtaatctcagcactttgccactttgggaggccgaggtgggtggatcacctgaggtcaggagtatgagaccagcctggccaacatggtgaaaccccatgtctactaaaaatacaaaaattagccgggcgtggtggcacgcgcctgtaaacccagctactcgggaggctgagggaggagaattgttcgaactccggaggcagagattgcagtgagcctagatgttgccgctgcactccagcctgggcaacagagggagactccgtctcaaaaaatatatatatatataaaataaaatttgaaggccaccagcaaccatctgaatagactccctgcttggccagggcactcaaatttaacctgaaagagtggttcaggccatgatgggaagtgggggttggacatgcctcattataccctccagcattaacatcaacaa

SEQ ID NO: 40215 - DNA, 2359 bp, Homo sapiens
gcctcccaggttcaagcgattctcctgcatcagcctcccaagtagctgggattataggcacccaccaccacacccggctaattatgtatttttagtagagatgaggtttcaccatgttggtcaggctggtcttgaactcctaacctcaggtaatccatctgcttcagcctcccaaagtgctggtattgcaggcataagccaccacgcctggccatagctatctttttcaagtccccttgtggcaggaaggtgtctatcctggtgcaggcccacaggtggactcccctacaagaggctgtcttcactccccagcctgctgaccatgagccaaggccacccagggtggggcagagaaagaagtgggaaagtcggatatcccatccaccaacttagcccagccagcccgaaaccagaaagccccatcaatgctatcagtttcccctgcctacgcctgctggtggcctgggtttgaaactctgagcagggcagctcagggcttgtcccaaggtcaggcaggcctgcggatgagcccaggccctgccacctttgaactggtgatctagcaggagtcataccacctctccccgctgcagtgttctcagttgtaaaataatcgtaataatatgcctgccatgatagaggaggggagattccatgagctcttcattagtgtcagagcttgatgttgagctgacacttaatatgaactatgtgacttcatacttcccctgctccgatgatctggcccacacctctctgcctctgcttccactgctctgccctgctctccctgctccaaccacattgagcttcttgctgttccttgaataagaatgtgccagccactctctcatctcaggactcttgcaccggctgttgtcccagtgtccccatggctctatctgtcacttccatcaggactttgttcaaacatcagcttctcagtatagccttctctgacaaccctacttacaaatgtctgcccactccttccctttccctgctttattttcctgtggtgacttaacaccatctgatgcactggacctgttatcttctccccatgagaatgtccactccagagacagatgtgactgtgcccctgcacccagcagagggcccagatagagtggggtgcaataaacatttggtgaataaataaatgactcattccaacattgctcatagattgcaatggaatctgtgatgcacaggactggttcttggctggagagaaggcgaagggattaaggtaatgaaggaaagctgctctataggagataagctttggagcacagtgaggggtgcagatggacaggagagaagagaaagggtggttcgggtgcagggcacagactaggaaaaggtctggtaacaggactgaacatgtggtgtctggggagtgggacaaagcagatgaggaccaggagtagggccagactggaagggcacatgtaggcaaggtccctggggatccgcctcaaagggtcaggaggcacatgtcccctcctaggactgagatgagccaaaagagaccccccacagatggggctattgcactaggcccacctgttgtgggagtgaccccacctgttgtgggagtgacccctgcagagtgcccctttccatggagtcccatggcaattctgggcctcagtggtacccactgtggaactagtgtgcccctgtgggtcagctttctctaaaggcaggccacaccccagagtgaggagaggtctaatgggattatagccttcagcctggccgagccctgctcctccatccaatcgcaggggctactctggcaaagctcacactggtggagacaggaagtccccctgcataagcatccagcttggacctgtcctcccacattgcaggcagtggatggcatgactggcgctgccatgcgattcctggagacagtgattcaatggacccatgggtccctgggaccagtttccaagcagtgtgagaacacatagctggccagtagccacactcaccccatccactcaagtcagatagggaagcctctgtgtgctgagttcttctacccacacccaatgagcatgacccatgcccctcctccactactgcagaatacccctttgagagatgccaggcctctgtttcacatcatccaaggagaggagaaggagctggggcaaaagatcccacaatatcgaaggcccccaccttggccttgcacacatgggctgacagcgaggcgcaaacactcctatgaggtctgaactcaacactaagaacctttccagtagatcatgcagacagagcttcagagcagcggttctcagccccagctgctgttcagaacccctgcaggtggagctcagac

SEQ ID NO: 40216 - DNA, 4968 bp, Homo sapiens
gtcttgtagtccatcttaaacaataagtaagtttagcatctatttcatagtgcagctgcgtctttttttttttttttaagagaaaaggtctcactgtgttgtccaggctggagtacagtggctattcacaggcgtgatcatagcacactacagcctcaaactcctgggctcaagtgatcctcctgcctcaccctcccaagttatctgggactacaggtatatgccattgcaccaggcacaacagcctctttttaatatcaaattaatgttttaatgatggactagttaactccaagttaggctgatactcaggaacatgcactatttatgcttttatggtttcatgtcctcctctccatgagtttgagaagcagggtcacagctggtcattaaatggggcaagccagtcaggtccaggcccatagggggctttgagcacagggtttccagaatctagggaagagctggtataaatgcccattgccaggcctgtcagagtctgatttggtgggtatgggtggggccaggagtctgtatttgtaacatgtcccttcagtgaaaaaaacagctctgccttgccctcaaggagcaaggggactgtcacctggctatgatgccctggccagggacacaagactagacaagtcccaactctgaccccagcttgctggagcccttctggtttcaatgaatggatgtggttaggggcctccctggaggaagcgcctggaggcctccttcgcctccccttcctcatcatggcacactggcctcctcactgccctcccacaagccaagctcaggccctcctcagggcctttgcacagctattccctctgcttgggctgctcatccgccgtgtcatcattctgctggctcatgatatttcaggcctcagcctgaacgtcacctcagagtcgcatcctctgaccccgccccagcaccctctcatgcctctctgctcctcactcctgacatgttgtgagtttatcattcatttcccctatgactatgagctccctgaaagcagggaccacaccctgctggtcaccggtgaatgtggaacacttggccctggcctggcacgaagaaagatcactcagatttgtctgatgaatcaatccccaaaaccagtgagcctgagtgcaccagggaatccctcccaccatctccagcgatgcttccactcagggactttctgtagggtgaagaacaggggattcaattccacaagtgttcggggaatgccagctgtgtgccggggcctgtggtggggtcaccaggctctaatggagtggcaggtgtataccagcccctgagcctgcctcagcgggagaagcaggtgactagcaccagagtccttgctccaaggaagccagagaggaaaaggaccaccaagcaggttgagctcagggagtgtcctcacgggggttcaagcccagcaccaggggtgcccctcgggtggcaggatcaggggtttctgagaagaggaggagaaagcatttggtgtgttgagggggtattgaaagacaagcaggtattccacagtgacgtgggtgccccagaccgtggaagggcaagtgtgggacagaagagatgcacagctttttggggctgagacaggcagtagcaggcccgtctggtgcagactcacttccgctgcctcctgcccatcagctcccttacctctcagggactgtcctgctccccacaacccagctcagctgcaaggaaacgagggggtcattcaggtgacaaaggccccctctgatgagtcatccttgggtctcaggtaagcctaacccccacaagtcactcacacactcagtgccagagcagccaccctgtgcaggggcgagactgatccccagagaggaggggccttgtcttctggtcctggacgagcacaaaatggactcggacagatgtggggtgattgtacttgtcagcctccctggggatcactgtgtgctccctcacgcaaagcccctctatggttccccatgctcctgggatgaggtcagactctccattgcctgcctgccccaccacctcttcagcctcgccttgcaccccgccccaccaggatcaccccatgggccagacctttccagcccattacctgctctaagctgttccctctacctgggaggctcctgtgtctgggatctttttgaaaaatcctgcccccaacgttggttcagatatcctgacctcccatatgctgcctctcctctggatcccacaaccccactccagggctctggctgctcagcctcccccaggccagctcctcctccactgtggctacaggagccagatcttaatccagctgaggatccctgttgtcctggagggagggtcctgtcagttcactctgctgccctctttatcatatgtgatggatgagggcgtgtgcacctgtgtctgcatgcatggctgaaagggcgtgcatgtctgtgtatgtgagtgtctgtgtgcatgcacaggtatgcgagtgggggtacagctgtgtctgtgtgtccatggctgcgcctctgtgtgcacacgtgtgggtgtgtttgactgtatctgtatgtgcatctctgaatctgtgtgtgcatggctatgtctctgagtgctgtgtgtggttcatgtgtgtgtgcctatgtgagactctgtgcatgatcctgcgcctgtgtatcttggtttgggttcctctagaagccaaccctgggaaaggattcaagaataattgtaattcatttatctgggaggtgattctaggcaacaaccggagggggcgttatgaagcaagtgacttctgtgggagagccgggctcaatcctgctggagagctgtgggacaggctgcagaacatgccagggtcaccccagctgaggcatgagggagtcgagaggtttttccacccattcttagcagccctggttgagacctggcatttcctgtctgccctacacacaggcctcaaggccccctgggcaaagaaagccctcaggcacagggtctccagtactggcagctggaagtcaggcttgtgtcacccagatttgtctgacaaatcaatggtgacacattttttttgtccgacaaaaaaatggtgagtgggaggggcccaggcgcaaagtcaacacaagcctctccaccgtgtgtccatgtttatgtgtatgcgctgtgccccgtcatgccacctggacgcagggactccagtgacctctccttgcacaagcctctgctggtttgggaaagattggcatgacatcagccaagctctggccttgccttttttccctcccggaacccggctggctcaagatctgagccgtggatctgcacccactttggggagttcctgcccttgggctagagtagaggccaagagtcaaagtgtggtgggggctgaggcagcaggatcgcttgagcccaggagttcaaggttagagttatgtttgcatcactgcattccagcctgggtaagagagcgagaccctgcctcaaaaaaaaaagagtggtgggggtagggacagggagatgaggaaggccctacagtggagaaagcaccaggaccagaacccagccctcccttgtctgaatcttgctgcccacaggagcctggacagtgaccagggaaggttcgaatgccacacaggtgagcttggcctctgctctgtaggcagtgggaagtgctgggagttgggcattcctgtgaggcgcatagtcaacattgtgagtagggctggatgtcgagctgtgagagggaaactagaagctggaacatctacaggaggcttttaagagaagcagagcggccaggtgcagtggctgacacctgtaatcccagcactttgggtggccgagggggtcagaacacttgaggtcaggagttcgagaccagggtgaccaatgtggtgaaaccccatctctactaaaaatacaaaaaaattagccgtgtgtggtgctgcatgcctgtagtccctgctactcaggaggctgaggcaggagaattgcttgaacccaggaggcggaggttgtagtgagccaagatcgagccactgcactccagcctgggtgacagagcaagactctgtccccaaaaaaaaaaaaaaatggagcagagctgggcagattgcgcaaagccctaagtgtgagaggtgactagcccagggccaaaaggggtgtgactgggatgacactggcagggggttagttctcctctttggggaggggtagtggccagttaccactgtctcagcaaggtttagaaattcaggagctatgggacagggccaatgacaaggggccaaagaatggggaaagggggagctgccaggtctcactgggaagatctaatggttattgggccaaggggagtggaaggggttacaaagaaagtgtgagaataaattggggagggtgtcaaggagcagcaaggacaataaggaggaggctggggtgacactggagcaccctcaacaaagagggagcatggaggctgccaggcctggagacctgaggagcagcaggcagaagggggcccagccccagggagatggtgacagcacagagatgcagcaggggcactgggcagtgccaggctgtgaggcaccagaatatccaaatgcacagttgggagcagtatcaaggactaaggcagctgtggggtttagggagacagtgagaggcacccccgaagcctactggggcagagcaggaaggagctggggctggagcctggggaagccaggaccctgggggagtctttaggagctagcacggaaggcttggggtctcccctgaggtttacagggcggggtgctgtagagggtcaggggatgggatcaagagagagggtgacaggtcaagggggtccataggggtgagctgagctcatgggcttagagttgcgtagatagactctaatcccaggtgcaacattagcttgctgtgtaaccctaggcaagatcttga

SEQ ID NO: 40217 - DNA, 2365 bp, Homo sapiens
tgaacccgagggcggagcttgcagtgagcagagattgcgccactgcactccagcctgggtgacagagtgagactccatctcaaaaaaaaaaagaaaaccccaccgtctcagcccaaaatctccttaagcaacttcagcagtctcaggatacaaaatcaatgtacaaaaatcacaagcattcctatacaccaaaaatagacagagagccaaatcatgagtgaactcccattcacaattgctacaaagagaataaaatacctaggaatacagctaacaagggatgtgaaggacctcttcaaggagaactacaaaccactgctcaaggaaaggagaggacacgaacaaatggaaaaactctttttaatttaataacagctgcaaagcacctatttccaaataaggtcatattcacaggtactggatgttaggatttgaatatatctttacaacaaccctagggcgtagggttgctgtaaggatttaaccacaggcctagaacatggtaaactctcaataaatggtagctttaaaaagaagggcaggctaagggaggctgagggagctcaggctggcagactttccctgcatgtgtccacatactcacacacgcacaggaggcaaaggaccacccatggaatccacccaggagggccaggacaggggactcaggggcctcagcctgcactcacctgctcagcagagctgagctcagggcataacgtcagcttcctgggcagaagagctgccaaaatcaaagctttgctagtcagaaaattccttgggaatgttgagcaaggccaccactgacatcatgtgcaaattcgcagacagcctctgcacctaaggctactcagacccacagccttggctcgatggggtggcagactctgtatgccaccagcacacccacccacagggcagaggggtcaggacatagaatcagacaggccccagggaccccagtgaagattataggcagccattccccactcaacagaggagaaggtcagagccaagtctgacattcccccatcccctctccataacacccatgcatctggcagtcagacaggcctaagctaaacctttcccccccagctacccaccagggtcatccccaagccaggtcagggccaatggaggttggggtggagaagacaggcttggccctatttcctgcccaactcagaaccttctggtttctgccacaggatgccttgcaagcttatcggggtcactgtgggcagctgggtgagctaagttcatctgtgctgccgtgacctctgtgcagatgcatcaagaacacagagtgctccggggttaggatgagggcagcgctgataaggttcatggaaccagtgacagagcacacagctgcccacagagtcactcccctgtgccccagcctggacacctcagctccctctcaaccccttcccgaggtgctagatgtatatgggaccagaaagccccctctgtgtcctcctgtgtgagagcccagctgcttaggtgtttgtgactctgggcacctgtgggcctgagattatgtgtatctgagagatattcagggcgtgcatctatgaatgtgaccaacaggctgccctgccagggcaggcaggggtacaagagtaggggtggaggaattgggggatgggaacaggttgccccaccaacatctggggcaggaccattatgggcagaagggagcaaaggcctgaggtgctcttgaggatttgcagggtgggtttaagggacagaaaagtgagttgtgagtgaatgtcaaagaggtcggtgggccttgtggactcctgtaagaacttggcttctaccttgagtgacagtgagccctgggggtgctttgagcagagaaggaacttcacgcagcttagcttttaaaagatcactctggctgctctgagatagatcagtggttttccaagtgtggtccaacagcagcacctgagaacttgcagaaatgcagattctcaggcgccctgctaaatcaggacaccaggggcagggcacagagatggcgtcacaggagccctccagggatggcttatacccctccagcagccttgctgcagggctcctggagaactccaaccccaccagaccccaccagatagctgctatgagcagaatgagttctgtggtcagctgcatgtgggaaatgaggctcctgcactcacaccccctaagttctctcaacacacagctttttttttgttttttctctcttttttgagactgagtcttgctctgtcacccaggctggagtacagtagcgccatcttggctcactgcaacctctgcctcccaggttcaagcgattctcctgcctcagcctcctgagtagctggga

SEQ ID NO: 40218 - DNA, 680 bp, Homo sapiens
accccaaggagcagcagcagcacaggttggagctgtcctatgtccacctggggtctctttgagaaggatgcaagatttcttgcttgactgacagatgtggaaactgaggcccagaagaaagcagcaggtttgccaagactgtgctacctcaccttcttggaggagtgctactacaaatagttcctgggagaaggggtcctggtgatgagtgctgcgttctctccctgagtccactcgcccgcctgccaccctccaccgtcgcaccctgcaaacccacccctctcctgtgctagaacttgctaacaccagtaccatgccctaccaatatccattgctgaccccggagcagaaggagctgtctgacatgactcatcgcatcgtagctctgggcaagggcatcccggctgcagatgagtccactgggagcactgccaagtggctgcagtccattggcaccgagaataccgaggagaaccggtgcttctaccgccagctgtggctgacagctgacaaccgcgtgaacccctgcatcaagggtgtcatcctcttccatgagacgctgtaccaaaaggcggatgatgggcgtcccttcccccaagttatcaaatccaagggcaatgttgtgagcatcaaggtagacaagggggtggtacccctggaaagggcaaatggtgagacca

SEQ ID NO: 40219 - DNA, 647 bp, Homo sapiens
accccgtggctcatttagggcctttctggtctgacctcttggcgtcaggtcctgaccatactcccgttgcccagctatttgggctgactcacgctgaccccccaaccgccacccccacagggctgagccttttccatccaaggcttcacccacagtctcccagtcgcatgtagatccacccttccaaccagcacccgcttctcttctggaagccttcctcgtggttgggatcctcctctttcagcgcctgttggagtaatagcctcctcctcttcctccatctggagttgcttacaacactctatttcactttccatgtgagtcggccttgtttcccaatctttctctatattaaacaggaaactcccagagggctagggactggctggtttaaacaataagcctctgaaatacaggacttcacctgaccctcctgccagccacaagtggcagggcgggagagctttacaaatcaggaaaccaagccttgaagaggttgtggcctgcccaagtctatggccaagtaagattcagagctgggtttgaaacccatgcccaactccactatccagttctttctgctttggctttggctctgatcacccccaaaaaaaccctatgagggccaggcgcagtggctcaagcct

SEQ ID NO: 40220 - DNA, 2068 bp, Homo sapiens
aaagtgccacagctgagtgtcccgcttcttccgcatcctgccaggaccactccatttgtgggcgatatagccagctccacctcctccgggaagcccttgttcacagtttccaaagcaagccgcaggcgggatggatcctgcttaacaccccggcccagaaccccttggatctccttcttcctccatgtccaagacacccagcttaacaaccctgtagcccccaacttggccctagcggcacctcgcctcgaccttgccattttatactcaattggggcgtagggttctgaagcccagggtagttggtggggaggcagcacgagggtgcaggatgaggtcgggaaaagagacctcgtccgcccaccgcctagcgcttcctcctccctgcaggcgagccggggaatccccggcagcaccgatatccgcagagcccaagaagtgggcctctctgccccgcccccccggctcgccgagggctacgcggcgcgcctgcgcagaagaaggcagcgcccaaggcgcatgcgcagcggtcactcccgctgtatattaaggcgccggcgatcgcggcctgaggctgctcccggacaagggcaacgagcgtttcgtttggacttctcgacttgagtgcccgcctccttcgccgccgcctctgcagtcctcagcgcaggtgagggcccgcgcggtaggtgcggcgccggccgaggaagccccggggtgtcctgccagccgtggcaccgctgccccgggtgctgggaccccatcccccactgtcccagtcacccgccgccttgaggtcagcgtttatcctccagatcttttgcctagacggccgcctcagtttccccctttcggccccttccggctattcccggttgaacccgccgctttagaattcccttctcatacccctcccgtcattctcgagacctcgaccgcgggtcacctctgacccccactgccggaggactgccttctttctccagactcaactccctcgactttataagcccctgcgcgtccccagtgaggcccaaggcgctggccctcatacccctaccctcatttgtgcccctcctttctcagttatgcccagttcttcccgctgtggggacacgaccacggaggaatccttgcttcagggactcgggaccctgctggaccccttcctcgggtttaggggatgtggggaccaggagaaagtcaggatccctaagagtcttccctgcctggatggatgagtggcttcttctccacctagatgtaagccaagatgtcttatctgcactgtgcatctccctaagaaacctctggcctcccaaacctgttcttgacctttccctcatccttccgcccccttgattatgtactgtcagtattcatttggtgaagttgctttgcaggtgcctttgtgtagcgctggagaatgaagaagttggtgacccgggtaaagtgtggtcaccattccttagctcacatcagtgctgtccttaggcatttttgagggagaagtgttagtattccagggtaccctttatataaactgcggttgacacctgaatccagtgagcttgcagtgatatttgcctgattattaacaactgttgatgtcactcttcatcagtctttccacaggagccagcatacttcctgaacatggagagtgttgttcgccgctgcccattcttatcccgagtcccccaggcctttctgcagaaagcaggcaaatctctgttgttctatgcccaaaactgccccaagatgatggaagttggggccaagccagcccctcgggcattgtccactgcagcagtacactaccaacagatcaaagaaacccctccggccagtgagagtaagtgtcattgacaatgaaggagcaggtatgggtgtttgtgctcattggtagactagaagcagtccccacagtggtggtgagggtcacactcactcacagagggctgctatgtgcaggctgggctctgagcacagattatctcatatgattgtccccccaagggtaggcacttttagcttttccatctttaaaggtgaaacagtggccagtgtt

SEQ ID NO: 40221 - DNA, 985 bp, Homo sapiens
gacttcaaggttcagtgagctatgatcacgctattgcactccagcctgaatgacagacagagactcagtttctaggaaaaacaaaaaaatgtatggtgagttgaggcttgaaagccatatcccttgcttgcgtgagcaggtgcttttggttgtggtgactacaggtgctgttggtagcctgccttctgtcctttaatacttaccgtctacacatggcactgagccaaacacgacatacagtcttatttacttacaagatgaggacatcaaataacctgcccaggatctccctcagttgccaagctgagacttgttgtatttcaccaaaatgcagctgtgtttcacaaccaccattctgtactgtcttttgttcaatttttagctgtttccacttttcagtatgatcgtttctttgagaaaaaaattgatgagaaaaagaatgaccacacctatcgagtttttaaaactgtgaaccggcgagcacacatcttccccatggcagatgactattcagactccctcatcaccaaaaagcaagtgtcagtctggtgcagtaatgactacctaggaatgagtcgccacccacgggtgtgtggggcagttatgtaagtagcccttggctttcaaatattactgttgttatttggcaagccaatgatgatgtataggggttggatcttttatggagggaacattcagtagctgaaagtgtgccatagcaaaatactattcttagcttctgaaaaatatctacagattacttttaaaggaactctaatatgcaggtagctgctggagccccttaacttgtgagggttcaagcttataggctcaatgaccacacacgtcagtccactttctatcactctgcaagtgagtgtgcctttaacaccaggcagtctttcacagagacatccttggttgtggctgtgagtggagaaatacgaatctagcagcgctagagaaaaagctactccaaaagaca

SEQ ID NO: 40222 - DNA, 535 bp, Homo sapiens
tcagttgaaatttctgaccccaggtttcacagtgagagagttgctacatcaacatgtttcagtctcctggatcctagaaaggggaaaaaattcacatggtgttgagaaccatgagctttattttctggttttgtttgtatttttaaacagggacactttgaaacaacatggtgctggggcaggtggtactagaaatatttctggaactagtaaattccatgtggacttagagcgggagctggcagacctccatgggaaagatgccgcactcttgttttcctcgtgctttgtggccaatgactcaaccctcttcaccctggctaagatgatgccaggtaaggaagcctggcatgagtgccttcgagttttttgggtttcttagtaataacaagaatattggcaacaaagaagccttaccagaacctctcaattgaaaatcataatcctatctgggcatttgttctggggtcaagcatgaaatgctgactgtacattatgggttccaggagaacgtgataccagtgaaaattcaaac

SEQ ID NO: 40223 - DNA, 1040 bp, Homo sapiens
ggataatgttccctgtgggaggatggtacaagcactgcagagccagtcttgttccaaagagcacatgcagtgcagacatggggagtggagctgtgctggctgtcagagcagcaagcctgggtgagaaagggaaaggagaataagatggtgggaagggaggcagcagcagggtatttgggcacactgggaccagtcactgaggtgtcaggtctgattggaagacctgcattttgatcctggttagacaccagcttggccatatgactttgggcaagacccttttgtaactttccttagcttttttacccttttaaaagtgagtagccaggcacgatagctcacacctgaatcccagcactttgggaggctgagacaggaggatcacttgaacccaggagtttgagaccagccctgggcaacgaagcatggcctcctctctacacaaaataaaaatttaaaaaatcagccaggcatggtggtgtacacctgtcctagctacttgggaggctgaggcggaaggaatacttgagcccaggaggttgaggctgcagagagctatgatcatgccactgcactccagcctgggtgacagagcaagaccctgtctctaaaaaaaaaaggaagattagatatccttttatagtcatgcattgcttaacgatgggggatgtgttctgagaattgcatcactaggcgatttcatcattgtgcaaacaccatagagtgtacttacataaacctagattatatagcctaccgcacacctaggctttgtggtatggcgtgttgctcctaggctgcaaacctgtacaacatgttactgtattggatactgttggcaacaccatggtatttgtgtatctaaacatacctaaacatagaaaaggtacagtaaaaatacagtattataatcttatgggaccaccatcatatatgtggtcgtcattgactgagacatcattaatgtggtgcatgactactccaatcagtccaggaacaaattaaaaagataaggagaaaagtcagtgctttgaggctcc

SEQ ID NO: 40224 - DNA, 796 bp, Homo sapiens
aaagcctttggttgtgttggagggtacatcgccagcacgagttctctgattgacaccgtacggtcctatgctgctggcttcatcttcaccacctctctgccacccatgctgctggctggagccctggagtctgtgcggatcctgaagagcgctgagggacgggtgcttcgccgccagcaccagcgcaacgtcaaactcatgagacagatgctaatggatgccggcctccctgttgtccactgccccagccacatcatccctgtgcgggtaatggcctgtctctgattggacttgccgtggggtgtgcctctacacatgatgtacggatgttctgcttcataccttcctgaagttgggcttgagcggggtgactgccagggcaggggttgtagccagccaccctctgtcatgtttccgccattggctgacttcaccaagagaagaaagcctttgaacccagcaggctggggcagaagttccctctccggagcactgaccttaacagggtaaacacagagcttgtatctagaaagctccagaagcctgagcttggccagctttgaagtatggctttctacttagtaaatttcaaaataggttttgcccttcccactacaaatggtagcactgttgatgtcacagttgaattagtgtaatgaatacagctagtataactgaatctagattatacatcgtgggtatgagagtctgctggtacgaacagaaccagtgttttctgattaaaaatgtatttctttttaataaggttttggttccctggtgttcacgaaacaac

SEQ ID NO: 40225 - DNA, 1039 bp, Homo sapiens
gtctcccatcctaccctcgtttgttcactgtgggcctcaaatacctaggttctctgcaacttccaggccctggtgtgagccattctttctctgccagtatgcttctcccctggatcatggtgtggctgcctctcttcactcagacaagggtccccaaggagaccatgctgagcatgccggctaaggcagaccgtcttgcagtctcaccattgcttggcctctgacatgatgcccttcagagctctggtcaccacccacaatgacttttcccctgctggccatttgccctgttgtaatgtcatctccctgaggacaggtgccctgtattctcacttccgtgtccttaaagtccagcacagtgcctaatacatagtggatgctaaacaaatgtgtactgaatgaaagaaaaagaaacccaatggcaacaggtcaagtttactagaaagactgagacagctgaagcaaaaccaagcagctggagttgagcagagtcctttgacctcgcctcccttctcgtagctctagaaacggcagctgtgttttctcctctctgtacagagttgggctggcaccccttcccaggaagctggcagtgggcctggggcacacaccctcagagctcggctgagtcacactcccatcagataaaaccatacacctaggcaggctacagggcttgatggaaaccacatcacctcggaatcatgattcagttccttcctgctcaggaaacgagcctcgcttagcattcctggctctgctgcctcacaggagctttcagggctttccattgtccctgtcattcccacgcccaggactccatcacctcccttccttcaaatgggattgttctcctccagctggggtaatgttgctacctgaatgcttaggaagatccactcttccttcgtaagacccagagccagcagaagcaaggccctcaggtgcatgtgcccctccctgcttcttggggttatgagaacgaaggaccgggtgatctgcaggaagtaggcgggattcgtgaactgcttaaaaatgg

SEQ ID NO: 40226 - DNA, 3756 bp, Homo sapiens
cagtgagctgagatcacaccattgcactccagcctgggcaacaagagtgaaactccgcctcagaaaaaaaaaaaaaaaagagactccatcttggtcattgggctgtagagctggaaggtgagagccagtgagtgaccaaggaccccagggcagaggtgaggaccatggtgagagctggggagccataagtggtggatctactagtggacagggaaaccaccacggcccatgtggggaagggccctgcttgggtccctgggtgagcagggctaggccagtgtgaccttgaggctgcccaagggtcaggggaattccgtcaggaacacagctggaggcctgaggtcagagaatatttatagggccaggactgggcaactcaggggcgggggggcctttaggaaaacaaactctggttatgtcctcaggtgccccccctttgcagagtgaccgttaatctgagacctcaggctatgcaccaccctccaaggccactgggtgggctggggcccaactgagctcagcagacccttagggctcagagaaacatggcatggaactgtaggcaggtggacaccatcccactgggccaggacagaactttccatcggcagatcccaagcaggtccctgaggccccaagcctggcctctggggctccacttctccctcagctgtgtgactcctgacctctctgaacttcagtgtataaaatggaaataatagccccaaacttggcagggctgtggtgaggggtaaatgggagaaagggcttggcgatggtggcctctattaataacaattaatcttttattatgataataacagcaagctgactgtgctgagctgccccttctacctgcccagaccttcccagaaggaaggccaagaagctcccctaagggacaggccgacgggccccttctagtgttaccagggcaaactgacacccccacagggaaaggcacatccctgcccaccccagccccaatgcctgcccagccaccatcaataatccagaggccaggcctgggacacctgagcctctattatcaatgattcatgaacaccctccctccgactcaagtgagcctcacattacaggtccctttcctgcctactctgcggtcagcagatccacacctatggtcaggacagggctggcacctggtcctccagggtgatctctgctgccaacttcccaggccagaaatgggaagaagtgggctgctcacaggtggaaggagggctaggggcagcccagtccccagtgaccccctcggtgggcctgtctcactatgggaaaggagggagtgaggcagcagggaaggggtatggggtggctaacttcctgggatctcctccaccagggctggaggctgggaggcagcagctatgaccagacaaaggggaaggaagaagctggccaggaggcagttccctcctgtggggctgagtcatgaagcctgcccgccagctcctcctggagaaaggctggcccatctgggagccctggccctgacccaggcccctgccttcgcggggccagggaaaccttctcagggcagcccagccaccaagtggccacaaccgcaccaggattcaggtggtcaggcaggtcgatggtggcagccccaggcaggggatcctagtgtggtgggaggggtggctgatggccaaacccgccaggctgtctgggcaaacagcccgggccttccccacaggccaggcagctctctcaggccagtgacagaggaggacactgagccccaggtagagtcagggcacctggctcccagccattgcttctctcacagcctgtccaagaaggaaactgggacccctaggggaggggagggtgtgatgcgggaatggtgaagcttcctagggctgggggctgggggtgggagctggcctggattctttagggccaggactctccccacaaaaccccatatctggacctcttctctgtctgcagcctggagctgggatcttccaaccagactgaggcagactcagaaagtcacagtggaaaatgggagggaggtcagaggtcaaggtcagataggcagctttctccatcccacgtagaagtctctgttccgggttttccctagcctggggagagtgagtgtcctgggaggagcaaaggtcagggccttctcctaacacacataaacaagcccattcaagtcagacacatgcggtatatgcatccttggcaaaaatgcacactgagacgcgctccaactgtgcacacacacagacacccacatacatgtgcacactgccatgaaacactgatgtctaaagagggtcctatgcgacctacagtgtccattcaaacagtcactagtgccagtgcatgaatgaccctagatgtacacaagcgagtcacatccagaggtgcacaggcaggactgtacacggaagacgtgtgcacatgcgtgtacacccactcccggaaaggaacaaaaatatacagatgggcacacacagccacattcatctccaggtaggcacacagatacttccaccccagttgtgtacgtacacatacacccactcccagctatgcacaccacgtccgtactcccccagatgtgcccaccccaggcgacccgcggctgcaaaagagaacaggaagctttctcccggctggtgtggggtggagggaggggccgagagccgggggggggcgcttccgagagcccagaccgaggccccctgcccgcccgccatccgccctcaccgtggatgcccgtttggtgcgccatggctcggcgcttcgctccgtccgcgccgtcggagccctccgcttgaccctggcccggcaacgctcgctggaccaagagaggtggaggatgtggcggaggctgtcgaccctcgcgcagcttcccgggcggtgccgcaggacccgcccccagcggcgccccgcccccgacaggcgcggcagggaggcggggactcggggccgcgcgtgcgcgcagcctgcgcctcggtccgggtgggtctaaggatgatgattgatccgccgtgcgcacgccagcgcgttcctctgtggcaggagaggggggcctgcgtgtgaccgagcgtgcgtgggaggacgcgcgtgtgtgtctgtgcgccctgatcacggtggtctgtgggtggggcggatcgtgcgcgcgcgcccgatctgtgcgccccaagccaggtgggtctccgaataggagtgggtcccagcgtacacgggtttgcacccaggaaggggtctgcttgtgggtgggcgcgccagctcttccccaggggccgtttcttgagcgcctcccgtggggtcctgggcacctcggggtgatcatggccgctaggctttgccctcacgggcctaggcccgccttcacccactagatggagtgtatggtggtgagagcccgccgagacaatgtgaggggctgccaggagaaggcgaagattggaaacctagaggggagaatgaaacagcccagcagagtggagggaaaagttttctttctttttctttttctttttttttttttttgagatggagtttccctcttgttgcccaggctgaagtgcactggcgcgatctcggctcactgcaacctccgcctcccgggttcactcctgcctcagcctcccgagtggttaggattacaggcatgcaccaccatgcctggctaattttgtatttttagtagagacggggtttctctatgttggtcagtctgatctcgaactcccgacctcaggtgat

SEQ ID NO: 40227 - DNA, 1089 bp, Homo sapiens
gattggaggccgcctgaaggaacctgtgctcggtggcatttactcaatgtgggggtctgacacctcccagctcattttgtccccatcttccccttgcgtcaggtccccacccagcaggaggaggtccgaggatctgcgcgacgctggccccgcggagtgtgggggacttttcctctcaaccaccagtgccccgcaagcgtgggtgaacagtcctccctggctactgtgggacgctgggcaggcgacttcgcctctctaggcctcggttttcctgcttgtcaaatggggctgatgccggcgtgggcttcttcaggcggtcgcgagcgttgacccctggagtcagcgaaccagccgcgcacgcactcccgggcggaggtcggggctggggggcgacgcctcccgtctgcgcgcccccggccccgcctcccgccggcgcacccctccctcggctccgcccgcggcccgcttcttcctcccgcgggcggcccagccctagcgccccgcgctccgcgggcagccccctgccgccgcgccatgtccgccggctggttccggcgccgcttcctgcctggggagccgctccccgcgccgcggccgcctgggccgcatgccagccccgtgccctaccgacggccccgcttccttcgcggctccagctccagccccggggcggccgacgcctcgcgccgcccagactcccggcccgtgcgcagccccgcacgaggacgcacgctaccctggaatgcaggctacgccgagtgagtgcccctccccgacccccagctcaggcccgggcctgaacccgcttcgggtcctgcgcccgcctagaaagcgggaggagctgagtgacagtccccacccacctgtggacagccccttcttgccctcacctccgaatcctgacaacttcccggtcatcccgacccagcgttttccttgggattccgacctccccctcagagaagacaggaggtcgggaaggacctgcagcccaggggcttccaagatgaggcccagagactcggtagagttccagcattcggggctttggagatttcccctcgccctctacccccaccatctcaccct

SEQ ID NO: 40228 - DNA, 2453 bp, Homo sapiens
tgtggcaacataaaagtttcatgatcagaattggaattcaaagtggaccaaaaagtgtaatagaaaaaaaaaagtatgaaaggaaacctgaaattgttctacgatgcttgctttgttttaacggaagctcacattcaggtcaggatgggacgaccaagttcgtttgtgtgtggcaaaaaggaagttttagatgttgctgaaaagttcacttatgaacgtgggcaccaagtctgaatgagtaagagaaaggctaggagcaggaagaaaaagcaagggggctcaaaggggcacaacaaataaatcctgacagctaagaagtgcaacccacgcggtctgacggcagaaaggccgcgggaagctgaggggcaggggatgggcggagtgccagggcggaatcgaggtcacagtggagagagcacaagagagagctgacgctgccgaaggaggcagaaaagcagcccctgcagtcctgcgtcgaggccggagcagaccagcacctttgacagcctgaggagctgaaaacgctacctggtgggcccagggtgggcggaccgggcgtttaaaggtcaaggtcaaggtggggtttggcaagtgatgcatagcgctcaaaggagaccgaagacatacaaataatattataaaattatgactatcgttatcttttttttttaagaagaaaaaaataaaaggtctcctggacggctgcggggtggaggcggccctggcaggaacgcgtgcaaaataggctgggggctgaagtcgggacggagggcaggccgagggacctgtgctgggccaccggagggaggcactgagactcgggcccagggcctccgccgcactcacttgccctcctggcagtcatagagcacgatggagtcgtcgtcgctactcgagatgaccgtctcgccgttggggctgaaatcgaagcagttaatcttgtccgagttttcgcggaacaccttagcgacgcggaagctccgcaacacgctgtcggtcagcttcatggcggcggctggggaaggcagcggcggcgcagggccggggcggggcccggcggcgagcgggcgggctgccgaggggccaacccaggcggggcgggcgccgcgccggcggctagcgggaagtcggccaacagttgggccgcctcctcctcttcttcctgcttggtcgagggtcttctgcctggactgtggagcctcgccgaccgttcgtcctcacagccacctcacggacaaccggcgcgtcgccggctcattgtgtccgccattttggggcgacaggcagaagctgagggcgaggagcctcagccgcggcgcacgccgggaaagggggcggggcgggaacggcggagcaaggcggggaggcggggtggtgacgtcagcgcggccgcggcggagtgtagtggcggggcgggctgctggcagggagcggccgagacgtgcagggccttcccgggggatcggaaggttgcggatgccttgggagccgggggcccttgcgcgggattgcaacccccgcgaagactctggcgcctcctgcaggcgtcccgatcgcaggctgcgtgggagggggtactgcagggtcgggtatgctgctggaggccggttttgggggtgactcaggtgagccgctcgcaggcaagcttgaccgctagtccaccgcagcgtccgcttagacagcttcgacctctttacttttttttttttttttggagatggagtctctcgctcaggcgcgcgccaccacgcccagctaattttgtatttttggtagagacgggggttcaccatgttggccaggctggtctcgaactcctgacctcacccgcacccggcctcgttttcttaatcgaggtagactttaggtacagtaaaaatcagcctttttaggccgggcgcggtggctcacgcctttaaacccaccactttgggaggccgaggcgggatgatcgcttgagctcaggagttgagaccagcctggccaacatgacaaaaccccacctctactaaaatacaaaaaattagccgggcatgatggcgcggctgaggcacgagaattgagaaaggcggaggctgcagtgcgccgaaatcgtgccactgcattccaggctgggcgacagagcagacggtttccccccaaaaattagcctttttagtggctagttttatgttctgacacccatacacagtcatgcagtcaccaccacattcaagatttggaagagttgcactatcctgtttgtagtcaacaggattattttaaaggttctatcatataagtgattatttgccttaaaagaaagtttatctctaacaaaggaaagcagtatttgaacagaaaataggaaccaagcttcctaaccttaactttctgggcaaggggttaaactcaatgccaacctatgtggcttcacagatctgtatcttgtgtgaagctcctcaaaaggttaa

SEQ ID NO: 40229 - DNA, 1834 bp, Homo sapiens
taaatttttctatttcatgctgcacaattggaatggaaactgtcctaaacaatgtgtcctctttccaaaacacagagctccttatgaattctaattctttgagataaatttctgagctccagtgcccagcagcagggcttccctagagattgactaacgtcttactcaacccttggaataactagaatcaggtgactctcttctttgggacagttgcatgtgtgtaagtgtgacagtgtgtgtgtgtatcagtgcttacacagccctcggaataactagaatcaggtgactctcttctttgggacagttgagtgtgtgtgtgtgtgagcttaattgccaaagaggaaacgcagaacactagaacacaaaatgcctggtgaggtgtctgagccccagcaccaggaagtggtcgcctcacaggttggcaaaaaatttactgacaacagtataggtttgaaaaaggaaaatttcttagaaagaaagaacgctgcagaagagtgcagcggggcaccccagcgagaggactgagggccttggtggattttccttaggtgcatttatggaccttcaggcaggagcttagggttgtaaaattagtttcagcatgacattccagagatgcctagaaattttagttacttataaaagttgaaagaggcctggaaccagatgcccactttagatactagggaagtttaattacttctaatttccccagataaggagttttgcctctggatggcctgttggatggttaccaggtggtctttgctcccttctaaattcctcagataagggccaggcacagtggctcatgcctgtaatcccagcactctgggaggccaaggtgggtgaatcacttgaggtcaggagttcaagaccagcttgggcagcatggtgaaactgcgactccaccaaaaaatacaaaaattagccaagcatggtggtgtgcgcctgtagtcccagctactcgggaggctgaggcaggagaattgcttgaacccgggaggcggaggttgcagagccgagatcgcactccagcctgggcgatagagtgaaactctgtctcaaaaaaaaaagaaagaaaaaaaataaatattacaaggatgaagtaagccatttttatttagacagaatttaagtgtgtgcatggaaaatcttgtgggatatacatgaatatgaccagaaataataaataaatttagttactaatgtatgtccacttctactggaattcctcagagaggtcttgagactccaggaccgggggcctggataaaaagaaagtatctttccctggcagcaggactaactacccaatttgtagggccccttgttaaaaaattgctaagaatctcaagatgacaacaacagaatattaaatgaagtgcagggtccttctgactatacaagtcacacacccatgaagctggctcaacccaggactagtacagcaacaacactgagcctttctacatgcactggaaacatactgtgatgaagactctgaagttctgagaggttaactttctcagggtcacttaaccaataagcactgaagtctggattcacactctgcttcagcactggaaagcttgtgttctgtttccagggcaaaggacaagaaatcattcacatttaacaaagaccactgtcggtaaataataccttcttagtctggaaggaaaggatggaatcttcccagataagccttgactgctcagagccagaaggaactgcctagagtctcagggccaaggccactgtctctaaaactacagcactgtttcctaaggcttaaaaactcccaaacaatccaacatacacagcttta

SEQ ID NO: 40230 - DNA, 2382 bp, Homo sapiens
aacatggtgaaactctgtctctactaaaaatacaaaaattagctggacgtggtggcgggcgcctgtagtcccagctattcgggaggctgaggcaggagaattgcttgaacctgggaggcggaggttgcagtgagccgacatcgtgcccaggctgcagtgcagtggccgtgagctgagactgtgccattgcagtccagcctgggtgacagagcaagactccacctcaaaaccaagagaaagaaatgtgtttttgtttgttggtttttttttgagacaggggcccaggttggagtgcagtggcgtgatcaaggttcactgcagcctctacctcccaggctcaggtgatcctcccatctcagcctcctgagtagctgggactacaggagcatgccaccacacctggctcttttttttttggtagagataagtttcgccatgttcccaggctggtctcgcattcctaggctcaagcgatccgcccaccttggcctccccaatgttgggattacaggcgtgaaacactgcgccctgccaagaaacatgtttcaataaaattgttaggaaatcaagtgtgtgatttgtgatgcaactctctcctctatctccctaagaaaacatcagtaaaaacagtgaactgttttgtatttttggagtctgatcaggactcatcttatgaatgtgggaaggcatccagccaacacagggtaggccccggatgagagtagggacagcgaggtaggcccagagtcattagcgtttacatgccgcttatgtgcttgaggatcgcagaatggaactcttgctaagccagagctgtatttggtggcccatggtgggagagggaagaacaataataagttgtggaataaaagccatggagaggagcgggaattacttaatctggctccagaaggggtgagttgtggggaagtagtgattctcagttcgtttgctcagcccagtcagtgcctgacactcagggtgcatctgctgactgaccgtacaggataaaggaagggagaggccgggtgcggcggctgaagtctgtaatcccatcactttcggaggctgaggtgggtggatcgcttgaggttaggcgttcgagaccagcctgggcaacatggcgaaagcccgtctctactaaaaaatacaaaaattagcccggagtggtggcacatgcctgtaatcccagctactcgggaggctgaggcatgagaatcgcttgaatccgggaggcggaggttgcattgggccgaaaccgcgactctgcactccagtctgggcgacagaatgagaccccgtctcaaaaaaaaaatcggcaatcggtgaggcggggattattaccctcaatgtagagatttaaaaaatgaggactgaaggtgactccttccaggtctgtcagtggccagcaaagagccaatatgctaaactctcccctcccggacaccggcttcagccagagctcgcacccgcctgcgccgctccacccacccacacttccggcttccgctccgcccaccccctagtacttccgttctccagcgctgggcaccgcggccggagctgtgggctggtaagtctgcgccgccagggctcgcatggccttcagaagcggtccctgggctgggcgatgacgggtcctggtggcagcaggcccttctttctcgcatcaccgggcattacgcggcagccatttccctcgctaaggccctaccttaggatgacgtcacttccggccccctactgtctagggaaagccggaaatggtaccagccttctttgatggcggggaggagtcaagaccggtagtcttcctatttccgttgttttgctctggagcctcccggagtttcggagagaccgtgtcttggatagaattggaggacttagcaaataaaaatgcaaagcgtccagttacattttttttgagttagaatctcactctgtcacccaggctggagtgcagtggcgcgatctcggctcactgcaacctccgcctcccctgttcaaatgattctcatgcctcagtctcccgagtagctgggattacgggcgcccaccacacccggctaatttttgtatttttagaagagacggggtttcaccacgttggtcaggctggtctcgaactcctgacctcaggtgatgcgcccgcctcagccttccaaagtgctgggattacaggcgtgagccactgcgccgggccacgtccagttaaatttgagttaagataaacgacgaataattgttaagtcctaaacattgtatgcacatacttatactttaaaaattacttgtttatttgaaattcaaatttaaccggaagtcctgtattttctctggcagccttagcattgagcgtccccctgtcctgtgctcata

SEQ ID NO: 40231 - DNA, 3174 bp, Homo sapiens
gctcagtccatacttgctgatgaagtcagcttgcaacatttatggtaggcatttattaaagtagatgcaatagtacatatgtagtacagatgagctgtttgggtctttgttgttcctatacccctctacagcttcctgaccttcgccccaaggcttctttagcttttactctgcccagtggggaaaatggctatgggctcagttatgggagcctggcctttgcctacttcagcccttgggctctcaccactgtgggtggtgtgacctaggacttgtttttgttatcttggaaccagaaggcgtgttcttggcagggttgggtctggccaactgtgtgggtagaagggcatccttttctgtcctgcaattgggcttcatggcacatggcctcacatggtgcctggggacttttctaaggttccaccatgagccagactttgccctcactcctgatttgaacctaaacctcttgctgaactggtcctgcatactgagattcctcagattgcttgccctgaggatgtgttctgggtttgacctgataaacctgcagcctcctatagaccctgacttcccaggctcctaatcccagtctcatgagataatgaaatagagaagactggaggtcaatgggctcagggtcagttggtgggacaatcaacagcttcctggcagcagaggtggtaaagaggcaaggaaggagtgccagaaaggggcgttgccccagggtaacagcgcagaagtgcagggggtggaaaaggggtgggatgggagcccactggtagaaattactccctctgtcaatgattaactcccagccaaaggggtgacctgggaggagggcccagctaataggaactttggacttgaggcagagtatccagagggccggcatgtggtctgcagaagaggaggacgtggctgggtggcagggctggtctccaaggacgagtaagatcctgcagctgcaggcttcaggaagtctcctggggctatcagatggctccttcttgtagcagcagctgtggggtccactggccctgagccctcagaggggcggccgtgggggacctcctgtcttttgccttgcaagggcctcagttgtgctttttccctctaggcagccatgggtgccaggcagtgctgagagcagtggggcatggctgcagccctgcaggtcctgccccgcttggcccgagcccccttgcatccactcctctggcggggctcagtggcccgtctggccagcagcatggccttggcagagcaggccaggcagctgtttgagagtgctgtaggtgcagtgctgccgggccccatgctgcaccgggcactatccttggaccctggtggcagacagctgaaggtgcgggaccggaactttcagctgaggcaaaacctctacctggtgggctttggcaaggctgtgctgggtatggcagctgcagctgaggaactactgggccagcatcttgtgcagggcgtgatcagcgttcccaaggggatccgtgctgccatggagcgtgccggcaagcagtaaggagccatgggggcctgcctccctctatctatctggagggaaacctgggcccagacacaggctgaatcgggcctcccctccccacccgcttcccatttctcctggatctggcctggccccaggatgcatgtcagtgggcatcttcgttcatgcccccatcacctgtaaagttgagagatcaggtgggaggagaggagtccaccccatctcttgcgtgctgacctttccctccccagggagatgctgctgaagccacatagccgtgtccaggtattcgagggtgcggaggacaacctcccggaccgcgatgcgctgcgggctgcactggccatccagcaactggctgagggactcacagctgatgacctgctgctcgtgctgatctcaggtgtggtaccacattggcccaagactgttggtggggggtgcaccacctgatctctcaggtcttcgagagatcaggtctgagcccccggggtcacagggtaaagttaggagcaagggaggtggtgaggagcctggatggtgactcctgggttgccttgggctagtcgtctggcctcccctgagctgtggagtcctccccctgagctgaccttttcggtgacagtgagagggtgcatggggagcacataatgcagggcctgacacatccgtagagtccttggaaaatgtcactgctattgctgctgtctgtactaatgtcacctggggctaggccctcagacctcatggagtcctctccttgatcttccattgtgtgccccctgccctgcctcctgttctagtctcttaaggagtagttagttcttccggtgcctactgggacctggggtaccccaaggcaggggcaacctcaggtggccaggatgtggtgactgtacacatattgcatatccacaggggggcaccctaaccccacctttccagccccctttttctaatgtgggcttgtcacccctgcttgcctggttccctgggttgggatagcccctctacctgataccctcattgtcttgagaggtgggggttcagctctgctgcctgcccccatcccacctgtcacactggaggagaagcagacactcactagactgctggcagcccgtggagccaccatccaggagttgaacaccattcggaaggccctgtcccagctcaagggtggggggctggctcaggccgcctaccctgcccaggtatgagtcccttcttccccaggcaaccttgggttggtggagccaggcccacatgtgccagggatgtgaaagctagaacagcatatagattggcaggggcatggtgtgaaagaccatggggccggctgggtgacatcatgggaggggtgccagagacggggaggaggtgcctgcatgaccaggtgttttgcaagcccacgtgagaggagttaaccatgggtaaggaaatgcactgagttgggggagggtgtgtggataccctaggggcagtttgtccttatgggctctgaggggaggaggaagtgggcctgagccttgtctggtggcccttccccaggtggtgagcctcatcctgtcagatgtggtgggggaccctgtggaggtgattgccagtggccccaccgtggccagttcccacaatgtgcaagattgcct

SEQ ID NO: 40232 - DNA, 1069 bp, Homo sapiens
ggacaaagagtgagaggagtgtgaggccaggtagatgcccctcctcctcctgtaaagggaagtgggattctcatggcaatgggtctttgtctcatggtcttttccttgtggctccctatatcctgcaggacagccccaggttcctgtcccactctgccatgactttgggtgaggcccctcctttcttgccacctcagtttgcagacccagagtatgggagcagattgccaaggaagttgtcagctctaactgccaccctagctgtttgaatgtccctaggccaaagcaggcaggccatttgcaaggggtgatggggaggagggctgccccacctctttgggagtgagggattccatctctttggaacaaacccttccttactgacctgctgggagttttttacacattcgctcctggaggtctggcaagggcagtgcttttgccaggaatggaagtatttggggcaggaaaagtcttggtgtccctcacaccactctgtactgatgaccccaccgtgacactgggtaaggtttctgttcctcattgtgcagaagaaaaactgaggcctaacaaaggaagggacttgcccggtgagtcatcagaataatccaggcctcctgccccgtccagagccctttctaggggtggatgaaaggtcaggctggcagtctggtccccaaagtggccagccttgggggatgagtggatgggagggctcagctaagcctcagcaaacccaggctccctggaaggtgggagtgggggcacttggtgggtcacagggccaagttgatgaagtcacccactctgccaagatattactccagctgacgctcaccaaactccttgggactgaggaaaaatcagaggtgctcagagcctaattataataaacagtttcctgtgcagctcctggagcccccctgggaaatgtcctgtggaagatgtctttgtctcagagcctgccatctggcgctttggcccaggaaggtggggaccaacaggcatcccccccttgggccgctgctcctggagcgcagagcctcagcatcctgcaccctcagatgga

SEQ ID NO: 40233 - DNA, 927 bp, Homo sapiens
ctccctggtgggtctcaagggaggcgcctgggctcggggtccctcccgggtcctgcctgtccctgggaggttgacacatactcagggctccatggtttggtttcaggaggtatgtcgtggcccccgaatgagccagaacctcctgcggcaggctgaccttgacaagttcaccccaagaggtcagtgctcaggagggctgtgtgagtgggtcccggtaggtatttcaaagcaggcttttggcctcagggagacagccttttcttggctgtgggccccagcttccttaactgtggagcggggataataagaaacagggtgcttcacaattacccactcatggtgagtgctcagtcagccacagctaccgagtcattactcttagtggagccatgaccttgatgctgggctgggctgggctgccaggggtcagagccacagctttctttccctggctgaggtcagaagggcatatgggtgtattttctgcctcctgtggaatgtgggccctgaagaggccaggactgtctgagttgcttcctgctggagacccagcacctagaacaggacctggctcagatagatgcctgggagatccctgctgaaggaggaaagggggactctcctctcaggctcatggagagtctcagagcacagctagggtggcgaggactgggacaggcctgcagggtgtggggccttccccagtggcagaggggagaacaggggctccaggagaagctctgagtggtggtgaggaactgcgcaggtggcctcccacctggccagggtttgtgcctctcccctggcagacaggacgtccccttggatcaggcccagatgccctgtggctgcccctgtccgcccctcctccccacccccaggaaagacctggctccttcctgccgctgtccacaccagtcctcttgg

SEQ ID NO: 40234 - DNA, 2559 bp, Homo sapiens
acacatctattctgcaggaccactgggaaaagactctaagtgtgggcacccaggaggggccttgtcaccccaaccaatcaatacaggatgactttgtgtcaggattaaagccaaggacacatgggcacactaaaattaatacattacacaactgcacaaaagacattgtgtgaccggggtcttcccgctgcaaggccaggaaagcagctgaaccaaaggatgcttaggggtggggagggggctgctacaaaaagggaagcgctaaggaaagtttgggagaaaagaaagtatcagtttgatcaggagcgggcactcagagagcaaggctgctgctttctgtgagattttacaacgtagggttcctggcactgtcttccctaaggggccctgttctctgggaccttccccagcactctgggtgtaaggggcagccctggtgtacagccactcacccctgacatttgctctgaaggtcgtagatctcctccacttgcacccccttgacacctgcgatgaggaaaggaaagcagtagggaaggacagcccctgatgagtgagggcgcaggggtgggccgccacagccccggtccggcagggagaaaaggctcttaccgaaatcttccacgagcagggtgaagaggcctgggtggggcgacaagaggagggggtgatggtcaggcaggcgcgtcccgggcccatccggcctccccagcccctggccctcccggtcccctcctcacctgggtcgctctccagctccagccagcccttattcatcttcccgcggggcggcccctcagcgccatgtccaggccctccctccccaccgctgcccccaccgggagcccccaccgcccccggggcccctcagtcccacacacagacaacgggcccagtcgcgtcacccgcccgcgccggcggcagacgtcaccaaggcgcgacggccctgctccgcctctgggctcgtcttccgcctgtcggacagcagatgcgggcatgcgctcgaaggcgaacgcgcacgcgcggagggacgggggcgaaggggagggacgggggcgaaggggaggggcggggcgggacgggacgggggcgaaggggaggggcggggcgggacgggggcgaaggggagggtcgggacgaggcgggcgaagggaagagggggtccgggcgatgctgagcgctgaggctcgagaggaggggcgggacgggcagtactaggcccgggtgctgcgaggggaggggcggagcgggcgaggggaaaaggcggggccgggaagtgctgggcgcaggtggggcgagaggaggggcggggcaggctaggggaaaaggcggggatgggcggggctgggcgcggatggtgggagaggagggacggggcggggcggcgaacggaaggggcgggggcgggtgttgggcgctgaggcgcgagaggaggggatgggcggggcgcgcggccgttagcgcgcggccgttagcggtcggtttctactaacggtaggcgtcgccgcgattcccgaaggtcatagtccgcgtgacccacccccgtttgcgcgctcgcagtcttcgccggcgcagtcaccgcgcagggcggccgcccggaggtagctaccacggcctgtgtcaacgactaaagctccagtacagcggcgccctcagacagctgggagggtggctctggccgggagcggcggccggtgagctaccgcgaggaggagcggcggaggcgacctcggcccggccctgcactggccgcccggcaggcgcgacatgagcctggtctggcatccgcgggatgctccttaagccccttctccggctgttaacctccggggaacggttgtgaccacaccgacacgtattttacagataaatcattcttgcggcggcgggtcgaacacgtttatttattttttattttctcaacaagcttttacccagcacctgtccagtgaaacaacttgataatcgtttcgaggggcgtccgccgggttaggaagccactgcctggcagcttgtggaagcctcatttgcaaagccacccctcagatgttttgaagatcgtgacgtcttgtaactagcagtgtgtgcacagaatcctactcaaggaacgtcttggcccagcgatgcaaagaactgaagtttcaaggttttatgtctattgctggatggtcggggtagccccagtaactgggaactgctccgcagtccgctcacgtggacccctgtgggaatagcaaggtcaggacatgcccttctctctcctcttccagcctgtccagtgttttccttaaggaagaagccatcagatgtcattgcttctgcaactcctgggttagaggaggagacagaacaagcacaaagaaggggagggcagggtggctttggtttcttgaacagtaatttcctcagtcgtccttattcatgcagaatagtttaaagtccctgaagatattcccgatctccagccgtgatcggaggccatggatactggagtgtctctggagtgacctgattcacccagccctccttctaagaaatgctgtccttctcctctcccct

SEQ ID NO: 40235 - DNA, 1763 bp, Homo sapiens
cctccctcttctaggtctcatctttccccggtttaggattcagcactgtagttcctgggtccagatcaacctgtctccctcgttttgaactttggcaggccaccccgtggggttcttgtgctcagtggcagcacacacccctccatccacctacaccttccttcgtacagagttcgtatcaagtttatccctcttgataaacacgctccctgcctcgagcactactgcgtgctgggccgcgcatcaatcaacccactcagttgtccagaagccccactgacaagagatctccgaatctcagagaggttcagaactggcccagaatcactctcgccctgctccggcggtaagcacaggtcctattttcccctccaacctgccttgccctaaagagaaagagcccaacagccaggtgaggcactattatggcctcctttatcaggaggagtaaactgaggccaggaagagcagtgacttgcttcgtgtggcctgggagactcgggaccttctgtcccctcttcccgaggacccaggggcgatgcccagagctgtcaccacccggggtctcagtttctagcaggctgtgcagggtaccgccggcggcgccacgcaggtagattacgcaagcgagcacctcgcacgcgcgccctgagtggcccctgtcagtcacgcgcgggggcggggcgagggcgcaggaagaaggcggggccaagatggcggcgcagcgcgcggcgggggcgacgggcggcgggggccggggggcggtgggacgttgaccccgccccctgctgctgctagtctgcgccgggcggcggtggcggcggagacccgaacatggcgaccgcgcgcaccttcgggcccgagcgggaagccgagccggccaaggaagcgcgcgtcgtgggctcggagcttgtggacacttatacggtgtgttgggggcgcgggcacccgaagcgggggtggtggctggaaccgggagtccgactcgggggcttggggaggggtccgggatctgcagccccgaggagcgggtagaagggtctgcgattgcgaggagggggctgggacgggggatctaggaaagggatctgggccccgcaggtccgggagaagggttgctcggggcccggggaggcggtttggaaaagggtacgcgatcagaaagggaggctcgggttgggggcggcatctggggataaagggggcttggggaggggggtgtctagatgaggcggaacccctctagatcctctaggactggaggggccccggcctggaagaccgttacaggggtccaggaggaaggcgatggggagagggtctctgatggatggaatcagggaaaagggtcaggcttcgcaggccttgaagaaagagaaggcgtcaggaccctgatctggggagcctgaggtggtggttgagattttctctgagaagtgcaggagagacctggggagcagatgccttgggggtcgggcggagacaagaccggaggaggggtggagcccatctatggagaaatgggggtggtctcagtgctaaagcgcaggccctataagccttaggaatcttcgtgactttgggctgtgggagcgagatggggcaacaagctgcccacacacacttctaagctatgggggagacagaggacaaatagcgggtagttcccgactttgacggggttggatgccaggcctgtgagcctggtgggctgcctggcaaaaaccggccctggactaggcatagagcacctccctgcctcc

SEQ ID NO: 40236 - DNA, 1186 bp, Homo sapiens
cacaggtatagggaaggatacggggtcagcggcccagtcaccagcctgagggcacatggctgggaggagtggagcgaggaccaagcagcagtcagttgggctcagaacccatcctgcttccaggctctgcaccacgctggcaccataggcctgcgcctgacctgggtgtttgcatttcggaggttgcagcataggtgtgtcacccagaatgctgtccctctccgcagcctcactctggcccagtgcctttggtctcgactcggcctcactcctccctcagtggctccccagcctcacagccccacagccctgccctcctctgtcatcacatgtctagggttgccctgtgcctagcaggcacccaggagggcagcagctcctgcatgcccagggcgctggctttgccctgacacagtgggtgcttgccaactgcttgttgacagaaaaggtggaaatcctggctgcacgagggctggggctgcggctggacacttatccttcagggcatggctcttgcaggagaacagctcctgggggccggcgaggtctttgccattggacccctgcagctgtatgccgtcacggagcagctgcagcagggaaagcccacgtgcgccagtggggatgccaagaccgacctcgggcacatcctggacttcacctgtcgccttaagtaccttaaggtaaagctgcagcagctcagtcatggagagccccgcagtcggtgggggtgcaacctgcgggggactggctggcagtttgtgtgaaggagaccatgggggactgttggtggaaggaaggccgcccggttattcttggcactatgcttctggctgtgggcaccagggggcggtcgtgacccagtgtcccgttaaattaagtcctggcctgagcctgctttgttgaagacagaagtggtcaaagttgtcttcaacttgtcagctgctgcagcactccccgatgggcatgcgacactgttcccaatttaagccttatctttggcttcaggtttctggcacagaaggaccttttgggaccagcaacattcaggagcagctcctgccgttcgacctatcaatattcaagtccctgcatcaggtggaggtaaggcccagcgctgcacagcatcctctcgctcccaactcagaggctagagagtgtttgtgatgttgggtgtcctaattta

SEQ ID NO: 40237 - DNA, 2359 bp, Homo sapiens
atgctctttatactgctcttctgcgattattgtgaataaagcgcctacaagtgcctgtggaactgtaagtgccccatacaagatagcttttattaattttagggttctcacggggcgcttacttagatttttgctgtgataattgataaagttcagctttcaacactccatatcaaattctgttactttagaagtctaggcaccaatcacgtctccgaaataaacgcaaggcattgcataattgcattttggaatgtggtgctgtacatagtccatcagagagggtcatcacttctatctgggtattaggaataaaaatggcggtggcagagtagggggcgcggctgccaactgcgagctcagacctgcactggggaggcagggggcggggccgggccggcgccacgtgggctgtccttcccttttgggccgtcccacctccagagctgaggcgcctgcgccagctccttcgaggccctgctcggcttcagggagcacgcgcgccctgccgtgctctgattggcggagctgcacgcccccgctgcagtctgattggcggatccgcctcgctttagaaggtcggcgcccagttccggcactcgtgcgcctaccagacagtggcggaggacggcgctcgctagtctcccaggtcgcggtacacggcgagaacgggcggggcggtctcggctgcgtccgggcgatccagtgcttagttccgtcatatccctctccacgacctcggtcgagcatgttcaccagggcccaggtgagacggattctgcagcgggtgcccgggaagcagcgatttggcatctaccggttcctgcccttcttttttgtcctgggaggaacgatggagtggatcatgattaaagtgcgcgtgggccaggagaccttctgtaagtgagggggtagcagtctctgtttcctttcaggaaggcacgaggcggtagggatccgtttttctggggagtattctcagattgcagaccgcgcattccactcagagcgctgggcgagtgcagttccattcgcttggcagtcagggcggcctggctctcctgtaggccgggcacattggcgtccagccttgtgaccttccctgcacttacaggcgagatcacgtgcttcttccagccctctcatgcctgcccttcacccctgccggtgacatcgtttgggcttaaggaacagacttgctcacaacaatcgtagaagggggtggatatgaggggtcagggaaactcctgctaactagccatttctctttggattcttctgtccaaactctggagggagctgatctgcctggctttgctaattaccactacctttacaggacagtcattggcaccaggtctttggtctgggtccagatgatcagcactgtaaagatagtggtaacgcctggcactgcattactgagcattaactctggacaggccagttcctttcaggaggacttccccaacccctcggccctttctgctttgcccctctcctgaaacgctatcacttgtgacttgccaacccacattttaaagaattgttacattagtgattcctaaagatccttagtccttctgttcatccattcattgatacttaatgagcattcttgaggggctataatgaacaaggcagaggtgtcccttaccccagaagagctctaatgggaaagaagatgataaagacaattagcatacaaagtgatcagtgctgtgagaaggaagtgggaggaacataggactctcgggtgggcgcctcaactggactagatggtgcagggaaggcttccggaagcagctaccaagtaaagtaggacctgaagactgagtaggtgtcagtcagatgaggggaaggtgtgtggaattgaaagcatctccatggcagtggtaggagcacttgtgtgagagtatgctgtgtgtttgagggattgaagcagatcaacaaagtggggatggctagaagggtgcctgggcagggtggcaaagggactggagaaccaagaatggatcccaaggattgagtcattttagggagaggctttaacatgtggagaatggctccttgtggacagattggtaggaacagttacgctgtatggctgtccagagttgagacagtggcctggtctaggttggggcagaaaggataccaagaagggatggaagtaaaagacagcccagaggtagtactgacagggcatggtgattaagtggactcaggagatgaggagtggaggcttctggtgggacacctggggcagggggtagtgcatttcctgaaggtgccgaacacaggcagggccatcctgggcaccatctgggacgtgacgaggtagatatggttatacaga

SEQ ID NO: 40238 - DNA, 445 bp, Homo sapiens
ataaggcagacattcagcaaaaggaaataattaagaatacaggaggctcttaatgcttcccttgttcatcttcccacaggtctcttttacctgcaaggggatcagagtgtttagtctgggaatactgccagcagtttaggaaagccagcagccaactggcatgagtcagcactgtgctgttactaaatactgttgatggacaaactattgtcacctgagtgaatttttctcttgttacgtctcactgttcagattccttctattttagcctgtgaagtcctaggtgatgttgggtagcagtggtgggtaggggtaggggtaaatggtgatgaagcatgaagactcttagagatcaacatggaaatctacggtatgtagacttcattgaatttatgaactaatatttctgggatgcctagctttgttactgataatatagtagata

SEQ ID NO: 40239 - DNA, 1654 bp, Homo sapiens
gaaagaaaggttggggatctccaggaaacagaaagaaggagcaaaagaatcacatttgaaaatcctggtgagcaattaaggaaaaagagaagtctcagatctctttttccaaactaaagtccacatggtgtttaaaacaaaatctaccacgatgatgttccttactctaggcttcggtttgttatacagtattattagtttgaagttggctaaaagtagttaaaatcgtcaaaaggcttagccaaaacttagccaagttttgctgatttttgttcattttataaaaagctgatcaacaggactcaattcattaagataaattaaggaccaatcccttttaaacaatctatgacaaagacacaagtgaatttgatgaacataaggagggaatctttgtggaaaggataacaaaaatttaagaaaggtggaaggaaaaagtcaaggaaggacagaaaagggaaagggtgtagataatcagtaatttaccagctttaccagagcacaaccagcgcctcgaaaagccagtctcctcattatgtctgaaagccaagtgaagccagtgggagaaggaagggctttagaagtgctgattcagtgttagtatattcaaaactgaaaaagaagaacaaggcagagaagggggaaatagaaaagaagggtcagaaggagtaaaaatgagtacgaatagatagaaaacattcaaatagaactgctaaagaaagataaagagaactggagaaaacaggcatatcagttctcttgtacctatcaaacaaactgctgcaaaggctcaggcactaacagtacctgacagttcttccattttaaaaccaaatgctttcatatgtttaaagatgtctcattgaggttcccctttactcacattaggaatgactgtcaattccaggaatgaggcatgcctgcccaactgccccctagtcaataagagcagagttcaatcacagagctggaatggagagtgaatacatgtgggaggctcacatgtgacaccaagtgttggcaagctggaacaaaccaagaatggctcatgtgagcaaaaggtctggaaaacaccctcccccacaaaaaaaaaattcagagaaagaacatttatttccaaaagtcctatctgcattggagacaccatataaaaatttgacaaggttaaaaaaaaaaaaaaaagggccaaccattttggcaggagttcaaaattacttttataaataatccactgaaaatcaaatgacaaaaaaatacattatcagcatgtgtatgtcgttcggatgacacaatatcccaatatccttgaatcattaatttactttggtaagataagaaaaagtttcaacttaaggataattttcaagtattttcttatccatgggacacattttaaaatgtattttgaaagtctgacaagaagggcaatgttataaggtgggagaaacaacaggacctttgctcctaagaccagaataggagtcctaagtcttccacctctgattatcagcttgatgttgtctgattagttgatgtaacctctcagatctgtttcatctctaaaataagaacgtaatgccgggagtggtgggtcatgcctgtaatcccagcactttggaaggccgaggccagtgcatcacttggagttcgagac

SEQ ID NO: 40240 - DNA, 1803 bp, Homo sapiens
aattaaaacttattataataacaaaactgtgcttccccaaaccaagaaatatacacagttcccaaaatcccggattctttgtggtgttgagaagctgaaatatctggcctctactataaatacaagtcccattgattaaaatacccggaaaaaatacggaaagaaaatcactaagagtttgtgtcgaaccgtcaagaaaccacaacaaaaaaaagaggccctgagcaacggaggaaatgaaggactttcccgacctgtcactggtattggggactgagggaaacgttgacagctttgaagctgccccgcgacgagcgggaaagaggagcgcggggagtttccgacccgtagtgcgcctttgtccctgccggcaggtgcgacaaggctactgggcccatccggaggccagccgccgcgccccgcccaaccccgcgcgcccggcccgacccgcgcgtccccacggccggggcggggcttccgccgcggctcccgcccgcccgggcccacacaaaggcccggcagctgaccaagggggagcggccccacccgccctgggcccggccttacccagccgctccgccgcctgcagccccggccgcggtcaccgaccgccgcgccccgccccgtggccgccacggctgctgctattgctcctccggccgcggccgctgccgtcgcttcggcacccgccgccctcacctcccttacccctcccggtgccgccgcaaaaccagtcccgcggccgccaagcgatccctgctccgcgcgacactgcgtgcccgcgcacgcagagaggcggtgacgcactttacggcggcagcgtaagtgcgtgacgctcgtcagtggcttcagttcacacgtggcgccagcggaggcaggttgatgtgtttgtgcttccttctacagccaatatgaaaaggcctagtaagtggggtcgggaggcgggcgtggagggacccacgtctggaagttgctgcagccaccacgacgctcttctacggctacggctttgtctctgctggtatgggggtgggagcctacgcgtaggccttggccctatttcctggtagaaccgagagttggaagtccctacggcgatcatgttaaccgcgcgggctcattctgcggaacgaagccgggcagagggtggggaagactaggctagattttcgtaaggaagcagcgtctgagccaggtttgaggcccaatattttctttccgtggccacgtgcagactggcccaggtgagagctgagaatcgcctcccagactcagtgttcctctcctgccttatgattcgtgctgtttgacacgaagtggttgtcgttttgtgtctcatacgctgttgtgtatgatcccattctaatattgtgagggtaagtgcagggaattttgactccattctggatctactgaatttaattctctgggatttgaaagtagcacgtatgtttgcattaggcatttcgcattagacttaacgttaggtttggtagccaataacacaagaaaaggatataactccatagtgcgttaacccagaactaatcatttgggttaacagatttgtgatgtgtttctttgtagagttaaagaaagcaagtaaacgcatgacctgccataagcggtataaaatccaaaaaaaggtaagtgtagtgcttgagagagctgtaccaaacacattgctaaactgattttgccctgttcctttgcgggaaagtctgggttaatgtgatttggttttgggaaatggcattggatagactgaccatgggcacaagctcttaggcatcaggagtgcag

SEQ ID NO: 40241 - DNA, 2618 bp, Homo sapiens
agcctgggcaacagagcgagtcttcgcctcaaaaaaaaaaaaaaaaaaaaaaaaagaccacacagagatatatctatttatacacacaacagaaagtctcttcaaacacaccaagaaatacagagcatgagaaggaaacaggaataaactcttgcccatccctctttctgccttctacacgtcctgagtccttctgaggtcagaaaagtgtcaaacgtgtctgcattttactgtttggtctctgccacgtgcaaggatgaaagggcactgaggatatacaaacactttctcctaccctttcatctggctggctcccacttggcattcaaaggtcaaggtagcctcctccaaactccacgttgagctgcacctcccctgagctcccacatctgggcctccctctcccagggctaatccagctgtcatgtatttctggcgtgatgtggctgtctcccttgacacgctctgggctcttccaaggcaacagcctggtcttggtaacaaccgtgtcctcggtctgctgtctggcacaaacaaggtgccgtgaatatttgctggttgcatgaatgaggacagcagtcccaccctgtcccgggagtgcctagaattccactgtttgtggccaacccagaatacataacctgggggccggagagccagctgggacccagaggcccgggttcctcagaacggtttctctccaaaacgtgggcatcccacctggctgacggtaacggaggagggtctaagatttagagatacaccagccttgaaagagaggctgagtgaacctttggctggcctctatcgggagggcccagcctgggtctgtgagggtcagtaaagccggccacaatgtgagagggctgagttcgggagcccccagatgagggactttctacgcggatgagagggacagccgagcaccagggtcccctctccaagggaattctctctgttgtggatgccgcctagggtagcccccctaaattccaagggtcagtagggccccccttacactttgaagtgatcggaaagtgatgtgacgctccggggatcccaccaggctcagagatacccctggttagggctccgacaagtcgttcccctcaaaggctcgccgcggccgcccttactgcaggcgatggaggagatgcggatgcagcccgcgccccgacccgccctgccagctcagcgcccgcgccgcaggccccggagcccagcccgttgtctggccgcccgcgttccctgcacgctgggccgagcacacttgccctctagctccgtggcagccgcgcagccccactacgcccagccagcccgcagcggtaaccgctagagcgtcgcgccaagcaggcgccgcggggcagccctgccgccggggtcctcgcagggaaaaaggccgtcgccatggagacgcgggggcgccggcggccgttgggccgcgcaagtactgtcaaggacagttttcgggacgggggacgcggctccaggcacccaacagcactgacggcgaacacttcacgggcgcgcgatgcctcgacaaggcggccgccaccaccacctcagctgccctcgcgggcagcacggcgcggcaaaagcgcacgtcgcctagcgatggcgcggggcggggacacgggctgtaccggcccgtcggagacttccgcttccggggccgccgccatcgctctcccgggcttagaaggcccggctactgacgcgcagtgccagaccttacccctcacggtccttaagtctcggtcgccctcgcctcgcagcctgccacccgcgctcagctgcccgcctcctcagccagccatgctggagcatctgagctcgctgcccacgcagatggtgagggcgcaacccggggacctctgcacgccgttcttgtgcctggcagcttcgaagcccatgttggagcaccgacccggtgctgcgctgttccgggcccggatggttaccgtccaccctctttcccgaattgcctcctgggtccccttctcttctactccgcgagaatctcctgtccattctccgtgagggtgtttcagttcctcccgggaagcccagaatttaatatcttgcccaggcccttaggagagcgggagaccctgatgttggggttaccctgtgccagagttgtgaggtcagggcaggaattgtatgttctcggcggtggaaccaattctttttttcctctgcttcaccccaggattacaagggccagaagctagctgaacagatgtttcagggaattattcttttttctgcagtaagtattggttttacatttaatctccgcccccgcctccctcccaaccctcagtttgagtgtgtttaatatacttcatttgtctctagatagttggatttatctacgggtacgtggctgaacagttcgggtggactgtctatatagttatggccggatttgctttttcatgtttggtaagaaatttgtgggtattagtggcagcttgggttttgtgagtcgggttggtttggttagacctactcagtagtgagacccaaagccaacgtttccctcatccttccaaacagcgtttccctttgctatcattggaaaagtagaatgccaaaatagtgtcagatgg

SEQ ID NO: 40242 - DNA, 1010 bp, Homo sapiens
tgatcccagctacacaggaggctgagtcacaaaaattgcttgaacccgggagacagaggttgcagtgagccaagatggcgccaccgcactccaccctggggacagtgagactttgtcttaaaacacacacacacacacacacacacacacacaaaactgtcaaaagacaaagacaaagagagaatcctgaaaacagcatgagagaagcaacttatcacatacaaaggataagattaccaacgggttttttcatcaggaactgtggaggccagaaagcagtgggctaatatattcaaaatgctaaaagaaaaaataccaagaatactgtatctggcaaaaatgcccttcaaaagtgagggagaaatcaagacatttccagataaatctgattaacactagatcttccctatcagaaatattcaagggaattctgtgggttgaaattatgacaataaataacttgaagctttatgaagaaagaaaaatctctaaaaacagtcagattaatcaaattaataggaacagacaggagaatggtgtttaccagaggcgaagggtggggagaatgggcaggtgttggtcaaagggtacaaggttcagttatacagcaggagttaagtattttgagatacattgcacaacatggtgactacatttaataataatgtattacatatttcaaaattgctaagagaatttcaaatgtcctcatcacaagaaaatgataaatacttgaggtgacagatatgttgattagcttgatttaatcaaaacacattgtatacatatatcagaacatcacattgtactctataaatatgtacaattatgatttgttgattaacaataaaaaatatatttgtaaaagaaatacctttggtaaagataaacagatgggcaactataaaagctagtattattgtaacaattatttgtaatttcttttttttgttttctacaagatttaagaggctaatacattacaaaacaattagactaaaagctaatat

SEQ ID NO: 40243 - DNA, 1414 bp, Homo sapiens
cgctgtattaagtcctgggaatgcatgataccggctctcatgagagtatcggggttgggagaaaggtgtgtagatcacgcatgccaattagtacaacaaagaagtagataggcagagactgaaaatttttacataaaacttagaattgtaattaaagaaaatgaaaattaaaaggaaaaaaatttaacacaacaaagaagtagaagtagttctgggcgcatattacagggaggccaggcctcgtcttggtctgggaccatttccctgaggaaacgccatccgagatgagcctcttgcgaccacccccgacctaatctaccggtcggcgccctcggcgcacttctgcccgcccccgccccttgccgggccccacccctgcagacctgcttgccgtcccgccggtgcttcacaagcgtcacctctccatagctccccttgcccacgacccgcaggtagcagtaggcggccaggggcatgttcccagcgctggcccagagtcgggatgcggcggcagcggcgggtagggcagcgggcggcaacaagaagctcggttcatgcccgagagggggcagtgggggcggctgttgaggcagccgggcccgggcgggattgctggggcccggcccgcgacgacgccgctgccatagcgatccgggccgggagcagttctgcgcatgctcctgcgtccccaaaggacggccatagagcggacgccacgagcggccagagaggttccgcagccccgggaggacccgccatagagcagaggctccaggaggccagagcgactccgccaggctccgcgcactttctgtgcgtccgttccaccgtccggatccccgccacaacagagtcagggaaagcttcctctttttgtgcacttgtttgtcctaaggccgttacaagtattgttcgttcattctgcaaatatttgttgaccgcctatgtgccaggccaacaaagtccctgccctcctggagctcatgttctaatgactgggtgacagactctctaccagtaacatttgctgtatccgctttatcacatgccgtctctgcatccagcaatccatcctattttttgatacattcaaagtaaattatcagtacctttcatccctaaaaactcgcctgctaattgagaactacaaagactcctcagcatttaacgactaccctaaccactgcactaagagacttgactaaactctaacatggcatcatgctaagttaacagcctaagggcggatctctaggtgggcctaggcccctttaaaatgcctgcccaagaaagctcaggggtgccaaaagaattcaccatttgttccagccaaagcctccctttcccagagcgcttcctttttttccttttttttttttttttttttttttgagacagggtctcgccctgccac

SEQ ID NO: 40244 - DNA, 1564 bp, Homo sapiens
cccttcccgccttccccttcccaagcactgctcttttttccaggcacctcatccaggaaccttctcctaatccctgcaggagatgagcctctgcccctccaaatttctatctcttcagcttctcatcactccttgggattcagtgggctccctttgacttgtctgattcccttttcccctgacatcagctcactgaacacagcagggcactcaggtttctgtatggtggcctctcagtgcctggcattgtgcccaacacactgcagggcttggtcgatactggtgcaggaaataagcagaacttcaaatgtacactgtcatgtcgatccagcttctcttctacaaaggccagaagacaggccagaaggtgaccgtggcctaaggacaataaactcttcccagaagctgctctgtgagacaaagtccaggacaagcaaacagagatcagtgagggctctgggccccctcctcttatcagggtcacagcagccagcacatcccaacccaggtcacagactagactggccaggggccctgtctgcccagtatgctgtggtttttggggaacagggtgggtttggcaataaaaaaataagaaactgcaggtgcaagatgggtctctgggaactcctgtctctaggatcttcaagtctgcttctctgtcattacatgatggccttgggctttagagcctgagagacctggtttgaatccctgttctgtctcttggtatggggccagtgtcccaggaacgttgcgaggataaaattagacaataaagggtttagaggaatgcatgacacaaatgagtcctcgattatgaaaacatgtcattcatcttcagctcccctttatctgccaggcctccctgcccaggtgcaggaacgaggaagctcacttctgttctttctagaactgggtaagaacctcagagaggtgaagcaactggcctaaagcgcagatctcccatcatgcctcaccccgaccgtccagactgtctctgacagagctaataccaggttagcactgtgagaatcaccagcatggctggatgtcacacactttctaagccaccgtgtctgcctccctggccaaagcatgactgaaaagtgtgttgatgctgaaagaattttgaaacagtctgggcaacaaagtgagaccctgtttccctccctttcttttcttttttcttttcttttcttttcttttttcttttctgttctttctttctctgtctctctttcttttcttttctttctttctttttggagacagtctcgctccgtcacccaggctggagtgcagtggcacaatcttgcctctctgcaaccaccactttccaggctcaagctattctcctgcctcagcctcctgagtagctggaaccacagacgcatgccaccatacctggctaatttttgtatttttggtagagatggggtttcaccatgttgcccaggctgggctggaacttctggcctcaagtgatctgcctccctcagcctcccaaagtgctgagattacaggcatgagccacctcgcccgactgaaaccctgtttcaac

SEQ ID NO: 40245 - DNA, 3524 bp, Homo sapiens
gcacctgtaatcccagctactcgggaggctgaggcaggagaatcacttgaacccaggaggtggaggttgcactgagccaagatcctgccactgcactctagcactcaagaccaaaactccatctcaaaaaaaaaaaagtaaagcctaatgaagtttagaaatccatttttaactgttgcttcttgccacatgtcaccgtgtcactggtgctgccttgtgccagcccgaggatgagatgagccatccggggatcctcacagttcacataggctaagcgcagttctacacagagggacatggtctggagccccatcagtagtttaaccacccagagctgggaacccccctgaggcaaaaagcttccactgccaaattttgattcctctaaatgtgttaggttgatgcaaaagtcattgcggtttttgtcattaatatttgcctgcaccttgtctaatgtttaatccatgtttatccagcactgtattgattactggtctgactgaggtgacagggcagcaggagccttagagcatggacggtgccatggggcctcgggggctgctgttgtgcatgtacctggtatctctcctcatcctgcaggccatgcctgccctgggctcggctacaggcaggtccaagagcagcgaggtatatggctaagcccacagggcagaaataggcagctgaacctggatgaggccccgggcgggacacaagacccccattcaaggggccagggtcacccccaccacctccaccacttctgagtggagaggtgacctcccagcaccaccaaggaggtgaagctaaggggcagaggacacaggctgtgttccactcccatccctgaactggcaggccggtggtcccctgagttttcctctcacacttgaccctgattttgttttgcagaagcgacaggctgtggacaccgtgagtaagagtcctggcaaaggggtctgtgacagagccctttttacaggcttgctttccccaacctgtcaggggtggacccctctatcagggccataggcatggggtactctccagggtcctagaaatggggacttgttcccatctcacctcatatcccacagcacggtctcagccagagagcaggggtcttcctgcggtctgttcttcctgcatctgggcaccatgcactggggctaagtgccaagtccccgtaccacaggaagtccctcgctgacagaggccctgtctcaggccacagctccttcatgtctcactttaggctgtcgatggcgtgttcatccggagtttgaaagtcaactgcaaagtcacctctcgcttcgcccactatgttgtcaccagccaagtggtcaacactgccaatgaagccagggaagtggccttcgacctggaaatccccaagacagcattcatcagtgactttgccgtgtgcgtgcctgcccaactcccatgccttctcccaggggtgccgcttactagtcccagcttaagaacaaggatcggagtggccagataacgcagagcatctcctcattctagaagggccacagaccagccctggctttgaggggaggaagaagccctttaggtctgtgcttggctcccatcttggaggcaaactgggacccatcacagcatgtttcaggctagaacccaaggagccaaggccagagtctgaggcttcttgctggcctctgacctgggctgctcacctcattgcccatggacccctgagttccaccatgggcagtggaaggctcgtcaggagacgtccttatccaagggctcacatggacaggccctctcaggacctgtgtggtcaggaggctcatctttcctgagggtgtccttccctccctgcagtacagcagatggaaacgcatttatcggagacataaaggacaaggtgactgcatggaagcagtaccggaaagcagctatctcaggagagaatgccggccttgtcaggtgagttctgggcctgctggtctcatctctagggctgccctccccagccaggacaggtctgatggctgcaaggtggctttagtggagaacagcccaggatgatggaagggtaagcaaactgcccaaacccagatgccagcacggtgcactgaacaggctgccgtgcagttgcccttttcccagatatgccactgggagaagtgggcccccgccatcttgggccctgaccctgaccagccagctaacacatttgtgaggtccagggaaacctgggagcaacactcatctaagagaaataaattctgtgggccacatgttaggtgacaaggacccaaatgtcatttaccctctgtctgtctgctgttgcctctggtggcacatccagggcctcggggagaactatggagcaattcaccatccacctcaccgtcaatccccagagcaaggtcacgtttcagctgacttatgaggaagtgctgaagagaaaccatatgcagtatgaaattgtcatcaaagtcaagcccaagcagctggtgcatcattttgaggtagatcacaggtcccggggcaggggtcctgcccctctctccgtcaccatggctcccaacactggttgagcacccaccatgtgtcaccacccaggcctgagaacacagggatggggactaacccctcagggtgagctctgatgtgctcttcttgggcagggaactccctgaattctctaacttcctctttatctctgagcttcggtttgctcatctgctagacggggggtttctgtgagtcccaggaccgccacagggatcacgagaagtactgaatgtccaggtaattttgtaaactagaaagtcccgcgcagcctgagggcctggaattattgctggcacctaagtggtggctgagttgagggatgcaggcatgtacaccttcatttggtcagtatttttggagtgcctactgagtaccaggccctgtgatcagggctgggtgggtgctgcacacagtaggtggccaggacacatgctggctcttggctgagacttggtgagtgggagccctggtagagaatttgcttcagtgtggtgtgagcctataatcccagctacgtgggaggctgaggcaggaggacggcttgagcccaggagtttgaggccagcctgggcaacaaagcaagatcccatctttttttttaaaaaaataatttgcttcaatgttgcagattgatgtggacatcttcgagccccaggggatcagcaagctggatgcccaggcctctttcctgccgaaggaactggcagcccaaactatcaagaagtccttctcaggaaaaaaggtacatgggatagcaagggggtggtggtgggccctttggagacttctcagcctgcccaccccttatggaatgtccagccttagcccagaaaccaggcaggggctgtggtctgccctcaggatgagagaagctggtgtcatgtgattggtgcctaggagaactcagctatcctggttctcagagcaatttagcaaaagcctgcatgctgaggtggggaaggagccag

SEQ ID NO: 40246 - DNA, 2686 bp, Homo sapiens
gacaccaagcacaggcagcatctgccacttggccatcatttcactggcttggaaactccctcttttcaatttttttttttttttttgagacgggggtctcgccctgtcatccgggctggagcgcagtggcacgaacacagcgctcactgcagcctcgaactcctgggcccaggtgatcctccagcttcagtctcccaaaaagctgggattacaggcaagagccatagtgcctggctgatttggcaactctccatcattgctctgtggctgctgcctcttccagccattagaccacaccctcctcagggcttccgctgccccgtggcatctgccttttgccttcttggttcctctgctcccaacaactctctctgcacatctcccagtcagcaccagagctttcagctgaggccgctgaactccccataagttagttgtcctggacccagccgtccttgtcgactccattcagtagtgggctgcccagtgggagggtcacagggtcagcttggctcagagaagccatgggtatggtgggtgtgcaacagctgccctgatggggctaggctggcagggtcctgaggtggctcaggaggtcccagcccccactgagaccaggtcctgcctctaaagctcctgttgtcctggaagctggagcccagcctcactacgacttttagggcaatgactccccaaaaggctgagggcagccaagtccctggctgggccctggaagcacagagggaaacatgacatggtccagcccccaggagctctgggtgcagagggggcaggcagacctgagcacatccacctcaacataaggtcatgacaaagcaggccctcagggggcttggggcttggagcagggatgtcccatagtcctctaggggatggccagggaagggtcctggaggggaggcactgggactggcagagagatgaaagatgtgacatgtgcagaaggggagggtgtgctggtgcaagagagtgagctcagaaaaacaagctggggtcagatcacagagacagctgggcttccgggatcgttgtgtgtcctttccctggggctttgggggccatagaagggtagtgagcgaggggctctgctgtggaggtcccagcctgaaggtgacagtctagtttcacgccctggctgcctcaagaagggaggggctgcaatccaggaggccagagagaggctgtcccagtggtagggataagaggcaacaatgctgagatgccctttgccctaaatgcaactccacaccccatctccatcatccacgccagggagtcccagggtccatttgttggcccacagcttctgctttcctgcgggcctcttccgagtcccccggtctctcaggaatgaagccccaacgctgttggcaagacccaccaggccttcttcagacagacacatcgagggacccgtcattccacccatgcccagcttcccggaggcccttcctgcctccactcctcccacccccgctgcaggtcactgaccctgcttggaaaacaccaggcttgctcatataaggagcgtgggccaggcctgagtattcagcgatggcatttgcatggtggccctgtctcatcttggctctgctctccagcttggcagcctctggcttcccgagaagcccctttcggctgcttggggtgagtctgccccctctttgccatctgggtcttggtgtggaatgggcagaaggcatcatgctgggcaaggcctctgagtggagtgaagaggaggcagagggctgggcactgagctgctgggagtagtgtggacactgggagaaccgggctccagctgaggcctatgctaacctgttgtctaaccctgggaaggctcttaaaactccctgggcctcagcttccccacctgtcaaaagagcaatgcaccaggaactgctcacttcactgaggggcaatgaaggttcaagtctcaaacgagtgtgacctctacaaaatgctcagttgagccctgcggggtgtggcgggggcaggggtgctctggaaggaggcctaaaggggcctgggggccagggaaaggcagaatgggagatagaatgaggtggggcatgtagggtgtgaagagagctctgggttcagttccccctgccctgctctcctggtaacctggatacctgcccctctctggacctcagtttccccatctattcagagtttttcctactctgacatgtggctctggagggtcctatgtctgggggccactcaggtgtgtggggggcagggcaccactgaacccctggtctcagcccagagcctcccaggccatgcggccttggtgttggccttggcctgattcctgtgtttgtgtttgtttttgttttttcagaaacggagcctcccggaaggggtaagaactttcaccagggggtgggaccgagtggggcagggcaggatggagctggttccccaactgctgaaggtgtaggctataacagctgactcctcacagctggcaaacagcttacggccctctgccctggcagcctccaacagcgcaggactcctgggaaagagcaccacagagtgacgacccctccaacctcgcaggatgtagcccaagagggcccctcacaggcatcccttccttccgcagacacttccttagcacttgctggtacctggctctgtgaagcggtcc

SEQ ID NO: 40247 - DNA, 668 bp, Homo sapiens
tccgactgtccccaaccaaccccagggatctcagggcccatgtgttttctgtgggtctgagatggccatccatcttttgtggggtcactgaaagctggcttagacacttctacagcatcaaccttccaccggactgtgtctagttcctgggcaaggacaggagtggggccctggagagcctggctcctggcctgccagtccccaccccaccccagctgggctcagcggtctgcttgtgccaagtcacctggtggcagagtggtcattgccctgaaccctcagcgtgcgtctgccgtcatctgatgctgctggagatccccagagcacctcctggtaaaactggcctgagatacaaagggtggatcagtaagggtcagagacagaggaagcctgggagacacacgcaggggaggggcgctgcctgttcccaagcacagctggtttctgaggaaggcctgggccccggtaatgggctcagtaccaagggtccctccaacgtggctggagaagcggtcagtgtcacgcagaaggagccggagcccctccccacggccatcccagaacaacaggccgatggtcactttgtctgggtcactgagcagcaggagacccgtcttgtccatggtcatcttcaggctgtggaaagacccagtgtcttgagcaggaag

SEQ ID NO: 40248 - DNA, 2147 bp, Homo sapiens
tgggctggggctcacaggaggctcagggacaaagaggggccgccctcagcagggcaagggtcatgcaggaggcctccctggaagaggtagcagcaggtacctgcaggtgcttgaccagctgctggggccgcactttcagcagcagctcgtacacccccaaacgccgcttgagcagctcctcatagaccagctcaaaggtgatcttggcattgggagccacactgaccgacacctggaactgctccatgtttctcccggtggccctgggggagaagggcatcaggcctgctcctccaggacaggtggggtaaggctggtagaggtgggagcaggactaagggccaaaggcaaggtggcctttgtctagaccctccccactgaagctgccccccaccagctcacttgacgaggccagcgctctttcccttggccactgctgcgctgtactgtgcctgggcttcagccttctccttgatgatccctgggtaggtcatgccatcgatgatcctgggggcagaagggtgggagttgttgagagcctggtggcaggggcccattccactcctgcctcctccagagagcctttctggactcggtgtgcctcttgacacagtgactcccatctttgcctgagcccagtgccatttattatgcacctaccgcatacaggaccctgtgcagggcactctgcaaagtgctccaggcctctagctcccggaggtgtgtacagtaacagtaagcattcattttatagaagggacgaaggggaggctgcagaggggcagggccgggctaaatcctgccttctctccacctgtccagtctggccgaagctggcccacattcccacctgccccttccatttcacggactgttccaggggaactagttcatcaccagcaagagctctctgagtcacacttgttcccagccctgcgtgcagccgtgtggggccaggactgaggaggaagcagacgtagggctggaggctctgagcactttccccctacagcagtctccccgctccctcccacaagaggcaggcaccctatagggaggctggcatatctggaaggaggttttggacaactggtggacgggactcctgggtgtgtggacacactcctagcagccatcctttgggggctgagaaagaatggcccaggccatttctcagggaggaaaacgactttttcagagcctccttgtggggtgtgtagggatgtgcctggtcaacttcatgtggtagtgtgtggcagtgggcaggagggggagcagccaggatgtcaggactacgcgtccctcctgcctgaccttcctggttataatttaactctagcccgggatggggctggtgagtgggcagtggcactcctccccctgggtaggcagtgcttcatctctccagatggccagctggggctcctggccaggtcagggagcagggaacctgctctctgctcccctaactcatgcagcaacaggttctgggtctagagaaggcaagtgacagtcttgggctctcagcagatgccacgggcctggacctggcaactgctgaccctggcacccatgtcgaaggctgacacagcccgtggggcttgcactgcaagctgggcagcataggcccgggctctgggttaggaaaagtagaggctgcggtggagtgggggatgcttggcgcctgagggaggagactagcccccactgcagttttccagaggccacagtgtgggaccccacatgagacactccctctctgccccaccatcgccctgtttctgggaagagtcttgcccttgtcctaaatcacagcttttcctggcagcaagggacaggcggcatcctggtgcatttagtaaacattggaaactgagttgggaagggtaggggagggtggcagaggacaaagtgaggaccatccttggctcatagaattcagagaaacctcaggcatctctcacgcagcctgagcaaaaatgtcctctgcaggatcccagctggggcagacctaggagaatcctcctcaagccactctccactgtgaggaagccaagggtctagaaggttttctgtactttgagctggaatgtgcattttggtgactccctcttgcctggtctggcctcaggaggcctcaagtctgt

SEQ ID NO: 40249 - DNA, 3616 bp, Homo sapiens
cggctggtgacgaccgtgtgggcaaatcgggatgagaccctggagtccacggtgaggctgtagatgtcgatgccattctggaccagcaaagaagaagggggttgcagggtttcaatgccacctcagctcggggtgacgctcttcaagagttggccctgactctggctctagaccaaaccctggctcccaatctgactgagccactgaccaggcctcaggctgaacccagtgaggcatctcatatgtgaacatttgtctcaggtaagagatagcagtgtgcttcattccccaccctacagcaccacagggcaggggccacgtccttcttgatctataggggcccagagcaccccttggagaagaacaagcatgcagggggtggagctggtgaagccagggccagtgtctgggaggggcatcacactcagcctttgggcaggggtgagagacctggtggggtcagggagctttgcatgctggcttagctttgcccagaaaaagggcagtgaccaggtcctttgatttctggagactttggcctctgtggcaacagggaagctcccaccagtctcctagaaggaagccctcagagctgggagaattcggaggtagactagagtctggtctctgagagttgggaatcttcctctctgctccgcagtggaccctccccaactcatccccacttccgcagggcactcccctagcaggtgccatttgccttgaggtctgtgtcccccgaggaggggcacacgggcacctcttacctgcttgtgtgtgacatgctcatgcgcactgcaccaactctgctcggctgcatgcggctgcctgaatgcagtttggcacagaggtgccaagtggcttgtttatgtgcttgggtatttgctctgcgacaagcactgtcctaagcacttcatagatacaatgggtttggttttcacaacaagcactgtcctaagcactttatagatacaatgggtttggttttcacaaccgccaccctctgaataggttctagtattaccctgttttacagatgaggaaattgagacatagtcagcataaatcattctcctgaggtcacttactaaaaggcggtagagccaggcttgtaaaactgtatttcctcatttggaaaatggaaatgattggatcatcccctctattaggtgggagaataccagtaaggcccttggggtagtgcctggcgggaggtctgcaccatttttttgcacacacagggatgcacacgcacttgtgctgacacgctggcacatgcggaggctcttccccacttcccaggcgttctctcatcccccagctcacgccacacccatggacactggctaccttttcggcagtagtagtctggtggatggccagcagtgaaagcaggacgagaactttgctgcaggtacggacaggccttgggggcttcatcgtggctccagtgtctgccaggaggcttctgaactcgacagcaagtggggaatggattagtaacttgtttgctgccccacccacatgggggcaggttctgggaaattgggatctacaagccaaaaaccacagtgacctcagataagcaaatgacgaacgtcccatggaccttggctgggggcaggaatgtataccaaagaaaggtaggctcagtttggagtgggggtacatgccccttctgaaaagtgcgaaaccttcaccaggacccttcacaccaggcattccaccaagctccacagggctgggagggaattgacagtgaagatgtcagtctgctctccctaagtccagcccggggagaaacagcgggggatggtggggaagactagggctacagggctaccctagcggcttcccggaagaagggggcttggccaccaggtaagtgtgtctggctgatgggagggcccaaaggcatggagtgactctgggaggtgtctgtgtggggcagatctagagtcaggatagatacgccgtatttctgaagtgagaggtgctgggcacggggcgcctccttctctctcctggggtcccaggttgctgtttgggtgccattaatctagccagggctttaggttcaaccccagcaaggcccccaaaacaagaatggcaatacaactgagtcataaacctgccacatcctgtggcacagaggtctccatgcggggagtttattgacagaagagcatggaacagaagacagacctgacagtgccagcagctcctgaggggtgactggggagtcatttggtggagcagagggagcccaggaatcgctggttgagagagggcagaatgctgttgtcatgagcagtgtgatgctgccacagcccagacccaggggagcgctgcccaaaggcctggggtgggtcccggccttgctaaagttgaagcgctctgctccttgtaaagtgggatcgagtgagtacatattatgcgctctgggcaccgctggggctcgtgttccctggtggctctggggaagccagctcctgagtctgtggccacagatgggtaaagatgagtcataaaagtgtggccagatgccaagtcctggatcagggaaggacggcggctccgtgacaccagccctgagggggccagctgccttgggaacctatcgggggccttggggcagccagtggcttccagaggctggggagggtttctccaccagtcctgtctccattagaggtggcggcaggcctggggcaaaggtgccatagactggagctatttctacagctgcaaggaagacgttccccttccttagcatgactggccagaagcctcatctctgcgcacgtctccactgctcacccttttggctctggatacgattgggattacacaggggaacacgctcctttcagtgtctgggggaagagtctccccatggagtccagcaagtaggactgggcccttcctcacagcagggctgctcccttggggcagagagcacaggcccagcccggactcagggctatataaggtggccaggctggccgggactgtgggaaacgttctgggcagccagaacctcctgggacaggaaggcatccccagcaggcatcagccccgagccaggcaccacaagcccaggctctgccagtccagctccgaaaagagccactgtcagcctgtccatggtcatggtcttgccatcacaacgggacaggcctctatgggtcttttgaacctggcacttccaggcacacaggggacagaggactggagagagaagggtcatgcaggctgagaatctggtgttccatgccccagacagcatggttggagcagaatgtgggagtcttacccctgctgtttggaagagacggtagctcaggaaactgactgccagagaggaatctcaatctggctctgacttggaggggacaaaagccgggaggaggcagtgtgaacaaaagtgtagggagggagaggggttttgaggtccctagtgcagtgcagggagaggggttttgaggtccctagtgcagtgcagggagaggggttttgaggtccctagtgcagtgcagggagaggggtttttgaggtccctaggtgctgcagagcctgcaggtcctcagaggcttctcagcagcttctgtggaag

SEQ ID NO: 40250 - DNA, 1801 bp, Homo sapiens
cttattttcttaaataaaatccaaacacaaataaaacccaaaggaggccaagctgagccacttgttctcaaagcttctggctggtctcatgtgggcattcggggatgaggagtgggggtttatctacacagaactggggtcagagggcggaagccacggttggggagcccgtgggctggccagggcatcggcacactgaaggtcacagactgtggaagctgcccgtggcaccacatggctcagttaaactaccagccaagagaggtgtgtgacaggatgtttgccgatgtagaaacatgtattgtcgcaaggcctaaaaaccaccatcagatggtagcaagccgagggcagggactgtatttcattagttttatacatcccaaggcttcatctagaacagacatttaaagtggatggatgctaagaattgacaagctctttggagtagttgccacatcagaccaaatgcaggacacattcatagagttaaaacaagtttggttttcctagagttggcgtatgtgggtgatggggaggaagtgctgcttgctcagcgtggcaaggagctgctcatgcagggacgaagcaaacctttttccactgaagtattaggaggacgatgaagacgacagacttttcaaaaatcatgatcacgatgtaaagagcgcactgcccgacccaggctccacactgcagagggtctcctgcagggacaggcgggtgcttagtcacatggggcccaggcatctgagtgagatgatgtccccaccccactcccccacacgcaccccagaacactggctctaaagctctaaaggtacttaatgagcccccccaaaagtccaaaggattacctcatccttaacagacaaatgcagtattttaaataaaatcagagaattccttatttgaagatactaaaatggcctttcttttaagagattctaagataggattaaaaagcactaaagttaggaagtgctcattgctggagctcagaaaagctgttctttctgccggctggcagcagaagctgtatgaagcaagactgctattcttatccgttgttgatttttccagtgacagcggggctgcccctcccttctctgtccatgagtggactgatgtttgtggatgatgaagcaggacccagtcgctttgtttgtctcccacctccccacctcccatcccttacccaactccccgggccatccctgatacctcagcctcttgagagcagaaacgtgactctggaggaatttggactctacctgtccagcatgggtcaccccaaacaccttggccagggacaaggaagtgaagagagaagtccttggggcaaggaggtgggagggatgggccggggcccagggctgtgacaaaggtccatctgggaccccttcagtcaccatgcttgagaaaccgagggacctagtagtacaagctggaggatgtgcaggccttggaatgcctccaggacattttgaacggagagaagaccagcccctccagggaatgatcctgtgatatgaagaaccctagggtggctcctgggagccacataggcctccccaaagtgggagacccaggggagagtgggatgtgggaaggttgcctggggctcaccctggaagttctgccagagctgccttaccacagctggccagaagagggggtacagggtagcattttgggggtggcgggggggcgggaggctggggggtaaaggccgtaatccaggctatgagaagataatttggtccaaagagatatctccagcttctcacttggctttattgtt

SEQ ID NO: 40251 - DNA, 582 bp, Homo sapiens
ttaccacggagaaaaccccagaaactctcatttaagatatcaaagctgagtggactggtttgtgatttttactttggattgcaggaaaaaagttatcacttctcaatgttagcagtgtttttgtaaaacatggacacatttctcccagctggctaggccccatgtctataacaaaaataggcaggcagatttatccaagctctcaaaatgcttgttttattaaaaaccaattctgtctacacttcagcccagaaccctgactgtgcacggtgagggaggcttgagtttgctttgcattcacatgtcctgagagcaaacacccccaaatgccaacacacacactggccaacacgacctttggctgacagctggttggctaccctgcactggaacagtttgctgagctctaggactgcttagctctgttctgctgagaccctagctgagcaactttgtcaagtcacagactatagacaaaaccaccaaaacgaggaattgcttaaaaccaccaaaacgaggaattgcttggcaaagccccctcgtttaaagcgtttctttctatgcagatacctagcagacact

SEQ ID NO: 40252 - DNA, 1001 bp, Homo sapiens
gacactgctaacagaaactccatgctctgcgttaccctccaaaacatgttttctgtgctgtgcttctacactggagacacctggaaagaaggacaaatgggcttcgctgtgggtccatggaacacttactgattttcacccaaagtaaagaccttagaaatgaaacagaggtagacaaacaactctagagaaaagtaaacacaaaataaaagtcactgaagtccctctgagaatgaataggaagagggcaattaaacagaaatactaacagtcttggtgatgttacttaacacaggcagcctcggctgggtcaagatggagaacagtaacagtagagttctcagatcaggtcagttaaggaactggtgtaagtgccccatataatgtttttaagaaagcaaacagtttccccccctccaaattctgtcataattttagtgtttatgtagcttaaaaatggcatcatacaaaaaacctcatacatggctgtaagctcaattatcaacagaggtagtaaacaaaggaactcctaagaatcgattttaaaatgatcaaagtgtgactatacattcaaaaccctagagccacataatcatccccaaaatgaactgttttaattttaaaaagtttaaaaacacaatgacaatgaagcactgatatgccttaggaacagtcccaaatcagtgctgacttaaagctaagtcctctctttccaagaaaaagaaagcagagaacaaagttcaatctacaatgggagggaacagaatgaaaacaaccaaaagggtgctttccagcagcctaggttattctttgttttcaggccacaccactggaaatgcttttcttcttatataagtcttttcctcacaacctttattttttaaaaactgccatctgctgaacaagagatgtccacatttccaccagcaggtgatccacttctgtgcacagtttttgcttcctcactgtgagtcctccttccccgaaagtgcaaagagagc

SEQ ID NO: 40253 - DNA, 761 bp, Homo sapiens
aaccctggaggcagaggctgcaatgagccaagatcgagccactgcactccagtctgggcgacagagcgagactctgtctcaaaataatgataataataattttggtaatcaaatataccaaaaagtgtgacagcggtccatgtgagactgacattttgggagcactgccttagcagaacaacaccctaagcggatggaacatggcaggaaaggatttacaggagagtgggttggtgaggctgcagaggccatgagagaagggaataagctggacaaatggactgggcctgagtgcttcaaggattccgcatgccttcctgaggagtttggactttacccggccaaatgtgggattttatgtgactaaaatcaagtttgtttagaaagctctacttggcctcagtgcttcaaggattccgcatgccttcctgaggagtttggactttacccggccaaatgtgggattttatgtgactaaaatcaagtttgtttagaaagctctacttggcctcagtgtagctggatggatgggagaggtggggaaggtagggagaccatttggaagcaacagaacaaggtttgtatttttcactgctaatatgtaacattttagttttatgggttgaataagcctactacattgataaatgaacaaaacaaaaacagtaaaactaaacaaagtttatcttgaaaatgttcatgttggtagaatagcaactttcaaaagagtcagcagagacttaagtaaattttttttaaat

SEQ ID NO: 40254 - DNA, 968 bp, Homo sapiens
aaatctaaaatacaaagcattaattaggtggtatcattattatgtaagtcattaagcctttttaaacacgtactagttttctatcaatacagaaacaagagtgaaatatggcaaaacctcaactaaccagaacagctggggattgagtcactgaatatgcctttcagataggtgaaggcttatttacaattctgaacacacatatttttttggttaactgttctggacgacatgctttgacacaggcccacaccacgaatgtcagtgatcacacagtaagatggcatcctgagacccaaaaggccttactccttactcaatgttaccctggactcctgcaacctttgcttttatgttctccttgtcttccaccctgctgtcacaatctgctctgtttcttttgttcgaataagcaagtgtgcccaaactgtatctaaggacaaggtacctggttctctaggctctgctgggcacatacggagttcttccaagggaggtaaacaaatcctagcaaacagtattctgtgacctgacctccactttacctgctgtggaagtctttcaaataatttacttcctcaaaaaaaattctgacacatgctacaacatggatgaaccttaaagacattatgttaagtgaattaaggcaatcacaaaaggataaatactgtatgattccacttagatgaagtacctagaatagtcaaaatcataaagacagaaagtagaacagtggttgtctagggtgggaggaggggagttggggaatccctgtttcatgggtacagagttccagtctgggaagattaaaaaagttctagagatggatggtggtaatggttacacaacaatgtcaatgtacttaatgccactgacctgtacgtgtaaaagtggttaaaatggtacaattcatgctatatgtatataacttaccacaaccatacgtttacagagtctctctctgttgc

SEQ ID NO: 40255 - DNA, 651 bp, Homo sapiens
tgaagaaccagtggcagcccatgggcagccttactactgagcaaatattccatagtagccacctcaaatgcttttttaaaaactcttcagggtataaaaaataataatttggaattcaaatctgagtacttgttggctaacactttaaattgaatatcagcaagaaaaactcctgaggcattttagtaattgctaaatttctcatcccagctcatgttgtcattccaaatgtgtgactgtcccacactttcaactgccaacaaaccaccttccaactctcatctaagatcctctccaaataccatctcagacagaacccaagtttcccagataaacagatactgacacttaacaaccctatctgccccacatcagtttaataattaacctttctctagactaagcaaaaacatcaaaaaagaaccaatgcaccagaccagtatgccagttaaaaaaaaaaaaaaagacccaatgcacacagtactgtgcatcatgttggaaatatcaccttatagcctctctctgcatagtgacatgcttggctcactgaagttactcaactgttcaaaccacagagttcaacaggtacttaacacatcatttaacacacaatatacagactacttttttttttgtttttatttatttttt

SEQ ID NO: 40256 - DNA, 2586 bp, Homo sapiens
tacaatgggtaagaaatgtgcccaagataaggcagttagtcaatgacaacggtaataacagaactgtttcctgatctctggccgtttctaccaggccgtaacttttctgacatcgcaaacaaatcttaactccgaatctacctacggcctaattcaacaaatgcctcaaaacgctagtcaacaggcctcaaagtgtacacatgaagacacatcttccttcatcctctcgccagttgacaaattaatgattacacgttcaggcattttacccagatgcaataaaattaagaatgacatcttagaaaatgtggttcaagagaagacatacgcagggattgacaaaatccatcttacttcctttcgaatctctttgatggttacttggttctcaaacacagatcactgctaacaggactcaaaaacaccacttgggaccatcaaccagtgctgcttcgggcgacccgctgggaacacccccacctgacccaagcgtccaccactccttgagcacaagctctgggggtgacctgtgcctgccggcttagttttagaccctacgggaacagctgacatcttgtgaaaaacttagcataacgtacatcctttccgcgggaatttatttctgttcgcacaaggcgtttctgctccgcacagagcaggccttgcttcccaggacgccgctcgcccctccacagcctccttttcagcgtccaaaatcggactttaggaacagaaatcgaaacggtcgcggacctcccgagcggcaggtcggggcgctgccgggtcggcgcggggtccagcggcggtgcccggcgggccgcggcgcgggagaggcccgctcacttcacaacggcggcccggagccaccggttgcggcggccactagacgctccgccaccgcgcagcgaccgcccgggccctccgaagttccgaccggccgcgcgcccggccccagctgcgggttcgcgccccgcccggagcgagcccggggggcgggtccgcgggggctcggcgggcggagcgcggggcgcgcgcggggaggggcgcgcggcgggcccggcgcgccggggaacttgggcgcccgccactgccgccgcccggccactttcctttcacgcctcccgcgggctgacgcgcgccgcgctgcctgccaggggctgacggccgccgccgctctccgccgcggcgaggcgcccaggcgcgcccctgcagccggccggccggcgcgcgggaccgcggggccgcgcgcgggcgccgcgctccccccgccccgcccccgcccccaacgtgccgccgccgccgcccgttggcgcctcagcccgcgcgcccgccggcgcccggcggtttcccgttggcaaagttgcgcggccgcttcgaaggggacgccgtacggtcccccgccccggcgccgccgccgcccctccaggccgccgcgcgggaaggcccagccggtggccccgcttttttacctgcccggagttttcgcgcgcgcgctcgctcgatcgctcgcttttccccctctcgcgctcgttttctttctttctttccgtcttttcgctcccccgcgcggaagctttttcctcccgtgctgcccgcgctcgcccgctcgcgccctccttcctgctgggttcggcggagcggggcggccggcagctctccccgcccccctccacccgcgctccggcggaggcggcggcggcgctccgcgctccgactcattccaatatggcacggacgcagggcgcatgcgcccgcgcccccccacccccagctccgcggtcctccaggcagcctgcgcccctcgcgccgcgcccgtggagctcccgggcccggctgccccgctcccgccccagcgccatccctcctggctggggccgcgcgggaggcaaggactccgcgggctggtgtgccgggggtccggcgccgcgggccacccacgcccccagccagcaactcggcgcggacggccccgaggccgtggcgcaggacacgcggcggcgcctcgggcccccgacggcgctgtggccccgagcggaacggcccggaagaggagacgcgtccccgggaacccagtgcccgccctggcccagccccgatccagcctgcgcctcacctcgggttgtagacagagcggcggggatcccagaggggttcgcgggtcggacctggagtaccggcccggcgaagcgcgccgctgtcgcccgcacgtgactggctcggacaagatggcatgagcggagaagcggccggatcccagatgcgcgcgtgccgccgccgcgggcactgcgcccgtttgcctgcccctcgtcggggatcgggcgctccctctgagacctgaaagggcacccaagtgccccctgtctgcgaagtccggcgcgggcccttcggcgcccccgatgtctctaggcttccgcaggaggcgccctgtaaatcttgagtcttcctgcagcgagggggcacaggacagctgcgaattgggacgaacgagcccagagccccgggaaggatcagaacctcgaaggcggcttcaagtcggccccgcagcccgaggtgaccgtgggcggttacgttgcccgagctcgcccc

SEQ ID NO: 40257 - DNA, 1339 bp, Homo sapiens
atggttcactctcagaagtatctgtccctacccacctcgtaggtgcggtcaggtgagttcttctctgcctctgtttccacactgcacctggaagaagctggaggacctgctctcctaattgctcctctaccactgatgttgtaagaaggggacactgacttgtcactctctgccaatgtaggagccaggcactgtctctgttggctcagggctgggctcccaggaagtaaaagcctaaaggctcagggaggccatttaaggtctagggtccagtggactttcggacgcatcgcagcctccgctgagcccttctagcaggcttgtggtgactgcaccctggggcggctgctccattgtttcctgtcagtcccgctcatctgctcaacaaccctttggaggaaacacacaggagggtcctgccctctagtggctgccggcggccaggtctctcctcacagggctccgcccgcgacctcagaggagcccaccgccctctctgcctgctctagtgcctgccgcacagcaacaagcaggcatttcctgggggtgaagccgaggctggccccatgagctgacacccagcaatcttcatctccgagcacctttgagtcctggggggccctgcttccagatgtgagcccccagcccgtggggctgggtggtcctgggctgtgccacagggtttcagcccaccgcgaaggaggcctgacggtgtccaggtcgagggcacctgtgggcaatgattgacataacactgcagagagagagcctggtggggcaccggcctctgcccaggctgggttccggggccttcccccatgtgcccacatcccatgcttcccccgttacagcctctgccgtcagactgcgcaccagcatctgtgggtgaggagagaacctgggctggggcttgacacaaaaggggctttgcctctggacacccccacctgtgccgcaagtggagggggcggggaaacggggaggagggaaagtaagcggaagtcccgcctctgtggaagcgcctctgcaccctttgtcccccaagggaagcacaagtgtgtggccagtcagataaagcaggcctttccttgcctttatggagccacgggctgaggctggaccaagggtcagtgaggggttcaggaggccccctctgcgcctctcttccaggccctgagcccatcattcccttcgttgttagagtgaaactgtgaagagccgcagctctgtgccgggcgaagaggatttggcagtgaaaaggatgagcttgccttgccctgggggcaactggcacctggggtaagaggtggccggtgagagcctgagccctctggagagc

SEQ ID NO: 40258 - DNA, 1191 bp, Homo sapiens
cttatgccattcccctggtgttaccttttgtgattttcaaatgaaagggcaaagaagtgaggagtagatgagccgggaacaaaactggcgctgcccgcagacagtcatgctttcatttcaggctccccctgctctcccaccccacatggccacgtggaagccgcacactattagttccacataattggaaagggtgtcaggatctcccagacattaaccagaaacatgctgctcagttgtcacctccaatgtgactaatgcagccgtgtcttaattagtcactgctcactgactgcgatgacagctcccgagcctgttccaaggccccaacctgtgatggggcactgcagagcagattaaaggtgagaggccgctgggaaggaaggaccaggagttgccagtttttcaggtctctttcccactgagcactgtgaacccaggtggcctctgccaaacccctttgtcaacattgtgacagtagagtcaatagggtcataacattgggacacatttattggagggagagaagaaatgtgacagggaaatggtctagaagattccttcacaagtcagctgttatgtcacgggtccccatgcagctccctggggaaggggcgatgagggatgaaccgtgccactctgactggcctacacctagcaaatgctgctcaggccagggtggcccatctactggctaatgtatgacctgtgatctacagtggctgtcttataatctgtgccagttccatttctcctgcaggggctttgcactcagaagcaaggaggagggagggggctgggggcgggaagtaaaaggtgagagactgccccctcagtggaagtgcctaggcctctaccctgagagcagtagccatgtctgggtcctcctcctctcactgcccaccagcctgagggctggcctgctgtctgggccccaggaaaaatgagaatcaccccacggtgaagccgggagaagcagagagggctgggagctgccccagagcctggcccctgccagcctcacagtgaggcagcctccaggcaccacctccctgctcctggcatccccttccctccttcctaagcgcccagggcccagtgttcattcggcctcacaggtggagcacccagggccctttaactcttcaggcccctcagaaatgagatgaagacaaaatttactggctccga

SEQ ID NO: 40259 - DNA, 863 bp, Homo sapiens
tcacagaaagaacctgagctcctggaatccaggttttcataacatcgaatgctacctggagaccatgggaatgtccctgtccccttaccctgagcagaaaggtaagaaacaactcaggagatgtatgttttttgaagacaataattagttagttaagcgatactttgtgatcaaaacataaaaaccctgttcagcccaagtcctcaatgtgagatacaagaatgtgacctgggtaattagacattggatgctaactctgtgacaggccctgtgaggagtgctggggacacactggagaatgaacacacatgggccttgccctgcagagcttggatttatttcacagacaagggaagcagcacagagaagttgagtaatttgtctcaagagtgaggtaacactcagccggacttctgacccctaagcttcagtacctcacaccactgcccttgggaaatgcagcacccagtaaccttgggcagtagaccccattcaaagcaaatgactggcctccaaaatgaaatgggaactgaaaccaaagcctggatcacctctgctattttccagactcttacatatcctcactcccactctctgtatctctagagctctttggatcctggcgcttcttgcacttctctgatttcaaagcagcacatcacttagttatcttcagtcctccaaaaagaaaacagattctcagcaaacacgaaatagctgccatagtcctccaaaaggcttgtacagccaagaacaaaatcccctagcctctggtttccgcctagcaccaagcaggcactcaaagtatatagctgttgagggaaccaaacttttgacatcctcaagccatgtctgctgggtta

SEQ ID NO: 40260 - DNA, 2179 bp, Homo sapiens
cctctctaagataaggggtagggtagattcgggacttgtgtgaagtagggttgattggctcaagagtgagacagagagatactgagccacttgacttaagaggttcagctcctggggttgaaagaatcttcagataccatttggactaactggcctgtatcatacctgacagatgacaaaaattagggccaagaagggaagtgacttgtccaagatcacataaacagaagatgcagccaacatgtattaaatgcatactaagagccgggtactgtgttaagtacgtttatttgaatgatcccaatcaatccctgcttatgagctaagtacgacatattattacccccattttactagtgaggaactcaggctctgcaggtgaagtcacttgtcctgggtcacggagcaatccaagcctaactccagatttctcttcttagctatgccatatggactctcggaactcagtgggactcaaagtttgaggaaggtgtttgatgaaggaaatgaaccccttgcctgaaaaatatcagattctcgagcacgaaataccagtccctcacccccgccacctgatctaattcactcctactgccatatgggaaatagaatgctcagaaggaaagcggcttgtctgcagtcacccggcctagactctaaaggcaggctcctatctccgggccagggtcccccctcatcaatgccaccgtctccggtcgacccccccaccccctccattgcggggtccacctcgggactgggtcggccctggggcaggctctcaagggcccaagggctgccatcccgcgaatcccggctgcagtacaagctggaacctgaagggcagagagtacctgcaggaggagaccggaggaggccagccgggccgcgtggcccagcacctcctggctgcccatagcctccgcgccaggctcagacaccaggaaatgccgccgccactccgtttagtcgcgataagatggcgtcacggcgcgcctcgctgtctgattgatggccttgagagaggggggcggggcacgagaagttctggtcctttaagtgggcctgtctcgggccgtctgttatggcgcctggctctttctatttcggtaggttttgcgctgtctgtcgcttgtgcgctgtctgtccctctcttccccgtataaacgaaatagtgtggcgagtactaagagataccgttaaagaatccaaagttccttctctgaggctttcagccaccaaccaagaagcactaactttcctggcctcatctgccaaaaggggaacaaacttctcactggcccgttaagaagattctcaccattgacctttgcttacagaatcacagccacagaccctctgaattaggctggacaggaattgtcctcatttaacagagaaagaactgaggaccagaagttagatatagcactgttatgtgtatggttttgtgaaatccttccgaaagctctgagaattggcccctgtggttagagatgagtaaagccttggagatgggaagtgacttgttcgaatctacacaacttgtttcctgactaagtggataccaggctcctgatcctaaacttatcactcttgcctgtatgctagaaattgtgagggcagagtggaagaaggactggaagtgctttgtaaaaaaatgtaaagcgcccaacatacacaatcagctgctgttctgtcagtgttcttattatctaccaagcaggctgtaggaagcccagtctttccccaatctctttcagtcctcacatgatttggccccaacctatcttctactacctttcacacgatcattgcccttcccaacactatctaggccatagccattccgagtccttactggtcctcaaacaggcggtgactcactggcctttgctcctccaccctctttgtccaaagtgtcttccctgacagcaccccttgccctcctagaccacactgtcctgactttcctggccaaccacagctggtacctgctgtggactaaatgtttgtgtaccctcaaaattcatatgttgaagcctaatccccagtgtgatagtattaggaggtaaggcctttgggaagtaattaggtcctgaaagtggagccgtcataatgggattcatgtccttataaaaagagatgtcagaaaaatgatctctgtgtttactatttg

SEQ ID NO: 40261 - DNA, 1197 bp, Homo sapiens
agtgctgtctctgggcacagcgatgtcaacacaggaaacctggtcttcactgagtacctgctgtgtacccggccctcacaaggtgggagtcatgtgtgtggtggcagtggggagtgatcaggaggacaggacatggcactcaaggggtgaccttgcagctagggaaggaacaaaaacatacaggatctaagtctcaattgccaaaaaggatagctcctggaagcccagagacctgtagactcaggttttagaattgacagtgaaggaaaggaagggttcaaggtggcccaggagcaccctatactcatccttgagtcagctggccagtgtcccagcagctcattatgtaagggctgagccagccaagtttgcagagcaaaggtcagaatggcaaagatttattggaaagtctccttgcactcatacccatgagtgccctttcatgtggggacattttgtgctcctggagcacactgcagttggtcttgggtacttccttgggacagggaagctgggcacgtgggctggtggaagtcttgggctctgagtttccacccctgcatcgggcttgggcatggccagcactctggttcctacccgattggctccagagacccaggaagcattcatatgaatcatataggtcatggcttcattttcccactcatttaaaggtgcctggtgcactcacacctgcctccagcctttgctcttactgtttcctctgccttgagtgaccttcctccagatcttctcccctccagtttctgcctggaaagccctctttccaagcttcatttcccatgatcttcaccacaaacccaggcttttgtatggcacccaaggccgctgtgagtgtgaatcttcaactggcccctgaggcacctgccagcagtaaccagtgccctgcgaatcccaccctgcagcccctcagccttccctagagtcagccttggatgcagcgggctcattaccttcaagcctttgctcaggctgttccttctgcctggagtgctttctctgcctcctctgccttcccaccactgcccactaaggaattccttcttgctcttcccggcccagcaccaagggcacctttttggtgaagccttccctgctttgttggccctcgcacagaaatttttttttttttttttttttgaggcagagtctcgctctgtcacccaggccggagtg

SEQ ID NO: 40262 - DNA, 2643 bp, Homo sapiens
aactatgggctttggagccagacagacctcggtctgaatctgcgtctgccactgactagctgtgtactctggggcaagtcgcttctcctttctctgagcctcagtttgctcatcaccaaaactggcactaacagcagccctcacctcttgagaactgttcagactgcccacatccagcacccagcacacagcctggtgctgggtagcccctatcagcgatagccatgattattcatttccttcttccatggtgaaccacacggagtgggaacaaaggtctggtggctggacctggagctcctcaagggtcagtcctccctctggctgcagtccctggcacagggtgggcctattgtttatgttgagggagagactgggttggcttactgtggacctgaaggaggagccagaaggaaacccgatcccaagtgggcaaaggtcacttgaggctcaccttgtttaccctttcctccagtccaaccccagggaagccatggggcatgatgggtggggtgggatgggatcaggacacagaacatgctaatgaatatggtccttcactcagggaagtgccgtgcattacaactgggcatcagggaggagggacatttgaatggacacaaccagggcaggtagaggtttgggggtggggtgggaaatggcattcaggcccagagaacagcatgctcaaggcctgggtgtgaagagaaagtctttcccaaaggatagtccttgaacccacctggtctggccttttctccccatccatcttccgcaatctcaaccagggtcctcccacctgaacaacgtggcagcccttctgtcccccatccagcctctcctctgccctgctgtccctctgccccatctatcccgcaggagcccccttgagcctgtcatcctgcctggttgtaatagctttcaccaccttctcattgctctgtgagaagaccaaagtccaatggcctgtctctgtcacaagcccctttctcagctcaggccacctcagggattgtcccccacttccatcccttgtgtctcagctgggaagagctgtctagactttctctatcccttctaggtggttccccaggacctggaaccctcttttttgtctcctgggaagtgacatttctttggatgagtataaggctaatgtcttggctttctgagctctggggacaggggaatggactccctagaaccccaactggtccctagactttgagcctaggggacactcggtgaatagatgaatgagtgaatgaatgaatgaaggagttatggctgacaaccaagttccatgtctggaaaggaggctcaggcgcctgccaggagcaatagagaggtctcaaaggtgggggcaggaaagcagaagactgccaatcggggtaggggcaactgccagtccgagtaggggcagttcccagaaccgcctgaggagcagtgcagcgcccgaccagcgagaacctccgaccctggagtctaaccagctcagtctttggggcagagccgggacagcgggcttggcggcgggcaccgcgcccggccgcgtccgagctccagccaacaggaagagcaggagtggggccaggagaggcgggccagctggccagtggggagtcccgggcgtgggtgtggggagcgggggaacccccgccggcccctcccaggccccagcgggcggagggagcctccccaccgggcctcagcgtcctcctctgtaaaatgggccccttctgagggctggctgcgcgctaatggcgggaggatgcgaagagggccaggcagggcagagggaccgggagactcggtgtcccgcgcaggcagaggcggagggacgctgtccccgattgcagctggcggggcgaggcctggcagggcgaggcctggcgggggcggggcctggcgggggcggggccggcggcacctgggtgaggtcgctcggccccgccccctcgcacttccgtgtgccgcggcgccggagcccgaggcggctgtagcccacatctcccgagcgacccccggcgcccgcccgccgcgcggaggcccgggccacacctcactggccgcttggcccatcccagtcagcgccgcgccgaaccccgtccgcgcgcgccggggagcggcgcccccgccgctgccgccgcgacccttggcgcctgcccctgcaacgggaggtaagtgagggccgggtccgggcgcgggatcggggctaccccgagggcgcggcgcccttccttcccccttcccgccccagttcccgtttccgaaactgagaaactgagccgcggtcagcgaaagtcccgccgcgccgagacctgccggtgactccgtccccctgtccgtctgtgtgtccctccgctagacagtgggggctgaggtccttctgtctgcccgctcccggcccctccacccgcccgtgtgtctcccgctcctccgaggggcccgtccgtccctcccgactctctcccgggccctgtgtccgtccgtctgtcgccacccactctgtgttctccccctgcgcgcctctccgagacccgatccttctgtccctcgccacccgatccgtccgtcccttgccctccgcgtgctccatcgccccacccccacccacacccctacccccgcccgccgccccct

SEQ ID NO: 40263 - DNA, 544 bp, Homo sapiens
gagcccaggaggtcgaggctgcagtgagatcatgccactgcactccagcccaggcaacagagtgagacactatctcaaaaaataaaattaaataaaatttagaaaaaataaaataaggaaaaagtaaaatcaatgaactccggtgtcattggaagagagccctgcctagtctcacagggagtgagcctgacatctttgtcccagcatgtaccttgcagtttcagttgtgtgtgacaacgaccaggaggcactgctgcagccaggatctctggtccatgagtccatccctccccagccctacaggtggcgctgcaggctcctcttccatgcaggccactaccgcctgcaaagcaatgcaacgtgggcctgtgaggatgaatggacaggcaattgctgagatctatgttgcagagatcagctcaaatgaaattcctggtggggtggaaatgtcaaagccctttaccccccacccctggggaacctgggctcaagcatgtgcagaggtctctgcttgtctccaattaaactcttaaagggataaagc

SEQ ID NO: 40264 - DNA, 2110 bp, Homo sapiens
tccaaggagcctgcattctgggtaaaggagcagccacgcatggatatgcagaacagatggcatttacactcgaggggcaacagtgtcaccaggttcctgcagcctaccacaagccacaccccaagagaaaatggcatgaaggaagacgtcaggagctcaggaagaagtactggttgttaagaaacagaggtctaggacaacagggatctggctaataagatctagaaaaatgggggttgttggaatgagaggaaagtgaggaagggtgggtgaataggcttgagccacctgctgcaggggacagaccccgctgtgaaccagaggttggaggaggccttgggactggctgggtgggccagtgggaaaggggaaccttgggaaccaagctctgcttctgcccggaggagggaggtgggccaaggaggcctgaggcactctaggcaacaccctggagcaagagggctctggggaggatagagcagagggcacttgaggaccaggcgcttcctgggacaggctctccccaagcttccaagactagctcttgaccccaagactgaagctgcacctggctctttctctaccacaggggccctctcctcccctcaacacaggcaactgtgatcttttcaagacagtgagacgttaaaaagaacactgaacttgggataaattacccagcaaacagaacgttcccggcctgggagatgtgaggggatgggggtagcagagggacggcagcaacagacaggacttgtctgaaggtcgcgctgtcaggaagttgctgagccaggattcaaacgcaggtctgactgtagcctagactgtccgctccttgccgtgcaggcatgcaagtagggtgaggagtggtaggacttggggacctccccttaccctgcccagtgtctagctgtgtagccctaggaaatgaggctggtgcctggttgggctcagaggggacatggctgccctcctgctcctgcaggaaaaggccctcaacccggctgcatgctcagcagtccaagcctccaggcctccctgccgcagggccaaggcaggggcagcaggaagaggctgggacagctagccacggagctgtcagcatgactcagcacttccacatgccagcaggccaggagcactccctgcagcctctcctgcctcatactgctcttctgtggcctccaccacaggaggtggtgcccctgtggggtaccatggccagaaggacaaagcctcaggcccacacttcagaggccctatcctgtcccagccttgcctcctctttcccctgtaggttttgagggggcccagagaccctgcagggactctggtctggcacagcagctccagaaaggggccacatgatggggctgagccagagaagccaactcgacttcccagaaagggattccagggaaggcaactggctgccaccccaagcccacacccacttccagggaagtcgaaccgaggctagcactggaggcccagcacagctttggcttcgagactagggacaaggctaagccctacagggccatcaggctcaggtcagagggcgtgctgaggtcccgaggagatgccaaggaaggggttgtgaacagggaaggggcctacaggagcctgggctaaccctgaggcttggtattgcctgagctgttagagttaggggtggggggctgcaaacatccattcatgaactaatttgaagagagggaaccctaaacagaaggtcgacatttgttgtagaacgatttggaaactaccttacgtgtccaacaacaaaggactggctagatggattatagcatctccataaaacagaatattatgtgatcattaaaaccagctctcaggatgtgtgcagtggctcacgcctgtaatcccagcactctgggaggctgaagtagggagatgacctgaggtcaggagtttgagactgaccatcctggccaacgtcatgaaaccccgtctctactaaatatataaaaattagctgagtgtggtggtgcgcgtctgtaatcccagctactcgggaagctgaggcaggagaattacttgaacccaggaggcggaggttgcagtgagctaagatggcaccactgca

SEQ ID NO: 40265 - DNA, 1161 bp, Homo sapiens
aaaaataaggaaaacgttcatttcttaatatcattctgtactttttaaacaggagggcagggagaaacagtgagtggagaccagtttgctctatcaagacgctacctccgggtgcctggcctgacatgataatccctggatgccctggccccttcccccaggtacagtcaggggcctaggctccaggcaaccctggccccaagccaccctggcttctgggaacccagctaaactccttctccctacactgacttgttccattatgttagggtcaggaaatgccccttcacagggaattatttccagcaactgtagggaataattaactcacatctctggttctctgccaaataaaatgctcttaaacatgcatctcattctttgtgtgtctctctctctttacttcatggtgaatcacttctgggtgtagccaagcctgccccaaggctcaccaaggaatgaaagcaaactgtggtcaggtgacactggcctgaaggggtctggaagggactgtgaggcctccttggagagccagtcctggggaagggcctgcacacagaaggtgctccctgcagcctcctgtccttcaaggacccacagtcttcccgaaccccactatggcacttctgctgcaggagtggaggacagggcagtggagatgccatcagctgcagaactgggcccttctcacaccctgcgggctggccccactggccttcctcctctaggaggcttcccgcccacaggactccccgagctcctgtggtgccctcagcctctccaagagcagcctgggtacctccaccaccaactggatggcctaggccagcatcttgcctcagcttcctcacctgtaagacgggtcacggttctcacaccactacccaactcacagggggcttttaaaggtggaacccaatacagcacatgagcactgagcacagggcctagcccccaaagggcaaaggaacccttctgatgagtgactgacatggttaggctctgggtccccacccaaatcttaccttgtagctcccgtaattcctactggttgtgggaggggcccagcaggagataactgaatcatggggacaggtcttccccatgctgttctcgtgatggtgaataagtctcacaagatctgatggttttaaaaacggg

SEQ ID NO: 40266 - DNA, 2272 bp, Homo sapiens
agcaatacaaggcctgcagagctaccgtgtgccaggctggtgaaaggggagctgagagtaagccaggtccctgcccaggcaggggataccccacataagtggtaagactgacacaaacccaggagagctaacaggtccaaagtgtgcaaggcagtgggtgggggaagggctttgaaagacatctaatcccttctgagaacagggtgtcttagaggcacaaagggtgaatgcgtatccacccagaaaggtgaacagatttacttcttaataatatatcctgaatgaaattggccagaagccagaatcttgtctgtctgaaacagagcttgtttgggaaggtcccgagaaatcatccatcacgcagccctcacaaccctgtcatgagcccggagcactgctggcactgtggcctcaaagcagcctccaagtagagcactggagtccttgaaaccacccagcgtggttaagtgccattactgtccccgctttacagagcgggaagcaggctctgaagtaattcactgactgaccccctcacccaccccactggacacctccagctgcatgcacggtggccctcattaattatccctgtctccgctacagaggaggctccttgggtgtccaccttctgggccaaaagggctggccagggaaggatcttggggcctaggcacgccagctcctgcctgggagatacagcacctggtggctggccctgccccaggacgtcactcccggcgctagggccctggaactccgtccttccggcgctcagccttctcagtctccttgccctccgcctcctcccgccccaggtcaaatcttagacctccttttcacaatggatcccagggttctgcacccacgtgccaccgccctcctcccctcttcccccaatcagccccgccgctgcctggcgtctcagcagccccctgctccaaactcggacccaacccaggggtggcaggagacaggggtaggggagcgtagtctgaggtggggagaaggccgggcccccgagtctcctgcaagaggaattaaaaacagggtctctagagtcggactgctggggctcaaatcagatctccctgtgtgtaactttgggtagctgactaactcggagcctccgtttccccatctggaagggggaacactcccggcggcgcccacacagccaggtggtggagagggttaagagggccgcgttctgtagaacagcagtaatggtggccttcccggcatcaccctagagggtacttggcgagtcgcgagcccatcccccgcgccaccatgcagctgcgcggccggcgatccgcgtggggaagagccggcctgaggcgcacggaggaccagaggcccacgcggccgagcccgggcgtagggcgagtgtgcggcgcagcggaagccgcctgcagcccggggccctgcgaggcgcgcgtctccgccctccgacggcgcccgggccaccttcctcgtctaggcatctcgcagcgcgacccagagcccgcggcgactctggccgccgcagacgccccccgccccgcccgagccgcgtccccggccggcgccgcgcactcacccagagcccgccgcagtggtggcctggatggagctgatacgtaggcggttggccgtgtccttcaaggcctgcagcttctgctggtcaggcttgtggtagctctccatggtgcggcaggcggggaccgggcgcacacgcggacacacagagatagcggctgctcccgcggcgacaggcggctgccgaggccgggcgcggggcgggggcgcgttaagtcgccgggcggggcggggcggggatgggagaggcggggcagggggaggaggcggggctcggatcaccccaggccttcagccccgccccgcctggggccgcctcctgcccgctcccctcccctaggcgctgggccgctgcggactgcgaggttagcagttaaccacacacaccaataataataacataacgaacaactcaggattcgagtctgggctcctgactcgaaagcctctcagtctccctcctccacacagtcctccgtggacttgtcacggcgaatcccattttagagatggacaaactgaggcttggcaagggcaatcaaggtcacaaggctggtgggtgccaggcttggccccagccgaccaaccccaggcccaagagactgcaggacttaattttgagactgagtttcgctgttgttgcccaggctggagtgcaatggcatgatcttggctcaccacaacctccgcc

SEQ ID NO: 40267 - DNA, 1990 bp, Homo sapiens
tttggaaatttaacaaaaatactgtgatggtcagttttatgtgtcaatttggctagactagtacccagttattcaatcacacactaacctaggtgtttcttttatttatttatttagaggcggagtctcgctcagtcaccaaggccagagtgcagtggtgcaatctcggctcattgcaacctccgccttctgtgttcaagtgattctcctgcctcagcctcccagtagctgggattacaggtgcccaccaccacgcccggctaatttttttgaatttttaatagagacggagtttcaccatgttggccaggctggtctcaaactcctgacctcgtgatccacccaccttggcctcccaaagtgcgtggatgacaggcgtgagccattgcgcctggcccaatattttattttactcattttttttttggagttggagtctcactctgtcacccaagctggagtgtaggggcgcaatctcggctcactgcacaaactctgcatcccaggttcaagtgattctcctgtctcagcctttcaagtagctggtacacaggcgtgtgccaccatacctggctaatttttgtatttttagtatagacgggtttttgtcatgttggccaggctgatcttgaactcctgacctcaggtgatccgcctgtctgcatcaatattttaaataaagatgttaatgctccacaggttgtgcgtctttccccacgtgagtccacattcttttctaccctaggattactactggcacagaggaagttgaaccactgtccccctttggttggatgtttgcaatacttctgcttttatactgcaacaaacaatacttgtgctttccctccatctagcactgtgcctccaggagagagggtttttttctggtcgcccctgcagacatgaccctgcttgtccctggccaatcccagggccagactggattgttggccctctgactcaccctagaaggcctggggctggagaggcctggaactcctcggaggtaagtgccagtgtgaggccagccaagccctgccgggcctgctttccttgtgcataaagaaaacatgccgagtcattgtgacttgcactttttgactagtgcggtcaggctctgtgtggcactgccgtaggcctgggtacctcctagtgtgaggagcaggagctgctttccagcaacgccctacagcccctgtcaactcctgcccaggggcgctggacaggctgggctgggcaggggcggtgctggtgacagacaggacactcttaggggctcctcctgcacagtctgcaggacgcagtagggagagatcttcatccttgtccccttttctggtacctcttgggtttccctgagcaaggctggggtggtggaaggagctattttgttccagtgggtattaaatattaaagcttttgttttgtgtcgtggggaggttaagtggattttctcctgggctggttgttgaacagctgagagtgaaactggcttcttagagtaggactaaaaagctccagagagtggctcacagaggggttgcttaaccactgtgagccacagctcctcctggaaaacctgaaaccatcaggagcacttcccttgtaaggtcacctgagaaagtgagtgaggagatatctcacttcccaaaccagggttctttggcccccagacacatgacttttactgtctctcttcccatccttgcctccagaattagcaagggcacccagtcagccatcctgttctagtgacttggacaaggcatcagaaaagcatttgttaggccaggtgcggtggctcacgcctgtaattccagcactttgggaggccgaggtgtgcggatcacaaggtcaggagttcgagaccagtctggccaatatggtgaaaccccgtctctactaaaaatacaaaaattagctgggcgtggtagtgggtgcctgtagttccagttacttgggaggctgagacaggagaatcgcttga

SEQ ID NO: 40268 - DNA, 876 bp, Homo sapiens
cacatttggggaaagacaagagagccaatgggactggagccaggtgagcaatgcagagtgacagatgaggcctggggtagaggggccagataaggtagggcctcgtgggccactgtcatgatcctggctatgatttgagtgagctcggacactgctggagggttttaagcagaggagtgccatgatctgacttatgttttgcaaggattactctggctgttgggttaagaataggtaagaagcaaccagggagcaaaagatgggaaaccaggtagcaggctactgcaaaatccagattaaacagttactcggatcatgacctaggaggatgtcattatgttgctgcacatttgaaccttgacacaactgacaaatcaaacttgcactcattagaatccttactgaatgttactctttgttacttaggacaaagctagagctttagctgtacaaaccttatcctgtgacccggagggcatttcttctagagtctcggtgcttcccagattggagagctgagtgcttggctgtaacccagggctggagatatttgagtcacccatctgattctttaaaaagttaaaagaaaaaaatatatcttgtgaaaaaaatttgctattatttggctcacaaaacagcatctgaggttatcaaaaatgttattttttaaaaagaagaagaaaaaccaacctcaaaatgtttgctctgtactccaatgtaaataacatgcaataaaatttctagaacattgagcacctaattttagacaacagtgttggccacaactgttatttttatcacctttttaagaaaaagataatggtattactttatcacatattcttttaatcttatttatttgtttttccaagatgg

SEQ ID NO: 40269 - DNA, 839 bp, Homo sapiens
ttgtaatttgaaacttcctaaataatggattgatagaaactaaagtcactcaattttaaatgtaataactataataaaacagatatactcacagcttgcatttctatacagaagaaatggttcatggagctgaaattccaaatctttattcactggttcaactagattgtgcatatttagtcgattcacaatggtaaaaccatggtaaggggaagctgaccttagatttaatagaagaaaaaaaaatatgtagttaccatttaatctgtagaaatgttatctactatgtactttattttcatttcaaaaaagaatgcattagaacattatacaatattatcagcacttacatctgtaaacaaaaaatttaagtcagatcatactcctcctctgacgagaagtctccaaagacagtctctcagagtaaaggccaaagtccttactgaggccaccaaggccccacctgatatactccccactctgacttcatttcctatggctcttctccagctcctactctccagccacaccgggctccttgccactctctctgcgtgtgtgcttctacctaaaaacctcttcctggattactgccccagaagctgcacagctatctcatctcctccaagcctttgttcagatgtcacctttttcatgaggcctacttgaactatcctttttaatgctcccaagctcaatatctctaaccttcctcttttatccataccacttatttttagtatttattgtcctccccccactaggatgtaagccccatgcaaatggagcttttgtcttacttttttcatacatatatcccaagatagacacacagttgc

SEQ ID NO: 40270 - DNA, 2226 bp, Homo sapiens
acaattttattccttgtggcttcccatatctccttctcttccaggaggcaaagataaacaacgtgattataaaaactcttcatctgaattaactgttcataaatgccaaatgattttcgataaattactgataaatataatctatgcaactgtattatagggtaaacgacatactacggtcatcttccagagttctgtcagtttaaggatttcgtatcttattgaaatgtgaactccagtcattggtgaattcaatccaacaagcatttacgtattactttctaagtgtaaagcctgtagctgaatgagttaattaggaagggtcaattacaagaaagtgggaaattatgctttttaaacaactaacaaagcttcaagcaggggctaacaagaatcagtgaacacactgaatgtgacttttcggaccctccccagtgcacgaaagccagaaagtactgagtccgaggggagcattcagagatgacatcaccagcatcatagatggaacaaaacacatttacagggtctctcttgtttgtacaaaggtcttcggggatccagtgaacacggaagcccttttcctaagtgccttggaatcttttccgaaactctgtgtagttcgattaaagccggacccacccaccccctccttccaagaatcgaaactaattggattttaaactttaaacccaaatgacctctgcgacaggggctctcatttacgtttgccagggggagaggaggagtgtttattttatagataatgtacatataatttatctaataatccgcaaagcctcaaacacaagctttcaggcacccttttgaccccaccggtcttataactcccaatgtatctgcaaagaaggcaggtcgcccacgtccccagacccgacgccaagggactgatcctgctccaatcctcccctccactggcttttccttgggatgtctcgagccacttctctcactcctatcccccaatcccaagcggacccgacacccctcaggctctggctaggctcttggccagaccctggcctcgtctccaccgccctggcctcttagtgtgcccccccaccccacagtaacccgcgcggcccctttaagagacggcagcggccgggtggccgtcctcagggccaggcggcactcacccactggttggccttggggcagaaggtgtacagagcgacctggcccgtgaggtctgcgatgctggtgatataggggtcgtgttgcttcagggccgctaggctcatctcctgcccagctcgactcagcgcctccatcttgaatcccagagcctagcccctctggtgggggcggagtcgcggacaggaaagtgccatcgaggcaaaattcccccatctgcgtcagtcccctcaacttccgcctctacgcgggcctcgcggcagggcggtacgtcagccattctggtccgccgcgcgcacgctccgggcgccgggttccggcgttgtcagggtccgcggccctacgatgtgggcggtgtccaaggctgcgtagtggagcttgcaggctggagctccggcgcttcctttccctgagctaaaacgactgggtcctgggatctggcctctagctcgcctgccgagctctttccaggcaaaggttggagaccgccgaagtgccggcctcgcggtgcgctgtctggcagggcccggggccacagaaggaaaacatgtctgtggaatgtggaaatgcgggactctaccgggcccgtttagagagcacagaaaaacatgggggaaagggagaggcgagaagcccagaaaattaccctaggtctcagatatggatgtgtcgacctaaaaggaagaagactctggggcaaaataaatgcaagcagagagtttatttgggccaagcttgaggattgcaccccaggagcatagattcaagttgccttgaatatatacactgattagcagaaggtacaagtggattttttttctttttttttgagacggagtttcactcttgtcgcccaggctgaagtgcagtggcgcgatctcgactcactgcaacctccgcctccaaggttcaagcgattctcctgtctcagcgtccccagtagctgggattacatgggcgcgccaccatgccctgataatttttgtgtttatagtagagacggggtttcgccatgttggccaggctagtctcgaactcctgacctcaggcgatccacccgcctctgcctcc

SEQ ID NO: 40271 - DNA, 802 bp, Homo sapiens
tcagttgaagatcagcatgcaggagatttattaggaattgctcttgggatcaaaaactgtggaggagaagggaagaagttgagctgtaatgcagtctcagcggaggcctcagctgaccctatggggagttcagaatctgggataaggtggcccttggtgcttgtccctagttggggtaagaggacttagcctttaaacccccatggcaatgagtcatcggatgcaggctgccctggtaaaggatcatgaccttggcaatgtggttgtctttccaggatgattcctgtaaaggctgacagctaagggccttctgttggcagcactgacagtagctgggagtgactcttccattcctgaagggaggtcagggtggggcatcacagcatccaataaaatcactagtcatgatttttaaaccaatacaatcactagtcatgatctttaaaaatcttgaatgtgacatctcctgacctcatccaccttggttgatgaaatagatatgattgtcttggtagtcaagagtactagttaaccaaaagactatatgctctttaagtttaggcaagctagtaaggaagtgagaaaagcaagacctgaactttgatctggagcaaatcactttacctttgaacctttttccctctctgtacaatgaaatggcaatccctgccctgcttgccttctgttgttttggatgacctcattagccattagacaacatatttgaaagtaatctctgattttattttttatttatttttattattttttttcaactaggggcatacccagatatctctga

SEQ ID NO: 40272 - DNA, 1490 bp, Homo sapiens
ggttgctgcaaatgccattaattcattccttttttatgtctgagtagtattctatcatatatatatatatatatatatatatatataccacaatttctttacccactcattgactgatgggcatttgggttggttccacatttttccaatggcaaattgtgctgctataaacattttttttcattcattgttctggaaattaatagttcacataaaagacatctttacatgaattagaaaaagttattctcttctagggccaagttacaaaaggaattttcttggggagatcaattagagaagggtgttccctctgggtagaccagttagaaatatgttccccttcctcttggctagtgccgcaaggtacggggcatggtaagcagagcctgggcgcatttcagcccccacttcccctctgttggctagggatctttgtgtcaggcacactttgcatgactgcactgcacattgaccttgcagttaggcacttggccagtgggcattccaatctggagactcactctattccatacctgggaattttcctgtattatttcttcagtaaatctcttcttactgtttcctgtcatctgtttttagaatcctatttctcagatgttggatctactgactgagtttcttgtctttcctctcttgttgttcatctcctggttcttttattctagtttctgggaaatttctcaagttcaattctcataccaaaattttttcaaccaaaattttaatttcacctatactattttttattttgatgagtgatcattctatgatgactcttttttatttttactatatccttccactcatgtttcattagtacaatatctcattatcgttctctgattcttaacgagatttccttttccagcagggtgtctgtttcatttcttctctcttgcttttctagagtgctttcttcaaatatctgtttatacttaaggatgaagcactgggaaactaatgggaaactcagttgttgtgtgtggcttgttaatgatgggcttctcagtagaaaaacaggatgacccttttcactggagaacctgaaatatcagtatctgtgggtctttactcgggtaactcagcttcttcaaaaagtaatgcttcagactccagccttaagggtacaaatacgtctggttgctgttactctgaaactgcttagggagtctcactttcagcacacagactttcccttaatttctcagtttttactttcataccttgtcaattccattcttgaactaagtcctctaattgtggtattgttgccatttcttcagagactacaccttttgactcctccatgggtagcagtggcagccgttgattatgctgggtgggatggggatgggaagctgggaggtgccactggtctttatatagactttcaaacaagtctcaatctcagtcctgtaccctcaccacagcttcctttcttttttcctcttcttggtccttctcct

SEQ ID NO: 40273 - DNA, 1630 bp, Homo sapiens
agtgtgtggctggagtcctagctacatgggaggctgaggtgggaggatcacttgagcctgggagtttgaggttgcagtgagctatgattttgccactgcactccagcctgggcaacagaatgagaccctgtctcaaaaaaaaaaaaaaaaaaaaaaaaaagaaaagaaaagaaaaaagaaaaataatgggaaagaatcccttcacatatccagtggcagatctgacctgccagagccctgttcatcttgacaatgagtcaggtgatctgggttcatggccacactgcatgacgtctgttcagagcagcacccaggggttctcttccttagccagtagctttctcagctttctcatggacctaggaactccccagtgcctagatgcagtggagcacatagatagccttgtgttgtctggaaatgtctgtgtttctgtgtagtctctgccagtccaatcccaggatggagggtggatgtgggaacctctgttttttaattagcctttagggcatagtctgctctccacacacttgtcagaacaaagggatcttttttcttcagggaatagcattaagaagcaggaggtggagtagtatacttgtcctgtttgaaatggcttttatctgctgttgcatcagtgatctttgacagctgatctgcagttctggcttaaccatttactagttgcataaccttggcaaactcacatcccagcataatgaatctagtttactcctttatgaactggaagtgttaatattttccctgacctacctcagaggcttaaagggttgcatggagatgaaaacccattataaaaataaattattactatgaagggttagagaagtttgtcttaagaagaagggtaattttaaaaaagaagtctttgttgccccctgagtgagcacagttcttggggtagaaacgggatataggacaatctggcactgagtctgctgaaggctgtcctgccactgctacatcttgcccttctctcctaacctcactgccccaggggtggagacagtcatgacactgggcaggccagccctcctctgtgctgctggccacctatgcggcacagtcttgtcagagagctgacaatcagctccctgctgctttctcatcttttaaagtccaattaaacatctctggccacagcatgataattgtctgggctccacacagtggaacgtgacctgaggtggcattaggagaccagaaaagaaagaaaagcccttttatcttggaaagatcatgtccccagttccttaaagtgtagaatcattgttcacattgagcaattgcccagctcaattccaaacgtcaagatatcaaaaggcatgcaggagatttaaccgtgtccacatggactcatgtgcccaagaagcaatctggtggcttaagaattagcaatggcataaggtatgtgtgagaaacagtgagtctgagtggaaagttccagcagggagggatgctggaaggctaggttagggccagattgcagaggaccttgatgccaggggtaaaaaggtgaactttgcttcagcaggataatcaggagtcttacatgggattgtagggcctggtctctggtggaaggcaagaagattctgctatggacagg

SEQ ID NO: 40274 - DNA, 693 bp, Homo sapiens
gggtagtgagtgctctctacagacccgggctaccccaacccccccgattccagaaagggccggagaaaagcagggggcgcctgccccgctccggagcagccagggagcccggccgagccttgacgaggatgagctcggagaccgcagcagctaccgcccgctagcacctgagctcccagggggcggggcctcctccaggtgtgcgcagaggaggccggcgcggagtcggggccggcgcgggagcccgagctgtcccccagcccagaaatgcgcggggaggagcggttcatccgcaccccagcgccgcgggagacactggcgccgcctgcctcctccgggtcccggggggagagcgcaccgtgcggcgcggagggggttaaccgggcagcccgccgctggagcgcgcttaaccctttggagcccgcaggtcagccgggccaggctggggtggcggcaccccgagtcccacgcgacggccaccccgagcgcgcaagtggtgccgggcagaaccgcgcgccgggctgcagacccgccggggcgcggcgcggcgcgggccgtgggcggctcggggcgggcggagggcgggggacggcggcgggcgcgcagcgtcgccagggcgaagccggcgtgcggcgcggcgcggcgggcgcggagcgagcgggcgggcgagcgcctccgtccccggatgtgagc

SEQ ID NO: 40275 - DNA, 1064 bp, Homo sapiens
ttttggagagagcagccaaatgctagggtaggatttgaggggttctcatgtgctttttcattttgcagcagatgtcccttctctagagtgagttatggtgtctctcacatagctggggttgtgtgtgtgcattttcttttgaagttctctagtctgagaacgaggagggagctcggtaagccagcatgtggcccagtggcattgctagattcatgacaatggctgtaccttgccaggaagacctcagactggcttgacacgactctgagtaagcagagacctctttgtggggtcactacttttgtgtggagtaggtgggaggcctgatgctgtttctctttgtgcacggtaatgtgtacatagcaatttttgcatgcagagtgaattcctggatcacgctgctgtctcccttttccagttgccagacacatgtgtacaggaattaggggacgtggctgccaattcagggagaagcctgtttacaaatgggacagtttgtaaaatagatagacccttaagcaatatatgatttttttttctctttttttaatgacagtttccttctaattcagggagcaggctatagaaatcctttccaccccgggcagctctgtcaaggccccatccgcagtgggagagcaagggtcaagggtcatttgtttttacagacaggcatgacagagtgtcctgccccctggaggagtgagggatgttctccttatcagaaggaattgttaggatcagacccatctatttctctattgctctgttctgcttcacttgtgaaaatcttatggcagtgagatggtatccacttgtacctggagaccaaaactggaccaacataaagaaaaaaaaatacaacttatatttagtcttcctgaacagtgttagtatttctcagatgtgctggtttatcatttaggtattgggaaattgaaaaggaagaatacctattacttaggtattgggaaattgaaaatgaagaatggaagaaagagggagggaagagactattgtgtttctatggagaacaacattggggcccttgactttagatttca

SEQ ID NO: 40276 - DNA, 2011 bp, Homo sapiens
agtattgctgatgtgcaccaagcgaatgactttcccaggagaagcgccaccatcattccttcctctgagccatgtttcagattttcttgggtggcaggtccctttgtggatttcttgcaggtccttagctgggaatgagtgggaaggtgtacgtgttattcctgaaaagcttagggtctgcggcccttcttgtgcacctctgcttaaaagagcccacagtgttggctttcatagcagagcagtctaggaaattttgtactctggttccagggctcagagtagcaagagtgctgggacctgtctgagaagcagtgctgggctgtggatgcttgcctgtggcaccagatgccttacagtggccaggaatgctgcgggacagtctactttgattgctttctttcctccatggctgagatctgagtgtagtgttaactgggcttaaaaatcaagtccgttgtatctgcatggtcacgtagttcggcatctcatggcttttgcacctagaggtgtgaaccataatacctgaaacacaatttcataacctggctccttgggcttagcctatatggtggaggttaggtctgtatatcatcaagactgtgtctttgcatggttgtcattctgttggaattgaactttcttatttctgtaggcctaggttctgtctattcttctcagacagctcatatgctgcttcttcccttcagccttctctgatacttgtccactccccgcctgcctacatctgagtacttgctttccctctggacacccctgtgcccagtccaactctcctgtacagacaccagcccctttcccctggtttataactgttgtgggaagtggcgtggagtgtgatggtctgctcatgggctgtggggtctgacagcctgactctttggctgattagctgagtgactttggatggaactagaatatgagttcctagaggctgagactgcagtctgatttgggtgtatagccttgtgaacttaatcctgtgcctggcacacaggaagcacatcaggaaatgcacgtcaaatgagtgaataaataaatgaatgaccatacaaggactccatggtatattcttgtagatcattagttaattatcaacaattggctaatgattaatgtttgcctgagaggctgactttttgtccattagtaatgacatcccaggaaacacctggcagagttcgtctttaatttcaggagtatatctttctttcttggcaaatttaactattaaagagagaagaaagacaagtacttgatactttttgaatctgtaagttataaacctgtcttctgtattcaatgttgtatattagccacattgcagatgattctatttggatggatgtgtgactgtcacctttcacataaaaattgattgagccagtcatagtggtatgtgcctgtagtcccagctatgtgggaggctgaggcaggagtcttggttgagcccaggagtttgagactgtaggggactatgagtgagccactgcactctagcctgggtgacagagcaagactctatctcaaaaaaaaaaaaaaaaaaaaacaaaaaaatgtggtagaaggggagagagcctcaaaatgaccagagtagatggactcgtgtagtaaaactttacccaaagttggtttcctaatgatataatgtgaaacagtctatgtgctatacaaataattatatctcttttgttaagccttacgtcattttgacaaaggctttacttgattgagtattgacggcttttccaaaataaaatccagctcttaattgagatttgtggctgggcatagtagctcatgcttgtaatcccagcactttgggacacttagcagggaggattgctggaggccaggagttcaaaaccagaatgggcaacatagtgagattccatgtctccccccgccaaaaaaaaaaaaaaaattagctgggtgtggtggcgtgcacctgtggtcccagctactcaggaggctgaggtggggggattgcttg

SEQ ID NO: 40277 - DNA, 548 bp, Homo sapiens
agaaattatatagtacaatatggacaaatgcagggctaacagtaattcttagggctttcacagatgggcaaggttgggggtagggaccggctggaggcaaagagaaggcttcctgagacagaggggactggggctggctcccacccagatgaaaacctgcaaatctcagggagaaagcttcatgcactatgaaaaggtcacaagaacctccagtcctgggatgatgcaggcaagggaaaaatcaaatgggactttccccattgagtcatcaatcatttgcctggtgattggtgggagtcacctgtgtgttgtgcctgttcccagtgggaggttagagcttcatctctgaattaatatcaaaagaagagctgtctttacaaatcaatatgcttctcacaaggggatggcatatttagatgcagaggttggcatggcgaatcggatggtttgagggtagtggggcatctgggttaaaggccctgatgttctacagacttgggtttgaatcttagctgtgctactctcaagcgctgtcacctggcaagttg

SEQ ID NO: 40278 - DNA, 687 bp, Homo sapiens
actccttttaaccgtgctttcactgattagaaaaccaaggcaagggctgggtgtggtggctcacgcctgtgatcccaacactttgggaggctaaggtgggcagattgctttgagctcaggagttcaagaccagcctaggcaatgtggcgtaaccacatttcttaaaaaaatattagcctgtgtggtggcatgtacttacggtcccggctgctcgggaggcggaggttgtaatgagctgagattgcaccattacactccaccctggggaacagagactctgtcttaaaaaacaaaaacaaaaaggctgagttagagaagagcaaagtgcttgcccaaggttatatagcttagaccgagtggggattttgaactcagactgcttgactccatatttactgtgctctccagcttagggcaaactggtagccgggaagtcatccagctcaatttcagcttgcctcctcctgatttcctggatgtctggtttttaaaaagttaatagcaaactagtatagtgttggctccacagacgtgcttttcagaacccacctatttgccctttactggtaatcaggggtaatcctgtcccatatctgtaccctgatatgtctgggttgtaaaaagtgtaagactggatggtacagttaagctatttgttctggatttgggttttttaagtttggcatt

SEQ ID NO: 40279 - DNA, 723 bp, Homo sapiens
attttaaagggagctcattctaaaattctggccagaaaagcagggcaattttattgtaggaactattaatgattaataattcctctaagtaaagatatttgatgcccaaagaaagggaggggcatacctgaaacttcatctctgaccacaagggcagcctctctgtcttctgcttcttcagtggtcctggaggctatgggcactgcccctgcctgcccggggactctgccaccctggggcttggtggagcaggttgccctagctgcctctcttttgcatgtgctacctagttgcctcttactgcaatgtttgctttgggggtggacagaaaaccaggacgttatagctggttgcaagcataaggcatagcaatttgctggtcctgttttgaaagactgtgttttgaaattttgatttacaaaactgctttcatcaccattgaactacctcaaggcacaagttcaaaatggaagatactcaagtaaaagctgtaaagcaaacagcagcagttagagtggcatacggtaaatatgcgtccaggtcaagagccctcactggagaggcagctggaagtgctttcactgggaagtgggagggctgactcaggggctggccctagggtcagtggctggacactgtctccattggggtggcactgggagtagttgtctggacaggcagactctctccacaggggtgatagaaagcagtggtaatttctaa

SEQ ID NO: 40280 - DNA, 1692 bp, Homo sapiens
cctctatcttccctcctcctcctccatcttccctcctcctccatctttcctcctcctccctcatcttccctcctcctcctcctcccgcatcttctcctcctccctcatcttctcctgctccctcatcttccctcctcctcctccctcatcttccctcctcctccctccctcatcttccctcctcctccgttcctccctcatcttccctcctcctccctcatgttccctcctcctcctccctcatgttccctcctcctcctccctcattttctctcatcttccctcatcttcctcctccttcgtcttctagcatcttcctttatcttcctcctccctcatctaccctcctcctccttcttttccctccccctctcctccctcctcctccctcctccctcctccctcatcttccctcctcccccttcctctcccttgccttccctcctcctccctcactttctctgcttctccctcatcttcctgtcaagtctgtcagtgccctctgctcacggggcaggttctggacttgttggtccccttcactctggggccaggaaacccatcccacctagaggggctggggctggggctggctgcttccacctgctttccctctgcagcggtgggtggcaggagctggcggatctgggtcatcctgagcaaggaactccagctgggggaagaggtgcagccctggccccttccagcccttggctgaacagtttcattttggacatgtgggcattttgctgatggttaaggactatccatttctggaatttctgaggaatgaagcatatttttgaacaggactctaatcagtaaccaaaaatagccgtgacacatcggcttctgagtctgccaactgcatatactataaagagcaccactgggaggtgcccagggccctctgcctcactccaactgtcacagccccactggggagtgtgaccagacccatttccatggttaatatttaattcctcagccctgaacacatgcagctaaatgaagtcactcctttcccataaatactagatgaagcagatgcaggtgaggccgggtgatggccctcgcccttgtgagttccactgccttcctcgggcctcggcctttgtctactgcctacttggccaagcaagcaagcacatgaatcccaccagccacagtgccagagaggagctgagtgggcaggagtggctgtgctcttgattcataaggtggttttgctttgctgccccgcagctcagaccttggacaggaagaacatttccctcctccacctgtgttctcagctgcagggggattccctcctcctccagagagtgttgtgcagagcacatgagatggtggggatccctggagcattttagaaatggaaaagcaccacatacaggagagggaccgctgctctcctttcccagcccccagcccggccattcgatctggaaacctatgctccacagcacagttggcccctgggtggtgcgtggagggaaggctttctgatgaggcagccgtgtgtgtcccatgtaggcaactgaaccaggaggccccacagtgcgcactgggcacgagagaccaggactggctgtctcgttcctctctgctgggcagtgcctagccaaggactcagcccggtctcttgtgtgcagccccagtgtgcctgggagtcctcccctggctaggccc

SEQ ID NO: 40281 - DNA, 459 bp, Homo sapiens
ggaccagacatggaacccctgcagaccccaaatccaccagcttaggaggttggccacagatgccaggacaaatcttcccttcccactgtctgctgcgccgactccagtacttcctataaacacatcacaggcgctgcaaagcctgtttgattttctgcgctcattggcacacttccacaccagtacaagcagagccacttccagcagacacctctgtcacccaggctggagtgcagtggcagcttcacagctcactgcaaggtccaggttgtgtgctgggtgcccctgctggtcaaagcaccttggccagccaaggttagccagccaattttcacacacatgcccactgctgtttcctcttcagacttctgggtgggtttaaccgcagagggtcctaagattgcaaggtgagtgtttgaaaaactgactgcttctttgtatcaactggaaatcactcta

SEQ ID NO: 40282 - DNA, 5188 bp, Homo sapiens
gtcaggcatggtggtgtgcacctgtagtcccagctacttcagagggttgcttgagcccagtgagcggattgcaccactgcactccagccttggcaacaggacaacactctgtctcaaaaaaaaaaaagaaaaaagaaaaaaagaaaagcgcaaagctaaaaccaaaccacatagtgattttatcaagttcacagctggcctgagtttcatcctccctcttcttacatagcctcactcatcttgtttcttcctccataaagtgtggaatgtgatgctacatctacgacccatatattattaataacaaataaattcaagtatcatggatcaaaaaatataccaccgatcctgttgcatgtgcccaacatacggcccaacgtagggtgacagggtgatcctccctgcagccctatgaggctaacttcatcacccctgtttacagatggagctttgagagaacgacaacagtacctgtctcctctgcatccgaggctttctttgagaccccagtgtgataacaacaatgtaaaaatcaatgcaagtacccaggagacaaggcacagggaccacagccatgaacagaacacatgtatgtgacctcaaggggtttctcctaggaaccaggaggagtgggattaacgctgagttaacacctagcctgagtctgcgggctttcctgggccagcccctcctactagagcagagaaaatgtgttttgtagccctgctgggaacagtggggtgcaagccctcagtgtggcttcagggtctttccctcaaagcaggcattaaaattgaccctgccaagcttaaccagctggagcagaacatggggttgagggagcaccgaggccaggagtgctcccaacagttcctctcccagctccggctcaccaccaggggccctgggagacagccagtatgtgccagaaacggctcactcttcacgagacaatgaatccactgttgaccagccagggccttgattaatatttgcaaaagaacgaactggaaaattccacctgtgtgggtggaggctggacccgcaggacttgtcaacaaccctgatggccttgttctcccagggatggatcaggcaaagaagcaaaggtcggaataacaatgacagaatctggggattaccgtgactcttgggtcctagggaatttccccccccaccttttttttttttttttggttctgcctctcctgcccctaaatttacacagcactcttaaatccttcaacttgctttcctatctgctgttttgctgtttcttctgcgtttcctaacagccctgctggggaggcagaactgatgtcagccccatgttacagatggagaaacaggttccaaaagactaagagcctcactcaaggccaacagatggtgaatgagccgcagaaccaggtggtctggaagccaggcatctcaccgcgctgtggctgcacagagtctgtgcagaccctagggtctgggtcagggccataggtacttgacccagtgatcttccaggctctggcagaggccctgacctttgctctgcttgtgaagaaagaggaggaagttcaaaccagctcccctgggtgggcaggctcaggcactggccttggatgaaggtaggtgttaatttattcatccattcaagcatttaatgagcaccccctacaaagcccccccggacaggaaggcacactggctggtagctctttcagaaacccagacctagcagaatttatgactgaagggagaaggtcagaaaatgtccaaaggtcgcttctctcatagactcaaatcacttcatcgcccctatcaccaccccattttacagaaaaggaaactgctctgagaagagcagtgacttgccagagcctccagttcaaaaagccacaaagtcatcaggcttaggcagccaaataaattgtgtgccttccggcaggccacctgggacctctcatgcagggccacttgaggcatggccttctgagctaggggggaaaacccccgaggggacaggcagacacacctgtttgcccacctcaacctccagttgtggctacagggcccttcacaccctctcctccactccacagccccaactacgaaactgaaccaggtatcaccccatccctaagccccagggggccagggcagtgtcattctgaacccagaacagcaggaaagccacttggcctgggtcttgggtctctgcctggcagcccctgcctgagtactcctccttcttacagctcagccacctccagaccaccctcacctgacacttcttcccctggggggagaaagaacctcagcccttctctttttacaaaaccccctcccctatccttttgccaaggcttcctgtgactgccaccaaccagcctcagtgcccttggtctctctgccccatctgaccccatgagctcctccctcactactgggctttcctgctgcagccccttagacctccccacctcctcaggcaagctctcctccccagggctctatcctcctctcctctccactgccccctgagaaagtctgactcatgaaccctgtctccaggcctaacctccgcaccctggttgtctcaaagcctgtgtgccgaacaacaccaagctcacagcagggcctgccctggcacacaactgaaaagccagcacagcccagagcctggcccacagcacagaatcagatactcacggaatgaacgcatgttagtgaatggctgcctgctcgctcgtctcagagggactagccctctattttgccctgcagagccaaccaggtggcctttctaaaaccaaaaatggatgaccatttaagcctgtaccattgttcctcagcaccatgggacaaagttcacaatcttgagcttgcagacgaggctgttttcatctgggcttccgcagcaaggcgggtacttgtgtccttgaaaataattctcactgcactcatcctcactccaggagtacccatcagccagcacccatgtgtggttcacctttgcacccagcaggtatttgctgaacaggaagatgactattagagctgaaaatgttctcaagggccacagggcccaaagcaactcagagaggtggaatgaggggctcagggtggcccagtcccaggcaggggtgcggccacaacctcaactgagttccttggtcaggaaacagagcaattctctgaaaatgctacctgcaactccacacgtatgcatgccagagcccaaacccctggctgatccccagtccatgcaagccttaatcaagctggcaggtgggccaggcctggcacacaagtagggcctcagctaaaacagctgcttgacttagtacagcctctcaccagctgacaacacacccctaagttccatacccctctctaggcctccgtcttctcatctgtagaatggagctaattctgcctacaagtttaaatggccctgagttggtcaccacaaccctgtcgtttgcaaaccgagggggctgaagcagcagttccagcctctgtgactccactgttagcccagctgatttttgtgaactttcccccaaacccactgtgtctcaaaggatggtccctgggccacccacccacgaattacgggggcgtgggtggaggctcgttaaatgcagatcccgggcctgacccggacctgccgtctggatctcattttaggcggcgctagagatcccgggccagggaaacttgagaaccgcagctccaaatcgccagtgctgacggcttccgctttgggagccccaggtgttgctgtccgaactcacttggtggaaacagacatttaccagaaagcctggggtcgggcagcgggcactcctaccgctctaaccccgcgtagctgaaagaattcgctccctcaaaggagtcagtgagcttcggcagtctgcgttccacccgtttcgcttcgcgcggcggggcgattgtgtaaagcgggcccgggtctcggcgtccagcccggccccaaacctccggcccccaggcctctccgggctagcggccgggcggcgctgctgcggggtggtcggggcgcctccgcggctactcacccggggcgactcggccgagagcccgacagtcgggaccggagcgggaggagcgggtggccgcggcccggcccctgccccgcggcactttaaccggcggcgccggcgccccgcgcgctctctgcgtccggaatggggacgcagcagttccgacccggtcggccccggagccgcgaggctagctgggctccagcggaggcgcgcgaagcccgagggcgggtgcagctgatgcacctggctcactgcatgcacgtgtgcgcgggggtaggcgcgcgccgcggcggcccgtgctccgccagcgctcggacacggcccatccctccgagccccagcaggcgagggcgctgcgacctgccccagcctgggagggggccagcgggcccgccctctgttcgggtggcgggaatgggtcggcgctgcgagaggcggagccgagaaggggcggcccggcggcgccgggataaaagcgcagcgtgcgggtggcctggatcccgcgcagtggcccggcgatgtcgctcgtgctgctaagcctggccgcgctgtgcaggagcgccgtaccccgagagccggtaagcccccgccagcacctcttccctcatctcccggccctcgagcccagatcctgacgtcgtctgatccgccagtccaggctgccccgaaggcgtgcgcggactgccggctcaaggggcatgcctgcaccctcagggcagccccggacatcggcgtcaggttgcttgagtcaggggcgtgggaatcagacagacccggtctcagatgccaccctgtactgttggttctgtcatttatgctcaccaagttccaagtcccgaacggtaaaacgaagggcagtaccgaacccaccagggtctcttaaggtataacgacatggcctgcaattagcggcgaagggcctggcacgtagttattgttacttggggtctgctcacctgttggggcacaagaactgtttctccattagtaccccctccctttttggccatattgattgccatgttcactcgtgaaggcagttgcctttcttccccagtaccctgaatgatcgagggaatcttctgggtcactgaagagaaaatagctcatcccccaaataacctttg

SEQ ID NO: 40283 - DNA, 1915 bp, Homo sapiens
tggcacaagtgtcttccacactgttcttcttccctgagattccctcctccctctggttagctcctaatcaccttcaggactctaaacagatgtcacctcacctcctttgaagaaaccctccctgactgtcggggatggaggaggtacttgcttgagtgcccaatactgccctctgcacaagcccattccatgccatgctctgatacctgttgtcctatctccaagtgtgacctctctcctcctaatcaccccccacagagtgggagaatcctagagggaaggatctggcaaggcccttacagaccatccagtcagccttctcaactagacagatggagaaaccaggcctgtgcaacagtaatggccactctgggcttacggtgtgccaggcactgtcatactagtgataactaactagtagctgccctactagttaggtattatccttaacccatctaccggtaaggaagctggatcagagatgtcctacatgaatttctgagcagtttatgcctcatttcttctgtgaattgtacactgcctgtgcccgttttcctacgtgaatgctgttttagttactgatcagtaaggttttgtgtatgtgtatacatctaaggtcctctgccaggcacgctactgcaaataattttttctggttagtttagtttggtctaatagtgttgtttttgatacacaagctcttaatatatatttagacaaatgtccaccatttccttgcttttaagcttgaaatgacttccattatctgagatttccttaacaaaggaaaaagcctggaccccaaactatcccttaacaagcacaggctgacgctcccagtgagccagcctggtcctaaactctatctgccaccatttaaccctcacggcaacttgcgaggcggctggttatcaccgtggtcgttttatggtcggggaagctgaggccagagcccgggcaggagcgcacacaaccagacggtggggcgtgcgggagatcggagcggtgtccctgcgggggctccgcctggctcctggcgctccgcacctcccagccctcggcgtcccggcgcgccaccacccggaaaagaacgaccgcttccgcactccccccaccaggggctggggcctgcaagggggactcgaagcctcccgccgcctcccgccccttgcctggcagcggaggacccaagcaagggcaaagagttccaacccagccagagccgcacctcttgcagcgactccggcaccagcgcgggcacgatgggccgcttcacgccgcgctgctccttctccttctcgccgcccttctcctttccgttctccgtatcacccttctcagcctgggtcattatggccggagacacccaccaacctctcgcctcagcgctgcagccacgactgccgggatggaagggccaccgcgcaggcgcacggccggctgcccacagtcaagatggccgccgcggagtcgccccagagggctccgaaaaggcgggggtggggctgcccggcgcaggggctgggggcggggtgtgcatgcggattgattgggtgggtgttgctgtgattagtcctgactgtgtagatgccagcaacatagtacacatagcttttcgagcgcctagtgggggtcggctgataacccgcatcttatttcgtcctcacaggcatctcttctcctggcttcccagataccatatgtactcttagtttttctcatatgtcttcatgttcagtccagcctctgatgttggggttaggtcttttccaggcacactccttgggtgactatccagtttcctggctttagcaatgaatacgattcccaaatatatatatccaggatgaaccgctcagagagatccgtactgataaccagtgcctacttggtctctccatctggattgtctaca

SEQ ID NO: 40284 - DNA, 934 bp, Homo sapiens
gctatgcatactactaaaataaatacagtgatttataaatgagaaaaagttaacaatgaacagtgtttcagaagttgaaaaggtgacactaacagtgctaaatacacaggcttttatttgttttcttcagattgctttttcgtgaatataaagatgaggagtccattctgcaacctaaaaatatttacttattaaaactatattaatactttaataaactatacaaaaaggtaatgagacaaacatctgcatttatggaactgcatgtcagtcaggccagttccctgcagagggaattcccagcatgacctcattcatctgtgaggacacagagcagtccttgtttagacatacacattcatctactgctcatcatggtcagccttccacttcttgatggtttccttctgctatgaatgcgcatgtccggttgtctgcttcttagagcagacatttacctgaaagaaaatgttacaataattagttactggttattaatttggatctgtgtgaaaacctcaacatattacatgttataaaatctttctcaaaagacattttgataacaaggccagtgaatttttcaagggttaagataacaaatatatttccaaataatgtctgagtaattataagctgctgggcaacttcttaaagaaaacattactacagaagtgttttcaaaacaaaatcctacaaaagaatttcagatctgaagttaccttcctcatccaccagccattggagggggactagggccacgcagatgattgattctacccattcttcggggagggtttcctggtggcctaataaaataaaaagttagtatctactgtttgatagacacaacttgaattgtctccttttaaaagcactcaactagacccttttctttttcagcacccacatgaccctaaaacacaatttaaaa

SEQ ID NO: 40285 - DNA, 2315 bp, Homo sapiens
actaaagtctgaaagcgcccaaaactaagatgaaattttgatgcttttctgtagtgtccatcaatctacttgtttcaaagatttttaagtgggagatgagaaggggagatttttaaaagtcaagaaatgcaaaagtgcagtcagccagaaggctcctcactgactaccttactcgtctctggagaaaaacagatgactcaaatagaaccaagacctagttccaatgatccacaactccttgttaagactgtaccaaagaatttcacctgagtcaaacaggtgggcaggcagctctagcactgatctgacacagtcatgtccttcctttccggtcatcttctttgtgggttcgcagaattaagtctctcggattctccattccggtaataattaacttgctcctaggggaagatagtacttcttcccatgccccttgaaattcgagcaaaaaattccatgtttgactagctaccctttcctggggaaaaagcctatgcaaagctttcatctaattatcatcctaggtcggctcggtctttttacacgttgtagacagaggcagcataacagataacaaggacgctgacgtcagcctacctgtgatcgaatcccgactcagccattaagttacctctgtgacttaaatagcccaggcaagctatttaatctatctgagcctcagagtttccacccgtaaaacaggattgaatgtgacgataagcaaataactgaaacactgtccagggcacaagcgctacgtgtacagcgtcggcatcattgtccttactagttttaaggataccgacacccgagagaggaaagaccaccctcgcaaatccacaatcaagcgcttgctgcacgaaggcggggttgcagggctcccagtactcaacgtgaggccggcgggacctcggcccccgactgccggctcagagaccatcggctgacgcgccgcaagccgaggcgacttcggtccagctccgcccggccgcggggcgctaagcccggggaagccgcaccgggctcaagactcagcgagcgacgatgaaaggaacctggagtccgatcttacaagtcaccggtcgaagccacagcccgctctcaacttaccgttcgagatgtaaaccatcttgtcccacttccccgcttcggagccaccgggcgcctggcccctgtcggtttctgtatctccctctgctccccgcccttcgagcgtcacaggccgcgattagacaaaatgctgacgaggacgaaggtgggcagagcccattggctgctgaaagagacgcgcccccgacgggcgtttttgcatcgtcacatctgcgacttctggttaggcggaggcggccgagctgacaaccggatatgacgttaaggactgccctgtagtgcccgcggttgccagtcctctatccgacttgatcgtgcagagttggttcgcaccgcccagtgaggggaagctgttttctcgtcgattgataggctccgggtctgggtaggagaggctgccctgtatgaggtagcttgaagggccgctgacaggaggaaacgcttccgaattttccagacgtgttgacgtttgagggtgctgactacacgttaaggaactttattgtcacgcctttgggaatatactgccaggctcttcctagatatattcattctctttaaaatgagcatgtctacctgggttcaccagaaactaagtttttcttagccttttgtgaggcaactgaaaaataaattgaactgtaggccctttctctgcttgtttcttattgatggcgactgcttatgaccactttggtgacagacgaattagaagacatgtcttggacattcagtaaatgtggaccacataccatggatatttactctgctacagccagtgggctgcctctgttccttgaacgtggccatttcattcccttctcaaggcctctgcacttagctattctttcagcgtggagacctaatggctgcttcctttgacttcccgcccccagttctcaagccatgtgtcatctctttggaaagattcctaatcaccttccagaaaatgaaaattacatgctgaaaatctattttgagtttaacaactttggttaagattttatgttctaatacttagaactgacaaagatctaattttatgttgattttggagagagcattttccccagaaaagttcataataggacaagacaacatccttcacctcatttgggatttgtgcagcacaatcataaaggatcatttctgcaaaaatattagggcagggccgttaattttcccaagggcctttcttaatctag

SEQ ID NO: 40286 - DNA, 676 bp, Homo sapiens
gtcccgaatctcagttctgccccaaggtgggagaccagtgagcaaagctgagtaacccctgtgaatctctttttttcctcacttaccagcctggcggcattacgagaagtcaatgatttaataaatacgtgcttacacttattgagttcagatgcaccagcccctgtgctaatcactttatgtatgcaatctcattcttgtatcaacactaggagtgagacactgttattattgttgtcttagaaatgaccaaacaggcttggcagggtgaaggcatttgcccaggtcacgtgggcagggctcagcagagttaatttttacacctaggtggtggggttgcagtacctctgtatctgtgtaaggtgtttatttagctcagtgtctggcaaacagtaaatgttcagtaaacatttgctgttacagctggttaaagggccttctaatctgtgaacatctgataggaggtagtcttgcagctttaggaaacacctggatgatgacaggagggaacgtgaactgggtttagcgtcttcgtattgcctaattttaaaacctttttgtgttaaattagtgaagataaaaaaaaaaagacgatttggtatggtgggtgtagttcctttgagaagaaaaaaataagttgctctgtttaaattgaaatattcccagaataaaggca

SEQ ID NO: 40287 - DNA, 436 bp, Homo sapiens
attatcctttttggccctctctgtgtgggctgctgttgtccatctgaaactcatcgttgttgtgttatatatgaactaaaaactgtctttcagctttgctttttctctttgctgagaacttgcagagttcagtgccaagaggaggcctcaggtcattgcaaagacactgctgactcagttttttgtacctaatgaatctttattggcaccgaggtctaaccttgacacagtgtggtgagttatgccttggcagccactcttaggcactgcattcctgtccctgtgaaaccctttataaataatgtgggctggctcacagatgctgccagcacacagagccttcgagtagtcttaaaaaatgggaagtagatgggatggtgcccttaaaatacaaggagcgttcagcgttaagtgttgatgaatatcactctaaaaa

SEQ ID NO: 40288 - DNA, 582 bp, Homo sapiens
tctgtcctcaaaataggtctaggcaagctcccaagttcaagtgggaagtaacacttcccctaggatcatgttgctcaccttcaagtaggaataaattaaactctatgagataattgagttattatttcaaatattctctgaaaacaaaggtctgggagataaacttttgggagagcctgcttaaacgttgaactggcccctgcagtatgaatttgtcaggcatgggtagaggtcagagtgtgtgttttggcatagagatagaataaagtccctggcatgttgacaatgtgatgcccagctcaagtgagtgagctggcaggcgtcctaggctcacgctaggaactccacatagcttaggcctggatgacaaagggtaatttatgtcacgcaagaaaccaatgtctcatatgggagttctccaagatatttcctctggaacacaagttccaggcgacactcagtggaaatcaagggttccatggtcaaacgtatttgagaagtgattcttgctccttcattatagttgcatgacatctattagtgtataattctcagatgtcttgcagtaaaggaatctgctta

SEQ ID NO: 40289 - DNA, 1077 bp, Homo sapiens
tgacctcggagttgtaaactgacctaagatcatcatgcttaaataatagttacttttggtaaccaagtgtcattggttaaatgtgagtaagggttagccccactccacaaccttcctactaaaaacaagtttcaacctaaatccatcccactgggagacctttcttaaacaagcattaattaacaaggatgcacagaacagtgcacacaggctgtgctataaagttgatgaaatcccagctctgtgacttctcaggtgcaccgactacagctctttcatgaaagattgactcaaagcagatgtgtcaatagtccagggtcaagtttgtgttagccatacagtcagcattagacaaacaaaaacctgtgcaccagtgactaagcagtctcatttaaggtcacgcttcagggtccagccccaaatgaacaggctatgggtttaattagaaaatgggtggttgtcaacccatagttgacaacagtagttcaatcaatccacatatactgactgcgttagtgtcactagtgacagcccattcctaacattcatcatactaacagataagccactcattcagcaagaaaaactcatctctagcatcccttatgcaaatcctcagagcctatgggatagagggagaaactaaagagagccacagggctctcggataagaatgctggctcactaatcctggggtgtgacttcctgatgagggaactggctgcctgagggtgccacagctaagcactgagggtgccacagctaagcatacagttaacatcccactgcctaacatggactgaaaagtgtaggcatcctcaccatgagagcatcccctaacatgacttgtctgtttcctccgtcatccacccacctcattaacatttgtcacatacccattgtgatagaggacagagatatattctgccctgcagaactcaaaagcctagacatcaagtaagcataatttcttattgccaattcattggttggcactgtgtggagtactgcctcaaaaaaaaaaaaataatgctcagcaagaaaaagaagttaggataactagtaatgtcagccatg

SEQ ID NO: 40290 - DNA, 372 bp, Homo sapiens
aacatccacttccgcggcccactccgctctccagaagacaagagtccttcagaacagggagaagtttaaaaaaacacatacacacaaaacaaaacaacttctttcacttggaatatccctgagaaatccagggttaatgttcaactctgggtgtgtagtggagaccagcccagcccacaggttcagcggagcagagagcaaagaggccagccaaggggcacttccctgctcatgtctcatagtcaagggaaagcacagccttccagccagtgtccaccctccaggggcggtcaaggtgaccaaacggaaacttggtgaaaaggcacagatgcaatcaacatcacacaagctacctctaggtctacacctgca

SEQ ID NO: 40291 - DNA, 1873 bp, Homo sapiens
aagtgaggcgaaaagcgggaaagcaacacttgttctcgatcatagagagttgggaggcagctgaggccagacccgaggcctcctagggcgacactctccttcccaagcccagaagaagaggtaccaaccctgtgtccagctggccgagtcccatttgctgggctggacccgtggccccttccgtattgcagcggccggcggcgcagcgaaactggtcctctgggggcctccgagggcccctgctgggagagtggggtctggtggtcgggagggatgaagggagcaggggtgggagggagaggggagcagctgcccgcccgcccgccccaaggaaccgaggctcgcaggagtcctacctcaaggcggccaacagggggcagccggcaccgcaccgcggggaagaaaaggccgcggggatggctccgagttctgcgcgcatagtgctaaccccttgagcaccggagcgcacgggggaggggaggagaagacaggggactcttgggccgggcctcctggggagggtcttccgttgagagggtcggggggtggaggagacgaaggctactacgtcctggacccgagaacaactcccctacacacacaaacacacacgcacacacacgcagccaaggatccacacactcggacacacacacatttgtcggcccgcggttcgctgcgcactctccgcattgccccctcgaaactcccctggcagagtctgtctagaaactaaatctggctggttcggcagtgaatgtgcgaaggtggctggggggagggcaggggctgaggaggtgcgacctcaccgcaaggcccaagttacttccaaacagcgaattacccatttaaagagagaagagagaaaagagaggcgagagaggagaaggggcctcgataccagacagggattagaaagtcaaacagggccgtggggtctccagacttgaagttttttgttgttgttttttttaactttttggggggaagaggggttatttgcttccaggaaacatcttaatttcaattctaaccttattttctaagaaacttaaaatgggaaagaccagaaaaatggaaataggaatcgaagcttggaggacagataagaaaaattgtttagaaaataaaaacttatgttgcaggaagaaacgttaacttttcgtaaaagtgaactctcagtgaccctcggagtgtgtgattcggctttaacatacaactgacaattaaaacaaacaagagttcgcaaactggcccccgcctgctctcccaaagcggaggcccaagtgttttctaaaggacaaggcggactccgctcagggggccggggagcgctgtcccggagtacgggattacagccactaccaccacaactccccgcccccaccactgctgcaaagtgcctgagctcacccagtggcggctaataatgctaataacgcgaccccgctccccgcgccggggtgcgcgctggccccccgccaggcactcttaaaggcaaaggggcctgaagcgctcgagttactcggccaaggcaagcctacaatctggcctccgtcggtgcgggggggtgtcggggaaggtgtacgccgctctggagtagttggcccctagttcctctgcgggttctctcaaccaaggagtccctttccccatcccgagccccggccacacaccgtcccggtgcccgcgcagtgggcgcttggtaaatatttgttgaattgaatcattatcctgttactgaaatatacatagtaaattacactcgatgttctcagagcaaaaggaaagtcgtcagtgaaccgcactcagtttgtctactatcgctcttccccactttttctcaaaaatcaaaattgtttgcagaacgggt

SEQ ID NO: 40292 - DNA, 1835 bp, Homo sapiens
agtgatctcctgggacactgaggcagtgcgcccggcgtggagggcgaaggggtaggggttcctgccagcgacgctggagttccagcttcttcaggcggttggggaaatggagggataggaagaggcgaagggaactcagttaacttccaacagggggtggggggaagtaaagaaaaaaagtggcagcgcactgaacacctaccttcatggcgagggggagggggcgcggggaggaagtcgccacccgagcgagcgcagccgaggaatccgagcggagcgaccgggttaagcctggggggacggtcaggagcagggctgcggagtcctccggcgcgcgtccggcgggcgcagtgaaccggagctgaagcgggcactggcgcccgggcctggactcccgagttggggcagagctgggatgcgcccaggaatggagggggcgcggacgcgcgcgagccggcagcaagggcagggcctggtcggggcgcaactagggagccgccggtccggcgagggcgcgcaggcaactgttccacggagaggcgctccgtttccaacgtccatcagcgacggcggtaattagggctttccaaccccaaatgtgggcgtgattgtgcaaaagaccttacgacaaataataataaaaagaaattcttcacaagagggtgaaaaaaatgtaccactactcaactgtggcccggggcgggggaaggggggcgatctgtgcgcccaggtgcccccagttcattcacaccacagattctgcaaactcttggcggctcacgcctcctgatctccagctcctcctctctgggtctgtagccgaaacgtctgcttccagacgctgatcctgcagccgcgagttagtgtggacgtctctgtacacacacagacacacaccccaacacacacacccccgctgcagctttggggccacagaacaatcaggcgcgcatggctttttctccgggagatgccgctgaaaacgcacaagtcgccatctgagctgcaagagtcagccccaaattgtgtcctttcattttagggttcggcaaaaacggggagcaaaataggtgaaagtcgccccggaacttattgctgtgcggtgagctggaggggtgcgactaacccaggggagacgcgggctccccccccccaccacgtatcccgttctttctctcttcgggttgatctctcttttccccgtttttccagggcgaagggcgaagagcagcgagtgcaccgcgggcgcgaggctggggaagggcgagagctcggagctccgcggcggcgactcagctccggcggtccatggccggcgaagctgcccacctcctcgtttggcgcccgggtccgaggggcgggagagcgggccggcgggaggcgggcggtcccgggcacaacggcggcggcggaagggctcgctgggcagctgccgcacggaccccggctctgggcggcggaggcggctccgtggagctcgcagcagatttccacgcgatcctgtgccccgcaaacagactgaccgaccgcggggacgcgtccccccctcccaccccccagcccttctggccaactgccttactctctccctccctctctccagactcctctttcccctggtgttctcagaaggaagaaaaaaaaaaaaagaaagaaagaaagaaagaaaaaagttctttaaagtttcagaactaggggcggctggaaagagagagggaaggggggggaagaaagaaaaaactcaactttgctatgcgcatgcgtggtgaggccggcctatgacaaactctgcaggattttaaagccgtactacgggctggggtgccgggaggcgg

SEQ ID NO: 40293 - DNA, 804 bp, Homo sapiens
agaagacagtcccaaatgcatgggtgaggtgggagcctcctaaatatgtttgtaaacatatcctggatgttactgctgcatgggctgtcgttaggcctgtggcctcttagctcagtagtcctggaagagggctaaagggctgaaagcccaagttcaacattagggattcctccttgtgctggctggctaaccctagaaatctgtccaaagggggtccagcaagcaagtgagtcactcaccattaggagacaaacactctgcagtggccatttcattggcagggcttccaagcactgtcatccaacagatgaggcactttggactctggctggtttgagacagggagaacttagaactaacacagtctcttgtttacaatccccactaccccacagcaaatacaattttcttctacttctcttcaaatgcactccctctagtctgtgctgagcattttacatacataatatcattgagcctgactggaatattagtaatgcatattaatattccagtgttacagatgaggagagtaagctccaaaagatgaagcaacttgcccaaggtcacataggcagaatttaaatgagccctgtaaatcaaaagccgtgattcctgcaaagggcaaaagcagaggggagcagtagaaaaatatgaggagagatggagagagatagaagggaagagccaagagaggtgggaaggatggaagaaaaggatggagaagggaattaggaagaaagaaaggtgccaagacaattcttccagaagagcagtgagagagaattacatttgtcctctact

SEQ ID NO: 40294 - DNA, 713 bp, Homo sapiens
taagccaaccagtttgtggtactttgttacagaacccctaggaaactaatacaggagtcatggtggagttctgctgcactgctcccaataaaactgaaactccaggcagccttggtgctgaaaccatgggggtccatttgggagagggtcatctgagatccaagaagcatctcctcttgcttctgtctccctttgacctggttgagcaacttgtgctcaaaggcccgcgtcgtggctctcccaagggtggctgtccgtgagagagttagcaccaaaagtcaatatttgtccacaggcaacagttgtgtttgcactatgaaagccccaacaggttttttcagagatttcaattggccatgaagtaactctgtcccaaggaaacccctgaagatgagccaggagggacaaaagtcccaaacagtaggctctggcaggcagcatcacaggaagcacgaggggactcgtccccgggccagggtcttcacggggccttggtgcacaatcgctgtgcttgtgctgctgctggggttggacttcctcatgcagctcagccaaagcctcctggccctcccttggtgctgatcagctgttcccagctggaagcagcaatgtcatcctcttcccaggactccagctgacacagctgatgggtctgcaggccagcaggagcacacgtgtctccacacctcctttgggaggaagggatgtcctgg

SEQ ID NO: 40295 - DNA, 1059 bp, Homo sapiens
gaggccgaggtgggcggatcacgaggtcaggagatcgagaccatcctgactaacatggtgaaaccccatctctacaaaaaatacaaaaaattagccgggtgtggtggcaggtgcctatagttccagccacttgagaggctgaggcaggagaacggcatgaacccaggaggtggagcttgcagtgagcccagaccgcgccactgcactccagcctgggtgacagagtgagactccaactcaaaaaaaaaaaaaaaatgattttagaaccttacacatcaaggccaatccacccagtttccacccagcctagaaaatagtcctcattttctgaggcttgtcttggtgttacctcctcagaaaaatcttctcgggtcaccttaagtccggtagttcttctcattcccagtgactccttaataactctactgtacttttcttcatgcaacttactagtttctgaagtcatcctatttgttactagttcactgccttcctggccccaccctttgaaatataatgtatttgcaacatctagctcctggaatggagcctggaacagagtaggcatcaatgaacatgtgctgatgaaagcctgacttggcaccctacagtgaccctagcccttcatagagatatagaccttgcccctagaatagatcacattacatcaggattacttgtgttacaatctcagtaagagttagtgagtttgtcatcatatccacttacataatagacggtaaataaatgactaaactatgtccttccccatgcaccaaaagaagccacaccttgggaagccacatcgcctgcttacagccacatcttgctaacgacagagcctgatttctgactgcgagcattactctgctcctccacatggcctccatgtcccctgcaacacaacctattatgcgtggaggctgcaaggacagagaagacaacttgcaaatgtctttttcagcaaattcagtgtttctgttactattatatagatactagcttttgccaaatctattaaaattgactcaaattatcatttcttataataactgcatg

SEQ ID NO: 40296 - DNA, 487 bp, Homo sapiens
ccagtgattacctgcccattttaagccctgtcagcaacacaaagacttaaaccgaagtgaaatacagggcgcattatccctttaagcccttgagttaactcaaggggactgaaaggcatgtctgtatttctacaggaggtttgtggtgggttcagaaaacatttaaagaagtaccctattatctcaggtaggtgtgttccaaagaatctaaactgaatgtacgtctgttttggttcctgaaaaatgtttctcagctactttcgcttcccagagtccatcttgcacaatacaaattacagaagtgagttgcattttacctagtaagtctggaatgagcagctaaggaagtggtaacacagggaaatgtttctttagcatgcctttttgacctttgcagaactgtccttgatggccctgagcatgccagcctttacctcccagttaagcttgaggtatttggaaaacaagttttgaaaaaagccacaca

SEQ ID NO: 40297 - DNA, 1450 bp, Homo sapiens
aacctcgacctcccaggcccaagtgatcttcccacctcagcctcctgagtagctgagaccacaggcatgcacatcatgctcggataattttttttgtaaagacaggatcttcccatgttgcccacactggtcttgaatttctgcactcaagcgatcctcctgtctcagcctcccacagtgctgggattacagcgtgcgccacgacacccagcctatttcacttttcaacatacagaaatttaaactcatattccagacgatgagtcagatgactcctccatccaatgaattttgtacaatgtaggcaaatattgcattgtgtatttccacacctctatgactcaatcttagggtaaagtctggttcctctttccctctcagataaacaaaaaacaagtccattgaatcccagaataacttgaaacctttgggacctgcctacactgctgagaaggctctgaaattgttctgtctgctccagcaccgtactttccatggagaggtgatgaatcagactggacaggaccacagggtctctgaaattcctcaggagaatcttgattacacccaattagtgagaccatatacagaagcccggtgaatcagacggcctcacaacccagcaggtcagcagggctagaaaaccaaggccattagctcctgctgtgtcctacctctcaaagaatcaaatccaagctggttgtgaaaaacaatggccattttatacaatcagtcccagattatttttaagggggatgtgagagattcaaagcagtggagaacaccaaagtcactaatagtcacatttagaatccaccagaggttgttttttgaaatgaaaaatctgacttctcaaatacaattttcctaggctgatttaaacatttctcccaagctctctgggccaaatagcatcagaaaacagtaatacaggtatgtacgagggcctggggtaaagtggcctgggctgaagttcatctgagcattggcctggttctataaggttggtaagctcatgtaggtggacggagcccctggctaaggcctggttcaaagtttgagttggcatgtagttggcatctgactataccctgtcgttcattcattcacatccgactcctgagctcagacctcaatacctcccaggagttagccctctcttgattcattccacctacactggtcaagcatctactctcacatgtaaggcctttattctggcctttccttcctttcctggtgcctacatacccagattttacgcattctccacaattctgtggtccaaatccaagtgaacctcctctaagaagctaaccctgaccaactccagctaacacagtctcacaatattctctggataccagacatcagagcagctgtttgttgagctcagatgatactccaggtaccatgcccaacatttcacataactgatctggtttaattt

SEQ ID NO: 40298 - DNA, 1712 bp, Homo sapiens
aaatggctaaaaatagcaaattttaacacacatattacaacaataaaaaataaaaaagtaaaggtttgtcaggcatttaataattaatacctttcattgtttttgtctggaaagagtgtgtgcaaagatacttaacaaccaaatgtaatgtgtgatccttgatcggctcttgcattttttttttttttttttgagacggagtctcactctgtcgcccaagctgctggaatgcagtggcgcgattggctcttgctttctaaataaaatgcctataagatattcttaggacaagtgggggaaattaaatcgggaagagaattattatgaaattaatgatcttaggtataataattgtactgcggttatgtagcagaacatctattcttaggagatacatgctgcaatgttaaagggttaagtgttacaatgtctgcaatgttaaagggttaagtgttacaatgtctgtaacttacttgcaaatggtgaccccaaaaaggtgtgtgtgtgtgtgtgtgtgtgtgtgtgtgtgtgtgtgtgtgtgtgtgtgtgtgtgtgtgtctgtgtacgcgctttggaaggctacaattgcgagaagcgcaggtctccgccaccgaagctttagactcataagccgggtcaggccaaattccgctgtgcgtaggggaacaaacggcacaaacggggcacaaaaggggaacaaacggcatacgcaaccgtccccgcgggagccccggcccagctcagcgcacccgccagcatgccccaccctgattggtccacttgctcagctcgccggcacccctatatccaattggcgtagcgcttgctgagcggcggcggcaaccgacgtacacaaggggcttgagcgttctgtggagagagtgcgaggtcaggccatgaacttggggtaagcaggggtaagctggggtaagctggggtaagcaaggtggtcgtcagcggagagggaggcatgtgtgtctgggttgtcccttggagtctttactggagaacgttcccaacctgcgccgccgagaggggcagagcccagttctcgggtagaagatcgaggcagatgggtcggcccttagcgactccacagaccttacgttttcacttaatgactagcattaaaactgccagtgatcccctttcggtcccttatttacctcaggatgaggagggaagagaggtgaggaggaaaggagagaaatgacgagacagttagaggaagcgtggcggctcctggggaggactcctggcccatgccccgggttcttcgccaccttgtttttggagtcttgcagaatgttgaaacgcccaaattcgttttaggcccacgaggcggggaaccaggcttctcaagaaatcgatgtagtaccagtgcctaacacctagtaggcgctccttaagtaggggtgaataaataaaaagggctggtgcatggtcttcatcactcgcaagtttgatattttgagaagatgagaagccaccaaactcagacctaactacacatcgttcagcaaatgttattatgttttagaatctggggatatggaaataaataagatagtgtgtcccttaaggagattacagtgcagtgcgtcattgaaggtactttaccattgaagctcttttctttcttggtgacgtttcaccaacataaacacgaactgttcataaccctacaataaggaaagccgtaaaacctattc

SEQ ID NO: 40299 - DNA, 815 bp, Homo sapiens
aaacttaacactaaagctcatcaaatgttactcttatataggtgtagtatatgtcaattatacttgaataaggcttaaaaaatagttctaggtttgcatctttaaaaatgttaataaagatagaaaatacctatcaaatcaatagtataaaatgttatgcattaagattatttcaaggggtttcaactttaccttgaaagatgagtagtatcttattaggcaagagatctttctaggccaggaaatgccaaggtttcaaaatgaaatgaggtgtgttgagggcaatgatcatataaaaaccaggtcacagtctactggcaggaagagctagactagggagtctataaatattaccctgtaaccttgaagacccactgcatgtttctgagacatctcagaaaacactgaacaaacagcagcaacagacactggagtctggaagtgatatgcagacaccagagtctagactaatgtggggacagagagaactgaaagggagacattttaaaggatttggtaacaaacaggtatgagatcacaacattacaacggatcctggaacctacctgagtaagctcataggctctgtaagccaaaagtgatgtaattcgattggcattctttgacacgtgacattcatgctttggtgtggggtccaaagcactcttatttaacatagattccaaactttttacacccatggggtcatatatactctttattttaccctaaaatagagaaaaccttttaagtgtctacctaaacctaattgttgactatataacattaatattatgaaatacttctttgaatat

SEQ ID NO: 40300 - DNA, 1790 bp, Homo sapiens
aaactaagactggacttttttttaacctgaagttctaccatctagaagaccaagttggtgactcttgagaataaggtaacttctcattagtttttttccattgggaaattactgctccaagaacctacctttccattcttttcaaatataagaaaaacaatactaagttcgaatttaaagagagaaaaacctatttaatctaacgcttcaaaaacaagggggaaaaatctacatggaaatgaagtgtgatggaaaacagcagtgtgcatggatcacatctactaatagagatttctaaataagggaggacgctgacatcaagcacatttcaagtagacacacagaactgaagaatttccacggggagaagcactcatggtcctcagaacattggcaatggccttggagaaagccccagaatccatggccacgggctatttccatagcgagacttctcagaagcatccttaggaggacacaacggcttctctgctttcaggggctgggagggaggggcgccgagcaccatctttcctctctgggagctgcagccttacggacaagcttcaaacctgagctacttccaacttccgcggggaggggcagcaggggagcgtggttccaccgctttctctcgcaccaaacgcggcagctgggcggccgtggcggtgaggggagaggcggccggcgctgcatgcgtgtttacgtatctcggatgggtgtgggaagaggagatagaaagattctaatgaaaagatggaggggagagagagagggggttgagaagaaggggaggcaccacctttcttttctctgctcttcctggggatctgaaaactcctcctaacaggcctttcgggctcttcggggcctctgggcagggcggccgcgcccgcctcagaggagtcctgaggctgctcgtggctgaggctctgggcggcctcggcccccgcgttctcctcacgcccagcgccgccgctgggctcagcgatgttgaggccgccgccgccgccattttgttgggaggactcaagctccggaagcgcctgcttcatctcgtcgtctccgccgccgccactttcccaactcgcatccgtcggctgacaggcctccgtctccacagcagtcgccatcgcgccggcctaaggagctctgggaagcttctgcccacaaggtcgacgggtgtggggggaaggggcggcgggccagtctcgccgccgagctgctctcagcccacccacccccttccccccgtggcctcaggctgcgctcccgacctggcagcctcttggggggccctgtagcgggcaccccaaatgcgctgcccggtcctcggagccgctcctccctcgggcagttcttctgccttcccccgccactcaacgtgcgcgcgtcggggccgggagggggcggggccaccgcgggccactccaccaatgggagcgcggcacccgcctgcgcgagtgcggaaataccgcgccggggggcggagtttcggggcgcccgagcccgccaaaaggggcgaccgcaacgccccgcgaggacctcgacgccgcagccgtggcctgcggaatgcgtgggcccctggcgatcttcgggttcccggggattcccccgccgcgctgcaggcgagggagactagcttggcctcttctccggagcgcaggcgtcgcccatttgtgggcaaaacccttcctctgcgcacgagttatctcggcccaaacgggcttcagagcagtggatgcgggacgatctcggttttatgaactatttgcatgtgtacaaaaacc

SEQ ID NO: 40301 - DNA, 735 bp, Homo sapiens
gaataaatgaaaaatgtaaaaagaaacttccaaagagcttcagggtattaccacaaccttctggaagcaggacgctcactctgcaagtagcaacacaagccccttaggctggcacaagtagtgggggtgctcctgggctcactaatgagctcatgatggctggaccagccctatgcaggtcaagaaagtacttgcaccaaatacacagttcactaatggtatcttacaaatccttgtgatctcttaaaaacagtcccttgtaaacagtaaccaggaactaaatgcacacagatcgccagcactcggaatcaattagccacaagcattaaaaggtcaaaacaagtgcagtgagtcattaagtaacttgctcaacccagtttgcagttctgatggcagctgagttaagaattaaagagcagaaagaaaggaaacacacacaaaaacttcaaaatgaaagtttccactttcacttgagagaatcaacctcctatcctgttatattttcagtccttggctaactttaaactccccctaccagtttgaaaataatgtatgctaactttaaattctcatacattacaaaagtatataaaattaagtacaaatgccctcatttccccaagtctatctcctagaagtaacaactgttaagtttgttctagctctttccaaactttttccatgcatttgttaacattcatagaaaactgaatttttttttttttttttttttga

SEQ ID NO: 40302 - DNA, 1305 bp, Homo sapiens
actgtgggagagatgtagagagagaaagtggcacacacggagagtgagagatggaaacagagacagtgacactggacgggcgccgagaatgggagatggaggcagacgagacaggcagatgacccatagaggtccaggtgcagggcgcggccctacctcagcgtccttggccggaccgctggccgggggtagctccaggctgcagttcgctctcttgaccgtgaggtagaaggggtaatccttggccaccatggcggctgccgggcctgccctttgggatgtcaccgctgaccctaggcgactacaaaactcccaggcaaaagggggccccagctccacgatgccgggcggcggcggcgacacggagaccgacagccggcttctagccgggcaggactcgactgggctccggagccgagtgggcgggaccgtgccagccacgccttgatgggtggggagggggcgggccgccggctcggcaccgccccacgctgccgggagggcccacgtgccgcagcgcggacacctcctggggctgcgaggggcgtggggcggtcccgcgggtggagagggacctctctctccccgctggtattcgactccgggcgcccccgcagagcgtgggccgcgattgcggggcaggcagaccccatgatagctcctttcgggctctttggcactctccgggtgaaaggctgctggtagaaaggaggctggggcgaaaccgggcaacggggagaaaggaggctgtagtgacacctggaggcaggaaggagcctggggggaaaagcgagcgttttaaaagcccacattagaaaggggtggtgttctctcttaccctgttcccaggccactgcacgttttttttgttttgttttgtttttgtttggttttttaaatgaatgtcagtggaatataatctacaaatggcaaaatgcacccattttaagagtaccgtttgttgagttctgacaaatgtaaacacccgtataaccacctccacagtcggtatacgaaacatttccaccacccccggaaaattccctcgagacctttcccactttgcaccaacttttaaatttgactagcatattcagaggctgcctgacactcgagggcaatctgacagagtgtccttcaagtataaagctgtgcatggatgacctggcactaccacacctttctggatcctttttggagaaacaatgacattataaatgcccaagaaggcgattgatcttaaggttgtttgcagcagccctgtctggggcagtaaaaaataaaaaataactggaaacaatggta

SEQ ID NO: 40303 - DNA, 2415 bp, Homo sapiens
tggtggaattaatggctagatgtttagaagacactacttactttgttattttctctgtataatgatgaaagcctacaactatacagagacataaacgagccagggtgacaggttgggaaagatgaagagggaggaggaaaggataggcttgtagccctcatccggtcaaattcccaactttgagcttcactttattgtaaaattagaggctaaaactatttaacgcttccaaaactttttgattcaacaaatgccaattagttactaacataattaatcagtgtatcctgatttttaaaagatattttcctttgtgatttaaaagaaacatgggagttggagttgcagcgtcagtcctgaaggactgacctcgggaggccaggtaggaactgataaactggcaacaaaatcacatgttttcaactgaatatactgatattcaagcgtccagaaaaacaatttcgagcctacgttcacaagtttgccagaaagccctattattgacacagctgcggatctcagacatctgagttagtcagcaccattctgctggaggggattaagactggacgcttcgagcggagttgggaatgttatcatctgaggaaactaaaaggcgccagcagtaggactttctccaaggtctctgacaaaatatgttgcgggaaaagtcaacccgccccaaattcccccgtgtggccctaactcgaggctctggctcctcgcgccggcaagctgaggaagagacggtcccctgcgatttagatacaaacgcgcgcgtgcagggaaggccatcccagggcagacactgccacctccgccgcttccgacgcccgcgctcgcgggagagcctagcgccgcacgggaacctcccgaccaccgccgcagcgcggatgggcgtccccgggagccaatggacgcgccgggaggcggggcagggaggccgagggggcgggatttcccgcacggccgctcggcgcctggagaaggctgtgcgggcggggacggctgcagcccttgccggagagggcgggccggggtcagctgcggcgggcgggccggcgcggggagctgtgggcggcagctgcgtctcctgccaccgccctccctccgccacgatgccggggatcgacaagctgcccatcgaggagacgctggaggacagcccgcaggtgaggcgcgggagctggtgggcgacgagggagagcccagctggccgaccccaggtctggcgcctccgcggctcccgcaggtgcccgccccggcccaggtgggggccgccgccgccctaggtcaccgcccgtcgcaggccgcgcccggagttgtggaggctgggcccgccgcccaaggcccgcgtgggcctgctcggctgggccgagggccgcaggcggagaccgagccgctggtgctcgtgggccgggcggtcacgtacgcgcgcgggtcctttttatttgacgaaaggcgccgtttttatcgcggtgatgtgaggtgccaaatctcgatcctggaattttctccctgagaacctcttcagaaaaattgcagaagggagagaaaccccgatagtcttatttaatgatttccgaggctcagcaagctaaggaaggaaatggatcgtttttctttgggagaggctgtaaggttgtgtgtggagccctaatggcaaagcccgtgacgggtcccggagcccaagaccgctctccccgccgaatgtgcccgtgtcgcggccgtgactgtggtcgctgtcactcgagctgtgcacggcgagggatggacggtgccttcgccgctccgcgactgctgcgctgctccctgcagacttggccttaataaactcatcaaaataaaagccctgtgttctgtgcgtcggaatgatgctgatgtggttgctctagcttaagacagttttggaaaatgtaaccatttaatatgttttcagtactgcagaatgaaagcagctatattttttaaaatgttggcaggggctgtaacttgcatagggaaaacttcatctctaagccgttttacacgataatttaaacggtttaagacggtgttgctggttggacactatttagaatgaaacatttctgaattgttgctgatttagaaatgcagttgcaccatttcgtgtgtctttacagttgaacatggcccccaaagaagaaaagcagaagaggtctagatctccttttcctggatggcacttctgccatggattttgtgccaatgttaattgccaagttgaaatggggctctgattgtagaattgatttgttcttttttattctgaaagttatcttcacaggccagttgcctgctgctaatgtactcttaacagctgatagtgacaaaaagagaaactcacatttggtttatcttgactgccagtatactcggttcaatttttttctt

SEQ ID NO: 40304 - DNA, 1059 bp, Homo sapiens
acacaaaattagttgggcgtggtggcacatgcctgtaatcccagctacttgggaggctgaggcaggagaatcgcttgaagcagggaggcggaggttgtggtaagccgagatcgcaccattgcactctagcctgggcaacaagagcgaaactccatctcaaaaagtgttgaatatgattctgatttttacaactcaaagttgttagcccccaccttacaagcacaccacagcttctgacttcacagaggtaacagatatgacatcctattttgaaattcatctgctcaacaaatatttagggataactgtgtccttgttcagcactagagtagagaacaagacagacatagttcttgcccacaggcagctacccgagaaaataaagggtttggtgaaatcttttctcccagatccattgttgccctacccagagcccctttacccagccattgcattcatcccccatttgctgtgtcagttgcaaatagttcacagctgctcttttctccttatcagcaagaaaatgcctgaaagcttactcatatccctgccccaggggtgacccttagtcaatgacattaaacgggtacaaaagtcagaccctgctgctttgaagtggaataattcgtgccattcatgcttcagagtgccctgtgagagcaggctacaactgtacatctgttgaaaccacatctttgcttaactttttactgtcccatcctgctgtccttatttccctacaggtttttactaagaacattacctaataaatcctttgcacaagaattgccacttcatttctgctttaagataactcattcgaagacactttaatttcacttactcagcacaggtagagtggtacttcttgatgctccttctcaattcccgtaggaagggttgccagatttagcaaataaaaatacagaatgcccagttaaattttatttcagataacggccgggcccagtggctcacgtctgcaatcccagcactttggaaggctgaggcaggcagatggcttgagcccaggagttcaagaccagcttgggcaagcaa

SEQ ID NO: 40305 - DNA, 2484 bp, Homo sapiens
gtgcctgtagtcccagctacttgggaggctgaggcacgagaatcgcttgaactctggaagccgaagttgcagtaagccaagatcgcacagctgcactccagcttgggtgaaagagcaaggccctacctaaaaaataaaaaaataaaataaacagataaacaactatttcttaatatatgccccattattattccttatctgaaattgaatttaactgagatcctgtaattttatttgttaaatgtagtaactaaatagagtcttcctatttactaactaaaaataaacactgggtggctcttgcctgtttgtacttgagagggttaggcgggaggatcgcacgagccctggagttcgagggggcagtgagctatgatcaggccactgcactccagcttgggcgtcaaagtgacaacctgtctctaataaaaaataacaaacagccttccgcagtttgtcagtactatttctttctgccaattaatagttgtgtgaccctgagcaggtaatatctcgggactctgcatctgtaaagcgatggataaagagacctacctcataagaactatgaggcttaaataagatagtgtgtgtagcgtttctcgcatagtctgcgctcactaaacggagttattgtatatcgttcgttgttaactaccacaaaggctctgctcagaggtgcgtaggcgctggctcagcctggggtgaacccaccaggccaccgaaacgagcgatcagggtcggcaaagctgtggagatgaaatgggcaacaccttccacactgcgagtaaagctcgcaatccgggtggaggcctccacgtcctagcgcagtccagtcccgggcgcagggaggagagctggtcagccaagattccaagacaggtgtccacctcctccaacgaagcggaacacgtgacaccaccctatccacttccggcttggagggcatgccctcccgtcaccagcatgcactttcgacaaaaccgtggaatctagtattttcctctgacacctttatattttcttcacttccctataattctgacctatcgtgtaggtaaaaattaatcttcagagtattacagacatgcgtgcccacgcgctaggcgaaagtgcgagtcggaagcacttcattccctctcttcgctagccggaagtcgcgagatctgaatgagtcaaagccggcggcctcggctcctcagctccacctgacagtaggccgctgatcggccgcgggtcttgtcgaccgctaggccaccaggttcatgtggaggctcccaggcgcccgcgccgcgcttcgggtgatccggacggcggtggagaagctgagccgggctgaagcggggagccagacagcggcgggagcgatggagcgcgctgtagtgcgctgcgtaccttcggaacccaagctgagcctgtcattcgctttggctgatggtagccacaagaacatgcagcgcgaccagagcgagccgctgggtcgagtcctcagccgcatcgctaccaatgccctaaagggtcacgctaaggcggccgccgccaagaagagcaggaagagccggccgaatgctagcggcggtgcggcctgttcagggccggggcctgagccggctgtgttctgcgagcccgtggtgaagctgtactaccgggaagaggcagtggctgaggacgtgctcaacgtggatgcctggcaagacggcgcggtgctgcagatcggcgatgttaagtacaaggtggagcgcaacccgcccgccttcaccgaactgcagttgccgcgctacatcatggccgggttccctgtgtgccccaaactcagcctcgaatttggggatcccgccagctcccttttccgctggtataaggaagccaagcccggagcggcggagcccgaggtcggtgtcccctcgtcattgtctccctcctcaccttcttcttcttggactgagactgatgtggaggagcgtgtctacaccccgtccaatgccgacatcgggctaaggctcaagcttcactgcaccccaggcgatgggcagcgctttgggcacagccgggagttggaaagtgtgtgtgtggtagaggctgggcctggcacctgcacttttgaccaccggcatctctacacgaagaaggtgactgaggacgctctcatccgcactgtctcttacaacatcctggcagacacgtacgcgcagactgagttctcgcgaacggttctgtacccatactgtgccccctacgccctggagctcgactaccgccagaaccttatccagaaggaactcaccggctacaacgccgatgtcatctgtttgcaggaggttgaccgcgcagtgttttctgacagcttggtacccgccctagaggccttcgggctcgagggggtgtttcgaatcaagcagcacgaaggcctggccactttctaccgaaagtctaagttcagccttcttagccagcatgacatttcattctacgaagccctcgagt

SEQ ID NO: 40306 - DNA, 2822 bp, Homo sapiens
tacagtaaccgggagcggttgcttacttcagccaactgacagcccttctccctcagctgagcaaaaacacgccccctaaaaagtagtttttaaaaagtcaactttctaaaaagaaattttaaaaaaattgtagttactatttaacaagactaccataaaattcagcgtcatgatgttcagttacttgaaaatttatcaggtattttttaaaaattcgtttctaaaatttttttgcattagaccttagaccgcctaaaaataagcttaaaaacctaggagaataaaccaaacacatttaaagtttttgaaaatagtcaaagaaatagaagataagctcagttttcggagaatgagattaacaaggagcgaaaaacttgaaacggaatccagcgcaaggccaagtttagcaaagtgagcgctgaaggactccagactcttcggaaaccttgggtgctccctggccaccgcaacttcctgccccgggcggctccaggctccgggtggccgctggcttacataccaatggagtatgcagggactgtacacgaaacgcagaaggggagggaaaaggctggagttgctctgcctccctcctgaccgctgtccacacccgggcaagaaggtatgcagatcgcacccccagaaagggcctcgccaagtgtttgcttcccagagttggctttccccacatctctgcccaatgttgtccagctttcaataagatcaaggagaaaaagccgagtccagaaagaaatcttgcccgaagccctgtccctgtctcgtctggcgacagatcgggggcgggggggatcgctcaccctccgctccattgttcccccttaagaattccttccgacccccgacccggcgcccctcccccaccacagcgggcggaggaaaaaaacaggcccagaggccaccccaattgtggagaccctgcctttcccaggtcccgcctgactcgcagcccctcactcacccatcaaaatgcgcatctgcttcttgccaaatagtcgggagaagagggaggagatagtgaggcccatggcggtagtggcacttgtgatgggcagaagcagaaggggtttggggcgaccccgtgctttctcctttcaagctcccaggcaaactaaacgagagggaagagaaagagcggaggaagaaagagggaggcagaaacgtctcagtggcccctgtgccgatgaagatccggcacaggaataagccggtagaggacctgctaggcgactggcgcggcagctccggctctagcctttaggctctggctgtgccacgtcacgcggcggccgcggcgactccagcagcggcccggcccctccaacgcggacagaatcgcgtcaccgccgccccatccccctgcgcttccggtgcgcccgagccactgcgcttgcgcctgcaggggattggccagtttcgctgacgagcatctctcgacggcgccaccgcccggacgtggccccaggagccgggagaggccggctgaggcacatgcgtactgggagacggacaaagtcccacaatacctcgcttcgtcactgccaaatcagactcagggtgagacgcttccgcccggatgaaggtattgtcggggtgatagtccttgcttccggaaaggcgagctgagcattatgggttaggtgaggaacctcgccctcttctattacggtacgcgcgatgggtattccctgatgccatgaacttacacgtttcacacacgggaccagacgcttgctttagttgacgcatgaagaccggtccggtcttttgcggagaaaagtggttaaaagctgacttgtgggccgagaaactgtggcaccctaatgagctagggctagacgcttcgaccaccacgccaagtgattctgaagatctctaattctgtcaaggcgagagcgctccaacacgtgttcatcggctgttgctttttaaagagaaggcaaggaggaagtcttgcttttcttgtactttttttcctagaagcagcattaaagatttactccttatgttgaggaagcggaaagcctcttcactttaaaagtgtttatgatcgggcctggcgcggtgactcaccgcgcccggcctgctacaccttttaaaattcacagcaatgataaatgtattagactcattgccaggataaagatttaatctatttttctagtagtgccgtcctatgtggttctgtagttgcttattccaactggtatatttccataggatggggttgaataagaaaaacttgcaaactttcagaaacagtaagttatttttatatttttgaaggcttgctgagtaacgcttctcttggtagcactaccttatctacccttcagagactgttatttcttaggagtggccctgggcaattaaaagcaaaaacttctggccgggcatagtggctcatgcctgtaatcccagcactttgggaggccgaggcgggcagattacgaggtcaggagatcgagaccatcctggctaacacggtgaaacccagtctctactaaaaatagaataaattaaccgggcgtggtggcgggtgcctatactcccagctactccggaggctgaggcagaagaatggcgtgaacccgggaggcggaggttgcagtgagcggagatcgcgcccctgcactccagcctgggcgacagagcgagactgtcttaaaaaaacaaacaacaacaacaaaaaaaccccaaaaacttctttactcagaagtaccctcctttgcattggagatacatgtaaagagttgcttagcagttgaataactcaaaattgcattttggaagcttgctaagtg

SEQ ID NO: 40307 - DNA, 1529 bp, Homo sapiens
gccgggcatggtcgcatgcctgtaaccccagctactcgggaggctgaggcaggagaattgcctgaatccgggaggcagaggttgcggtgagccaagatcgcgccattgcactccagcctgagcaacaagagcaaaaactccgtctcaaaaaaaaaaaaaaaaaaaaacagaaatgaggcacaaaaggaggaaagggagaaaatgcgtgctgagataagcatttcgactcaggctgagggaaacgctcaaacagttactgcaaatgactaaaacaatctgagccttaaaacttggttgtgcaagttcggctactagagttcatcatctgttatgggcattgttcttgaaaaagtaccaaacaaacatcctgcctgcgggcttctccgggtgggtgctactaacccttttagttaattctgtgactctgcgtttaaaagaaataaagaaagaacaggatgaacatcaacaagtatttaggaggggcctagagagaacttttcacccctagccgcagcccaagatcctcccacgggaagtgccgtaggaccgcagcccgaaagagcgcgggaggggagactggccacgcccggatgcgccgcggacagggtcctggccggtcagcccgcgggccgctggctttgctgcagccgccccggcgcaggggaggagcgccgagaaagggcggggccgggcctcacctccacggcctggcccagctccaggtcgaagcccaccacacacacgcagtgcagccaggcggagaagctgtcccagcgcagcaggccccggccacggccatcgtcctcttcatcgtcctctggcgcgcctcccgccgccacaagggccggcgcctcgcggccctcggcccctgccaccgcttcgtccaacggccttcgagagccgggccccaagcccgcagggcccctcaaagccatcggccgccccctgaccgttcgcgccgcctccacagcggaccgcgccgcagagcgcgcttgcctccgcgcaggcgcagacgctgctgtcgcagccgctggggacccactcagtccgggcggggctgcgggtcacgtgaccctgggagcggacgtggggacgtcacgctgccgcttgtctcggattgtgaagccggtcctggcttccttgtctaaaagctctttgggactgaaatggctgtttatgaatccttgtcaacctcgttcgcagtcaacgaccagggaataaattattcgtggaatgacacagttcataattattataaggtattattaaattatgaaagcgtaggccgggcgcggtggttcacacctgtaatcacagcattttgggaggccgatgcgggcggatcatcaggtcaggagttcgagaccagcctgaccaacatggtgaaaccccgtctctactaaaaatacgaaaaaattagccaggcgtggtggagcgcgcctgtgatcccagctactcaggaggctgaggcaggagaatcgcttgaacccaggaggttacagttagctgagattgcgccactgtattct

SEQ ID NO: 40308 - DNA, 992 bp, Homo sapiens
cgggagactgaggcaggagaatcacttgaacccaggaggcgagactgcaatgaaccgagatcgtgccactgcaagccagcctgggagacagagggaaactccgtctcaataaataaataaataaataaaaaagtccccaattttctaatggggagccacctccccagtgatctcagtccatgaggttcaagaggaggtaagcactactcctggattccagcatgcgcatgtaacccaggcctagacaatcagtgtattctatatacctagaacaatgatgggtgcaggcatatccccatgcatgacccgatcaaacaatgcaactcaactctgggggtcattagaactgttctgaaggaggcactgtcctgacactgggattgctgaaaggatagaatataagcttggagccttatcactctaaaggaagagcatacccaacaaagaaaacgccaagaaatagaaagaggaagacaaagtccaaatgacatcattcaaccctggattcagccaaggctgaacttttcacatacatgagtcaataaattttccttttagattgaagccagcttgagctagatcttctgacatgtgcaactgtaagagtcctgactaatatgattacacatggttaatagtcctgattcattacattagtcttttaagtcctgattcattacattagtcttttaccatgccaagtgcttatataaaatcttcccggcagggcacagtggctcacacctgtaatcccagcactttgagaggccgaagtgggcgaattgtctgaggttgggagtttgagaccagcctggccaatatggtgaaaccgggtctctattaaaaatacaaaaaatttgaggctgggtgcggtggctcatgtctgtaatcccaggactttgggaggctgaggtgggcagatcacgaggtcaggagattaagaccatcctggctaacacagtgaaaccccatctctactaaaaatacaaaaa

SEQ ID NO: 40309 - DNA, 1564 bp, Homo sapiens
ggctagagaggacttttactttcctcatttttgcttacctgaatatatgcaatgagcatgtgtttcttttatcaatcaaaaaaatcagtcggggccggcatggtggctcatgcctataatcccagcactatgggaggccggacaggaggatcacttgagcccatgggtttgagaccagcctaagcaacacaggggatccgaggtatacagaaaagaaaaaattaataaacaaaaataaattagctgggtatggcggtggcacatgcctgtggcacatgcctactaaggaggctgaggtggaaagattggttgggctggggaggttgaggctacagtgagccgtgattgtgccattgcactccagcctaggtgacagagcaagatattgtcaaaaaataaataaataaaaataaagataatttttagaaagaaaaaaccccagcatgtactttggatctagcatggtgacttattttcagtcactcaatcgaatattaagattcttaatgtttttcttaatgtttgagcctgagccttagtttccttacttacctataaaataaggttaatacttaatacacagagatgtcatgaggaaaatgctaaccacatggtaaatacacaatcattaaagttccttctctgagcctcaatttccttgcctgtaaaatgtggaagctggatttgttgtctatgattctttctggagttataatattgtgattccctccttttatattcacagaaaaaggttgctaaatgaacttaatgtcttcatttgtcttcaggtagttacttttcttttatttcctgaataaccaggaagccacaaacatatgagcagtgcctctggaatgtctgggctactccaccctgggcacctgggaaatgacagggtatttccactcattagaatctccctgatgaagagagctttccttagtgggaagaggacctaacttcagttgtaataagccagtgtgtgccactaaaaatgttatatactctcaattttgggctttgagtactcccagctttctcttaattggtttgcttacctatatttgcaatccaggtactctgctgaaacagttatgcaagtgttccataatttattatataccaagtgtatgtcattggtcaaagtccaattagatcattattaattagaaagggctgcttattagtagagtttacagagttgtctcctacacatcagaaatgctaataattgcccatctttgatggtactaggatgataattttacaagtctgtctttgcttttataagattgaaaagtggcttggatcatagcagtggcaatactcatcagactataaaaaggcagaaacttaaaaagggagagaactacaaaatcaggaaacattgccattcccaatttctcaaaatatgacatgttttttatttaataaaaattttgtgtggatacagaatcacagagaggaacacccacatgacttagaattcaaagtatctcatgtatgagatttcttaatttaagccttttctgtgcctgctgaataccagtgggtgaagaatgcc

SEQ ID NO: 40310 - DNA, 3180 bp, Homo sapiens
ggtctcaaactcccgacctcaggtgatccgcctgcctcggcccccccaaagtgctgggattacaggcgtgagccaccgcgcccggcctaattgctactctttattgaacaacatggattaacattttgaagtctcaccacatcaagtgaattaactattattaacatgtcatccatgagaaaaaagaggcttgaaaaagtttagaaacttgcttaaggtcacacagtggtggagcctgttattgcaggaatctgaagaatgaagtcacctttgattctaaatgagtaagtctccttctcactattttttcttaaagttttcatttagcccttgcaaagtcttccttctttagaccaatgactcctcatcttgatattgtaagtgggggaaataccctcttttttcactttggaaattattcaatctctctttggaagaaacatgattttaaactttctggacgctccttctgtggaagaatccgcgcaggagccctgggggcacataataggttcagtgagaaagactgtcattcgaaatggaatgcgggaactaagattttttttttccgggaagaaaacataacgaatttagcagaggggagaatggtccttctgttaggtgcacaaatcctaagacttcagggagtttggcggctcacacttaaggtagctgcgggtgactgtgttgcccacagctaagatggctgctaatgaccatctcctttggctgggtctgttcttttgctcgctagtattttcatcgagaattaaacagaataaaatttagtaaaagttggcacccccttgctaagtagataaaataagaaggtggcactgtttgtttgaaaaaccttctacggcgcaaattgttcttgcccttaaccaaaatggtcgttaaggttgtcccgaggtttgaagcttccagcccttaactaagatggcgcctggaggcccgttaaaaattaccttgcccttttttctgccctctaccaacacggcttccgtggcgtcgttcacgtgacattcctggactacggcgcgggagagggggtaggagggcccttgaagggtgcgcgttcccgtggcggtgcaccgggtaggtttcagtcagagtcactatggcggccggcgctggcaaggtaagctgaggcggtggtggcggctagggaggtaggacccgtcgtggcgtcctggctccaaatcctcgtagcctgcttgcggagaggtcggcggaggtcgtgcctagcggtgtgggctggcgggggtctggctggagggggcgacggctgaggcgggcgggctgaggcgcctgacggccgtttgttttgatgttttccccaccaggtcggaaagtttcctgcctcgtcgggcgcagcttgagcttgccccatcggccgcgatcggtggaggctgcggcggatccagcccggggcctcaaggcctctccccaacctccgggccagtctccctcccccaccttctcgtccgccgggagctgcggctgccgtccctgagatgcgaccctcgcgggggcgaccctgaggggaggcggcccatgtgctgagcggcggcccagaagcctaggcgtccggggaccaacttcctgccgcctgggaactcgagcctcccggtgtcgcgcctcgctcggtccgcaccggcctgcggagccgggtccccgccctggtcgcggggacgctcgccaggtgcccaggagtcccgacttggccactgcccgcgccccgccggcctccacgcctcgcgcggagaacctcagccaccgccgtctcggatcgtgccaggccggggaccgcgtcccccttcccggggcggcctccgctcagcaggggcgatgcagactgtcccgccggccgtctagagcccctccgtctccgtcacctctcgccccttcactccgggcgaggactggcggtggctgcccagaggtgcccagccacaccttccttcggcccaaaaggactttcctggccgcgccgaaccgacccttcattcatgctgcagtgctgcaacgtttccgccaccaagggggaaaagcggccgcgatctcaaaccaaacacaagaattggcgtgtgactcatctgcttggatacctccagtccccaaactgtgttccaggagttttcttggccgaagctgcccgatgtttgagccttttcttcccagagaagaagatggactgaaagctgccagttggggactttttgtgatcacggcgttgcagcgttttaaaggaggtgatggggcttgcgctggcttgtcttcccacccaagtgaagagttgatgttcactggttatgcttagacaatgtgcagtttgtgttaatttaaaattttgggtgggataggggcataggcttgtgaagggcagtccggatccggaggaactcctctttgtccctggtaggagagacacccccagtctatcctcgatgccgtcagccttggccatcttcacttgccgcccgaactcgcacccgtttcaggagcgtcatgtctacctggacgagcccatcaaaatcggccgctcagtggcccgctgtcgaccagcgcagaataatgccacttttgattgcaaagtgctatcaaggaaccacgctctcgtctggtttgatcacaagacgggcaaggtaatgtcaccacattgtccagcggcattgtttaacaaactttttttccccttttgccctccctgagaggactaatgtatgcaggatcccagggtttgcatccagaggaggctttgcgcaaagccacgaatcaactgtttgtgtgcctggttctagtggaaatttgattgaggtggttgaatggaaaacagagaaggtattgtaattaaaagcctcaggagggctatggcatcttgataacgtggtcattcccagtgaaatcccaaactagatagtgaaacttggcgtcttgcttttagtctgtttagaaaggtgaattcacagttcagcgctttattaagcaagcagcagttctcgaagcaattcggggaatccgtggccattattatcccggggctcaagtgtcttagtggtgaaatgtagttaacacatagctttaggtgagttcagatcaggacctttctagtaaggataattgctgatataaacctaagatttttgaaaggtttgatacatacttgcccttggagga

SEQ ID NO: 40311 - DNA, 1006 bp, Homo sapiens
cctcataatgtgaataggaaacctgagtttagtaccagttatgttattaaatagttagaaaccttggattaattttatctcttccttgaggagcacagtttgcttatctgcaaagtgatgagttgggctaaaatagacagtatggtagagcggtaaagatctggaagtcaggagtgaggaattagggatgacagctgtggaggtcactgcaatgggttcatatcctggtttcacctcttattaccttggtgacttttggcaagaaatttagcttcattgtgcctcaggttgtttttcatttgtaaagtgcagataataataatacctcatatggggctgtgaaaattaaatgagttaatatatgtgaaggcatacatggcatggcacacggtaaagactaaataaatgttaactaattttattggtatgtaagctcctttctaagcagtcatttattaccaagaatatttttagtgaggtgggtggtttcttaaatttgtctgtcatttgaaagtttaactaattttttatttaggtattttcaggattgctgaagctgtctgtttgtgaagtagaatattttggactttggacttgctttgtttacttgtcttgttcttatataggcggctgctttggggccctaagttacctcattgatgagggtattttgtagtcctttttagcactaaaaatctcatacttgattttctagagtgttttctgactctctttgttttgaaactaatgttgtatgcagcttaatctaagttgcatgggctgttaggttgtagctatttttcctcaactgatgttttaattttaaatttaggaaatggcataaaacccaagagaatatatattatagctcagttgactagcctattctaggaaaagctaacattatgacataaactcagctaaaagttggtaaagcatgacctctagtttaactcaattgatgcatagatgttatttaacttaatcccagaaagagaaatgtagc

SEQ ID NO: 40312 - DNA, 817 bp, Homo sapiens
ttgtgatgacattaactttgttggtctagtctgtgtgccaagcattgttgcaaagccatctagatccttgtagatgtaaaatgttgaaataactttcatttttgtttccttgaatgtaatttaaatgttttagtactgtataaataaaggaagaaataaaccaaaagataaaacagttttagattctcccatgtgttgaagtcaaatctggtcatgccttcctctccactctctttttgtctgtctgactcaaactctggaggcacaaatccaacatgggtttttttctttttgggccagagagctgcatgcttgctctgctgtgttttgaatcctgcttttctagctcgcctaaatcctgaatccagttgttctttaatccaatgactcacaccttgggagtttccctcaccccactccaagaaaatgcaattaacttttccatttcaagtaaataattctgtcacgtgctttctactctttaccgattttgctttaggtgctcatctgaaaatatgcttcctgttgactttttaaaagttccttgtagagttcttctgtatgggtgggaccaaatatctgtgaatcactcccagttagtatagcatagtacagtcatcttaagagtaagtgattttttaatttgacagattgtctgccaaaaagtgttaaagtagagccaaaagcaagaacagaaattgactcttgctctatttattttcaccttttctcatcttttttcatctaacatcaaagattatttccatttctgatacacttttattgtatttgtattatttttgtctaattactagcc

SEQ ID NO: 40313 - DNA, 1163 bp, Homo sapiens
gtgaacacctaatagctattttggtgttgtcctcaagtcccccaaatgccccctttgtttccttacgtatccttctgcacagatgctgattccatgcaggtcttgtggcttttggtggtcttccccactcttattttggggtttgtgtgggtactgtgtcacctacttttgttacaaatgtttcccatgggattttggttttgctatcttagtcactctgattttaggtggtgattcaaggagattaaaaatttttgttgcagtatctgctatctacctcgaatctattctgcattcatatcttaagaactcccctatatggacttagagtttgtggcccctggcctgtggtgtgtctactatatttgtgctttgttctgaagctttacttcaaatgttattcatctgttggtgtttggatattgcaaaacctatcaatgtagaaagagttaaaaagaatcagtgtatcattataatggaaatgaaaatatttacagattgtagcaaagttgaaagtgatgcaaaatgtatgtatttatggaatgaattcatctatagcaggaactttctgaaggtcaaagagcaaattgtgcaacctgtgaagtgctgttcctgtgtcattgaagttaatcagcaagagacaaggaaaagtgactgatgagacaggggtaaacctttcaattcaaggatcaccatcaatgcctgattgttgggaacttaaagtttattcagggaaagcaaggagttgatcaaagaattaaaaccttaaaacaatgaaagtgctgctgttgaactttcaccttaagccacacagggtttttaaattcagagctccttactcacctgctcaacatcaaagtgaatgtctggtggctaatgcaaatactacagctgctaggacattccttaggctactgggaaagaaagatagttaagacttcaacagattctttatttcttttttaatgtggtcaaaactccttttaagaggagggaataaaagcctgatagaagaaggttatcagcatagaggagaaggatatttctggtttgaatttgacaaaggatcaagtaatatatctacttgctggaaatgtacccagggactataagcatactccctttctaggcccttgcaaacagtttaacatttatttatttat

SEQ ID NO: 40314 - DNA, 4045 bp, Homo sapiens
gtggtgcacgcctatagtcccagcttctctggaggctgagaggcaagaggatcacttaagcccgggaatctcaggctgcagtgagcagtgatcgaaccactgcaccccagcctgggtgacagagtgagcccatctcaaaaacaagaaacaaaaccagttcttgagcaagacatacctttctaatttcccagtactttccagctttccaaacccttcaggccccacaccaccctgatttttgtcacctgcaaataataaaactacaaactgcactgcacgtacacttttgtaaaggcttgaatcattgacttcctcagccccacaccttctggtcagcacagggcactgcactgccactccagacaggcctgggcagtgaggaaaggtgccagccacgtgggctgggggtggggaaagtgactaatcatgaaatcctaatttataatgtgttgctatccttagttgagcattaatttggctctcagaaataggagaaggtgtgggtgactggtctgaggagagtttctgggcaattagaacaaaaacagaagcatgctcttgcacacaaagtggactttctctagggtggtggtattctctggagagctgaactcagggagtctttattatgtatacttctgtgtgtctaaactttatacggtgctgggtgccgtggctcacgcctgtaatccccactttgggaggctgaggcaggaggatcagttgagctcaggagtttaagatctgcctggacaacacaggcctcgtctctacaaaaaaaaaattttttttaattaactgggcatggtgatgtgcacctgtggccccagctactcaggaggctgaggcgagaggattgcttgagctggggaagttgagatttcagtgacctgtgatcaggccactacactccagcctgggcaacagagggagaccttgtctcaaaaataaaataataataataattagaaaaactttacacaatgaacatatatcccttttagaccacatttcctgagtctaagatgccattgattgaaagacaattattttctgtactcccctgaaagcaaactgctacaatgtgtcatctattagacacatctgcatttttgagatgttgaaatgtgaaaaaaatgtgcgtcttcgaattgacagaatgaagtaactttttaaattaaaagatattttcagctgagcatagtggctcacgcctgtaatcccagcactttgggaggctgaggcgggtggatcacctgaggtcaggaattcgagaccagcctggccaacatggtgaaacttcgtctctactaaaaatacaaaaattagctggttgtggtggtgggcacctgtaatcccagctactcaggaggctgaggcaggagaatcgcttgaacctggaggtggagattgtattgtggtgaacagagtgagacagaggaaaaaaaaaaaagatattttccacttttggaaaaaaattatttaaattgcttttgcattccactctcctgctcagaatgatttcctcaaaaaagccaagggagtcacatttgaagatgaggaaatttttttttaatgtttatgtgccagtttcttgctagaccctgtgctttctcatccctgaccccatggaggcctcatgagaatgataagcccaaataaaattaccacttatggaaaaggagtaattttgcaaggaaggaaactgaaggtcagattggtgttcctgatcatgcagttcagtaagtgaaggagaggaggttcaaactcagctgctgagcccccgctcccctcttctcaccacatgcctcagttctaaagctgtcctgagaaaggagccaggttggaacctaagcctcctcccagaagcctggggaatcaaagggcaaaagggctgaggcccgggctctgaggcccaccctgcgaatcccgctctgtctggtgcaaaggaaactgacttcctccatgcacacactgctctgccaatctgagtgactcagcctcaagatgacctcactgtcctcagtgggctgtttggccgcctgcttcatgtcactgagcctcagcacccagcatgtcagatatggatttacgagtattttctctgctccactcctcgaatgtggctaggtttgaaaaggtcacacttccccttgccctccacctctcagctttctgttgccaggctgcctctgcccctccagctgctaaaaacagcccaagctgcgaaagctctttgctcctgccaagctctggttggaccaccatccagggggagctgggggctcagcctggattttcccagtgcctaggacagatgcatggctggtggaggacgttgcttgccagcaaattggcagagtaaactgaaatagtagctctgggtctgcgctacagcaaagtataattttcagaaggggtctcatacaagtatagagtgaccacatgtcaaagattgatttaattcattaacaaggaaaccaacaaaaggacaaagctggtttaagagatgatttgaaaaagtggctcttttagtttgctagggctgccataagaaattaccgccaactaagtggcttagaacagcagaaatccattcttctgcagttcatgaggacagaagtccaaaatcaaggtgtcggaaaggctggctcctctgagaggcactggagggaatctgtccatgcctctcccccagctcctgatggttgcgggcagtcctcggcattcttggcctgcagcagcatcactccagtctccgcctctgtggtcacatggccatcttccttgtgtatctgtaggctccaactctctccttataaggacaccagtgattggatttagagccatcttaatctagtatgacctcattttaacttgattacatctgcaaagtctctatttccaaataaagtcacattctcaggtactggggaattaggacttaaacatatctttttgctggggacacaactcaacttttaacacctacattaccaaactcatttctcattactcagcaccacagacccctggcttgataggggcatttggggtgctggaaagaacagagcaacaggcaacgttgatgtcagctttgatctgtccccagcattctgggattcagtgtcagccagtgaaggctcagtgaaagacagggcatctccacctccgaagtcagtaccatgtagggtataaagagagaccttggaatcaacttccaggattcagttcccaattctgtccgccactgtgtgtgactcctgacatttcttcacctctctgggcctcagttacctcatctgtgaaatgggggtgataatggtacacagcctatcagagagtgcttagagcagcatatgggaagctctgaataaatgtttcctgctgacgatgatgatgattatccgaatcactctcacctgcagacacagctttgccgcttttttggtgagataggctgttcctgatggacacgctggaaaatttccagtccccagaaaacagggcaagggcagttcctgattaggataaaggaagcctctctgatggtcacatgcccaggtgacttgtaggcagaggccagccctgcttcctgtccccacttcccaacttgccctgcttttgtgaatgagctctttcctagctcctcatcctgggtctagtttggaaggtaatttctcagtcacttttgagttgacgcaggtggcagtttcctttatgaacactcataacccagggtaagcttgacagggcagttagaggcccagaaacaaaagttgggaacaacagcctttccagctagaactagagctggcttggtgagaaacagaaggcctccctgaggttagaggcctaagcagacaccaggtctggccttccacatccctgctgggtggagcaagactgtcagcacttaggaagtgccttgcacgttgatctttgggaagcgaggggctcctgtcatctgcgtccagacttctccattctcaggtggaccgcacatggcctggccaggccaggccaggccctgagtggtgactgt

SEQ ID NO: 40315 - DNA, 1449 bp, Homo sapiens
ggtgggcggatcacctgaggtcaggagtttgagaccagcctggccaacatggtgaatccccttctctactaaaaatacaaaaattagccaggcatggtggcaggcgcttgtaatcccaggtactcaggaggctgagccaggagaatcgcttgaatctgggaggtggaggtggcagtgagttgagttcatgccactgcactccatcctgggtgacagagtaagactccgtctcaaaaaaaaaaaaaacaaacaaacacaaccaatctaacaaagttgtctgtagaacccaatatctactcgggtgatttggagcaggggtgggaatgagtagaatagtcatgcaaaatctaaaacatccctaaagttggagagggattggccccctaaaattgatgggatgcccccaccatcatggctaaagccacccctatgtctctcaggtctcagactgttgatgaggccaggcccggagaggagtagcccatgaagtcatcttgttcagccccctgactcggggcaggactgcaccccatccaggtcagaggctgactcactcccagctattcactggaaagttaggcagctccctcctcatcctgccttccaggaaagccaggctttctggaagcccagaggctagagcttgcctcttcctgcccagggtgggatgagggggttgggttagaggatggggcgaggggctggttcactctgacctcatcacattcttggacgggggagcggaagcctggtgagccatccccaggtccagcctcctgaagcctgctgctgtgatttgtgggctggcttccaggcagggtaagaatggaattggccccaggaacacactgtaggaagggacctgtctgcctccatttgggaaggaaaatggtgaaaacctaggctcaagtccctgcactgctgtttcctactgtgtcacactgagcaagttatttaagctgagcacagtcctttcctgtgaaatggggataacaatggcacctaactcatagggctgttttgaggattaaatgaggtacttttatcctttgcattattcctgggggcatggtttttgttcagtaaatattagctacttggaaagcaagagcatttaaaggcaaagggggccagtgaggtggctcacgcctgtaatcccagcactttgagagggcgaggcaggcggatcacttgaggtcagaagttcaaaaccaggctggccaacatagtgaaacaccatctctactaaaaatacaaagaaaaaattagccagggatggtggcagacacctgtaatcccagctacttaggaggctgaggcaggagaatcgcttgaacctgggagacggaggttgcagtgagccgagattcaccactgcactccagcctgggcgacagagcgagactctgtctcaaaaacaaacaaacaaaaaaatagctgggcatggta

SEQ ID NO: 40316 - DNA, 2309 bp, Homo sapiens
acttgggaggcagaggttgcagtgagccgagatcattccactgcactccagcctgggcgacagagtaagactctgtctcaaacaaacaaagaaacaaacaaacaaacaaattagccgggcctggtggtgctgctggtggtcccagctccttgggatgcagggggtgggaggattgcttgagcctgggctgtcaatgctgcagtgagctgtgatcgcaccactgcactccagccagggcaatagagcgagaccttgtctcaaaaaaaaatttttttaaagaatttcggcgacagctgagcatgggtcataagccctaaagctgtccttgcccttagcacatagaatgtcaagttttcaagaattttaaagctaaggtctgagatcccatcccctccccccactccactcccaaaaaagcgtattttgagaagggctgctctggactacactcaccccacactcaccccttcgcttctcatcttgcccttaggccctcagtagaaggtttgaggtctcatagttgaagtgattgtacttttcgcaaagtactttcagctgttctttatgagagagaagttatcatcccattttacagctgggcaaactgagatttagaaactcccaggtgtggtggctcatgcctgtaatcccagtgctttgggaagccgaggcaggagaatcactacagcccaggagttcaaggctgcaggagctatgattgcaccactgcactccagcctggacaacagagcaagaccttgtctctattttaaaaaggaaaagaaaagaaattcccggccgggcgtggtggctcacacctgtaatcccagcactttgggaggctgaggcgggtggatcaacgaagtcaggagttcaagaccagcctggctaacatggtgaaaccctgtctctactaaaaaatacaaaaattagccaggcatggtggcaggcgcctgtaatcccagctactcaggaggctgagacgggagaatatgcttgaacctggaaggcagaggttgcagtgagccgagatcacgccactccactccagcctgggcgacagagcgagactccgggtcaataaaaaaaaaaaagaaaaaaagagattccctccctgagctgacaccttgctggctagtagcataggtggtaccagctctggcctccagacatcctcagccctcagccatttccactacagaaagcacccagacatcatccaaagccaacactcagatgatgcaaaagtcaatgcagataactcacaggaaggaaggtcatcctgaggtctgatgagtcagggaaggacagagacattcctcacattttcaccagcagttctgctgatagaggtctcatgtgggtctggtgttcctctaggattgggtggagccgtttaaacatgagaaacggctgttacaataaatacaataaaagatggtcatgctgatttagcagtaagtgagtggagccagaaaaccaaattgggggtgagggtgaggaagaggaatggggctttgcagtcgaatccagcagcaaataggcccatgcctggaaggaagttagtctgaggccacaacaaatcaggcagggaggtacattgctggtagctacacatattggtgtcatcttcctagaggacatgtgggtagtttataagagaaaccattaaggggtcataaaggtaaggctgggtcgggcgtggtggctcacgcctataatcccagcactttgggaggtcgagatgggaggatcgcttgagcccaggagtttgagaccagcctgggcaaaatggcgagactgtctctaccaaaatgaaaacatgcctgtagtcccagctactcgggaggctgaggtgggaggtcaaggctgcagtgagctgtgttcatgccactgcacatcagcctgggtgacagagcaaaactctgtctcaaaaaaaaaaaaaaaaaaaaaagctattagccaggcctatttatgagaaaattagatccagcagatgaacccagtgtagggaacattctataggataccaggccaattctcaatactatcaaagtcatgaaacaaggagagggctggtgtggtggctcatgcctggaatcccaacactttgggaggccaaggcaagaggatcacttgaaatcaggaattgaagtcccacctgggcaacaaagcaagattctgtttcagaaaaaaaaaattgctgggcatgatgatgggcacctgtaatcctagctacttcggaggctgaattgggaggatcgctcaagcccagaagtttgagctgcagtgagctatgatcgtcccac

SEQ ID NO: 40317 - DNA, 2617 bp, Homo sapiens
ggtgtgagccaccatgcccagcctaatttttttttttttttttcattttagtagagacagggtttcaccatgttggccaggctggtctcaaactcctgacctcaggtgatccacccacctcgacctcccaaagtgctgggattacaggcataagccaccacacccggccaaaattttttttttgagctggagtcttgctctgttgcccaggccaatggcacagtctaggttcactgaggcagggttcaagcaatactcttgcctcagcctcccgagtagctgggactacaggtgcccaccaccatgcctggctaatttttgtatttttagtagagacagggtttcaccacgttggccaggctggtctcaaactcctgaccttgtgatctgcccaccttggcttcccaaagtgctgggattacaggtgttagttaccacacctgggcaaaattttgttttaaaaaagaaaaacaatgagaaattgccaaagagtggaggggagacatgacatcaaatgccacgtggttccctgcatggaatattttcgttttttagagatggagtcttgctatgttgcccaggctggagtgcagtggctattgacagacacgatcatagtgcactgcagcctcaatgtcctgggctcaagcagtcctcctgcctgagcctcccaagtagctgggattacaggtgtgagacaccagacctggcagaaataacagcacagagatgaagcgtccctttcatcacatcctgagagggagtctgccacatcacagggtaccactggcgaggctcaccttatcacatggttaaggaggtgtcccttgggcttctctgctggaaagccactatttttcactttccatactctattcttcggaagcgagtcaataagtctagcctaccctcaagtaaggaaggacaggaattaggcttcacctccaggaggaaatcttgatttttaaaatgttaattacctttaaaaaagaaaacctggccaggcacagtggctcatgcctgtaatcctagcactttgggaggcagaggcggacggatcacgaggtcaagagatggagaccattctggccaacatggtgaaaccctgtctctactaaaaatacaaaaattagctgggtgtgctggcacgcacctgtaatcccagctacttgggaagctgaggcaggagaattgcttgaacctgggaggcagaggttgcagtgagccgagatcatgcttggtgacagagtgagactccgtctcaaaaaaaaaaaaaaaaaaaaagaaaaggaaaaaaaagaaaacctatcctagtggtaaaatgcaaaagataccaaggcatacatggtgttaagtcctcctatctctgtccccaaaagtaacaatgttaccattttcttgtgaatcattccagaggtattttatgcacagacaggcaaatatgtgtaccttgctccacctttttacacaagggcggtaccctggccatgctgttctgcacccaaccacggggctgcttgaattatgagattctgtaagcacctcggtttcagatgtctgactctgaggggatgggtcagtaaatgacattctgtatagcaagggcctggccacagctaggagcagtgacacagataagtagcttctggtctcatgaaaaagtaagatgtcaaatgacaataaaatcgagtgcagagtacataatcatttcaattaggtggaagttatctttcaggagaggctgcaggaaactgtaaatcactgagataaagtggaaggcctgtgagtagcatgttttgttacatgtaaaagaaaaactaaaagatgagactgtgagcttttgggaatgcagtttccaggatcctgaagccaaccacatataggtggcaaagaccccgtcgccctttcctggtcagggagggaagggccgtttgactttctagaattgtctccctggattgagggtgtttgcagttaattgttttgtggaaataagagcagagcaaacaccccacccagggcagggacaggatgtagattcctcaggcctgaactgtcaggctcgaggccacacacttgtggatgccccacaccctggtgctactcacagcctgcaggatgaacgctgtccctcagcctggtacctgtctgtccgtccgtccatccatccatccatccatccatccatccatccatccatccactagcttatttcctttattcactcagcgtttattgtgtgcctgagcttgtggcaggtgcagggatatggctgtggttgagatggatacagatcctctgcatggagtggaaggtctggtacagaactaaccaggtgtggggcatgcatctgtgctccagcaatgccctgagatctccatgtacttccccaccctggggagcagggcagctttgtggaggaggcaaagaccaagctaagcaggagtgagctaggcttggggggctcaggggaaaaaaggggacactccaggtgaatggggacaagaaaaggctcacagaccagtaccagcatccattcaccaagtctttgcctcagctgcaccctgtgcctggtgcctggcagtcacgatttcatttcatctccatagtagccttt

SEQ ID NO: 40318 - DNA, 2654 bp, Homo sapiens
cttttttttttttttttttagtagagacggggtttcaccatgttggccaagatggtcgcaatctcttgacctcgtgatccgcctgcctcgacctcccaaagtgttgggattataggcgtgagctactgcgcccagccgcctgtgttcttttaaaaggtcgtcttccttcctgcccttcatcacttgccctccatggcccttcatggcccctctgcttccctggacaaagcagagatgtgactggtgttcccagcatttgtccacagacaccattttcctctcaggccctgaggtgctggactacagagccggcctcccagccacctgccatgaaaacctcaccaggaccagtgggactctgttaaatctgttaacacccccacttcggcctgccctagacaacagctacatcttggaaaaaggaaatgaaactggtttaaaacctctcccaactgttcagaaggctcaggccccatttccaagacagaaggagccagactcttctgcgcatgtccctttatttatagtcaccagatcctggtcccaacgatcaaggctcctgggtggggatggtcctgtgtgatgtatgcagcacactcaatgccccccaccatgccccttcagcctacaccactcaccttagccgccagcagccatgacttttttcttttcttttcttttttctttcctttccttttctttgatttttttctctttccttccttccttccttctttctttcttctctcctctctttctttctcgctctctctctctcttttctttctttctcgagacagggtcttgctttgtcacccaggctggaatgcagtggcaggaacatggctcactgtatcctcgacctccaaggctcaagcgatcctcctgcctcagcaccccaagtagctgggactacaggagcacgccaccacacccagctcatttttgtatttttcgtagagagggggtttcaccatgttgcccaggctggtctcaaactcctggcctcaagagatccacccatcttggcctcccaaaatgctgggattacaggcctgagccaccacatctggccatgcagccgtgactttttctgatcacaggagctggctgtgcttgcacacatggtcggccggagggtggtgagttaacagcccctcctcagtaagccctcaaccaatgactactggtaaatgcaggccccagcccttcagatgccttggagggtacactctacctggcccttaggttcccctgcaggatggagctccagctgctcgcaggagcagcccactcatgaatgcaccttttgtgggcttcctgtctttccagcctcacctcccacctcccttgccagcacttcttggaatcatttcccaaatgaataactcctatgtgaatcctggacttgggtctgcttttgaggaaacccaaactaagacaatatcaagttgccaacatttattgagcaccgtctctgtgctaagcatcgtgctcagcatttcacaagtcttaactcatttaatcctatgacagccagcactatgaagaagagaccgttatcatttccgttgtacagacgtggaaactgactcagagcatgggcttgaggccaaaggcctcttccactccacccatcctccatcagcctgaattgctttcatttcctcaaaatgctgggctcccacacctcttgatctctgcactctggggcacagggaggttaaatcacttggtgacacagcaatttagaggctgagctacccagattcaagagccatctccaggctcagagcccacatactctgccactgtggtaagcaaaatattggcccctcaaggtatccaagtcctaatccctgtaacctgtaaatgtgaccttacatggcaaaaaagagacttcacagatgtgattcagttagggcccttgagatgaggagagtatcctggattatccagatgggccccatgtaatcacagcaggctctgtaagaggatctcctcctcctgtctgtctttcagacaaaagaagataggatgacaaagcagaagaccagagagaaagagatttgaagatgctaccctgctggctttggagatggaagcaagggccatgagccaagaggtgtatgtggcttttggaagcaggtaaaggcaaggatagcccctggagcctccagaaggagccagccctgctgacgccttgactttagcctagtgaaactgattgctgacttctggcctccagaatgataagagaatacagttgtgttttcttgtttgtttgttttgagacagggtcttgctctgtcacccagactggagtgagtgggtccattttggctccctgaagccactacctcccaggctcaagtgatcctcgcaccttagcctctcgaatagctgggaccacaggtgcacaccaccacacccggctaatttttttttatagatggggtctccctatggtgccagggctggtctcaaactcctgagctcaaaggatccttctgccttgcctcctaaagtgctgggattacaggtgtaaagccacctccacatctgactcagttgtgtccttttttttttttttttttttgtcaagatagagtcttgctctgtcacccaggctagagtgcagtggcgtgatctca

SEQ ID NO: 40319 - DNA, 4316 bp, Homo sapiens
gcccagcccattgcaggctttcacagagaaaaggggcaggagtcaggcgcgcaggcagcttctggaagttagaaaacacaaggaaacagattcttccctacagcctccagaagggaatgcatcctgccaacactttgtttttagctcagcaagacctgtgtgggccatcgaacctacagaactgaaggataatacatttgtgggtgtgtgttttcaaagacactaagttttggtaacttgttacagcagtaactggaaactaagacatgcaacaagccttattgttcatttttaccaccactactgggctgttggttatggtggaattacacttttctcttccattaggctgtgtgaactccttgaggttgtgcaatacgtttgtctgatttactactggttagcaggctctgagaagaatggctggtacacaggcggagctcaataaaagcccttactgaattttattcaatctatatgtggatgaagacctccgccccgcgcgcccctcccgcaagtcccactgaggcccgacccattctgtccggctcccagcccccgcgggtccccccaccccggggctgaccgggtgattcaggcagccctacatcctgctggggtggtgggcttcgagcgcgggtcccaggacgcagtggggcgcagtgcctgcggcaggcggcaggaggcgagcgtggcccaggaactcccgcgggagggtcgggacggggcggggcttgggggcggggcggctcagcgcgcaggcgcggggccaggcgcctcgcgcggccaggggcgggcggccgcagagcagcaccggccgtggctccggtagcagcaagttcgaaccccgctcccgctccgcttcggttctcgctccttcggcccttgggcctccaaacaccagtccccggcagctcgttgcgcattgcgctctccccgccaccaggatgccggtaaccgagaaggatctagctgaggacgcgccttggaagaagatccagcagaacacgttcacacgctggtgcaacgagcacctcaagtgcgtgaacaaacgcatcggcaacctgcagaccgacctgagcgacgggctgcggctcatcgcgctgctcgaggtgctcagccagaagcgcatgtaccgcaagtaccatcagcggcccacctttcgccagatgcagctcgagaatgtgtccgtggcgctcgagttcctggaccgtgagagcatcaagctcgtgtccatcggtgagttctctggccgggcccaggcgcccactgtggtgccgacccgcccccgcgcgtgcacccctgcggagggcgaggatttcccgcagcgcgcccccacctcggagataagggggagtcgtccccaggggtgggttatagggggcctagaccccctccccggtgtcttcccctgggatgggacctgttgtgatcgctccccgccatccgccccagcagtgcacctttggctggctaagggttgagggtttgggctggggtcacaggaggagaggtggagttgttgcatttctctacacctggggcgcccctatgggagctaggggactagaaaccctcgttcgctgtccccgggggcgggccctagggtcagatgctccgcggagtgctctccctgctgcgcccaggttggtgctctcagaggcagctgaatgggcgttggctcggaggccgggccgtgagacctgaggaggaaccgttctctgcgcctggggcctccctgcccaggtggagacagagacctggtaccttcccctgccgtcgctggaatgggtgtgggccccgaggttgcaagggtaggcgcgggtgtgtgtcctcgctctctctgctcccagctcagctctggccgcgcgccgcaggttgaacccactccttgctgccgaagttataatttagagatggtggtggtaacagtaattgctgtcttgtagggagcccaactagcgtccactgtgtaccgtcagccttctaagttatctccgtccctacgcatcctgccatctggggtgaggctagacccattttacagataagggggtccggagggttaattgacctgtccaaggtcagcaagtagggcccagctgagaactgaaggaagtgggcaacagttagaaggaggctttgttttcctctcctctcccaaacctacaccagggtcttcctgaaaggagggagggaattggtgtctcttgctggactgggccttctggtctggggaggaagaataaggatgaagtctcccttgtggtctgagatagttggaggcttcccagagggccacaaggctactgatagtgtgggctgtgatggtaggggctgtgatgtgtgtgtgcatgtgggcgtttgtgcagagaacgtgtgtacacacatagcatgtgtgtatagcatgtgcatatgcaaagagtttgcatgtacacggaatgtatgcagagaatgtgtatccacctacacgtgtgtatgggtgtgtgtatgtgtgtgtgtgtatgtgggtgggtgggtgtgggttggggcagaggagggttctgggtctggatctcttcctaaggagaaccagggactggccctggcctgtgatttgggtctcttcctgaggaaaccaggtcactatagtgaccctagtgacaggaagaaagggagatgggtgtggctgccaggactttctccagtggaaaagggattccctctaggctgagcctcccctgggccttagggcctcacccttcccttcccccacacctgtcctggcaggtaaggctgcttcctgcttcctgggcccagatggcagccgcaccacccagctgatctccagcagccctccccctccccaagggtggcttccctgcagaagaatctgcatggcacgctgttgtcttctttctggggtccatctcctgtactggggagggagaacctcagaatctcctggaattctttaccattcagaaaccagcctcccctctgaagaatcccaaggcccagctgggctcaatttggatctgttctttgttttaaaaatgtgtatttatttaattaactgaataaagaaacttaaagtaaaccagaagtatccaaatacgacatgaaatctctaaaacaacaacaaaaccaaaccaaaccgcagcactagcaaatcacagactgcctgatctacccactgtttacagaggcagcagctacttccagcactgtctctcatcagtgcccggggctgtgggtctcattctagattttgtctacatttttttacatggttctcctgattccctgctccccctccccaccaccgccccgcctggagatggagccttgctctgtctccaggctggagtacaatggtgccatctctgctcactgcaacctccacctcccgggttcaagcgattcttctgcctcagcctcctgagtagctagaattacaggcacatgccaccacgcccggctaatttttgtattcttagtagagatggggtttcaccatgttggccaggctggtctcgaactcttgacctcatgatatgcccgcctcggcctcccaagtgcgggggttacagccctgagccaccgcgcccagcccggtcctccttttattttcgaatccactcaggccctagctactcccattgtcccgacgttccagggttagttagcttcccttcctctgtgctgggcctgtgggctgttggcagcttcttcctgttcctaccacaacttgcattctatttttttcctttttaatgatttcttggatcatattccccagagtgacattcctgggttaaagggtgtgaccacatttatgacttgtatcattggctgcctaattgctctcccgagagatcttgcaacaaacaggttttccagcctctggagaccacagagagccctggcaagtgccaggactgctgtggggataaagcaggaggcttcttccctaagctcttgaggctgttgtgggtaatggtccttcatccttcaaggcaaagttacctccagcttggactaaggttcatatattcactgcttaggttgtgttacattgtgctgacaatgacactagcttcaatttgggggcacctactgggtgttaagtgtgttctgttgatcaccccattgaattttcatgctaatcattgattgacagcaactactgccctatctctaatgatctgcttctgcaagtcacttagagagttcagggcttaacactgtcctgggcatgtgttgcttagaaaatggcgcctgttaattaaataaggtgctgtctaataattatctcaaaagtaatgccagggctg

SEQ ID NO: 40320 - DNA, 917 bp, Homo sapiens
agcattgttgctgtgagaccctgcacttcccacttagccttggaaaaataagtcttcacgttaatgccatgggctaccgcttctcttttcagggcttcttggaggagggtggagatggagagacaggtgggggactgccagggttacatcctccatgaggctgaggctgtgctgactgccttgtgtgctttcaacctggagtaaagggtggctgtgccagctgctcccatcccccaggagtctgactcgtccctgccttggccctgggcagcactttccctcctagctctttggcatctggggtcatggtggggctgcctgccatctgtcaaaatttttgctgccctgggtgtggtggtaaacccccgcactatccaacttggtgtcatggagctggcgacaatatttttacagtggttagtgcttggaaactggacttctgggttatgccctgtacaaacagcatcaaagtcgctgggctagggtgacagaggaggctgccaacagggaattctgtggctcctgggacaggaatggatatgggaggttgggggccagtattttcggttctcttgaggagttggcgagtattagtctttgccctgatggatagaaggaatctgtctgtgtcttgcatgaaccgtgtacttcccccagttactccttggacaccagctgcctgctgttcataattgggccagatttctaatactgcagcgctaccaaatgtcagttttaggccatctctggtgtagccagggaacgcccaacacctttcccaaaggtagaatttgtgtgggttttacttcactgagtgactaatgcagatctttatgttttaatgatgggaagaaattcgtcagcctgggtactttttccatgtgatggggcaaaaatttaaaacacttgcacaacgg

SEQ ID NO: 40321 - DNA, 464 bp, Homo sapiens
atttcttgaacctgggaggcagaggttgcagtgagctgagactgtgccgttgtactctagcctgggcaacaagagccatctcaaaaaaagaagcaagccagatctttggggtgctgtgacggcaaatcccccagcgctggcctctcaggttctcttgcgggattagtgtttgttgaataataagcaatacaccctgacccagcgagccaaagcaaacaggacagtaactgaaactgcaggggagtgtgagtaaacagttaccttctaccctcatggagctggcctctggccagcaacatgatagctgtttgcatcttactcttatggagccattggccctctcattaaggtgggggcagcttctggtccatgcctgcaagtcctcatgggagtgggtacctgacagggtgtaaagggtaggtctgaggacatggtttcttttttttattgttgttgagatggaa

SEQ ID NO: 40322 - DNA, 6753 bp, Homo sapiens
tgagtagctgggattacaggcacgggccaccatgcccagctaatttttgtatttttagtagagatggggttggccaagctggtcgtgaactattgacctcaagtgatcctcctgcctcagcctcccaaagtgctaggattacaggagtgagccaccatgcctggccacatgcgtgttttttattgaatcatttgaaagtactcagctcgtatcatgacccttcacccccacatactccaacaagcatctctaagaaaaaggacattctcctaaccacagtgtctctgcattcccaggacattcttctaaccacagcgtcactgcatacccaagaggttagcaccgatacagtaataacatcttgtgtaaaacttcccaaaatgctcccaagtgtcctttatgacagtttaaaaaaaaatggcattttttgggatccaggaaccaattaacgattactcaattgaatttggtttcaaagtcacatacctcaacttttcctttaatcaagaacagcccccctgccttttacacatttttttgtctttcgtgaccgtgtcatttttgaagaaatcaggcccgttgtcttgtagaactggtgtttctcaagtgtgcttgggagggtcttggtaaaatgcacattctgattctggagaacagggtggagcctgggaatctgcatttccagccagcatcccggtgatgccagtgcagctggtcttcggctgtagaatgttccacattctaggtctgtctgtttccttgtgattaaattcaagttgaatatttttggctagggcacttcctgaggtcataggtacttcccactgcctcacagcacaggctcacaatctcagtttgtcctgttacttcgtggtgctaagtgtggtcacctgcttcaagtggtgtccgcctgctctctgttgaaacaatacctttctcctagtataatgattaggtaacctgtgattgtaattggtaagtaatctttgagactacatgaatatcctgttccccagcagttttcactcattggtgaactgttttgggaaaaataatagcatcttacagttataataccctgctggtaacacatggctcttacataatcagcagttaattgtttgtatgtgtgttaatttttatttttaaaatgtaactagtgactggtaactctcatttgtattttaaacattggcttttacagcttctcagtacatttcactctgtgtatgtttttggtagagcatttgttgtcctgtataatggtttaggaaatcctataggccaaatgaagggctggagactcacctgtgttcccaccactgtgtttcactgtgtattgccagagaaaatacagttaaatttgaatttcagatagacaatgaataactttttagtataagtatgttccaagtgtggcagacagctctcacaagttacaagtcgttgcgtaggacatacctatgctaaacgatttgatgtttatctaaattaatatgtaactgatatcttgtatttttatttgtacgatcttccaagcccacgtcccaccgccttctcggggatggccaccatttgtgtttgctgcctggtggtgtttgcagctgcgagaagggccttggaggaggagcaaagtgtagtggtatctccgtgctgtggccttgggcactggggtgggggttagatgagtaattagctgaatatgacctcacccatgaagaatgtgcccttgctaggtattagcagaggtttaggctccagggagccattgtcagaagcttgtcagtgatgtcatcagctggaagggccagctttcaggcctcaggaaaaagcttgaaagtcagggctccagttttggtaataaatgggaatggagtttcacaggtagggtgtggaggaatttattgtgacaggaagcctgatggagcctcttgcctgtgtgcagcccccagccaggtttctgagttctgatgaactaccagaaacttccaccacggcctgtgattacactgttggcccaatgccctggaaaaattggcttgctctcggggaacactccaggagctgcaaagggggtgtcaggactgttgtgcagctccccttaaattggggaggaggggtggctgatgtggaaactgttcattagactgctcagggtagtgtgagaaaacgtgtaatctgtgggcatctacccctagctgcccctctgatctcacccactactgtgggaggaccccgtggatgggggcagaggagggtcttctggatttagacactcacaaaacttccttttaccttgttcattggaagaaatagaaaatgcctttttttttttttttttctttttttttgagacagagtctcgctctgttgacaggctggagtgcagtggcatgatcttggctcaccgcaacctctgcctcccgggttctaacaattctcctgcctcagcctctggagtagctgggactacagccacgtgccaccacacccagctaatttttgtatttttagtacagacggggtttcaccatgttggccaggacggtcttgagctcttgacctcgttatccacccgcctcggcctcccaaagtgctgggattacaggcgtgagccaccatgcctggtctctttttcatttttaaagggtaatttgctgtgcaggagtgggctctcagaccagaagtggggacctgaatgaaatcaaggactgagtatggtaactacagccatttaattttatttgaagtctcccgtaaaatgttctggaaaaaacaggggttccagggctgggtgggcagtttcaatcatggactggattttgtggttcagatttctctgggcctgttggaggttccccttaagcaattacccaaggcagttctgcccagctgaagtactgattacctgcacactataccagtgaggactcatgggtgagcagatgggaggcactgagcttgattctgaaaccctggcctccatcccacctgacattcaatgtcagattagaatttggaagaccctaagtctccagattggtgcactgggtagctcctgaaatggggtggctgagacaggtcctctgtgcccccttccacagcttcctctggggcccttctgctcactggcatgtgcttctgggcaaataggcctctcccagcatttgttttggctctgtgaaatggggtaatatttgttcctattgcgggtgaagcgctgctgttgggatgctcaggtaactcactccgtgggtagctgatattgcctgggcaagtggcattttagaggaaatctgtgccatcaaaagagttggacctgatcacacttttgcttttgaatatgctttgtcccagcctggccattcgtcacttgggaccccctgagtctctctgaccccactgtaaaatggatatgccatggagttgtcccaggaatcaagggcaggtcctctccagtgagtgatgggcttgcctctcacttctctaacacccttctgcttccttgtgtaagatttcactattagtggctattctcttttacagaagaaaaagggagacgcatgcctcttccagttcactgttcaccattgcagcatatttattccaagggactggccgaatcatccctttctttgttagaatgtggttttgttgccttgagacaagtggcccgcatgtctgcactgaaggaggctttgcgcaatagccttgggcacctccggttctgcaagcatgtacagtacttgctctcctttccctttctttgtatactttttctggtctgctacgtgtccatctgcatgtggataaagggtcgtcgtcttgagtagtgattttgctgtgatgtgattcctgtgaggtctagttgcacacagtgattccgaaggtagacccagctggaaagcttttaaattgctgatactccagccccactccccaagagatgctgattttgttttgttttggggagggcagtttttttgggttttttttttaagctttttgatgtgtagccagggttgagactgaagtgatttttgtgagtaacggagaagtgttaaggcttgagaagttggaagagccatgcttgagataggaccaaggtcatatccccggcattagcacagagcaaccctgacctgttggagagttgggctggatggatgcggtcaggggagagactcgctttattttatttatttagagatacagtttcactcttgtcacccaggctggagtgtaatggcacgatctcggctcactgcaacctctgcctcctgggttcaagtgattctcgtgcctcagcctcctgagtggctgggactccaggcacgcgccgccacaccctgctagtttttgtgtttttactagagacagggtttcaccattgttggccaggctggtcttgaactcctgacctcaggtgatccgcccacctcggcctaccaaagtgctgggattatgggtgtgagccactgtgcccagcctcgactcgctttattatatccacacttggaatacaattcggattgattgtagtggggcattttataattaggaaaaattaatcaggaaaaatcactccatgtagattagtaccaccatatgaggggacaagaatttcttcagattaggaacttcttccaacaggactgacagggtccaaaactactcttggatccagctttaagatggacccagcccactgttgagtcccctctgaggtcttctctctgtggatggatttgattgttaacaatggctgagtcatgtggcacccagcccggtgagtaagacagctgagtaagaggggaaacagggcctttggtcagaaaaaccagactgacttcagtcttatctgtttagagaagccccagaagctgcaaaaattgcagcttccagactttagtgtgccgtggtcatgacatcggtgtggatggcaggttgtcatctgagcagtcagggtggcagcacacagcttgcgggctggctgatggccgaggtgtgtgaactgacctgccccaagtgacttcagtgctgggcacagcataggagcagtactaatgatatggacagtatgctcagaggacgttagggagcacagctttgtgtaaagggcatgccctgccctgtccggatttaaagcagctatagcactgaaaccccatggtcaccctcgcatttctacacttctgcctgtgccaagtctagtttgtgtgcctcctccattttgtgtgtacatgggggtatttttttctgctaggcaactgctatttatgcctctcagtactgtacttagtgtgtaccattcctgcaaggtatagacattgtcagcccattttacagatgaggaaaatggagtttttgagagggtgagatcattcagtggcagaatggaatgttaacccaggtagtctaacctctctgctgtagatctgatgtccatttgaactttagacttcccatctgtgtctacagtctagcccttaaaaaatgtgataaacaggtttttaggtaagtctgttaatttcagaaagacattattattattttttagaaagttagagcttatgttagggctcagtctatcctcctgcctcagctgcctgaatagctgggactgcaggcacatgccaccatgcctggttaatttctgtggtatacatcattgattactgagaagtcacagtccgttgttaaataactgagctattcatagccaaatcatttttaaaaacacaaatataagcaaaaacaaaacatttatttatttatttattgagacggagtctcgctgtcacccgggctggagtgcagtggcgctatctcagctcactgcaacctctgcctcctgggttcaagtgattcttctgcttcagcctccccagtagctgggactacagacacccactaccatgcccggctaattttttttttatttttagtagagacagggtttcactgtgttagtcaggatggtctttatctcctgaccttgtgatctgcccgcctcggcctcccaaagtgctgggattacagacgtgagccactgtacctggcccaaacatgtggtttttttaaatgaaagtgtgttcattttacaaacagtgcattcttactaattttacaggccctgtgctagggacatggcctcgtcttccgctatcttagagtgaagaagtaaagacagagaaagtgttcacaagttgctgcacaagtctcattgcagtgcctcccagaggcgcgaagagcaacacctttcacctgggctgtcctagaaggcccgtggcagggtggggttggtgaacactggggcttaagggggtgaattcagaagacaaaggaccttctgggcaaagaagggcccagtagtgggaagtgcaggagtgtgagagtgcctggaattgcccactcactggctctggagcttggtgctgagtgcttgggaagtgttgggaggatcagttatattgctggctgggttctaaagaacctccaaagtttacataaaagttacctttgatttgactgttctaccctccagtcacgtggctaaattaattaaatcaaatttaaaattaagctcagccataccaagtatatccagtgttcaataggtacatgtggcttgtggctgatgcactggacagtgtacatataaaacatttccatcgttgcagaaacttctattgaacagcagttgtattagtccgttctcaacactgctgtgaagaaatacctgagactggg

SEQ ID NO: 40323 - DNA, 4435 bp, Homo sapiens
gcccaatctgtcctgtctgcctctacctagctttagaagtgttttgttggttcctgagatggagctgtgcctgaagggtatgaggttaccctctgggttcagcggggagatttgggaagagttttgatttgtaggccagtaaaggggcctgacattagatgatggctgctgggctagggaacaacttagaggcagctaacaggattcagggagagtggatttggtgggagagagtagtctaggatgaatccaattgggtttttatgagtagtttggtagttggttgactgggtgggtggtcccttggtaattatttgttgattagtggttgttgggttaggttggttacacttacattatagtcgatggaatctcagatttggatctaataccacatgtaagtcgagtggatttttttttgagacagagttttgctcttgttgctcaggctggagtgcagtggaacagtctcagctcaccacaacctccgcctcccaggttcaagcgattctcctacctcagcctcccgagtagctgggattacaggcatgcgccaccacgccgggctaattttgtatttttaagagttgggggtttcaccatattggtcaggctggtctcgaactcccgacctcaggtgatccgcctgccttggcctcctaaagtgctggcattacaggggtgagccactgtgcctggccagttgagtggatttttttagcactcaagcttcgtggctcattgctattattgtgcatgtgagcgttttatctttcagtagcattagggatgctacttggatgtgttttagttattacagaaatagtttttactaacttttactaagttatctttcctctcctgtgtaggaagtttagagtgaagcggcagttggctggaggttctgaaggtttccccctttcacataatttgatgttccagttgcccacatcaggacgactccctctctttctactgatgtaagcagtgggccaaattatggggctccatccctgcatcttcctacttgtctaaatcttcgtcacagacaacatattgctctaaaggaaacctagaaaggaggagaagctggttttcgcccaaattcctcaaaatcatcgcctgttgtttaagaattacagtttgcactggaacaataagatgttccttaatgtggtttttaagtgagttggttgtcgcctgaatttcataaacactggctaaggattgtgcaaaagggtgtgcttccctttagcatccttaattagggacagcgttttgaaaactgctttttattgtcctttatctgcaaaacttcttgaatccaaatagcgagattctcatttcttaatcactgccacagaaagttgtagattagagaaagctccaattccttatttcctgtcttcctttctttctgtgtgtttattgcctgtgtctcatcctcactcctgccagttttatagaatgtaacctcccagcctctgggaatgtttgggagacttgttcatagaggatctgaagagcagtttaaagtggacttacccaaactatcttctggagaacattagtctctttggagataaaatttttaaacatccgctagtccaatagtgttggcaaattccctgtgacactgtagccctctctttgagattgtcaatgtacgttggcatgttaaaggctctgagaagtcctgcagcagttaaaaaattgtttagtctagtgtgcccccagttgtttggccactgaaacccccttttctggaaaaaccagctaacatctggtagtcttttctaagaggtggtactgaagatgatactcatgttacacatttaaaaattctaacatgtgtttttcatgtgtttataaaatgcaactaatgtatcaaacctgtgatttccaggacataattacttaagctaaggaaaaaagaaaacatgagtgaaggaaaaactttagtaaataggccaggtggtaagaggagagagccttgtctgtgagtgtggtctagggggatgctggacctagcttttcagagctaggttcaggcagagctgctctgagatgtagacactgcagctggggttcttgttgagccgggaagcagcttctgactaaggtgcagactgtttagatgagctggtcataaagagccctgactgtggactgcgtctccagccacggcagcagctggtggatggggtgatgccttggatatttatcgtgtgtttcttgcctggcctgcccttggacagtgcgcctcaggaatgttagaatgtgttccccctttagcagcaaagccgatctgctgtgtacttgttctgtttatcttactgccacgaccgtttatcacgggccagagttcaggggcacactgataaatctcttttaggaggatgatgtaaccctcagcattttccccctacttggttctgagtttttaaagcttttgtaacaccatcatgtccttgtttgggcatcttcctgtgtactcccgtttgggtctccagggtgaaatagccaacagtggattctggagtcatggcctgggttcaaattcctgctctgctgcttatcaactctgactttgggtttaattgacctattcattatttttcttaatctggaaaatggagccaacagcagttcctcataaagcagctgtaaggattcaggggggtaactgcacagggccaagccctcaggtttcacctctcactgggaggtcggacctctgcataatggacaagctctcctagggtgcaagtgaacgggggcgcaagggagttaggaaggtgggtgttttttgtttttgttttttggtggcttgaaaaacatgcccaaggctgggtgtggtggctcatgcctgtaattccagcactttggaaggcagaggcgggagcattgtttgagcccgggagtttgagatcagcctgggcaacatggtgagaccctgtctctctttttttttttttttttttgagatggagtctcgctctgttgcccagactggagtgcagtggcgcaatctcagctcactgcaaccttcacccccaggttcaagtgattctcctgcctcagcctcccaagtagctgggattacaggcgtgtgccattgtgcccagctaatttttgtgcttttagtagagatggggttttgtcatgttggccaggctggtctcgaactcctgatcacaggtgacccatccaccttggcctcccaaagtgctaggattataggcgtgagctactgtgcctggctgacccaaaaaattagctgggcgtggtggcacacacccctgtagtcccagctacttgtgaggctggggcaggaggattgcttgaggccagcctgggcaacagagcaagaccttgtctcaaaaaaaaaaaaaaaaaaaaaaaaaaaaaagaaagaaagaaaagaaaagaaaagaaaagaaaaacatgcccaaaggcaaccaaatgactccatcttttgcaatgtaatcttcaacatcgactcctctggcaagctgtttggaaatggcaaagtccatctcctgaggctgggagattgcttgtccaggacgggtgtgtctggtgaggaatggaaggcatttggatggccactgagaaagctgagccaaggagcatcagaaagacaatcaggcaaacccacagagtctccaggtattcctttgctgataggtaacattgcactagcgatttaaacaaacaggtgaaaggccattgccctaccaccccacctcacctctattccttgctgctctttccagaagcaactgcatggtctgggaacagttttttgtcttgtcaagagacagtctgtacatagatgaattcaattatattacttctgtagtaccctgtactcaaatttgaacctgtcatacacattgcttttatcatttcataatacctgttgattttcccacgttagtacctatagatcctgacaagcaattttgttaagatgaagagttcttcatatgtattgtactatgtttctttttttgatgatgtatgtcaagatttattataaaagtaacagatgggtagggcatggtggctcattcctgtgatcccagcactttgggagaccgagatgggaggattgcttgagcccgggagtttaagacaagcctgggaaacctggcgaaatcctgtctctacaaaaattacgaaaattagccaggcatggtggtgactgtcccagctacttgggacccaaatgtcccagatactcaggaagctgagtcgggagcctgatcctcagaggtcgaggttgcagtgagccgtgattgcaccactgcactccagcctaggtgacagagtgagaccctgtctccccctggcctccaaaaaaaaaaaaaaaagtaacatatgtagtttaaattttaaaaattaaatttttgggggggctgggtgtggt

SEQ ID NO: 40324 - DNA, 2376 bp, Homo sapiens
ggaatgactgagtcaggtggaaattcagaggccctgccctggtgggcagagaagcctggcttacctcccaagcacagcatgtgtgtggatcacttctgtgcactgtctcctcatctccaaaatgggagtcataactgaactcacctcatcaagttgttatgagatgatgtagattcagcgaagtagcaagagtaggagtttgggctttgataacagagagaagtgagtttccatctagattctccccctgtgtcacttttggcagttggcttcacctctgtgggcctctgttatgtcatctgtaaaatgggattaaccctaaaagccaccctcacagggtcattgtgaggattgcacaaggtgatgcaagtggcacagggtctggcccaggagagggggctggaagagagcgagctgccattgtattttggttgctgtggatctaaggagaagagatgtttaggagtctttccctggcatggttcctcctgccttcacccatcactcttttcctcgagggattccctgtggggtgcacagccccagggtgggccagactgagctcacaggagcatgggctgtgtttcaggtgaggtggcctcaccacatgacaaactgagctggagtcaaagggtcacgaggacctccattcacagccagcatttattatttcagctggaaatgtttgccgagcagttgtagctggaagctgtgagcgagacacagactgccatcaggctgaggcctccagagctcatgctgggctttaacctgagcctcttgggggctgggctctgagctcctccacttctgctcatgcccaggcgtccttgggggccttgaactgtcagttgtccaggagaactgtgtggcagcaacagaatgagtttgtatagcaacctgttgctttgaggtttaaaacttagtttagaacgcaattgctttgaccattttggagtgtctatactttttttcttcttctttaagttttcttttttctttttttcttttttttttttttgagacagagttttgctcttgttgcccagtggcaacaagagtgcaatggcgaaatctcggctcaccacaacctctacctcctgggttcaagctattctcctgcctcggccttctgagtagctgggattacaggcgcccgccaccatgcctgaccaatttttgtatttttagtagagacgggtttcaccgtgttcaccaggctggtctcgaactcctgacctcaggtgattcatctgccttggcctcccaaaatgctgggattacaggcataagccatcaagccctgcttttttgtttcccttcttcgacctttctaacaagaggttggaatcctcgttttgacttttaaaggatttcccagtgctagaaagtggtaagatagttactgtatcctaggccctttagcagacctgtctcattgatcatttatttagtccagtgtggctttgttgttggatattaagtaattctcaaaattttaccttttcaaaagtggcattgaaaataaaggcattgggtgatgaaaatggaacttttaaatacagtgattcctgttaaccagaaatagggtgtttgggataatttatgaagcagtacaccatcatagatactatgagctgaaagttcaccaaactctctatcccaaaataacaataaggtatttatgaagtgattcgttccaactatttgaggcaaaaattgtccagcaagtgagagagaacagaaggaatagttggcaaaatagggaatttgaagtctgaggttatgcataaggaatgtgttatgggcctatagtagaaatctcaaatcagggattagggaatgtttactcagttctgttgcagagaaatcctggccacgactcccccatgccatgcccagggcaggcattgctaatcttcactgcctccattctccatgccctgttcacggaagacatttctaatgcattttagcagtcttttttttttttgctgaatccagatgtggcctcagaatccttctcaacacagtgtactagcaccacttggtgctcctgatctactgtatcatctcttgaaaaactactaacatgaaaagacctgccaagtcaactttatattaactgaacccttgacacagtgatggataaaaattaattcaaacagcttctttgtgatctttgagtagttcatgagcaagaaagagaattggaaatccagccaacttcggcccccttgtctacttgtattttactgtggtttatgttttctcttaccaattgagataggcccatgagacttctggtcttccaaagcccagaacatccccacattatagtttaaccactgtaacaaagaggttttttttgtttgt

SEQ ID NO: 40325 - DNA, 887 bp, Homo sapiens
ggctcactgcaagctccgcctcccaggttcacgccattctcctgcctcagcctcctgagtagctggggttacaggcgcccaccatcacgcccggctaattttttgcattttttaatagagacggggtgtctggatctctgacctcgtgatccgcccacctccgcctcccaaagtgctgggattacaggcgtgagccaccacgcctggccagaggttttcttaaaaacaataacaacaaaaacagttgtggaaagcatgtagagtgtgggttttttcggtcttcaggttggcagggcatctgatactgggacccaggttccttccctcaccttgctgtgcctctcctagtgcaggccaaagccaggtgactgcgctgtctgggctcctggctggcaatcggggaaagagtgcatggagcaggcatgcccactgttcaggtcctgaagccgtggctcatttcatatcatttgttgcttatttgaaagacaggcacagcactgacttccaggggaggctgactgaccatctaggtggaagttgcatgcctgggagggagaaggggacaaaggccacagataggcatcagttatcagggccttaagtctgccttgttggcatgcagccttttattggatcaaggccctggagaaaagccctgagcaggaggagataagccagcttggtccccttcatcctacccaggggcctctggggtacctgagccaaagtgcacagttcattggctgtgtggatggaagggatatgggacttgaaaatgggacactggtcctgggcagctgaccgacatggtcctccttaacctgctgtctggggagatgggttgcatctggctaggttttgactgaggaactgaggagagctgtcag

SEQ ID NO: 40326 - DNA, 1247 bp, Homo sapiens
tgcagtggcgtgatcatggttcactgcagcctcgatctcctggctcaagcaatcctcctgcctcagcctctcaagtactagttggtactaatgggcatgcaccactacacctgactaattttttttattatttgtagggacagggtgtccctatgttgcccaggctctggtcttgaactcctgggctcgagctatcctcctgtctcagcttcccatagtgctgggattacagagatgaaccgcctggcctacacacccctatctctcctcgattcttttttttttttttttttttttgagacagagtctccctctgtctcccaggctggagtgcagtggggtgatcttggctcactgtagcctatggctcccaggttcaagcgattcttgtgcttcagccacccaagtagctgggattacaggcacacaccaccatgcccagctaatttttgtattttgagtagagacagggtttcaccgtgttagccaggctggcctcgaactcctgaccccaagtgatcctcctgcctcggcctcccaaagtgttgagattataggtgtgagccaccatgcctggcctctccttgattcttacagtcactttgttggctgtttctgactcagcagctacctgcattgtggccaaaggatgacctattccttctcaggagggcaaaaatgtggaatagtgtctgtccatgcctctcctcatgggctaccacctctgccaccgtggttaatcagtaacaaccaggagagaagctgctggaactgacctctgggaactccctggatggtttggtgcaggaatgtagtaggcatacacgtggttgcgtggatctgggccctcctgatgtgagtagagaggtaaaaggccaccatctccttgacctctggggaactcatccacaaagaagatgtttccaagatgcttctgaagattgcctaaaaatagccggtttccacccccgtgaatgcatccattctagaatgctccttcaccaggaccagagaactgatttacagaagtgacatgaaaacattccatcccagaatttgcagtagctcaaattaagtttctagctattaaaaagaaaagaaaacaaaactaaacaaaacacacccaccctgctcacttagaagcaacactgagtaattttaagtagttcgagaaaatgtatgtggtttgagggtcagggttgtccagagccaagaccagttatgtgggaattgttattggctggatt

SEQ ID NO: 40327 - DNA, 2091 bp, Homo sapiens
acctctagataccatggaacagtagttctgtggacatttcaagtaaggcatattggaagctatcttcgcccttaacttttagacttacaactctaggttttcaagctagacccggaaatgaaatcagcaatggtgtttactgctaattattgcctttatagccacccacattctgaaggccttgtaacagacagcacgaaaagattggtctgcctcagccaaggtggggctgaactggtctctttccaagctgtgttggttgtttttgcctggttgttcaggcggaagacaacaacatttagacacttaaaaatggctgacccaggttttggaacccagacaggcattttcaagtactgcattttccaagaagacttgaaaaagtccagtctatccaattactgagcccttgagtatggcagtgaggtttgaataatgtccagcactcggccttaactccctttcacaaatgaaaggttaaatgctggaagcaggagcacagcatggatttgctgtgctctcctgttttctttgccaaagtcacttttctccagtccttctgtggtgtcactggacaaagttatattgtgtctgtatttgctagcctggtgtgctccctgagtgggacccctggtcttgggcaactactgcatactatttgtgcaaagcaaatattttcttggcgggtggctccaggttaccttggctttcacgactctgactaaagaatgaaagattgaattgatgtcaaaactgtgcttgcagcctgcaatccaaatgcctgccgggccagtggccgaggcctacaacccaaaggcgtccgtatccgggagaccacagatttcaaggttgacaccaaagctgcaggaagtggggagctcggtgtaaccatgaagggtcctagtaagtgttcctttgtttctctatctcaggtgtggttttggctaactttgcagccatggcatatggatttcatcccacggccagttgtcctcaataatcccagaaggctatgtcaaggatttgaggctatctgggctccttggggaagacggcagtgattgattagtaatgtctgccctggatgcggccagtgggtggcttgacagctttacattacatcaagacttctgggagtagaaaaagcagtgatgtaaaggagttggggaaatgctgctgttggaacaagtggctcattttttattttagacatctgggctcagagaggaaggctcttgcctaaggtcatacagcgtttgtaatcatctgagctggaattcaagcacagtctccaaagccagtgattttcccactacaggttacattttatagagtatgaaattatgtcaagtacttaattactatgatcagtgcttatagaaggagaataaaattccctaagattaagttttctttgtagataaatgccatttgtggaggtacaggttaaaccctgcaacccattctctctccctcttttggggaaggagacagcagatgtggggatgggtgtcttcacttttttcgttggaacagagaagcatttcagcacttctagtctcgggtgtagcagcctttggtggttttactcccatgcctgtggaatcttgagcttcctgtaccaggattgctcttaccttctgtgttcccaacaggctggggcaggagcattctgagctccagaaagttaatatttgacttcacagcaccaggctttgggtcaggctgtgccctgagggtagccgaggttctagactgcccagacctggagtcaagctgcttggggactgtcttccctcccagattattccaacaggagccaaggagggtgtgtgtgtgtgtgtgtgtgtgtgtgtgcacgcgcgtgcatgcctctgcgtatgtgtgcgtacgtgtgtgttttctcctgaccttgaatacttgcttgactcaacggctttcctggccaaacctcagggctcaacacaaaacaagttcctgcctgatggctgggtttggagtttgcagcgtcacatctaaaacctgtcctcttgcagatagcgtctgaggactttcttgcttttgttgtccagctttagatggaaaagtata

SEQ ID NO: 40328 - DNA, 1028 bp, Homo sapiens
tagggattaaaattaaccttacataaaaatggaaatcttagtagaatgttctgtgcctaaaggtagtggtcttgacatccatttaacctcttctgcctttattccaatagtctgcaacattctttttgaagaattataatcattctgtctctgatcacttcttgcatttccccagaccttagctctcagctgtccctggaggacatttccttcccccagccccatgtattattgtcgtttttggttttattcttgttggcatttttcatcctgagtactcaacattcagtattaaaggctcaaagtcctcgggtttgtttgtgacatcagggatccaggcattagagagtgacctgttatagaaggccctttcccaatgctgggcccttttggcttatcttacccttctgtttacctgtggtaatagaagtctgctcaccactcgctaagtcagagtgatgctaaggttcaccctttgttgaaggctccctgagctctggctgttgcttcaggggctttcctactaagactgtgtctctgctacaggaaatccccgccagccctttcagagtcaaagttgacccttcccacgatgccagcaaagtgaaggcagaaggcccagggctcagcaaagcaggtaagatggcacgtctaggttgtcctgggcccctctgccagccggtggcactgggcgtgtttcatccacggccttgaggaacttcatctccaccaacaccaacaccaagctggcaggttttctgtgcagctctgatgcagcagtggctggccaggcccgttgctggctgtcataatagacctggtgctgttgaacctgtctgacgggttctcaaagtgaaactactccagctggtctgtctcctcacttcacagtatatctttccaggtgtggaaaatgggaaaccgacccacttcactgtctacaccaagggggctgggaaagccccgctcaacgtgcagttcaacagccctcttcctggcgatgcagtgaaggatttggatatcatcga

SEQ ID NO: 40329 - DNA, 906 bp, Homo sapiens
tgactggtaacaagagcatactttcttttatgggatgggtgggcttaactggaagagggtttttccctctcttttttagcacttcagagaagaggccagaaaactttatgcgggtgagggaggaggtatccccaagacctctggttagcctgaggtctgcttagtgagcccctgaattgttaggggctgtggggaaacggaagctcgggaagagttggcacgttgggaatgccacgttggctgaagtagcgagtcagtcctgccttaaacagtacaaaaaggagacctttcctgccccttggctggctcccagctctgttgaatttgacctgtacacattttaccaggaaatgttgttcacatgaggcagggggccaattggttttgtgtgcagtgcttaaaaatgctggaaaattaatcctctcttcattgatgcaaccagtttttttttttttttcttggcctttacccccttccttattacaaaaggaatgtgacaaaatatacataggccaaatgctacacccttttaacacttgatcagcaacagctttcagcagggcctgcattccagcaaggctgctggattcttggggggaactcgtctctccctcacactttcctgttacattatgcctggccgattgtggtgaaggggatcttgatctactgagacagccatgagatttcttggagcctcgatttggagggagggaacttggccaaccatggagagaagaagccggctgtgtgccagcctggaaccggcgagaggagagaaatggcgcacacatggctatcgcgtgccacccggccacccgtgagggtgcctgccaatcctgcaagcaccatctgccttcacacttgcaattttattttctttcacatggaaatggaagttcagat

SEQ ID NO: 40330 - DNA, 618 bp, Homo sapiens
agttttatcctgaaagcattcccccaccaggccccctggtcttctacgaaaccagtccctagtgccaaaaaggttggggaccgctgccttggaacacactcaggacaaaaccagtctgtcatatgatggttactacctcatagttgtaaatttctgctagacttaggcaccttgactaactcactgtcttatctgctgtagaaatccccttttccatcccactcttatgtgtaagaaaagtcagatgcagctgggttgacatgtatctttattgactagggtgtgtgtgtgtgtgtctatcaagtcccttcaaggtcaaggtccttcccacatatgatgccagcaaagtgactgccagtggccccggccttagttcctatggtgtgcctgccagtctacctgtggactttgcaattgatgcccgagatgccggggaaggcctgcttgctgttcaaataacggtaacttggagttattttctgagccaaaccttaatcctaagacttaatttctgggccagatttaagaacaagggtttcaataaccgatttctgactcaatgcaagttgtttgttagattttcccaccaaagagtcagtaaatgtgcagaagcagaag

SEQ ID NO: 40331 - DNA, 797 bp, Homo sapiens
attttgaatacatctgtgccttgggctctgcttctctggggaaggttgctggtgggcttcattgccccgtctctctgtgctccataggagaggtccacatgccttctgggaagacagccacacctgagattgtggacaacaaggacggcacggtcactgttagatatgcccccactgaggtcgggctccatgagatgcacatcaaatacatgggcagccacatccctggtaagctgagtcagcaggcccagcagggctccaccattcaggggcatccgggcagcctgcagacactcctcagccgctttgcagggagcagctctcggcagcaggctggagaatgcagcgttggtacccctgtgaaaccaaacagtctgggaccctagcaggtccagctgatttctggaagggatgatgtagctcagtgtcttgggtcacagtgcaggcctttgggtctgtggttgtttatctttgtcactacgctgagtgtggccagaggtcaagctgggagaaaaatgggaggcatggtgagggactttccagcctggcctgcagagccctgtgtgggctggaggcttggggccaggtcagaggtggaagaagaggaccagcagccctggaagaagaggaccagcagccctctacaagggaagccagcccaggtttcatgggtcaccaaccagcacagtgtcaccagttcattctttctttttgtagttgtatttgttttttaatttagtattttgaataggtaacacattctcatggttcaaaaataaaaatgatacgaagaaagt

SEQ ID NO: 40332 - DNA, 634 bp, Homo sapiens
agacatgtcttcagaggactccagatgtcctgtgaatttagttatcactagtgatgcttaggaaacttcagcaatggaccttggaccttgcttgggttctgcttggggttggagaaagaggaaagggctagcaacagacgaaacctagcactgcaggtttgaacaaggatggaagagggacaggggctctgtggggctcagtcactaaccaggtttctctttgctctcagctgagttcagcatttggacccgggaagcaggcgctggaggcctctccatcgctgttgagggccccagtaaggccgagattacattcgatgaccataaaaatgggtcgtgcggtgtatcttatattgcccaagagcctggtatgtattcagggttcacaagaggacattttccttgtttgaacatgattaggttgcaaggaacagaaatccatcaagtttgctgaagtcaatgaggaatctatgtgtatgggcacatgggacagcctcctagaaatccagttgcaagatacatggccagacctcttaagggtgggaacgcttgttctggttgccttttgcctttctccattagcctctctgcttcttgctttcattcaattgctccattctttccaccaaccagc

SEQ ID NO: 40333 - DNA, 830 bp, Homo sapiens
ttaatggtgatgtaagtcatatgtacttataatgtgctgtgatttcttgtcaacatttctgaagaaaggaaatggtaaatttcagttagagaatggtgaaaattaaaacgtaattttttccccattgaagtccatggatctgctgaattcaatacaggccatttggggaccctgtgagccccggttaagagtccctggccttaccccactaaggaaatcatatcggcccagcctcagccaggcgactcccactcaaccaatcagctgtggccattgaggagggctgggtctctctgaaggcattttagcccttggtgagaagcaagagtccactctgggtccagagtctctgaaatgatgggactttcctgtcctcataggtaactacgaggtgtccatcaagttcaatgatgagcacatcccggaaagcccctacctggtgccggtcatcgcaccctccgacgacgcccgccgcctcactgttatgagccttcaggtgagatgcaaggaagcatccatctccttggccgcaggccaccagtgagacccctggactcctgaggctgcttcaatgtccccttaggtgctgaggccccttttcacattttgaccacagatgtcacccagtcactggggagctttcctgtggcagagtcaactccccatacacttagggcggatgacacttggggcgagcaaaaacagagccacagtcaacaacacaccttaatgtttggggacacgtttgtttttaaaggtttatttaagagaaacaaaggaagcctgttcataactggttaagggataacaagggctttcaaaacaaaacc

SEQ ID NO: 40334 - DNA, 4903 bp, Homo sapiens
agtgagaccccttctctacaaaaaaaagtaaaaaaaaaattagccaggcatggtggcacacacctgtagtctacttgtgggggatgaggtgggaggattgcttatgtccaggaggtcgagactgctgtgagctgtgatcatgccattgcactccagcctgggtaacacagcaagaccctgtctcaaaaagaaagaaaaaggaatgtaggctctgtgtgaacatttagatctatgtttcctagtaggcagaaaggcagtggggagcctcaggaggaacaagtgtaaaggatggggtcagatcctggttttagtctgaaaggccaagtggcaagctggtgctcccagagtggtccatttgaggaagcagtggcactggaaatggagaggagggacttgaggccagagatctatggtggctatagagagtgagagagagaatccattccaaaatgttccacgtagcttagtgattgggtcggaagatgacagtgcagttatcagaactagggccagccaggcagagggtgggtgaggattggtcagggccttaaagggtttaatattttactttgaggggttttgaaggatccccaatacccaaatggagatgtttactagatcactgtgaggtttggtggcctcagccccaacagtccctcactgggtaccctccctcttctcttaaagccaatgtgcttcaggggaagctaactccaccccagacaggatttgaacccctacagatgtatgagatcattagcatgacacagttactattgattgcaaattacagaatacccagctcaagccaactcacacaataaaggggcccagtaagttgcataactagaaagttcaagacatccaagacaggtttcagcaatttgatttggtcattgagctgcgccctgcaaggcgtcaaatatttctgctgttctgctttgtgggcctggttctggccttcctcttggtggcaggatggccttcctcttggtggcaggatggctgcagcagcaccagatgtcccaccttcacgccacatcaattaagagagacaccctctcaggattcttagaagtcgagagcctcctttcccagaagtctccagcacgtctgccttcccctctcactgacctggacacatgcccactgctgagtcatttcctgtggctaaagaaatgccatgtgctcattgactaaggcttagtgaagaaggatttttccctgatccactcagggaccacacctggacatggcggtggagccagcttcccctacaacacattggctttaagggaggcggatggggactgttggaggatgttcagtgccaaaggacgtagggtgcacagcttcatggaggtgcacctctgtggagacgtccagaggcagggagaagagctttggggaacacaaattctgagagggatgaagagtactaggcaccagggagagaccgagagactacctggagaggtaggaggagaacaggctctgcaccctgggcaggagggcttcaaggaggaagcggcagtcaggtggtgcacaatgggtagatgttctaggtgcccacttcagttaacagattaccttgctacatgctgtgacccaaacgcacagccacaaacctgccctgtgggggcagttcctagctttgagcttaattaaggagcattaatgccagttggaaccgttttttttccccttcaagtggccaaatagagaaacatagaagaagtgaggttttcttttttcccttcatatatattcctttttatttcttgttatgccttcccaaaacagagacattgaacagtagttagaatggccatctcccaatgtttaaaaacaaactgaactccccaatgggtgaacaaagtaaagagtagtaacctggagttcagctgagtaagccgctgcggagccttaagtggtgaggtcttccaatttcagagtgctgtgtcttcaacttgtatcatcattttagtggaaaaacataatttaattttggtgaaatgagattcatctcgtgacaggattagtaacagcattcacagaatttcacactgaagaagtgaggttttctaaagaaaggaagtgttcttctgaggcaggggtcagagtcttgtcctgtgtttataggatttgcaatgtggatgcgtttcccttggggctgatgagggatacccagggggtctgtctggttctgaaatccaggatgctgagtgccaggctccctgtagaactgttgattttaaatgggccatctcagcttggcctccatcctttatcctcactgaactcaggggtgtccatttgcttgatttcaccctgtgcctttgctcattctcctagataagtatgctgttcgcttcatccctcatgagaatggtgtccacaccatcgatgtcaagttcaatgggagccacgtggttggaagccccttcaaagtgcgcgttggggagcctggacaagcggggaaccctgccctggtgtccgcctatggcacgggactcgaagggggcaccacaggtaacccactcttctgcttcttgaagccttaactgaaccagctccagggaccaagccagatggaaatcctcaagccccatgaaagctttttacacgtactccccgtggaaactggggtcatgcacacttcggaggcgcttgctgtccaaagctgttttgggagttgcggtttgacccacgataaatccagagtgagagctcgatggccgtgttatcacacctcattactgttagttgtgattcagattccttcctctgccaagtttcttgactttcagaacaggatgctgatagtcagggaacacagcacagtgtcattaattttgagggtttctttgcctgcacagaattcatgatgcgtccaagtgggctcctacccgtctgttctttcatggtaccaggctcccagaaatgcactgaagcagcaataagacctgtcccagcctatctcctcctctttttactctcagatcttaatggaggaggagaaaagactgaaatgttcaaagaattctgaagctttttagacccgttacaatttacttttattctttgccacagatgggacatgtttgattatgaaagatacaggcagtgaagaagtaaataaagtgagactcactccatcttctctcctcctcccccacctgggtctggaagcaaacggctctgggaagggaggaccttcaccctgtctgtcatctcattgtctgtcttcattcttggttgctgggttggttagctaattggttcattagacaagcagacacagagttttgcttttgtcttacagaaagaatcttactgtatccactgtgtggtatagcttgtgtttttgctttgacatcttaaagatctttccatgtcagaacagatcttcccctccttttcctggctgtagtgagaattcctgctgtgaatcgcagttatttgaacaggtggcatcgggtggtgcgcagtgagtgcgtcactgttatggaggctgccagggtggagagtcagtccttagtctttgcaggggaagtgcgcagtgtggactcactggggcatgtttgcatttggtgttactttggaccctcttgggaaagcagtatgtcctggtttcttgagtctcttgtgtgtgtacccccaccccgcataaggagagtgggatggagcagacttgcctcccaggggtgaggggtgagtggctgcatggttgcctggcatccagccctaggagcaagtgacctgtgtggccaaggggccctctccgggtgcaggagtgactggtgggctggcaggctgcccgggactctggccaaagcagtggcctcagcaaagccacccacaggggtggtgtgagtgctgccagactccccaggcaaatccagcccggctccacgctgaactctgggcctgcggcttgccttttgtgaaaggcatggtatcattttaccgtaagtgatgtccattttacagatgtggaaagtgagatgcagaggttgagtcactccccaaacaacactcccccaaaaagcagtcagctgggaggaggcagaaccaggaatcagtctacatccgtgacctcagagcctatgcgctgaacccccgagcttggccccctctctaagtggctggctcacccagaggcagtgactgcatccccagcccactttggggatgtcctaaaccaggacccctgtcctcccagccactcaggagtactttccaggcagcagtgctggcacttgggccctgacaaggtactcacctttgagggcccaggtggggtcctctcggcacttggagcgcgtggcaggcttcaggccaggcctcacagcagctgctggggtctcccacactggccaggaagcatctcaccctcctgctggctcatgccgctgtgcctgggccctctcccatttccttttggctgttcgcacacctttttgggagcttgggtttcaggctgtgctctgcaagtgctggacgctgctgagagaaggagttgctcttgcagggaagctcctagccaggaggggagaggtacagaaccgcctgcttcaaaccctgtgtaaatattgctcttgtcacagggaaggcgccttgtttttccagccctcctgctcccaagcctttccctaaatatccattctgagattacacagctgcagtgtgcatggaatgaaaaggtatctgtgcttggccgccagagcgcccagtatcctgaccttctgaacaaagcaaacctccctctgtttttaatgggtgagtttgctgtatctcttggctcaagctttaaatggtccattctgtagattttggagtaggggaatgtggagaatttggggcgggaccctgctggaggcggcttgagaggctgggagat

SEQ ID NO: 40335 - DNA, 1067 bp, Homo sapiens
tacccggagaagaaaggacagtcagaggggcccacgcctcccccacacccctggagggagagctggactctggtggctgaagcagcacttcaggctcacagtgtgactcaggcttcttgccctcagccacaatggctcatgcccagaggagagaacagggtgtccaggctgttggtgcttgtgggcgaaatgtcagccatgctcctcctgccttggcctagaaaagggagcccccaccccgcagggcctgaggttctctctgccagaagttcagagctagtgccagtgggttcccatgccaccagggtgagccctctgtaaggggatctatgtgtgtccctcaccacggcctcagtgctcccaggaaagccctccaagtcatcaacacagcattttctattcctttctcccaggtatccagtcggaattctttattaacaccacccgagcaggtccagggacattatccgtcaccatcgaaggcccatccaaggttaaaatggattgccaggaaacacctgaagggtacaaagtcatgtacacccccatggctcctggtaactacctgatcagcgtcaaatacggtgggcccaaccacatcgtgggcagtcccttcaaggccaaggtgacaggtaacgaacaaccaccttcggagttactctcccttcctggggagctggttgtgtcagatcaatcatagtggaaactatggatggttttagatgtgttaaagctactttgaactttgaatgtcagtaaatagtatgagatgtcagagggcagtgtttgaaacttacaaaagtccacagagtggagccgtgcagaagttgagaaagcatgttaggatgttaggtggttttctatctctaacaggaaagaatacatattgaaatcttacgtatttgtttagatcagggtctgaaaaatcccctgatttctaattttcacttgaaaaataatcaaaaagttttcctatacttataaaaatgtgtctcctccaaaacactggaaaaaataccaaactatgaaaaccacttcacagccaccacccaaggtaaccaccataa

SEQ ID NO: 40336 - DNA, 791 bp, Homo sapiens
tgtaaggaacaattccctgccagagtctcagccactgctgtctgtgaccaacacctgctggaagtgatgttcctggcagaaggccgccccctggctgcttgttggcatctggggctacacttggttgtcccctgcatgggagcgatggtgatgttaccctggggtaaatttccccactagaagccactgcctcctgttacatcaaagacatcccagggtgggatgcacctctttatcagtcaatggctaggaccacagggcaacccttacctgcacctgggcttggctgctatggaaaccagctgtttgtgcaaataccttgaaaactttgaaacttgaccccggacaggcctggtgccaggtcctttccgacttttgtgttttctttccacctttcactactgactttgcctctttcctaccaggaatggacagggccgatggaggtgaagcggacagcagctgcactgccctgtagagattcccaggccctgcccacttcaaagcacacaagcccacctcttcctcatcacatttccctttgcaacccagggaggcactcaccaggatgctgccaagaaggaaacattttattaacatgtttctttgtttccgatgcacttaaaacacttgggcctcttgaccaagtctagttttaggacttcaaaggggcgttgaaagccacattttgatgactttggtgtaaaatgagtagggcatatcgggatttaatttcccttgaaagttgcacagacttaaaaattagcagaataggctagcagaataggccg

SEQ ID NO: 40337 - DNA, 1518 bp, Homo sapiens
gaataaaggttaaaggcaaaatgagtgcttgatccttgtcaacccgccaagtttatattaaaaatggggagtgttgctgttaactgaagtgcgcattagcctcagttctcagccctatggaagtagagtcaaggaaagagatggagtctttccaaatctccattaacttggagggggaagaggctgtataatctgtatatttcacgaatgaaaactcccagaaattagtatcttatgcaggtattttttccctttcacagtagtaaatcataatttgaggaagtaaaaatgtcacattgggggcagtaagggctcaggcaagcctggattcagtttatttttctggctttgtcctaaggatgctgcctaacgcatggtgggaggaatctttctaaacaaagagatccttctctgcttcgtgataaggcttttgtctgagcccccaggcccacggggaccggctcatgggcatggaatttagggagacctactccacagccctcacaccctttttctctcttcctcaagagctctcaagagcaggcaggaaatggagaatctacgagcctgacttgtggcacggatccacatatccaagggtgttttgtattttggactcgcttatctccccgggacaaagtacaaagatgaaagaatctgcaagccttttgttgcccatgtttctccctctgccctgactgccttgccaagataccaaaacacctctccctgtcgggggctgccctccctttctaggaagtggacgtgcttagggcaaagctggtgctgaaccccggcagggtgtattcagaggaggagaaaacctcagcagaagcaccaagtcctggaaatgccagcttcaggcccagctacaagcagcctgctccatagcagcagaataacctcgtgtagcagcagcattcagagaacagcgggtcacatgctgcaggttcaaaccggattccaagcccagcgctgctgcttaccaaccgagatacctcaggcggtcaccttctctgtgcctcactgctctcatctgtaaaatacggaaataatgggaaacttccattctaaaatcagatgaactccagaaaggcatctccccctgcctccctcccgctcagcacatccaccccgcaactggcctgggcaaactttcctcaacccaaagctgttgagagagggactgcctgagtgttgcagagattcggctccccaaggcagactggaaggggcaccccagctagggaaagggaggcttatggagaagccattaagcgtggtggctctaaggttgggctggggattcaaatcctggccctgccatgacctctggcaggcaggtcactgatccttcacagaaaactgtgcctcagttttctttccaatgaaatggggtaacaggacccaccccatagagtgttctgagaactcactgacaaaatatacgtaaagagcatttcaggccaggcatggtggctcactcctgcaatcccagcactttgggaggccaagatg

SEQ ID NO: 40338 - DNA, 695 bp, Homo sapiens
tggggctggtacttgactgtggaatgaatgaacaaatgaatgaacatggactagggatgagaacttgatttgcaatcaggaggtatgagttcaaatcctggttctaccacttctgagttgtatgatctcaggcaagagcctcaacttctctgggcctcaattttcacatctgaaaaatgggaataacctagtatgtgccttcctgtgtcatggagttttggggaaatcaagtgggaaagcacttggaataggaactgtcctcacaaaccccctgtgaggtaggaaccaagtgtgattccatcattcagaatggagaggagatctggagttactgaatcccagctctacctggaaatgagtcactgaacaaacaagcacagaattgtgaatcagtttaattaggaggcttgggtttgatttctggctcattcattcattcagtctgtcaatcatttaacaagtgtttattgagctcctggtatgtgtcagacacttacactttttgtccctgggcatacaacagagaacaagacagacatgatccctgccctcaccaaaggtagacaacaaacagataatgatgcggtgtcaggcagtggtccacactactacagagcagcccttttccatctttcctatgcacaggaatcagctggggtcttggtaaaatgcaggttctgactggggcagggagt

SEQ ID NO: 40339 - DNA, 2549 bp, Homo sapiens
ttacattttggcttatattatattcctattggaccagactggtctaagaactttacaaatattaactctgggggatgatgcttttaccctggcagaggggtgtgtgtgtgtgtgtgtgtgtgtgtgtgtgtgtgtgtgtgtgtaggctgagatgtgtgaattccaacgacagcctcaagtgagtgtggagttggctccctggcctggcttcaccactgctgagtgtggagcccaagtgcagactggcttgtggaggtttcctgcgggtatctggaactgtctgagccctttctctttctaggttcacctctggactaaaggtaagttccccaaaaggccaccgggtggtgatgtcggaccacaagccatggtggttggctcactggaaacctgagctctccacctggctctgccattcgctgtgtggccttggacctcagtttcctcacctgtaaacaggattagactagactgaagagagcacgaactttgaaggcaggcagaccgggattttaattctgcctcccccagggccccattgtggctttcacgggcattaggcacctttgcctttatagatcctttcccccataaaaaatattaaaattgtattttacaactatattggtataaagacaaacatgttattattattatgttaattttttcttcatccccaaagttcatgtttttctttctgattctgaaagaaattaacacatttccatgggccctaggcacagtgctgtgcctaatgggtgagtcacctgggttcaatactccccagctgtgtgccctcgggcaagttgtttaacttctctgggcctcactcgcctcgcctataaaatggagatgacatcagactccacctcgctgctgcggttggaattcagtgagatggcccacgccactgcctcttagcacacagcctggcacacagcagcccttagcaaatggcagccattacttattattacctttaaggatattttcagctctagcctctaggaaactgtgaaaagatctcaggagcgggaatctcaaagtaatgataactcggaaaaataaaactcccagggtatttggtggtagagtttcccagagcatagaggggcagcaggaggagtttctgtaaatgaccaacctcctcccacctgccatcggaagacgcatttgaggcagggacatgggctggtatgacccagccagaagctgagcaggccgaggaatatgtgccaggcagggagacccctgggaaagagctgagtgcgtgtgtatgtgcacgtacacacacacacaaacctgcatccatagattcttgtttcctcaaattcccttattttgatttaattttagtagcttccctgaatcccaaagattgacgccactgttgccagggtcttggggaccgtggggacccgctcctcctttgaaatatggcccatgggcaagtgacatggggatgctggctccttcaggatcattcaggtggaagcccgccctgatcaggagactcagcagctgatgcaaatgtgagcctctctcagctgccctgctttccaccctcacgcctgcctgggctgggtgcctttcctctttccgggagggacgagggatgtggcccccagtttgtcgccctttcctggtttggcaactactctttatacttgccctctccagcccaagggagagataggagcagggttgctgaattgcagaagctcccttcacccaccccacccccagcagggtcagggagaaggtcactgggggagggtttctgtatttgtggcaggaaagtggtgttgacaaggaaaaggatgtcacaaggactggaagcaggggcgtctccatcctcagggttacctgccaaaatatttgccgtggtgaatgacaaagaaatggaaccctggcatgattccttgtgtggcaaaaattcattctgaataactaagctcgagcaacctgcacacccagacttaaagcggcctaccctttaacagagcaagccctgttaatacaaatatacaagtaagggaatttaatttatcgagggcttactaagcatcaggcacatcctccatgccttatatccatcatcttatttaaactttacctatgaggttgattctcttattatctctgttttacacacaaggaaactaaaggtaagtagcctgctcgaggtcccacagctggtaggtggtagagactatggctccaaagtgagcctggtccttgctaccatgctacacctcgcctcaccaagggggactgggagagtgatttcaaatctgggcctcagatcatgtgccttggaatcaaccgggggacttgttgaaattgcaggttcctgggccctggcccagactctgggagactgggacctgggaatcaccatggtaactggttccctgggattccagtgcacaccaaggtttagactcttttttgttcgtttgttttttttgttttgtttttgagaaaaggtcttgctctgtttcccaagctggagtgccatggtacgatcacagctcactgcagccttg

SEQ ID NO: 40340 - DNA, 1294 bp, Homo sapiens
gtggcatcaacccatctttttttttttttttttttgagacaggatctcactctgttgcccagcctggagtgcagtggtgcgatcttggctcactgcaacctccgcttcctggactcaagtgatcctcccacctcagcctcccaagtagctgggaccataggcatgcatcaccatgcccagctaatttttttgaatttttcatagagatggagtctcatcatgttgcccaagctaactcatctttccaggacaatggcatagaaagacaagatggcaaccttacctcctcttcagtcagcttgtaagctttctggaagtcaaaaacactgtttgacttgggaacaacagaactgacgatttcttgtcctctaagcacaatcctggaacaaggggagggaaaacagttgtgttaatccaacctgtgattgctgagatcaaaccaaggtctgtgtttgctgtctggaattaaccgagcagtctggccctttcatgtggcgctcaaagtccagagctggttttagcctgtgaccccaaaggacagtgcctacaactgtgaaataggatcagtccctgccatggttctgtggacaccaggacactgtctcccagtgtgggcaatgttctggtggagtaggagaagattttatatgacacacgcacactatcccacacaacaatgacttgcgtactgagaacgctgttcctttttcaattatttttcactttccctgatttgattatggagaaattctcagggaggtgctggtttgtctttaatacctccctcagtcccgtgttgacagagagtaggctgccatctccgagcattctgcaggcaagagaattaaggcagaatttaacaaggcgtgattttcactggacttaatttttacgttaccttcaatttatggcaaatgctgctgctttcttactcatgctagtatcatgaaatttcttttaaaaatttatttcagcaagaaattaagcgatttaatggaaaatatcgagaaaaatcacagcatatgtgctttgcaataatgacaaaaagtaagaatgaggtagtcaaatgagttttggaaacaaactaacatatcccaagttgggtgatgcagttgtggtctacgtggtcctgagtgacttcccgaggaatggcaaggtgagtcaaactgccatttcatgagtgaccagtgggccttccccattctaatcaacagttttggtatctgcatttgctaacatcaccagcacaactaacttttttttttttttttttttttttgagacacagtcatgc

SEQ ID NO: 40341 - DNA, 3583 bp, Homo sapiens
agcaggctcaagcacaggatcgttttcctgagaacaaggctaagtcaactcttctcaacagccagggagctgttgcgaatctgggagctgaagatctgagccatactagttatctgtggcacccaaaagttaatgttcagacttaagaaattactagcaggaagaggaaaagaatacgaagttcaggaatcagctgtgctgagaacctcagctttccagccctgggccaggacttgactatgaggagtaaagaacacctggcctgccaaccatggagccaaccaacaaattaggtgtttggagaccccttgtgttttcagcttgaagagtcaatactttgcataggcccctagttttgacagcaattattttgatgaacactgagaattggttagaaatcaaaatttggttttgaagaaaagacatgcattttgattcaattcacgatttattggtggccatgttccagggagcataggtgatacttacttgtagagaaaggcatattgttctttatatgtgtttcttccaagccgagagctaatcacatagttgtacgttatgcctctccttgaatttctagaaaacaaagatttaacactgcatcttgaagagtaaacattcccctactgtacatgttcctttctttccaatctgcctccatacgcccaatggcatcatgtggaagggccactgttcatcataacctttgagtccaatgagaggagccaccattgattggctggaatgtggcatctgccacgatctttacagccattatttcttgccttatgaggagagtgttatcattaccccctttctatggtttgcaagcccaaagctgggatttgaacctagatccaactcaccccaaaacccgcatgctttggcctgtacctgtgggaggccactgagaccctagaagacaatcttggccagaatcagcccctgaccccgctcatgcccatggctgcagctgcagctcatgctttctggtggaataaatgtcatcaggccacctgtccgtgtccacgaaccactcctgagcatttatgataagcaggaatattctctcctctgaaagccatcaggcatttttttacaagctttgggaccacgatttcaattcactgttgtttatatcctgggtgctggggatacagccatgaagtcccattgaccttgcccctcacctgcaccagggaaagcggactctttctgtgtgtttaccaaacctgctgataactccactctgggcagagcctaacataatttcactctatctgctcacaaaaagatctagggcatgtctaaagctgcagcatattctcagattcagttggaaaaaaagcagaaggggtatttaggggccaacttagaccttacagaaattcctgggacttcagatgcagtatgctaaggcagacttagcccctggggccccaggagtgtgaacagtaggttctgccgggcttccactttggggagactggccctattttgaacatagcctgccaagtcctgagttagcaaactgcttgtggtgactcagttgcaaagtgactaaggcccatcctggcttgtgggggataaagagacaaacaggcttggctctgcttggagtccgcgacagtctagataggttggggtgtgccaagaccactggtggtgaaaagactcgccccagactgactgtggaggagatgactggagcctacctgtcccctcagtcccccacaaacctgtcccctcagtctcccataaacctgactggggacactccaaggaaggctgagatgacaaagaatagagcactggctatgagatcagatgtgacgcaagttcaaaggtaggcttggccacttcctggctgggtaactcaggcaggtcccccactcagttcccttactataagggaagcccttaggcagactgacatggattcttgcctgtccctacaattgtcctacacatgccttccctatgatggataagcccagagcctgggggatgatggcaccaggatctaccatctcatcttgctcctgcccaagacccagacatggcttttgttcaaaagtccctattaagtgtttcttgctgagatggccaggtgcagcggctcacacctgtaatcccagcactttgggaggctgagaggggcagatcacttgaggtcaggaatttaaggccagcctgggcaacatagcaaaaccccgactccactaaaaatacaaaaattagctaggcatagtgggtgtgtgactgtaatcccagctacttgggaggctgaggcaggagaatcacttgaacccaggaggcaaaggttgcagtgagccgagatcttgctgctgcataccagcctgggcaacagagtctcagatttaaaaagtactaaaataagaagcaagtgcccctcactccttcactaacccctttcaccacagctctctgatcacaccccccccccccccaccagaagtaaccactattaatagtttggagagcatccttccagtctttcatctctatgcacatggaaacacaaacacacccttattcatgtaacatgatgactcaaatgggctattttacctgcaattctcaacttgctttttttcaatatattgtggccattattccgtgctggaatatttagctctaacttattctgtagcaagcatgattttttttttaagagatagggtcttgctctgtggcccaggctggagtgcagtggtgtgatcatggctcactatagcctaaacctcatgggctcaagcgatcctcccacctcagcctcccaggtaggtgagactataggcacgtgccaccacacctggccaccagcatgacttttaacagctgcataatattcctgtgtgtgagcatgttgtaattttattatctttcttctactattggtttctaatcttttctcttttctccaacattttcttcataactgtactttttagctcagcctcatctgcttttttcatttctttctgtgtccagacccctcatctatttcccctattctattttatcacagtaaaatcaactggttgaaagttctcaggaccgtggctaagggagctggactcctgggcaacactggctgtgtgaactggtggtcaagtgcgggatctcacattactttcagttcccaggggttttcagatgcccttgcacttgaccttgagccctagagggcccacccttccccatgttacctgttcagcttctccatcagtatggggcagatcctgttgttgctgtccttgatttccatcacgagtatgatgtcacagcgtttgatgacctgcaagaaagagaattcccaggggtttgaggtcatttaccacagataaataaaaccttttattggacacttactgtttttaagtattgcactgagtgcttattaaaataatttcttctctgaactaaatgaaggactccctgaggtaggtaggtgcttttgttatgtacattttaaagaggagcgtgagactcagagaaagttgagtaaattacactcccaatcaccctactagaaaatggcggaggcagaatttga

SEQ ID NO: 40342 - DNA, 1871 bp, Homo sapiens
acttggtcaaaggaagctttcccctacctccaagagtcattgaccccacctccagaaggttcactccaacccctccatgtaatactggaggacccagggaaggcagaaaccctgtctcatccttcagttggcttctcttgctgggaattgggaattttgaggcacttgcctaacgcctgctgacagccccggggtctccatcttcgggatgaagtttcctgctccatatacttgcaaacaccagtctctaagatgcacctggaagaaaagataaatatgcatcattctttcttggagatttagaatgcacattagcatattaaatgttctgaaaagtcctgtaattataaaaagccgcttaactgtgttgaaacagggtgtccaaaatttattgtctgtggagtccttttcttcatagaattccttggactatcttgagcaacatccactcttgggaatactgtccttgattgtgcagtgacaatcagatcccctcaaagtctcaagctcttgtcctggtcagtaagtccctgctgaagagctccatgcatgtcacatgagtgggctgaaacgaggatcaggagttcagtcacatggcccccatacagccatccactatgggccctgatgggacaagagtcagtggagagtgatatgttgcgcaaaggctaccttggaatttgagaaaagcaagatatggagatttcaggaggagcaaaagtgtcataggctgagtcacccaaaagcagcaagaagaaacaagaagtctgtgggaaagtctccactcctggcagaagacaagcctcgtgacccaaacaggtgtttccagtgactgatgctggtctttgtccaaaaatgaatgagcattaacaataattttgtaacatatgcaaaatgctccatcgtcatgtttcacaaccagcttagagtttgcggggaggaaggtgcattagttaaagttgtgtaactatgacaaacctctcacctttgcagggttgtttccagatgatgacacactctgggtttcagcctcacacactatcttccacacagggctgtgcctggacctcaagagtcactttctgaagggcaggcctgctctgattaaaatctttccagggcttttattggtcaaagagcaaacttcttaatgtagcctctacctgctcacatttcccaggtcataacactctactcccctcttcctcccctactggtctgcccttgcactgcctggctttcggttcccccctcagggccttggcacagctgttctctccgcctacagggctcttccttcctccagcctcagggctcagcttaaatgtcacaccctcagagaagccctcctggcctcctgaccccatcagggtcttccctcgtcttctctctcatggtgcccaggtttttcacatcatggcatgcattgtaacatcttattatctctgagcttgtgtgtttccttgtctaaagttgtctctccaccaggctgccacataggggcagggggcacctccgtgtgtctgtgctgcctggaacaggattgtcatgtagcagcagatgctcataaatcattgctgaatgcgacgtatgatactctaatggactccagagaccaagttctttttttttttttttttttttttttgagacagggtctcgttctgtcacccaggctggagtgcagtggcacaatttcagctcactgcagcctcaatcccccaggctcaagtaatctaatcttcctacctcagcttcccaagtaggtgggaccacaggtgcatgtcaccatgcctggctaatttttgtgttttttttgtagagacaggattccaccatgttgctccggctggtcttgaattccagggccc

SEQ ID NO: 40343 - DNA, 892 bp, Homo sapiens
aggagttaccaaataactcagtaatcaagctaaataacattcaatgcaatattttgaaaaatcaaaaattaatgaagaaaaatccatgatgaacaaagtaacaaagtaaagacacgatctgcccctgaacttgtacttgaccctgtctcattaacctcaccctaatcttgcccttggaatttgcagatttgtgaaaccacacccagtgggcacagctggcggccaaagcctgtcggtgcctattcaaaggatgacatgggcgaaaacatcgccctcttctgtctggcaatgagcactgctcctcttctggggagccaggttaatctttgcccctgaaggcagcatctcagtgctagaagtcttttcccagaccacagtgcttttctccttgatcccttcatgagacatgtgggtaaaaaggttgcaggcagttcaaacgatgccattggagaccccgcctcatcccttgccactggccgctgcactgccctggatccatagcctttttcagtaccacccatgccaacgcgccaggacttgtcaccacgtgggtggcagatctgaagcagcctgtaactatcaagttggcctttccaggctgaccacaagggtgcatggtgaggacacaggaccgagaggcaaagggcttctcacagcgcctgacgtgggaaccagcagggagctggctgctggccgaactaccgtttcttattcttcctttaatggtttttgtcacttcctagcttcctcttatttatatatactttactttttattttgaaataatttcaaatgtgcataaaagttgcagaaatagcacaaagaactcttaaataccctcaacccacatttaccaaggaacgttttgccacatttgttttgtcactacttt

SEQ ID NO: 40344 - DNA, 873 bp, Homo sapiens
aaggtgggatggtgaaatttcaccataatgtttttggcgtattccaaattattgaagcagttttgaatctcaattttcttcctagctttgtttaatttaaaatttaatgagaagtctgaatttgtgttcatctcaattaaaaaaaaatttcaaggagagagaactacagcattttattagaaaattgcttccaggcaggacatggtggctcagggctgtaatcccagtactttgggaagctgagggaggaggatggcttgaggccagcagctcaagaccagcctgggcaacataatgagatgaaagaaagagagaaagagagagaaagagaggaaggaaggaaggaaggaaggaaggaaggaaggaaggaaggaaggaaggaaaaaaaattgctttcagtctcattttgtcagattaaacaaaattgggccactgttgtttaaccttctatgacttcaccaaactgatatttcgaagtctaaattacttcatcttctccataaacagattataaaatgctttgtccaaagcctactacagtcaagattctgtatgcaatttcctgcaacagtctccaggtctatttatgctagtaactgtgaaatattattcctttggtgtgatcattcacagggaacccaaatgagctcttgtacttaacctcttttgttttagtttaataatcaggtgcagaactttgctaaaaatcaacaccatacctcttggtctcgagatctgtttatcagtctttctcctttatttgaaatgggactctcactcgttaaaatcttctagcataatttatcaaagatcactgaatatgtttcttaagatcagatctaaatatccttttagtatcttgggcagtaattt

SEQ ID NO: 40345 - DNA, 2134 bp, Homo sapiens
ggtgtagtaaatatctgttaaatgaacgaatacatgttttgatgaaagaagcccacagtgcagtgtgagcccaaaggggtcttactgaaggcttcctggaggaagtggcagctaaactgagacatggaaaacacggaagagtagccaggccaagctggggtttaactgtccctaaaagaaagaaacgaccatagcaggggtttaaccagaggtggccgaaggcctttccaggtgcccatttctcccgtatagctttggagtcagacgatcctcggttggaattcccagttcagtccttacagtctgacgtcccgcacaacccgacgccggcaactgtctccaaacacccgagagccagggcgggagcatgagcgcctacggtgttccttggggtggagccctcgcagtgtccagaggatttgggggctcctgcgcccccatttctcccatttcctggactatccagggcaagcccctcacctccctgagcctcggtgtcttctgagaaaagaagtcgaccccagtgcctacctcataggattacgtgagacaaccgatgtcaagcagtgttgctttgctgcctgagaacccctgcctgtccctttctctctgatgcccttcggggcagagatccagagatcctgcctgagtcactttggcgggtttaatgcccagccgcgccaggcacacagtaggtgctcagtaagtgaaacagtgccgggaagaattcgggccggggatgtggaactgtgtgtggctctgcgggctcagaggccctccccgcgccccgccaccgtgtgcgttccggggcggggcggggcgggggcgggggcgggggcgggggcgggaccgggcgctcgggctccgcccccggtacctctgtaggcgatcctgctctcgccgtggctttcgggtgctaggagacagttgccggcgttgggttgtgcgagacgctaactgtaccctccgggtttaacgctgtgaggcagcgcgcggaggaactggggataagcgccccggagcccccaaacagagcgcggccgctgggggacagcgcgcggcgccgggtcggggcggggcggcttttctgtcggaggacgcgaaccggcacgctgcgcctttaaggagtccagctgggctgggcgccggagctgggagcggcgcgggtaggagcccggcggcaggtcccagcccggggctagagaccgagggccggggtccgggcccggcggcgggacccaggcggttgaggctggtcaggtgagcggaggcgggcgggcgggcggtggtgcgctcctagggggatggggcgccctgatggccccgtgacctctcccccagtgtctccctgcagcggcgcatcgagtggaaagagtcggcgatctgcacttgcctttccactccgctccccgcgcgggcgctgcccccacctcccgctgcctggataggtttgagatgcccgaaacccggcgccccatttcctgggtccagccagcctcttgaagccgggggacagagtgaggacgggtcgggacctgcaccctctttctacttcgcctccccaccccctgcgcccgcagcagcccttaggcgcccctcgcagtgccgagaggattttggggtcctgcagccctgtttcccccatttcctggagaaggactgcagctcgcccacccagatagcatcttgctccgtgtcacgcgccgcctccgcgccgtccccaagatctcgctccgctactcccctcccccagcagcctttcagcttccctttccccagcctgccccggctcccgtgcccttgcgccccttccgtgtcgaaacacttgaatcaggatgctgtccagccaggtacccgccggcaacttgcggtcccccgcctacagcgacacaggtttcacggctgccttagaaatgcggattgtgtaacgccggctgcagggcagtgcacgtgcagggtttgcgcccctgagcccacagcgaggccaggtgacagagtgaggcatgggggagtgggggaagaggaggatgccagagggtctagatactgtgcatgcagagaatatgtattttgagccctttgtatgccccaggagctgggtggttaggaagaggaaataaagtgggggtcttac

SEQ ID NO: 40346 - DNA, 755 bp, Homo sapiens
ggatgggtttggggtctgtcatgagcttctgtgcggctctctggtgctgtaccaaggaaactgctgattcaggggagcaggacagcactcaggaggtgtgggcagaggttcttacactgctgcaggttgggatcctcttctttttaagtaatatattaacagcagcctttgctcttaggcatttttccagaagctgtggctgtttggctgttggcattgggtgtttgccttgtgatatacccagaaaaggattcatacgttacatatgatgaagtctggggatgggactggattctgagagtataaagatggcaatgcagaccctgcccagagactactcaggcatctcaataggcctgagcagtggccatgcagggtggtggaggtatggcagggctgcctaactctgcctgtgaagtcaggcaagatcccagcagtgcagagtgaatgcttagtatctgcctgtcactgctttgaacagtttccttgcatcatcccatttcatccccacactgaggtagaattctaagaggttaggtcacttgctacagtcacatggcaagcatgtgaccagagcagagtcacagtggtcaatggcagagcagagatttgaacccaggttgttgagctgcaaaactgaactgtcaggagcatttacagagagcggcagtgctttaatagctaagacttttaggatgggctggagctcgccaggcgagagggagaataggcgtgccggggagagaggagcaggt

SEQ ID NO: 40347 - DNA, 1367 bp, Homo sapiens
aagaaagaaagaacaaaaaaagaaaggcaaaactgtctttgatctccctgcttttcctcttatttaaaagtgcaagtttggccaacaggagaatgttttgggtgctgaggttctattttttccatctgctatatagcacaccaatagagggctattttaattcctttcagccatgtggcaaatagtcacttacatgatgctctttctagcacttcacctttgaggggtgacctggctgatgacagttacatgtactcatgctaattcagtgagaaacgttcaaatcaaagcctgttgtgggctccactagagcctgaagactttgggctccttaaacgtaaagggtcaagtggcttttggctcctgttttatccagcaggagactggcttgtatttctgtagggctgtcttgttttaaacatgatttcaagcaggcggttattccagactatcaccacagcccccatcctgacaaaagaggctgatgttgccaggtcagtgtatgtgtgacatgtttcatcaccttgcttcttggccagcatgatttgttaaaagctgtaccacaggatacacaacccccctgccttccagctgagcctcggactgatctgcctgcctgtccctcctctgcctgtcacttctctagagaatcaggtagcacggctttctggttctctctgatcctccacccacaggaccagcctggctgggctgaattctctttcccacagtgctgcccaggtggccaaagcagggaggggactgtgggctgggctggttctttaatgagaacccccatgaggaaccagttgtcagagttttggtgcaaagcaggagagagtgaaccatctaatcagtacctctcccagaatcacgaaggagataagaatttgtggtttatggatggtcatgtgtttccaggatagaacaataagaacgtttatcatttgaaaaatttaaattcctatcttctaccttagagtactggactttgagtcttaaggactaaagttcctgccatgcaggcataacctttggacagtcatgtgggcagtagtccgccagtcattgaatgttaatagagtgggctgctaggctgcatagtgtggagatggagggagtttcatcctccatccttccagcattcacatttgtatttctttcctcataatgaaaaacagttaatatttggttgccgtctctaatgggcctttttttttttttttgagacagagccttactctgtcacccaggctgcagtgcagtgcactgcaacctccgcctcctgggttaaagggattctagctaggactacaggcatgcaccaccacgcctggctaatttttgtatttttagtagaggtgggg

SEQ ID NO: 40348 - DNA, 1161 bp, Homo sapiens
ctcatctcattctcttgctgctgagcagtttgtagcgcctccctgcttctgcccaacccagttttggagcggtgcagcccccctgacagtaccagtgccatcactctggtaacaatattatcctcacttgcccattggttgctgccttgcttccattcctttctgaacacactgtttaggtaagccctaaccccgatggaggagagctttaactatcgttccatgcttgactacttaccagatttcttctttgacctctgtcaattcttcctagtcctggctcattatctgagacgccctgccctttgtgcacgtttgccttattgcctcactgggggaggtgacctgaacaagaggcatagtataaagccacaagctgtttgtactttgcctgtgctgaggaaaagagtgctccaccttcactgaagccagcaatttggccggctgttagcacttcattcatattccctagtatgagttaattctttgtcattttatttcttgtgattccagaatctcattttcagcttctgccagagccagtagcagttgggaaagaaggctgtgctctttgaagagtgagtatggattttaaccaccatagatttcccccaaaaggcagcctttaattaaactgggactgctgttgtaagccctgcttccaagccctctgcaggccaaagtgtgctgcatgatttttctgatcagtaggtctagtgggaagggatttggcacctgaaggttttcaaagctctgacgcacaccctaaaagccccctgcaaatagttctgaaagactatgtgggggaacctggctctgaatttgaagggagtctggaaggcatgggttcatgggccccagtgctttcctgaaaaggggacacttgaacaggctctgaaggcagggaagagttcatcaggcagccagacgtgggagtgctctacaccaaggggtcagcaggaaggaagacagaatgaagctgtatggggctcgcgagctggttatttggagtgcaggcaaagacgtgggagtcaggactgggaagttgagctgggactacatggggcggtcagagttcacattttatttggtggacatgagaccagcacagcctgatccctggtgtgaattgagaagatttctctggcagctggggtggtg

SEQ ID NO: 40349 - DNA, 1629 bp, Homo sapiens
tgtatttataatatataatagataaaaatcatattttttctctcctctatctccccctctctctgttttttttttttttttttttttttgagacagtctgttgctcagactggagtgcagtggtgcaatcatggctcactgcagccttgacttcccaggttcaagcaattcttgtgcctcagccacccaagtagctgagattacaggtgtgtgccaccatgcccagctaattttttgcattttcagtagaggtggagtttcgcaatgttggctaggcaaacttgaatcctgttggctaggatcctgttggcctgagtcccttgaactcctggcctcaagtgatctgcccgcctccacctcccaaagtgctgggaataggcgtgagccaccgcacccggcctctctctccctctccctttggtgctttattggggtatcatttacacatagtaaattgtctaaatttaaatgtgcatctcaatgactttttacgtatgcagttaccatgcaggtcaagatattatgcccattttataaatgggaacgttgaggcacagagaaattacattagtgccaaaaccacagtaggaacagagcccaggctgcctgactccagaacccaagctgtgatgtttggaagtccttgcatatttactgcctcctttttatgactcatatcttctacttcctctgtatgattcaactagaatccagccatgaattgaacatttaatgacttttactgaaacttaactaaattgacctttaaaatccttctgccactctgaaagctaatcattttcgatatgttgaggacattgaaatcgaagagaagacaccaaagggtcttctcctctcttttttcaagtagcatatctgaaataatttgatcttataataataagtttgagaattgaaggaacagcatctatggaaggtttttagattttaaatcacttacaggaagtaaaatctaactggctttttcaagtataggttcatttgctcagagaaaaaattgacatccgaatttcaactggaaatttaaaattaagtttgtatgtgaaaactaaaaagtagaaataaattcaggattatatcctaccaagagttttaaaataaactttctaaaaattttgaaataatttttaatttacagaaaaattgcagagatattatagagcgccccatataacctatactcagtttccccattaatagctcacattaccacagtaaattttttcacaactaagaaaccaacattagtatattactgttaactaaattccaggctttatttggatttcatttagtttttcaactcatgtcctttttctgttctgggatccagtccaggatgtaccacatgacatctaacctaggtttagttttaaagagaggggaaatagataatgtcatctgcttcatggcatcgtgaaagccatacatcatacccatgttagatttaaagggtttgctggacatagatttgcaaagcgtgggtttctgcatcacgaccaatattattgatgctactgcctttcattataaaatctagctcttttctagattttgctgggtgaggtagctcacacctgtaatcccaacactttgggaggctaagag

SEQ ID NO: 40350 - DNA, 1612 bp, Homo sapiens
cgcttgagccctggaggcggaggtagcagtaagccagatcgcgccagtgcactccagcctgggcgacagagtgaaactgtctcaaaaaaacaacgaaaaaattgttgaatgaatgaatgaatgcatgaagaaatggataactatgaagcaccgtccaaggcggaaaaaacccgccctaaaccgcaccccaagcaaattgcacacacggctttcccggagtggacaccagagggcgctgagctcggccgctctcagctccggatcaggattcgcgcctgggtccttaggacgacgccgcgtggtgacgtcatatccgcctgggcgtcacgcttcgtggggcgggacgaggagaagccaaacgtaaagacaccaggagtttctcgggcccagctgtggctgctgccggggagccccaagccttggcgggtccttgcggcgaataggagtctggtcaggcgtcaggctagtccgacgaagagtgggtaggtggaagccttccaaagagcggcggttgtctgggagccgtctcagttggccgcgacccgggcgcatgcgcggggcgggcggtgcgccttgggtagcttgtcctctccgaccccgggcgctgagggcctctgtacggcgccgcgtagggtctcggccgcagaacgtggccgagaggcccgggcgagacttcgggaccgtgtcctgagcgctctccatgcgcccggcgcgaggtgagcgctaaatagtggttgttgaaaaatattgaaagccacccaagtgctcagcagtaaggatattgagctttttaaagtgattgatttagtccaaaaattgtacgtcgcacgcccactgtgcacgacccagtgttttagggccttgggaaacagcagtgaacaagatagcaagattcttggagtggacttttgttggggtggggaggggaagtacagataaagataaacgagttacataattgtcatagaaaaaggcaaatgctacgaagaagaaagcagggacggggcatgggggtggggtgcggtgttagccgagaagggcactgggccaacccgattgagatttgagctaagccaggaagggggcaagggtgtgagtccggtggctgcctggaggaagatctttcccagcatggggaaaagctagagccgaggcccagcggtgggagcgagactggcgcgtgagaaagagctaggctaggcctgtgtggtggcggggattgagcggagggagaatggcaggacatgaagtcagaggtgtagagggagcagtcctgcaggtgaggcagagccttgcaggctgctctaaggactttggccttactctggataaaacgggaaccatagcaagattttgagcagaggaatgatgtagcttgagtagatgttaatagactcactggccgccgtagggatggagaagcgggggagtagggagaatcagatttattactaataggtcagattaggagcatccctgcgcagccactaaaaaaggctgactctaggccgggcgcggtggctcatgcctgtaatcccagcactttgagggggccgaggtcggcggatcacttgacgccaggagttcgagaccagcctgggccaacatggcg

SEQ ID NO: 40351 - DNA, 865 bp, Homo sapiens
cttcctgtgctcatgtgatcctcctacctcagcttcctgagtagctgggatcacaggcatgtgccaccatgcccggctaattttatgactttttgtagagatgggaatctcactatgttgcctaggctggtctcaaactcctgggctcaagcgatctgcctgtcttggcctcccaaagtgctgggattataggcatgagccaccatgcccagctaggccttagccatttcaaatgccaggtggatatcgaggcggtcttggggtttgaaacctggttccccatggatcatggatccagtttaagtccagtgtcctcagaggatcactgacaagacactgatttgggtagataaaaataaatcatgaggcttaccaaaatatttactttaaggggcccacttcccagaagaatttgcagagaaagggaaaggctagactgagagcttatctctggcttcatttcatcaaatacctgatttctcactttcagtttcctttccttagtaaggaaaactagataaggctgttattgtatgacctttgcaactctgaccttcaattctaattccttttctgttctcttcccttccagggagaaaagtatttgaattcctttccgttgaacaacttttctctccctgtacggttcatctgctgatttcctttatttttaatttttattttgttttagagacagtcttgcttggttgcccaagctggaggccagtggcacaatcatgggtcactgccacctcagctgggctcaagagatcctcctacctcagccttctgagtagctaggcctacaggcatgcaccaccacacctggtgactttttaaaaattttgtagagacaggcagggca

SEQ ID NO: 40352 - DNA, 1478 bp, Homo sapiens
gtttggaaatctcgccctgaagattcctggatcccagggctcaggaccaggcgtctctggatctgaggatcctggtagtgatggcttagggtggtgttccctggtccgaagcccggagctaagggcaccgggtctgcggtgcggctgcgaggagcagggaagcgcaggcccatggcagccgcgaggcggaggagcgggccagcgggcggcagtgctggcggcccccacacgttctgcgctgggtcggcgctaggactccggggcggcggccgtgggaagggcggcgctaggaccccgcgggcccggcggcgcgtggggcggcgcgtgttgacagcggcggcggtggaaccgggcgggcggcgggagtcggcgcctcgggttcctacctcgcgtccctaggcggcggcggccgggcgtcccgggatggccttcatggagaagccgccagccggcaaggtgctgctggacgacacggtgccgctgacagcagccatcgaggcgagccagagcctgcagtcccacacggtgcgcggcccagcgggcgggcgggcggcgtggggcggccccgggccgcgagggggctgcgggctgcctggcgcgggccgggcagggtcgtcggacggagaccgggccacagggtgggcggccctggccgagaaggctgtggcgcgccgctgggtctgggtcagggcccctggggcccaggcgaacgctgaggcccggaggggccaaggatggggaccgcagctcccggcgccgcggggtggaaggagctcggcggcgaccaggaaagcgactccgagttggggggcgggggcgggggctgcgggattcccgggctcaccttggactaggggagcaggaacgagaccgctcaggaccatccacttctgcccgccgccagccttttcctttttgaggccgtgtaatttcctccttgcagctgagggtctgggtgatggggatgagggtgtgccgggccaaatgaagtgtgactccagagcctacttgttgggacagcagagtgtaagtggctggggtctgcagccccgtttccaggtcagccgcttggccctggtcccgggaagtggtgggggcggcagtcggggcgctgttaagcaggtgtatgaatgtgcttctctaacttgctctttagtgggcagtggtagcattcatttgagtttaaaatccactcgagtagcataaaggagtaataggtcctcatagtaaacattggcagggttcatttctgctacatatacggtcttttatggggctttaaaaccgtggttgttttcatttgcttgtacctttttttttttttgaaaggcccactatgcattataatttccaagcaataaatctaggaaccagcaagaaacctggagctatcagctagtgggacttttttggaaaagtaatgagtgaggagagagattccttcaattgtgatgttttgtcagtccaccgaatcagat

SEQ ID NO: 40353 - DNA, 2438 bp, Homo sapiens
gtgtttggggggtcatcatctggaggctaaagctcacaatagccttctgtttctcttttcgttcaagctcttctgatgacttcaaagagaccttttattctgttgtattaaagtgagacttttttgaacctcagtttcctcttctgacagccgtgctttgtagggcttgaattgttcaaagcattcacttccagttaagaaaattattatctttttaaaaagggctatttatttcacgctgtgtgtctttaatcctattctgtagacatgtgagaaggcacatacaggacagaatttgttaaacttgctatcatttgtgcctaaagggagtatggcataagggttgaaatttaggatagggagtcaagagtaattcagctattaaatttgatttttgacttgactattggcaagtaagtcttataacctttcagggaatagtgtcgagtcctttaggtttattttgtattgaaaataaagagatagatgtttctaaatactcacaaattactttccctaggaagcattcatgatttctacagccccagcccatgtgcctacccacaccttaatcttgattagtttgtcctgtaattacttctttactttttgtctccaccaggctacaagaggaggggcacttcttcctcacttttgagtctcattccctggtttttgataggatttcaaatgtgtttatcaaatgactaaataatccaacttcaaccttactatgcctctttttctgtttatgtaaaatggtaattgtaaacattgaaaaaataacttagagatcagtgctttagctaggtggcgaaagatgtaataggattctgtttttattgtaagggtgtgtgtgtgtgtgtgtgtgtgtgtgtgtctgtgtgtgtgtgtgtgtgtgtgtgtgtagagacagcgtctcaccatgttgtccaggctggtgtgtgtgtgtgtgtgtgtgtgtgtgtgtgtgtgtgtgtggagacagcgtctcaccatgttgtccaggctggtctggaacgcctgggctcaggccgttctcctgcctcagccccacaaagtgctggtatacagatgtgagccaccacacctggccctgcagatcttttctttaaaaaataaaataatttagggtagaaaatggcagttcttgtagggatgactgaccacaaaagacagtgactcacaggagacccatagaggcagatgtggtagagtaaaaaactgtagcattgtcttgcgtaattttttgactgttctgtgttcttgtcattttagctgtaaagtttgactgagaaatgttgcatcagccctgaagtttattgagaaaatcttacgctgatgcaaactttttggactgttagtgtcttatgagtaagtcttttttaaaacaggaactgttggaaattattttggaaagaagtagttgttaagaggggtatgtagaagagaaaggcactgttttttcttggggagattgaagttggctttccagcttggtagctgaagggagatggtgttccagaagtcagagctctactctcgctttgaaatgctgaatctctaggaagttactccttggctgtagacagaaacatacggagttagagacagacttggggttggaagaggcaagaccttaatacaggtctgagctgatacttgctagtcatgtgatataggctgggcaagtcacttaaacctttttgaagtttagttttgtcatctgtaaatgggagtaataaatgcctgccctgcctgcctcccaaggttgttaggaagatcaaatgaaatcatcttgatgaagtatttgtaaaatgtattccttcctccctccatctcttcactccctgacaacatttgtgcaaagcgttaaacacattagagggcgttattgcaagcaagctcatttctgtccatagttcctttcatttatcaagtttgtttaaccttgggaaacatatatatatatatatatatatatatatatatattttttttttttttttttaataccaatggggttcttgctgtgttgcccaggctggtcttgaactcctgacctcaagtgatcctcccacctcagcctcccaaagtgctgggattataggtgtgaaccactgcacccagctgggaaaccacctataacagaaatgatttaggatttgtgaacttggtagggaaaaattctgtggtttggaaaactgagtcaccagaaggatgaagggaacacaaggtcaccaccagaaaggcatatttggatgagcaactggcagaaaggacatgtgttggtaggtgattctgtgctttgctgatgctgatgcatcatttttatggagcaaaatgaatttagcattaagagctagaccagccctctgctgcaaggaaatgaagcttctataaaatcagaaaggctagtatttagggggaggatgctt

SEQ ID NO: 40354 - DNA, 728 bp, Homo sapiens
tccttttaagtttctttatgttcgagttactttggaaatactaaaaacactttatattaacatgaattatagaagaagtacaaagttcccagtgttgataatgaaagtctgtgtgtttctgctgcacccagatcttccagatggtttgtcacactctggggtagttagaacaaatgtgaatggagccagttttgtatttggtcatcacatatcacatcacatgttttcttctgagtagatgccaatgacactttacatattgagtcagtaaacaaatagctagtaaattgttttcttccctgatctcttaactcaaaatgtactataaaatatatccaaatgatattgtttgccaagctcttgacatgtgaattctaaacaaggtcattttgacatatggagagcatttctactgaatccctcatgcctcaccagtctgcttggaatgtaattaatgctaggcagaactgaaattccacagtgcatttggaggattgctgtttgctttcagggatctggaatggcttcatttactcactgcaatgaggggaaatggcaaattacagatgttgctttttacaggaaatgtaaaagcacagctattttcataatttcttaatgcaaagaactttaaagaacttcctttctcattgtcttcttaaaagggggaaacattttcatgataaatgaacagaaaaagaggatggatttttttttcccagtaaaca

SEQ ID NO: 40355 - DNA, 3119 bp, Homo sapiens
tcgggctgagcgaggtggctcatgcctgtaatcctagcactttgggaggccaaggcaggcagatcacttgaggccaggagttcaagaccagcctgggcaatatggtgagaccctgtctgtactaaaaatacaaaaattagcccggtgtggtggcaccggcatctaatcacagctactcaggagtgtgaggcgcgagaatcccttgagcccaggaggtggaggttgcagtgagctgagatcgcgccactgcactccaacctgggtgacagagggagactatctcaaaaaaatatacatatatatattattcagccttaggaaagaatcaaactctgacgcatgctacaacatggatgaaccttgaggacattacgctgagataagccagacacaaaaggacaaatgatgccacttataagaagttctagaataggcaacctcataaagacagaaaagtacaacaggggttaccaggggtttggggaagggaaatgaggagttaccgagtaatggacagtttctgcttgggatgattaaaaagttctggaaatggatggtggttaatggttgtacaacatggtgaatgtacttaatgccactgaattatacacttctaaaaagtacattttaagttaggtctattttgctgcaatttaaagaaaaaaacatggagtgagggaggaaacgcctagtcttagttttcccccattgcccagccagctgtgaggtggtgactcgccggtgtgctaattgccaggcggcgacagaggcagcaggagctccacggaggatgctggctccgcaaacccaaggcccacggcgccggaaggccacagcgcaggcgcgactccggcctccttcccgagagaaggggggaccctccccgccctcgtccgacgagcacccgcgcctgttacctgcagcgcagccggcgcggtccagtgaaagcgcctcttcagcagcccggagacctggcagggagagaggaagatgacggcgggacgcagggtgggcaggggtcgcgtgggaatacaggccgcgcgctgctgcctacctcccgaaggggtctccgcaccaagccagacaccgccgccatcttggtcgtgtcctctatccgctgccaaacgacaacagaggggccggcagacgtgagcaggccccgcctccaccggcgcgggccaatggcaaggcgcgccggctgcgtgacccgcccacccgcccaccgggtgaggggccgcggggccgggctgaggtggcgtgtgggtggccgtgcccctctgcctggagccgcctcaaatcaactttattgacagtaggcggtgaccgacaggcggggtgcacgctgggcacacgtgcctggtcggtgttacttgaagcgtggggactagaagtcagaccctgaggagcatgatctctggaagctggagagaccttaagagttaggccaacctgttgtgggtgctggaatcctttgggcaccaagaagtgcttgcacacgctctactgatggggaacttaacacttcatgagtgagtctagtcttccctggacagtgctgtctgttgattccttataatgcacatcatagctttcattgattgcattaagcacctactgtgagccaagcattgagatatgtgctgtatagctcattctcacagtaccccacttgggtaattagtgttattattatctccattttgaagacggttaaactgaagcagaaattgattaaatgagccgatattttaatttaggactgtcttgactctaaagcatggtctttttcccactgcttcctaaagcagaagtggattcctgcttgggggaaggttacaacaactttagagaagggcggccctatggatgtagcaggacaagccgcagacgaaactcctcagacaccgagttaaagaaggaaggggtttattcggccaggggcatgggcaagactcttgtctcaagagccgagctccctgaatgggcaattcctgtcccttttaagggctcacagctctaaggaggtgtgcgtgagagggtcatgattgattgagcaagcagggggtatgtgactaggggctgcaagcaccggtaattagactggaacaggatagggattttcacagtgcttttctatacaatgtctgtaatctatagttaacataaccgattaggtcggggtcgatctttaccaggcccagggtgtggcaccaggctgtctgtttgtggatttcatttctgccttttagtttttactttttctttctttggaggcagaaattgggcataagacaatatgaggggtggtctcctcccttatggggaggtgccaaacacttggccatagggacaacctctggaagctcattagtcttaatttggcccttgggggtcagatgggacaattgagcacccagtctccacccatccccaagacattccaaacattcccttctatggatcacagctgcaggctgccaaattaggaatttgcaacttccagtaggttgctgactgggaatgggagggggtggaggcaaaggcagaacaggcggatgctgggaagtctgtggcagcaacagaggcagactaggaggcaacttccagatggagaggagggggacagttttgagatctatttgggctagaatcaataggaatgctgtaagtgctagggaagagcagaggaaaattttggatttttgtcattgctggatggatagatggggtaagggaggagcctggggcagtgtaagtgccaggagctggggaagtaagagtgtatttttgtttattttttgagatggagtttcactctgtcacccaggctgaagtgcagtgggcctcactgcaacctctgcctcccaggttcaagctattcccctgcttcagcctcccgagtagctgggattacaggcacctgccaccatgcccggctaattttttttatttttagtagagatgagttttcactatgttgaccaggctgatgttgaactcttgacctcaagtgatccacccgcctcagcctcccaaagtgctgggattacaggcatgagccactgcagccagcctttattctttagatgactgggacatacccaggttgcctggagcct

SEQ ID NO: 40356 - DNA, 486 bp, Homo sapiens
tagtttcctgctcctactgatactcagtttatatgggcatgcacgcatgcgtacacacgcaggcacacacatgggtccatttggttacttctggtaccttattgatagaatttcatttttgaaagctttagaggcgtagctttttagaaaagggaattcctaaaggtggatccccacattcgctttcccaggggaaggtgactattttgttgcccaggctcacccctagaggtcgcctcttcgcttgactggcagctgctagggcagaaggtgcacaaaccacggtcggggctgctcccatgtgactcatgagatgcgcagccttccaaaagtattcacacttatgttttctggccttagccacgtttcttgtgggttgcaatactcagacacagaacccacattttggctttgcagaggcaaaaagctgacagagggacaggttgtccagaaagcttcgcccacacactgtactgtaaacttcca

SEQ ID NO: 40357 - DNA, 1895 bp, Homo sapiens
ccagccccaacctttgtcctctttggtaggagggggtacggataccttttgtcttcgtaatctatgtcctgcttttaggcaagtagaggaagggcagagagctttcctgcatctgcatcttctcaattgccttcagctcaacagtgcttataacaaagaggcgtatttagggggtcgtattctgatctcccacagacgttgcaggtggagtgtcctgatggcagggtgtggatcacatctctgctctcaggaggtggggagaggggatctggggcctcctcgacttccataggggaggttgggcctgcactgtccaccatgacccatacaaccacagacagaagttccttggtagtaaccagcatgtgttcattacagtgaatgaaaagaccagagcaggtagcatggatctcagccgcagctcatggaccacccagcgctgggaattgcagaggttccctaacctttcctaagcctgagtttactcatgcagaaaatgccagggtggacttggagggtagctacaggccctgtgagcactaagatttcctgagacttcgctgctgtccatgcccctcccctgttttgacctttccaacagactggaggctagaatgaagataaggagtaccatttttttgttaggcactgggagacggcccagactttgatatagcaaaggttaatgttctgtcatctcaaagatccatttccccaggctgtcggaatgtaaatgttaaggtgatgaaaatagtgaagcctaggttccggctcatttgagtcagagcccctcacccctcacagtgcaaccctggtgcacagggcctcctctgtggcctgaaccttcataaacttgggtttaggttgtcagcactgatttaaagagatttgctttgttcagtttgcttctgggaaagaactgacattcacagcagggtttgggggttaagaatgaaacctgagctggcttcttccccactgggtgtgtgcagagtgagtcagatgtttgcacagaaggctgtggtgtcaaatcaaatccacaaatttgcaggccttatgcctttaccacttcaaaccggaaaggtgttgcaacataacagttttaattgctaaaccctagctgcaaacccaaatctctggatttaataagaattgggtgtgaaagactgtgaacagtggcagttttctgccaggtgagtttatttgttccttcattccctcatttgcttcctcgttggtgcccaagcccacaccaaaggcctctggccagtcactgcctgcgcgccctcctcctgatgatggacctgtggtctcgcctgtaggtttaccttctttcctgctcttggttgagatttgcggacctttgtatccactgtggtctccttggaacaagcaactggaaattcttcacaccagctatggctggtaggaatttcgggccacaactcaggtagacaaaaaataaagctttcttttctagaacttgactctgggttcaggtctttgctgtgccagactggtataaaacctctaaccatggtctttgccgggcacatacccacttccccagcaacacgtattcactgagttgcccaccatccttggggctgaagtaaggccatgattagggagggaaatgaatctggctctgtgtcattggtccacatagttggtcaagggatctgttggtcttgctaagtggccccttttgcttcagggtcctctgctgctttcctgccattctggggccctttctgaagttaccgtaatggctggttgtaccttccacaggcttccagactctggacggtattcccagagtcagctcccttctgaattgggagaaagagagaaaggaaaatacaagaagacccaaccatgtggattaacaccct

SEQ ID NO: 40358 - DNA, 827 bp, Homo sapiens
gttaggccatttgaggccctttcattttaccaggtgtcaagacagcacataatattgaactttaattttaggtcttacatacacaggcagggatggatgtgggctacatatgcacaatctcccttcctgcattccttcatccatccattcgtccatccatctatccaaccatccatctatccatccatccatacatccacccacccaccaacccacctatctattctgtagagattccacaaatgattgattgaggcagcctaaacattctgactacatctcttgtttttcatgagtcctggtcatagctgtttgtgggtagtcaacattggaatcagcccttctgacctgtggccaactcttcacccttttcaactctgcactagtccataggtcagctcattgaccctagcatatgcttttctctgttctgcttctgattttgctggaaccatcgctttcttctttgcctgtctaaattctacccttccttgagccaaatccctcatcatccatacacactttcactccccgtcctgaattctgaatcttcttgtcagcccaaagcctttgtgacagctgctgtatgcaaacacataaccatgcactactgtgtgtcactgcatctcctggggattgatctttcctgttttgctgccatttctcattttattgctatgttttctctccaacctcatcgtgaactctctgagggtcagggctctatcctgcacacccctgcacccccttcattgcatgggagtggggaagggacagcacagcaccttcttatgctcctaaacctccatagacattttctgacttaa

SEQ ID NO: 40359 - DNA, 2018 bp, Homo sapiens
tatttgggacatacttatatgaaaaaaatattcgttgtttatctgaaattcaaatttaacagagcatcctgtattttcatttgctaaatctggcaaaccaagttgctgatgaataaactggagttagctgcatgaattgggggaagaaagggaagggcatgcctgagagggaacagcatgagtgaacatctggaggtcagagatcccgtaattcatctaaggaaacgaacattgtccacatgctggagtatggagtgcaagagggcgggaggcagtgcagagtatgcaccaaaccatcacatagctgttgagtacatgctaagtgccgggtaccaggtgaagttctagggtgcagttatgagctaatgggacacagcctctgccctcaggaagctcacagtccagctgagaagcagcaaggtggagagagggaaggacaggcactgtggaagttatagctgggggaactcagcctccctgggaggtcagggaagacctccctgaggaggtgacaatatgctgaaggatgaggagacaggtatgctaaggggtggggaaagagagatctaggtcaagggaaccgcataacggaaggccctgaagtgagaaaatgagcagtgggtcccaggacctaaaatgtggccagagaggctgggcccagagagagaggagaggggaggaggaaggaccagtgggcagggatcagaccacactgcagggagtttcaactggaccctgaaggcaatgggtgccactgaaggagtataaagcaggcagggtgacacacagcttcgtgctcttagagctgactcatgctggagagaggacgacggatgggcagtgtagggtcagggcggagggaacggggaacaccaggagggggctactgcagaggtccgagatggacacattgctggcttggtggtggagatgaagagggagaaggagaaatggatccaggctgcactgagggggaagacttggcagggctgggttctctggcactgggaagtgagggggagggaggagcaggcatgactcaaagcttctggtctgggcagatgggaggacggaggcgccatttgccgagctgagctggggacttgggaggtttgggggtggtgaggagagttcagatttgcacatgctgagggtgaggaggctggcggtagaccctggttcgatgggctgtgaggaggaggaaactgcagggagccggcagaaccatgttccagtctctcctgccacacttagtcacgtggcctggatcaataacttcacctctctgtgcctttgccttctcacgtatcccgtgggaggtgggggtattctgccctcagagctgtcgtgagggtgtggtggcagcctcctggttcacgccttgttgtgccctcccacactgtagtagggttgatctgtgggaccataatcatatgtgtgtcgcttttgaggctgggttataaaagacattgtggcttctatcttgctctctcttgggtcacttgctctgggggacgtcagctaccatgttgtcaggagagactctcatgacaaggaatgaatgccttatgctgaacgccacatgagtgagtttggaagggaagtctccaggcttcagatgagtgcagctcctgccgccaattagactgcaagctcctgcgggaccctgagctgcttccaagttcctgagccacagaaacagaggggaaagcacttggaagccgttttaagtccctaccttttgggattatttgttatgtggcaaaaggtaactgatacagtgggtaaaagcacctagcacagtaccttgtacagaattggggctatagaacagacaagatctatagctctggattcaggatagagggctgggctggagacagggatttggaagcctttggctcagacacagtaaaggaatccatggaggtggctgaaccattccatggagaggggtacatggagaggaggggattgtgttgaacaggaacttgagcttaagtgtcggggtaaagcaa

SEQ ID NO: 40360 - DNA, 1489 bp, Homo sapiens
gggcccatacaagttcgtgaaatgactaaggagaaacagctgtggaggcaccacccctgaggacgcagtgggcctggggttgggcggaccccaggctgcgggcggaggcgggacgtaggggcggggtttcggggcttcggagcggagcctaaggggcgggactggggcttcggggcggggcttcggggctgcggtcgtgtggtcttgaccgcgcggctccgactgcgctggctgagttcctcaggccgcccgctctctggcttccagcccgcgctgccgttagggggcgcccgcgctcgtggcgccgcggctctgctgggaaggcgccgcccgcgccgggcagctggagccgcaactccgggcgcgggctcagtcgtcccctctgccgccgccgccgccgccgtcgccgggcgcgggctcgcttgtccccgcgctcgcgctctccggccgcgggcatctcccggcccggccgcagcagccgccgccgccgcgcagtgagtggggctggcgcggggcttgcggggccggggtttgggagggccgggtttcaggagacgtctgcgccgagcggccaggggagcggggctgaggaggatctgggcgggggctcctggaacggggcggcggcggggccgcgttgaggggaccgcgcgtcccgggctggcacgagccagcagcggaggtgcccgcggcggggcctgggcgggggttccggggcccgcccggcggggatgcgcggtttctgcgggcccgggttcggagccccgcggcgcgcccctcgtccgggcccggagcatcgcccgccctacccctggccgggtcgggttgcgggggcttcgctggcggggcagcagcgaagggcggcccggacggagatatttggggtgtgctcgaaaatgattgtttttgggagatggcgcttattagccaccaattgccctagtttaaagcttgaggcaggactcaaaaccctgcctttgggattttctgccctgaagagactctcagatcgcagctgagttctttatgcctagatttgtgtgtgtgtggtggcgtttttaatgcttgatgtcagaggtgataaatggccatggtaatggggagccctggcagcacctgctgggctgacagtggtggaggctgtgtctgggggtgggacggggaaatgaaacgtgacagagatcctgtttggatattctgccgaagttaccatgtttctgttcaagtataccagttctagaacaagttgatggatccaattttaggactttgtgatagaagaggtttgggtggcaaagtgacctgggatgacccggctcggctaagaatatttggggtagcctaagtatctcttctatatccccctggcatgttctttttttcgctgtcacaaatgccctattacttgaatcatcctgggataggagagaagcttggggacagcatgtagcacagtcctgagcccaagattgagatgttttcaaatgaa

SEQ ID NO: 40361 - DNA, 926 bp, Homo sapiens
ctgggcagtgacccgatccgctttctcacttggaaagaacttgtgtttcctagggggccctcacacaggtgctgacaactccactttgccattcagacatggtgtgctcacagccatgctgggcttgcagcatttggctgtggaaggtgagcagatgtgctgtgttgcctctgctggctccagtagcctttgttgctcagactgggtccagcttggcagaactgcggacccgcactccttttcctgtcctaatctgagagccacatcctcaaatgctcaaggctctgagttgaggagtggagtgatggagagctgcccaggggcctgggccttaaaaagcaggatgaggatcagagacagaggtgacctctacactttggggaagggctgagctgaaccttggccccacgctctgagcacagtgaacattatttacattgtgtgtgttggtttaaatcttgcctcctgtctaatttgggggtgggggtgctagctgcctctctaagttttacttatttaatctttattagaatcctacaaagtaggtactgttattagctctatcttgcagacgaagagactgaggctctgaaagattaagttttttgcccaaggtcatggctaggaagtggtagcagtgagatccacaccagggctgtattcctaaccctgtgtggccaaagccacaggagactgaggctggattataatgaggccagcatttgttcccatggtcctggagactgacatctcttctggtcagagtctgaattataggaccacggcctgacagagcctaaagggctcttccatgcccctttgtctacagacagggaagttaaagcccagagagggaaggggctgcttgaggtcacacagagctgggaccagaatttagcccgtggctcccccttgtctactcttct

SEQ ID NO: 40362 - DNA, 1534 bp, Homo sapiens
tgggcagaagtgtacctgctctgggattccatagcagcctgtatttccctgtcatggtgcttccttgattgtagccgtgcatgggcagtggcttcactgttgagcacccaggtcagtgcccagggcagagtgggtgctcaaatatttgccgaccgactgtgaattatgcagaaacacaaaacgagtggaaatggaatcagacatccaaggattgcctgtggggctaaggggagacttgacctgcttttctatctgggaggaaatatttgaacaacctgaagcaaatccaataacactgcctcattaccttttcccctaagagctgccagcaagattgctttggagttaagtcctttaattaaaataccctggactaaagccttggaagtgaaatgagggcagccgccactgaagcagagttggggaataatggcagagcccggattttcccagcagggtagcctgcctgggaagcaaaatggatccctttcagcttcagctggcaggcgctcaccttagcagcctggaggtgtatgacagtggtctggttccaagcctcgtgctggtcagctccggattgcgtcagggtctgtaaatgctgcactgagtcctttatgagcctgaaagccaaagcaaaaaaggttcagcttcctgactgagtggaaaagacaactgatgggcttcctgtggtccctcagaagtagaaataatgcctgtttattgaccacttatgtgccataaagctaaatgattgatatttattatctttttaactcttttaagggcaggcaccccccagtttgcaatggggaaaactgagtcccagagaggttaaccaatttgtccagggtcacacagctagtaaggagtggagccaggattttgacttgttgttaatcgccatgttataaagcctcagggccacaggccaggagctgtcccctatttctaatgcagattccagcctcacaccagtatgttcaggcctttttgttgactgacgtcctgtggcctgagcaaggagaatggtttttctgtaaaggctagagaggcccgtcggtcacctagcctgctgcaggttctacccaagggacctaaaaacaaaaagagaaaaccaacctttgtcctgcaaaccactaaattagtcattaaataacctttaatcccctcttattttctattccctgcccatccatccatgacccttagaatttgtgtgtaaagcaaactgtttattaagcaatatgttttttgctttgtcagggaatagataagcagatgtcacactgagtttcaagcaaggagaaataccatgacactttaatcacctcgagcagccttatcttcccctcctcaaatctcccaattgaaatgttagctctatgagtttggggtgtttatcaggcctatttactgataggtccctaatgcctagaacagtgcctgccatattataggcagttaataaatatttttggaataaataaatgaatgttccaagttgcttgtgatcttgaaataactattaaccatc

SEQ ID NO: 40363 - DNA, 547 bp, Homo sapiens
ccctgcggcacatctcagctccctgggtgcagaattctgacatcatggccttcatgcccgtgctcagtgcgtggagctgtgagaacatggaggggggttgggcggtgttagggggcctccaccatagggaccaaccctgtgcaccacttactgagcatctactcatgcccagctcagctctgaggtaagaagtgtttcctctgctcacaactttatgaatgagaaggcgggtactcagcttatgtgactcacccagaggcacacaattaggcaatgtagctgtaggggcataagagtgaaggaaaacctggcctggccagtgtctccaggattgggaagagggtgctgcctggattgggcccacaaacctccaggagttacggattttgctggcctgggttttagaaagctagcttatgaggatgggtgtccactgtaagcccacttactgggttgtaggagggtgacagggtctgaatgtgtccacctaaaattcttatgtagaaatcctaaccctcaagggttagggctaggattaggaggtatt

SEQ ID NO: 40364 - DNA, 914 bp, Homo sapiens
tgatccactcacctcggcatcccaaagtgctgggattataggcatgagccaccgcacccggctcatgtctctctcttatgtctctggtctctgcctgtgtctccctctctctatgtgtctctcatctctgtcactctcctgctttagttgggctcagcatatttgttttaattttttccacacaaggtgtgggtccccaagtgccacagatgtgtccttggaggtgaaattctcaagtttgaggaaggggaaatccctcgttggggcttggtaaatcaccaagcctcagggacgcttgatgtggccgccacctggtggccacagcaggaggtacggcgttggtggcctgatgggggctggtgatgggcgtgagccttcctgggtgtctgcagcaggggcaggcaggcgtattctttccactgtgtcatcacagggcctgtgctctggctggtggcaagctctgccactaactcgggagatgagaggaaccggggttgtgaggagtgcctaggactagaccaagtgtgtgtgtttgtgcgtgtgtgtgtgagtgaggccttgtctctcatggatcgattgtctcctctacttcaaagttcctttggggactttccagccactcactaatgaaatgtttaatatcccacctattttacagagtaagaacctgaggctcaggttggtgaactgacttgcccaaggtcagcagcctagaacagaaaatcaatctgaggtctgttggacctcaaagccagtgctactctgccctccaacattcttctacttggggagagttaaggaaggggggtggatgtatactcacagtctccaggccaccatttggtggcagtcagcgtggggctgtgtatcacaaactcctgggtggctgcgtcataggtggcttcagtctccag

SEQ ID NO: 40365 - DNA, 2607 bp, Homo sapiens
actacagctccactgtggaggattgctgggggcaccttggtctcattaaactgctcataagttctaggatcactcagctccatttctatgagccctgcaggtatattgtggaactgaagggaggaagccttcttcctgcctgtgaagtgttcccctggagcccctgagtgtctttcatacccaggttggaccctgtctccttcatggcaagtgcttggcctctgagaagcccctattcctccacagtgaggcaaccatgaggtgcagtccatcctatttcacaagtctcttgagtccatctgctccttgctatctctttggctagcatccaggccactgttatctcttacttggcctcagtgttcctcttatttgttctcccagctgccaggtgaactcttgaactgcaaatcacattgttttcctctcctgcttggaatctgctccttggggcccactgtttgtggaatggagtccttgctgtgtctacccaaccctactccactcacctctctcctatgtcaacttactgccctcatccctggcctccactcattctcttcctaccctttgcccctgctgttctctctgaacaaagttcagctccctcgttccctgggtgctctagggttagggacaagttcttatttgcttacatgttcctcccacaaggcctgggaggccagctctgcatttcctagcttgcagcaggtatgttgtaaatctctccggcaggctgccatgcttttgatccccttccttcctgacctcaacctgacagatgcactgctgttattaccattttatggagaggatgtgggccttggaaagggaggagactttataagggtcatgcaaccacatgtagcaaatgattcatatgaggctttcaaaccaatacccccagcagggctgtgggggtgctggcaaggggccccatcctctgccccccggagtcctgcaagtgcccctagtgcggctcctctcgtcctgccttacctcttttccttgctctgctgccactgcctccttgctgttctgaatgctccaggcctccctgccactgccagcatttgctagggcatctccatctgcccagaacaccctttcttcaaatgtcactagggctttttgcattgaacctcatttaaccttaaagaggccaccctctttaaaaccccaagccccctcccccggcattccctgtcctcctcactctgctctcctttttctcttttcacttatccccttctgacatttgagatcatttactcatttcatatgtttttgtttacttccatctccctgctactaacacagaaactgcaagagggccgggatctttgtcactgtcatgccgtgaccctaacacttagtgcagggcctgatttgcaggaggtgcccagtgaagaaagccttgctcagggtctctcggagctgcggacagggtcatcatgggggcagccctctcctctggggtctcccagtccctccctgcccaaaaacctggctcacctggctcccctctgtcctgtgtccgcactgtaggccgggctggcctctccccggctgtaggccgcagcctctggcaggcttgtggtcctgcccttctctcctcccacataggggctggaacacagaagctgagagaaactgcttggccagctctcaagcccttgtctgctctcaagcccttgtctgctctcaagcccttgtctgctctcaagcccttgtctgggcttatggagctcctctccttcctccctctcttcctgcatgggtgtgacctttgtgcctgtcgctggggctgccctgggaggacttctgggaggttggagcccttacatctcaaagccagggattcctttgacactacttgtaccaaaaagctgtgtaccccagcagtgtttccaaagtgatatcctggtcttccctgatctttcactgtgtgcccttcaggcactcaagctgttaatatcacacgagcttaataggctcccctgagatggtcctcatgtgaaaggattgctctgtaaggtgtacgtttttcctctctccccatgtttctgctctaaaatatggcttgtcttatgcttagcatcccctgacattccctggaaaaatatttgtgaagcatccatctgtagtgtgtgggatccagatgagagctgggtcttagtgagaggaatgagaggcttagaggttccctccctgcataaccaccttggaaagtcagatgcggctccccattttgcaggtaaggaaacaggctcagggagggatgtcactttgtttgggtttgcacaataagtagattacgtaacacatttgtgtaagactgggaaagaaatcaaggggccagtaggagatcaaggctcctgttctggcaggacttctgagctatgttgactctgagcaggtgtactcctttctgggccttggcctcccctgtaatgcaaggtatttgctcagtaaggagcctcacagcaccccatcatatccccaaggtagtgtctagcttgtgtctgtaggaagaggcaggacctgtggcccaagctttgcaacttatcacctagtaggtccttctggagctgtggggctcagact

SEQ ID NO: 40366 - DNA, 2013 bp, Homo sapiens
ctggctggggaagagcaggtggaaaggcatggagatggggcatgcctggagagggtaggaggccagcacaactgggactgtgtgagcaagtgggagagtgcaggaaggaggtcggaggctaagagggagctggactcgcaggaccacctggaatgcaggagagactccactgggagcccagggagggctctgtgcagagtcgcaagttctgccttagactggaggaagatcattttggctcctctgttgagaacagggtgtagggacaaggccagtaggggagaccagttgggaggagaccactgcagtcatcagatgagggggaggcactgcacctttgttctctactgtgtcccagcctatggcatgcatcctggcatggagcaggaactcgataaatatttgttgaatgatgtgtgctttagtcatgtccaagtaccagttttcagactcatgctaggtaggctatatggggaaggtgcagaaaaacagatcccaggcattgcagctggggatcctgatccaataggcttctgatgggaaagttgaatctggatttttagcacagcctgcaggtaattttggacaggcagggactggccttctgtgtcagttagggatgattttggttgcaagtaacagagactgaccaacaatggtttaaacaaagagggatttattttatttacaagaattctggagaaggatggcggctggtattggcttggtgaaataatgatagggtcaatgactctgtgattctcttggcctttttgtcatggtagcaaagtggctgctgtggctccaggcatcacaccctcaatcaaggtaggaagaagaggcccagggaggtgttagccatgcctgtgtcttttattggaaaagctttcccagaagcccaggtagacttcctcttcaatttcattggccacacctgatcacatagccatcctaagctgcaaaggagactggaacagtgaaaatctggatttacagcctccacagttggagtggctggagatacagagttgggacgacccctgaaaagtgaaccaaggtcgtctgcacggctgccctggagggcgtggtgcttgaggtcccttctacctctggggcttcatggaatgacttgttgcctccatggagcacctctggggaccactgggtgaatccccaggcattcccttggagagccctcgtccatctgagaccctctgtcttgcttctcttcacatgtctgaacaacacatggacccgagggctgcttctttggggaagtggtgatctttattttagggattgtgcatcttcagtgtaaccctcacctggcagacattaaacagcgtaaacacattctcagcacgccagtcacattcaggagcctcttggagcttgacttatacacacgcacacaggcgcaatatctgcatttacagccctgtgctggcagcacacacaggaaaagcacgacttcagtcaccctcaaaccacccagttatgagtaagaccagaacaatccctttcctccgacagtcccacgtttgcttccaggaatcaaagagcatgccagtggcagctatctgtggcagttttgggaaagtgaaaggagatgctattccagcactgctctgtcaccttagatgatgggtttaggaagccagaggcagggatttcaggggaaaagaaacaggcctggtttattctctaattctttaaaaatgggataggagcaaaaggttaaaatatgtgggtctcacacaggaaaggccttctgaagaagaaaaatgggtgaattcactggagttggcccagctaggggttgggtctcaggtgacagaggccggggattcagactcaaaggggccagtccataaaggtggcagtggggtcttcaaaccactgtttctattccagaagcctactgaaaatcattgtatatttgctttccataagactaggaaaaagtaaaaaaaaaaaatttttttttttttttttttttttttggctagaatt

SEQ ID NO: 40367 - DNA, 754 bp, Homo sapiens
tctctacccttctagctgccttggctggtcaggaattaaactgacagcagggagaataacaggagaaaaggtacagacatttatcacatgcatgggggcatcccaggaaagaaaaggaattccccacacccagtaagatttagaagcttgtataccctcttcacaagggagagaggggtggggtgtcagcaccgtagtggagagtaaatgatttctggggaagaggagtgggccctcagcaggacaggtgacgacagcctgtgacaaaggctatctggacgtagtgtggacctttagactcctgtgaaacgagccagtccttccggctgatgagattccctgggcggagattcatggccactgcgtttgctctggacaatctgtctttagacagaaaaggaaaactcggaaagcccctccctgcagttgctgttccccaagtgacctcagttcaaagtctcaaagtggcatattttggggagttacttcggaactccttcacaagcaaatcatttaaaattgagacattctgtgaaagaacccatgaaagtgattccaggagaactttcctcagcaggtggtcagggaaggcctctctgaggaggggtgctttgaggagctgcagtaacaaacaaacacagaccagcagcttcataacacagctgtgaagctaaccactctggagggcaggagcttgatatgggtctcactgggttggaatcacggtgctggcaggcttgcattcctttctgga

SEQ ID NO: 40368 - DNA, 1274 bp, Homo sapiens
agtgcttataatccaattcttaagatcttattagttagcatcttagcaagaatgcaaatgagagaaacacaggctaatgatgaagagaggggtcctgaaagggaagaagaaaggcatcacaaaccaatgtttcctatttacaattatgccctcagctgctgtggcatccacaaatgtctctctagtagccaactctggagtctcttcctgacttaccctctgaaatcttctctttacccacagggctaggtcttctaaaaccatgtttacactaatgagcacaactgaactgaataggggtaaatgcctgatccaaactaacacaatcatattctccctctaggaattttgaaattgcctggtggactagaaatgaagcaaaacacagaaaaacctgagatgaaagatggagagtgcttaaggggaactagtactggcttccatgcccagctgcatcactgccccttgagcttcccgtgacatcccaaaaaacttgcgattgaagctcccgctgtgctttaattcactccagttgatgtggtgaacagaaatgagtccaaatgacactagtcccaccccacaactttcgcaactttactgctaaaaattaactcaagtgccttttggcaaatggaatatacactgctgattctgatattgtaatctttagtgacctatgacatggttccatcaccgagctgaggagaaacaaacaaaacaaaaaaccctacatccattttttggttgttgttggataccagaaaagtctcatacatcctccttacaattttttaaattccaggttaaacagctattactgtttacttgtgagagtatcagttaggactcttttatgtcaaaagttaatagaaaatccaacttgagctagttcacctaaatggaatgctcacattattggaaaccacagaggtagggcaggcttcaggaatgattgattcggcagctcaaagctgtcatcaatgacccaatttctttgtttctccctttctgccatctggtgtcagctctgtcctcatggtcacaggacgggtgccagctacaaacagagtgcagcccagtctagcatcccaaacaagagtcataaaagtcactcaattggcccagcataggtcagattcccattcctaaaagaataatgtggctaaataaatgaaatgcactaattgacctatcaatcaaagcccactccaggggctagagtgtgatccattttactagacacacataggctgcactggccaggggagataccc

SEQ ID NO: 40369 - DNA, 529 bp, Homo sapiens
tttttatcaaacatacagggataacctttacttaaaagtactaagcttctgcttagtactctccagagggccatcagtagtgtaagcaatgtaacagaaataagagatcacaggccttgatcctagaaaattctctagaaatctgactttaccatatttatgggaaaagccagtgaggcaagcagagctctggtctacaaaagcaaagtgagataccaaaatgaggccaacttaaataaaccatcctcaatgaatctctcttgcatcttgcattgattggccccacagtatttttccattgcacaatggcctctgtaaatagagctgagagaacagcaggataagtgaaatcagtctttaaaaaaggtccctaatttatgtcacaaatctcactgaatcagcactgttctcttcaaacacaaagagttacacacatagggcatttttatatgagcatttttagatataaaagagttcttaccctcaaaaaaagaaagttttgtaattcaactttctcacatatagaagc

SEQ ID NO: 40370 - DNA, 1350 bp, Homo sapiens
tcattcactcttctaaatcgcttctgagataccagtgttgcatgaatactgagtctccaaagcgctttgttaaaactcaagatttctgggccctgccctcaagattctgattcaggaggtttcagtggggcttaagatctccattttaggtagaatcacagacaattaattcatcttaagaaacactgagttggagagtgaacaaaagccaaatcatacgcctagacattggtaaatttttccttctctctgggtcaacagcattcacccattaattctgtcttacccctgaaaaagaccttattatggggatagagggtgcactttatcctcaccccgatcacggactacctcacccaagaggagaaaggtatagacaggttggagaaccgtttcgggttacctggtactcatttttgaacattcccgcagggggcccagggcttggggggcacagagttcagggtttccagcgagtggcgtgaccctgacggctggaaatcggctggcgggaacccaggagcccgacgggtgggaaagggcttcgtgcttggcccagacttgggcaggctcttctcagcccctccggcccctggtcagctccatctcccgccctccatcagcaccattgcggctccagcctccgcggtgcccgggtctggggagggcgcagctgcctggacggactccgggccgtccctggggagtgattgtgtgtgtaacctacgtgacggggcgcccagtcgcggagccacagacaaccgcccgctggcctaggaaaagcgggcgcgctcccgctgccgccccaccccagaatcaaaccgcgaaagagcagcgccgagcgccacccgcgttccggccgcgcccattggttcccactgggcgcctgcgcgttgcgctctctaggcttctcgccgacgggcacgggaggatacgcggtgacgtagcgttgcccaggcaaccgcgggactcctggagaaatggtgggcggtccaaacggtgagcagcacgctccttacttaggtcatgacctctgccgactaaaaaggctaaactcagcgtggattagggctataccaggtactggactcttctagagtactgtcacatcggtttggtctctcctcgtggtaaacagataactggtaggttcctgagggatacagtcatggactcatggaaccctcacgcggcctttgcttagaaggttcccaaatttgggttcgttgaggcagtaagagggtctgctggaccctttcattgtttcagaagaccctaggaagccaagatttttttgtagaaaataataacttattgagactagcactggcttaagtgtaactattaagt

SEQ ID NO: 40371 - DNA, 766 bp, Homo sapiens
tcaccttttcttcttttctggacaagagccaattttttccctgctgcttcaaacctcaggaagcacttttatgaggctttggacccgaagtacactttctgggattctctgagacggcggcctacactagaggagcaagtcttccgtcaggacccctgaaaacatgggtcactagaatcactgcaggaagttagtatgtggacatggtggagccgtgacctttgaccctattctctcaatctctgcaccactgaccaacagggatctgcaaacattttgacagctcctgccagtctagggtctgcttagaggatgatacagatctcattccagggaggagctttccaacagtttgtagaactgcctctggtaatttgagaaacagccccttcattctagcatgagccagtcactagcaggagcttcttagtctccgaacaaatacttgtgacatagagcaaacaaagacttgtttgctgtgccacagggcgcttggatcttgccagagcatcactttcaggcctggaaattcccctttcttctccagcctgattgcttttaaaaagctttacattggatcaaccagagttttttgtttcattcataggaagactcttttattctccctgaagcagtttcatggaggctcctgagtgctctggaaaagccatttcttatttcaatatggcagagggaggtgcctcaataagactcttgatggggtttcaagttaaaaaattggaaacaatcttagcttggggtgcta

SEQ ID NO: 40372 - DNA, 711 bp, Homo sapiens
aaaaaaaaaaaaaaaaaaaaaaacaaagaaaaaaaaagaaaagaaagaaaggaaggaaaggaaggaaggaagaaagaaagaaaaaggcagcaagctcctaacacccaccaagagctaactttgtcctcatagaatgcttaagcagccctgcagccaccagctcggccttttgcacaaggccgaactttagacttatagctacaaattagtagtggctgataaccaactagatcactgcaattggtaatctacaattttattttgcaatgactgattgcctcattctataagaagttagtgctattaacttgtgcaataatgacttagcttctgtaaatagttctgtgtttcctaaatgaattacaggcatgggcccaaatattcctgtgttaggaaagagtggaaaattcatgaaaaaatacccaaactgatgaaagtggaacagtttctcttacttaaacttgttcattttcaccattacttatgatgaatgagcaaaaggtaaaaagcaaacaaaacaaaacagcaacaaaaaaatacttttccttaaatgttactatttgatcaatgattcaaagataaaaggttcaagttcctaattggagaaagttgtagagaatcactcaggtacctgaagaatgaaaacaaacacttaaattagctttctgcggcctgtggatatcttaatccttgaaaatcaaaattaactag

SEQ ID NO: 40373 - DNA, 630 bp, Homo sapiens
gggagcgtataggagcaataaatgcaacgaaaagatggtggtggtagtcttgagcgggctttgatgaggacaagtagggaaagggggcaggaatgtgagtgaggactgagctatccccgctgttcattgagagtgaattgaaggatgtcctccaatagcagttgaaagccagggctcatcttgagtaaataaggtttttcaaggggctaccaagaggtgaaagagccactgagataaaatctgactggtgtcagtctcagtaagttcaactgcttgccacagagaggacatactcattcttcctctgctagagtaaactctgctatgtaaacatccaactaagtatatcaggcagccagaagtaaggccaagaaattgtgaaatacccagggtggaagggcctcttcaccctggaagcagtgtgatttcacactaaaatgactcccacacaattcccatccccattttgggactggcaggtccagttaagacagagcccaactggcttttactggctacctccaaaattgtgtacaaaagctcagcagagatcatcacaagcccattcttactcttgaaaatatgccaccttccttcatttagttaaaaaacatgccctaaacacctggt

SEQ ID NO: 40374 - DNA, 997 bp, Homo sapiens
aggcttcagagggcaggaatgagcgatacactgtcatttctccatctctgcgtgaggaaccttaagcactaatgagatcagatatgtcaccgcaactctctccactctgccacagattccaggtcagaatatttttttttttaaacattctggccacttcactgcctacctgcaactctctaccacgttcctgacatataagatttatgataatttaccttaggcagggcttggagttttattccaccaggttatcaaaaatgttgccaataatctctttcatattttcataggacaagattatacaaataatattccaccctattctttccctagagaaacttacatatcgattagacagggaggcctaacaaagattcaagagtcagtttgtcctatgagcgtggaaaacaccactcctgttaaagattacagagtgacgtcacttatgactatgctgtgcaaagtgctgggtttttttttttttttttgtatcctaaggggctttatgcttgtctttgtactattggtgccttgggaaggaaaacaagaatgcatttctcaacatttatgtctgcagcgatactgggaactgtgaatgctaacatatttttaaagagctctgatagagagaaaccaggtggtgaaagaaggtagtgaacaagcctggatacagaaaggtttagagtagaacttacgggcgccacctgctggtcccctgacaccactgcccagagcttccagttcccctaattggagtctcagctttatggccagttggctcagctgaatattattaaatgatttctgtcttcaactatgcttagacacagccttggagacaagtaagtaatgcagagagagtaaaagggagtgagtagatgtcaaagaatggtttgcccattcaacatatgtgtgactgctgtgaaaggtgtatgggagtttcccacatcatctatcagcaaaaagacataaatggtgatcttccttccttttc

SEQ ID NO: 40375 - DNA, 1323 bp, Homo sapiens
attctttaatagccagaaacacaattataggggaggtcagaagatacatctccaaagtcttctaagtgttctctcctgtgccctacaggccaaaatggtttatatatcaaatgaccttggacaagttgtttatcttttgagtttcagttgtctcatttgtatacaggcaattctgttggctctacagtgctgctggcaggataagtgacaaactctttggaaagtccctcacacacagtcagtgtcatttaaggtggctcctcctgtgagattttgcaattagggatatgatcagtcttagtccattttttgtttttgtgaagaaatacctgaggtggtataatttataaagaaaagaggtttatttggctcatgattctgatggctggaaagttcaagattgggtatctgcatctggtgagggcctcaggcttcttcatcatctcatggcagaaggcaaatggaagccattgtatgcacaaatcacatggtgagagaggaagcaagagagagagtaaaagggtggggggatgccaggctctttttaacaaccatctcttctggaaactaatagagtgagaacttgcttaacccaaaggacaggcatcgatctattcatgaaggatctgccctcctgacccaaacacctcccccaggccccacctcccatcattggggatcaagtttcaacatgtggttttgagaagacaaacatccaaaccatagcattccactcctggattcccaaaacccatgtacttctcacatgtgaaatacaattgtttcatctcaatagtcccaaaagtcttaactcatttcaaaatcaactcaaaagtttaaagtccgaagtctcatctgtgacccaaggtaatttctttccagctatgagcctataggatcaaaaataagatgtttgttttcaacatacaatggtttcatgggcactgggtaaacagtcccattccaaaagggagaaattggccaaaagaaagagaaaacaggccctgtgcaagtctgaaacttagccgggcagacatgatatcttaaagctacaaaataatcttctttgcctccatgccctacatcctaggtactgcaaggggtgggctcctaatgcctcaggcagctctgcccctataacttcagtgggtgcagctcaagtagctgctttccttggttggagttgaatgcctgtggcttttccaggttgaggttacacactgctgctgctgctggtggctgtataatttgggagtccctttggtagctccacttccatagctccactaggaaccctgatagagattctgtggtggctgcacc

SEQ ID NO: 40376 - DNA, 1604 bp, Homo sapiens
aagctttggccgaagacagttttgatgagatggctagaaaaactgcttttcttcattggcattttggaaatattgctcagtggtttgggacccatttatttctactgcctctatccatctttgctttatggcttgacttctgctgctttaactccacattctgttttgctccacttcaactgtttagctgccaggtttggtctggtttcactgatttactgtatctaatctcattccctccctggattctgaaccccatcctagaaaaggcacttccagctcacagactcgcatgtttatcgattgaaatttagttcaatcgataaacattttagcatacttgggttcaattccaatagcacagatgttttcagatcatttcagatggtgagacccagaaattttaattatttttccaaacactgctaaaaactgacattaaatttcatccatgaactgaaaacatttttactaggagaaaatcatgatgctgatatatgcaattatgctataaagtattattttattttgttaggtattccatttaatactatagaagtattatgatatttattacataaagcattattataataaaatctcagtaccacccagaaaaattaaaggtttgaccttaactttctccaatttttccctattaatatcaatttgcttttcttgttaagaaaatattaaggtggaaaacttgaaacaggacattctgttctattatttttatgttgagaattgggaaaatacagcttttgttgtatagaatgtggtatgtatgtgatgagtatggaaaatgcatacttccaacggaagcagagagacttgttcaggggccattgcaaaactccactggcaaggcgctatcagcctgcagcaaggttgtagaggcaaaggtaaaagattagagattgatttttagagggtgagctaaaaggacatattggagagctcttaggcagtgtgagggcatattctgacatcttaaatgcctctgcattttaaaatttctgaccagctgtcaattttgtccatcaaaatctcagcctggttatccttgcttataagcagcagattttttgagtgcccccatatgactccaggtttcaaatgtttgctttatcgtatgtcccaaagtccaaatactggagagtcatatggaaatattccaaagatttgcacacagaagtgtgacacataaggtgagaacagccaataaagctgttaggtataagcagttgtgcaaaagaatcagttgtatagccagccctgcaatgcttggaatcaagcagcatggacacaaagtgtctatgtgtacccaaacagggcatagacttcaatgctttttcctttcatgactagtctaaggtttttgaagctcttctcataccttatcacattttacatacctaaaaagaatcaatattttcttgttctttacaacattcttttttgttgttgttattgctattgttgaaggacaatcaattctgatttacataaactcaagggtaacttaaaaagacagttgcagtaactaagattgaagctggcatgcctttcccgagtgaggtgttagacataaaaatggcttt

SEQ ID NO: 40377 - DNA, 598 bp, Homo sapiens
aattagaagtaaaagcaagtttatataatgatatatcacactgctagcaagtaataaagataaacatcctcgcatattatcagcaccaaaaaacagtcaaatttcgctttgcttacagattgcagaaacttctatagtatgaaatggctttttcagataccgcttctgagtttggtggatttttttcccaagaacttgtggttaggataatttgagggattacagtgtagacagtgacattcccttgtatttgagagaagtttgtgcaattcagacatgactgtgtttgcttttagcaaacatactgttcacattttgagaaaaactgctgatgcagtctggtgaaagtgttctagcaatgccaaatcactgacagatgtgctgtctgccaagggatttccctaggaatgttctaattttcttctatctgtttagagaaagttcgtttaaaatctgttaaaatgtattaatgtgcagtgttccattgtatcttgctgtgggcatactagcaaaagaaaagttacaggaagattggtactggggtgcctaccaaaaacttgatcccgccagatcagaaacctgcccaatcctcgatctt

SEQ ID NO: 40378 - DNA, 715 bp, Homo sapiens
cagatttctgaatatttaactaccctattgtaagttgtcttgtttagaagaaatggaatctaagattgtggcagtaaaggacaagctgtcaatgtgttaaataaattcctgttgaaaagtaacggcatgcactgtgtgttaacataatttattagaacaattagaacccatccttgttgtcttttaattagattattccctgttctggtaattacactagacaagggagaataatagtcttgggattctaaaatcatctgtagactatgtggaaagagaataaataatcaataatgctaatgtaccggaaaacttaaattcccagaaagagatcttttatcatgagcaatcctttgtataaacagcattatttctcaatgtctatgcttatcttgcccaaagttgaaaagtgaagacactggacaaataacagatatttattttactgtcagaaacctggttgggctgggccacctctggcctctagtggctcagacattgcttcagtcccttgcaaaatgccaacaagaaaccgcaaatgaaggatttaaaattccatgcagagcagcatatctagcagtctgaatgcctaagggaaaggatgcagggcttttaagttctggtcctaggtgaggaatcataaagttcctcaatttaaaaaaatatatacaaatggacaaaaatgtcttagaactgagaaggctactaaatatta

SEQ ID NO: 40379 - DNA, 593 bp, Homo sapiens
cctacttttgtcagtgattatgctgtgcagaaaagagttaccatagaaggcctgaggttgctatttttagaatttaaaaaagtttgcaggtaggtaggtaatatctacagacttcactttatgatgataaaagagacataagagaaatagacctgcttgcaaagttgactcttggctggcatctgggaacatggatttgggaaggttgccatcattcccagaactgataagagtggctcactgtgcccgaactgtttgttcaaataatgaaatgctaaatgcctgctttccttctgggagtctaaaatgttggtatgtgctagccagagagtatctacgtgaccagcccccaataacagccttgggtgctgatgccctaacaagcttctctgttggacaacatttcacatgtgttgtcacaactcattgctgaaggaattaggcatgtcctatgtgactccactcaaagaggtctctcagaaccttgcatcaagtttcctctgaagttcaccccatacgctttttccctttgctgattttgctttttatcctgctgtaataaatcatggctgcaagtacaactatatgttgag

SEQ ID NO: 40380 - DNA, 538 bp, Homo sapiens
ctttgtgagaacctaaagagactgttaggttataaaaaagaaaattgagggataaatttaacacttaaaagtgactcttctagcaggaggtttgggcacccagccagattaaggagaagtagctttatacacacatcttaacagcagtctgaatatcaaatcttcactactctttgcttaaagcccagtacctactgagtcatcccagccagcatgtcccttctaacttgtcatcctgtttgttatcactctatgccctctgcagtactctggactttgaatgtgagattactttatttaagtgaactgcaattgaaaaaagaactcttttgattgaatcttgacctgcagtaattgggaacttatgtaaggaccccatgatactcatattaaggggagtgtgggaggatcccactactaaagcctggctgcagaagagggataatggaaactgcaggtgttagaaaggtaccaacatacatcttccccctatagtacatggactcagtttttacatatggctatgctttctattctg

SEQ ID NO: 40381 - DNA, 1021 bp, Homo sapiens
actttctaaataacgccacattcatttatgaggaattgcatttccctcaatgttctgggcattaatgaagattgaatataaataaaagaattgccttatatgtatagcactttaaagagttgagattcccaaataatacaaaagcattttcaagtcacacatggtatgtaaagtgaaaatgttcttgaaggaaatatcctctaataatacttacctacttcagagggtgatgggaagctctattaacaccaaaagaacacttttagatcttcaaataaaagcactatacaaatgcaaagtattattattatagttctgaaataatttcacacctagggatgagaaaaccccaggccaaattttattgcttctctcatacgtgataaacaagaaatgccataagcaaggggcgaggggggtggttagtggggggtgtgatagtgggggaagtggaaatcaaacagaacaaagacttcaaagtttctctttcactaggactttgtatttgcccagatgtcatttagggaactctcagggaagaaagaaaaaaaaaagtcccttaaaggtcagagttaagtacagggacaaagttctcattgcttttgtaccagataaagcaacaaccggctgagctgaaaaaaaataagcttgtctacttctatgggacataatttctcccaaagcacttctcaaaaaaaaagaaaaaaaaatggccagatgaattattactgaatcacccactagtgtgatgatctcacctatgaagtcaaaaggtagctgctttaacagacaccaggatttctagtcaattactgagagcactgagcaagacatgttattgctgatggtagtggtggtgatgatgatgaagatgataatgatgttgatgatcatgattgtgatgatggtaattacggtaatgataggatatggaacagaagttctcaaacctgctgatcaatggaatcacccctagagctttttacaatacagatttttggttctccacctcagccccact

SEQ ID NO: 40382 - DNA, 1052 bp, Homo sapiens
aaaacaatccatttataaggaaggcaaaaccagatattcagtgtttaacttcatttattacctttccatcattacatagacctcagatagccttagacttaaaaagtcattcacatttaagcaaaactctgttcctggagcatctacactggatacttttcaatgaatgctgaaactggttataaagttgtgctaccaagaggcatgaagagtgactgtcagtaccttaccaaacccctgctgactggaacatgcaagtcagtccaaggatgcagggccaccactgttactgctgcctccagcctaactaaggtcacctttcctgcatgcctgcctcattctaaaggaagaaaacagagaggttggagaataccagctccccatttggtttctacagttgccaactctacccacatgtgacttggggaaagcacccttaagaagagtggggtccaacgtccaaccagactgacccagccttgggggtaaacattccacctccaccacgtggcctgtgtgcacctgatttgaatctgctcctaccctgagccaagggtgaccattctgccaggtccccactccactgcagggtcaggcagcagcctctgctcctggctcctggcccagtgctcggatggcccagcaacgtcactgcggagagggagtctggttgtgccctcctctgaactctccatctggaagactctctagtctccttccctctcatttttaatctgacagacactgcggacagggaaactcagagcagaccaaagttcatcttccctttcctgcttcatggctggcataatcacaggggcagaacaaggttggcatggaccaggatgccaggaattaaatgagggtccctgaccactggaacacattagtcctgccttccaaagtcttaattagtcttcctgtgcctggcacacctaccaccagggaggtggccgggtaaggtgccatgctcacagcaagtattcaacaaaatattggtagagaatggcggtcacaaatgcctgctggctcatggctttgcaacaacagtc

SEQ ID NO: 40383 - DNA, 756 bp, Homo sapiens
tctcaagttttttctcatatacaaatgggaaatgtagtattaaaaagagatcatgtgaacaggttctaaatggtcaagtgttagtggttttggaagcatgtacgttaatacttggaacaccgtatacaacaatcccatatctaacacttagaacagcatatgcaatcaataacaacacacacacacacacacacacacacacacacacacacacacacacacacacacacaaaccctagacttctttctttactaaatatttctagtccaggttgcagcaggtggacacaggccggcagccatgaacgcaggtccacatgggagttgtagttccgagtcaagcggctgctctacagaacggctagaagcgagacttcgtctcccaggagacatctcgccgtgcaaaatggcacgccacgaggtggagtacctgcccgacgagaaacaagaggcgggactgcaactcccagaagcctccgcggccaaggcctcaggccgcaggctgaagccaaggagggagagttcaggtagatccggcttaacatcaggtgcgagtagggaccacccttggtagtctgggcccggcccaggtcagaaccttactaaaacaaccactgtgagtattttctattggtcccagcacatttctgagagaccagaataataatagcagtaaatctgcaagtggtaaactttcacaagcataacctcaatttagatttcggcttcaggcaacatcctttggccacttgacct

SEQ ID NO: 40384 - DNA, 1426 bp, Homo sapiens
tgagcctacagagaaatctgcagatgcatctcaagttccactaacctgcctccttaccccccaccaccaccaacttggatatacctttaaaattcccccctttgacgctaaaaataaaaacaacaaccataaaataagtgtaagaaagtccgaccaagtaccgatgagttctcccacaacaataaattcgatgcctctttgcctgtttttgaagtagtaatgtaaaattatctcccaaaatgctgccttctctatactccggtttgctcctgtcctgggcacgtgttcagcaaccccttaggggaatccagagctgcgtgtttaacacagacctgttgggacggattttcgctacttgtctatgaaactgacgaaccatcccaaaacggcgggtgccgactacacccccagagccaagagctgtggcgtccccggacccgctggcgtggccccgtgcctcagtttccccaatgtataaacacggtggaggaggaacgggttagggctagggtcggtgcttgggaattggggggcccgagtccccaccctgagaccctcgtggggcggaagagtactcgggacagaagcccaccgccccgtgagcggcgccggccccactgggctccggggtgatgacctgacgcgcgtggaaacccagacccgcgccccagaaacagtattccacttgggcttgcctccccgcccctaccttccaggatgttgacagctgggaatgaaaggcagagggagggagcgcggggccggagcgccgcctgggagtgtgcccactgggtggccgcctgagggacccgggaacagagggcaaaaagtcctgtgaccggacagagcagagcggggactgcaattcccagaagaccccacggtaggggcgggacccaagatggccgcttgtctggggacaggagcggaggccaatacgcgcagagcatgcgcctacgccgggccaattgaaagccatagtgacagtaaccctgattcaggggcgggaaacactgaccacagaagacaagttgaggtgagaatccccttacaagggggtttggggcataaatcgcacaatctttggctttttctaactagaaaaagaaacatgattcttttcacgtgtaacgaaaggctgtaccgcacttttgcttttttctttcctcccaaaacgcgtttaactatcccttcacgacttcccactggctggatttcttttcgtttcatttccccactctggatctttctggattccttaagccttcttttctttatgtgtctctcagaaacacagacttgcagtccctggcttgatccatcaaataatgtggtcatttacgactacgctcagccctccctggcatcctaacaaaattgcaccacatgcgccccttctcttttcctttctgtcttttctgtgctg

SEQ ID NO: 40385 - DNA, 850 bp, Homo sapiens
cccgggtgaggagacgccccaccctgcttcatctcaccctccgtggggtgcatccactgtgtaaccagtcccaatgagatgggtacctcagttggaaatgcagaaattacctgcctttttccttgatcttgctgggagctgcacaccagagctgttcctattctgccaaattgcccgcctccctaatttttttgaatagtaaataagactgtataatttactggagtctcttctctacgaagcgcacagtgattttacaaacattaattaataaagcttcaggatccctaccaggtaaatgttaataaaacccaggagtcctaacttttttgacctttgcctcaattttcagataagaaactagctgactaagatgcttccacagctttgaaaacaaaatgggcatgaaaccaacattcagagttcagatgtcacttatgagtagcattctcttatgaacctagttggagatagaagtaatttagggaaaatgatatttcagcactgccttaatctagcagggattttcttcatgggaaaattaaaccaaacacaaactgaagtatgacttaactgggcctgcttctgcatttagggtcaccaaagcatactgtaaatggaaatcagattgctttagaatccaagaacaaactctacttttgacctttaggaagctcatgatgtatatgcccaccaaataaacaaaataatttcaaagtaaattcgttgagtgcacctgacctttgaaacagagcagatgatgttaatcagatttgtacagcgttaatctagctcagcctctgtctctccatgtatttttaaaatatcataaggaagagtctcacaacag

SEQ ID NO: 40386 - DNA, 1024 bp, Homo sapiens
aaacccacgttcatctaacaccaaagtgcatcttcttaacccctgctatgatcttttcctgtgcctcattctccctgtggcctaagtgttttaaacagcctctgacacatactagatactctgtcaatgttatataacttagttggcattagaagagagaggaaatggctttcctgtctaaagaacaaaggcatataataaaatagcatggaagaaaacaaattggggagtgggggattatagagggtagggaagaagattaagacaaatttggctagaataaaggattttggggaattcctggaaactggcccagtcaaatctttttaaaatatagctaattctcaaacatgggttaaacatttacctagactaccttatttatctgattcatttacttataaaagtaacccatacttcatagatatcacagaggtaaacttcagaatgattaaatttgcccaaattcctaataagtaaaggctgatcaatacattcttttccatatttaagacaagcttttccactttgctactatatcatgacgctagatttttttttaacccacactagttaatgatcccaaaagggctcagtttctgttcatgttccaagagctgggatgcttatctaagaacaaacctcctgcagagttcaaaaggaactctaccctcagatatgctctgtggaattgtgtagcaagatcagaaacagcctcttaaatggaatgcagacacatctgtcctaattaaataataccccgtgtagcctctggcttaatcatattacaaaacaccccccaaatatcatgaaccccagtgtacacaaagacacatgagggccaagtctgcagtatgctcatgctggcaagaacgtacaatataaaattggctgctaaattatatccatgtcatggatctctgccaaggatggctgacaagcctcacctgtctcgttcactcatcttttgcaggtctgagtccattaggcagatgatgggggagtgaggctaaagcaaactgaa

SEQ ID NO: 40387 - DNA, 867 bp, Homo sapiens
tttgtatttttagtagaaacggggtttcaccatgttggccaggatggtctctatctcttgacctcatgatccgcccgccttggcctcccaaaggctgggattacaggcatgagccactgcgcccggcccagtatactgttttaaaaatcaacagtggcaaacctctttcctcctggtttaagtccaaaatccttataataaccatattttaaaaaaaaatatgtgcttggcattatataaatcttccatttagtaatataacaattataatatttttaaattattaaacaaggttgtttttaaaatttcccttaaatcatgtaccttgtggcttttcttctattgagtaaacagtttctatttttcccgagtagagcagatacacattagagcagtggttttcaaccagggacaatttgtcctctaggagatatttggcaatgtctggagatatttctgatgatcacactgggaagagatgactggcatctagtgggtggaggccagggaggtgctaaacatcctgcagtggcacaggacagcccctcacaacaaggaaatatcacaacaaagcccaaaatgtggatagtgcaaggttgggaaacccagcaataaaacaataaaaaatattgctcagctataaccgtgaaactggggtgcagaatcttacactacaagagtggccctcagggggtaatagatgggtggttgtgagaactgaccttcactttgtttagcattacagtgaacactaaaaaaggagatggaactatgtcgtgtatatggcacacctggtaggccagtcttcagatgcgtcaggcagagaaaggggtcaggaggtgttaataaaaattagaatggtagagg

SEQ ID NO: 40388 - DNA, 892 bp, Homo sapiens
gatctcctaacctcgtgatccgcccacctcggcctcccaaagtgctgccattacagatgtcagccactgcgcccagccaaaaaaaaatttttttttaattagccaggcatggtagtgagcacctgtggtcccagctactcaggaggctaaggtgagaggattgggaggtcagggctgcagtaatgattgcaccactgcaccccagcctgggggacagagcaagactctgtctctaaattaattaataaattaaattttcaaataaaatggttaatgattaatttatgttatattaattttaccccatttttaaaaagaactggttaatgtccaatgaggccataatttgtaacccttggagttatgtgttccacctgatagaaactaatttcatctggctaaaccctttcagacaaaaaaatctacaagtttacctttgcccctatgagttgcgaaatagccctgacaaaagaaagttaacccagcactgtactgaaagaacagccagtaacctcttccctatttccaagttttaggtatttttttctgacatcatatagagtccaaattaccagttcagatttcactcttactgagggttactttcaccattgaagtgagctcccttttgttttttttttttaaaagtcagttggtcttattcagggctatctcagtccattagaaatgtacttaaactagaaagggaatgtattgggatctagatttctttattccctgaagatttctgggaatgtatgcaaattttcccaccttttcctggcaatcaacaagccttctgtgtgtggatctatctacttatccatagcattgtattagtctgttctcacactgctgataaagacatacctgagattgggtaatttataca

SEQ ID NO: 40389 - DNA, 3378 bp, Homo sapiens
acacgtttaaaacacaagaaccatgcgcggtggctcacgcctgtaatctcagcactttgggaggctgaggcaggcggatcacaaggtcaggagttcgagaccagccttgccaaaacggtgaaaccccgcctctacaaaaaaaaccaaaataaaacaaaaaacaaacaaaaaaaaccaccaaaaaaataatcagccgggcgtggtggcgggcgcctgtagtcccagctactcgggaggctgaggcaggagaatcgcccgaacccgggaggcgaaggttgtagtgagccgaaatcgagccactgtactccagcctgggcgacggagcgagactccgtctcaaaacaaaacaaaacaatcccacgtcaagatcgctttgaaacacaggcagaaaaattaggcaaaaaatgtcaaacggctaattaccttggctcagttacacatttactcgaaagcccgcctcccccacttttagccccagcgttaagaatgtaaaatagggcgcttagaagtctaagcgataaagatcttcttaccgagagccaagggacaaaactcattacagataagcctagtcctcccatttcccccggacgcctctccccgattgctaaagaagcagccgctccccgggtagctgccaggaaatcagtccggccccgcggcgctgctttcaccctgcagggtgtaagaggcgcacttcctgcgccctccccgcggccaaaccggggtgcgggaaccttctccagagaagctgcgagttggggaaactccgccaccgatccatcgtggcgccgggaaaggggatgcggggctcggaagggctagatttcgcaatcctgggatcgacattcctcccctcccccactttccccagccttggactgggccaatgaaagcccgaaaaagaaaaaaaaaaaaaattaaatctcaatgtagccggagtgcaaaggccgctcggctttgtttcccggcgggggaatgcgctgtgttggaggcgcgaacaggagccgcagacggtgagcctcaccgctgcaaatgccagggcagtgaagccgaacagaaaaccccatcgctttaaaaaggcagctgtccgccctccccctttcccctcgccagggcgaggggcccctcaagtccgggatccgcgagctgcgcggaggatctcgccaaacccgagcaccgtgcggcgtcttttaagagctcgaacaacgggaatccagcaaaaaacaagccggccccagaaggcagcctccctcctctctccgcgcacgggctacaatcgcccccagtccccaaactgtcccagtagaggccgcgcggagagagcagagccgagggacccagcgcaaggcgggagccaagcgcggctgctttaagaacgcggagagcgcgcgcccgccgccagctggcccgggctgcgcgcccccgccgccaccgcgcgccccctgttcgctcgctccttcgctcgccggctttaaagtctctgccaggatccatgctcacatgttacttcctgtatggaggcatggccagtttccagccccgcgctcttcgttccttcccagcctgcgccggagccacaactttcaggagcatggactgaaggcgccctcgccccagcgcccctctgagatcctttgtgttttcctccgtttcctccggccgtttctattttggggggctctccgctccccctgcctctcccctccccttcccctctcgcaaacatgcctccttccttcccggggccctggaaggagctgcctgcctgaagcccggagacgccgcgccgcgctcagccccgccgccgcccgccggctctcgggctgtgctgcgctgccgactcaagttggggatcctcggctgctcgccgccgccgcccgcggtccctgcctgccccaggcccggggcatcgccgccggccgccgactccgcgccctgcccgatcggctctctcctttttaaacggaaagcagcctttctccgccgagaggatcgtccccagcgtggctctgcgttcccggtcactttttgagattttccggggggcgctcggcggcttcccggattccaaggggactcgggccgccgagcgcggggggcccgtggagcgggcgagccggggaagcgccccggcttagcggaggctcgcacggaggcaagaacttattcaacaagtttacctccctgctttcctcttttcgatgtgcgttttcggacatgcggaggttactggaaccgtgttggtggattttgttcctgaaaatcaccagttccgtgctccattatgtcgtgtgcttccccggtgagtgccggccgccgaggggatgcggccccggccggcgcgcgttggggatgcggagttgtcgcctgggcgcggagctccggcgcccgtccgggagaccctggagagggtggagggtggcccggcgcccggataggagaaaaggattgctccgctggcttggatgatgtttagggaggcaggctagtggtcgaggaaggtggaggcaggggctggccggggagggggctgggggacgcgggggtctgctcccgctcccttttgggggtcctggggagctggaatcgggagaaagggggacttgctttgctgactcgtcgccgatcgggagaactcgagttgtggggcggttggggagactgaggccatggaaaggatgcttctgtgggtttggggggcccgggatgagccccctcgctctggcgggtattgaaggaactcagaaggtgggggtttgctttgctgttctccatccctttgggagggctaggtttcggggaatggaagtcggaggctggctgcggaggactgaggatgtgtggggagcagcctgcgttctgggtcgggggcgtcctccctctctctgggggctggggcgcgggcagcacttcggtgccggcgtgaggcagcctccttgggcgcagtgagacggcagggcgcaggcggtttcggagagatccgtgtctcccctagccccggcccgtggccctttccctccgctgctctgctcgattggattgcctgggtctggacgcggggagggggcgggggcggtttcggcggccggggcggtttcggcggccgggttgctgttcgcgccggggctgatttttttcctgtctcgcgcgccctgcctaccttcatctttgcccttttgcaggctgttcgcggctggcagacccagtctcgctcctttctggccaggttaagacaggaacaatactggccgttgataagaataaatcaccgcacgtaacggtgtgcggctcggcgaccctccacttccagctctcagctggcagttccccctcctctctcccctggggagggcagaggccagctgcctccctctc

SEQ ID NO: 40390 - DNA, 840 bp, Homo sapiens
gtatttttggtagagacagggtttcaccttgttggtcaggctggtcttgaactcctgacctcaggtgatccacctgccttggcctaatcccaaagtgctgggattacaggtgtgagctaccacgcctggccactgtaaggcttttgataagccctgttgcaatctgtgcagttgagaaggctctcatttaaagaggttctctggtgagcttcttggaatgcgaagcatctttctgtaacctttgtcgtgactctacaattccatccagttgagcaactgttctcttggatgacctttgcctaaagtgagatgcacatgtgcctccagttcagttgtaggtagttctcggcagtactgcatgtggcctgtttccagttagaaatgtcaacactgtgagcccaggtaggtgctgggcacgaattgcctgatggactctctgagaagctgttaacttctccactgcttttgaaaggatcttcacctttatgcattctctagcctattttgttcctctgtttttttcccccgtcttctctacattaaaggtgcattagtgtattctcagtgcaacactttagagttcttggaatgggcagagagcagttatgtcccataatggcaggataatcaatggaaagagatagattgccaggttgtaaatcatgtgagagaatttgatgatatcagcttcgggggaatgggatcctattactcgttctgaattctctggttcctggaattaatttgtgtgtgtgtgtgtgtgtgtgtgtgtgtgcgcacttgtaatcttttggtagaacagcctttgttgtgaaccagaggatgacaaaggacaggtca

SEQ ID NO: 40391 - DNA, 1068 bp, Homo sapiens
ttttagtgacagatgctgcattagttatagggaaattatgatgtctggaacttgctttaggataattcggttggagtaaggtgtgatttggggtaaaaaaacataaaatttgcctgatacgataattgttgagggtaagggaatggttatgtggggactcttctatctctgaatgttggaaatacaatagaaagttaaaacataatgacttacctgtgttctattctttatgatggctgctggctttatcaggcctacttcttttttaagtatttgtggggtaatgaatatttaaatatgtaacctttttacctcaaagtaatctaagtataaatatggtcactaactgcacaaccaggtctcacagaactgacaggttttatttaatgacccattttcctttatttgaactcagccccatggaataaagggaatgttttattcatcagactgttcacttttttaaattttagaatgcttttgtaggaattagcaggtgtttaattatcaatgggaggattctttatttgctgaatgcagtagaaggtcattaaaataagtttaaaatatgaaagaatcaagtagtgagagaacttggggggaaatgaataaatctattctcttgtgtcctaggtttgttaaggtcaaatgaggtgtggtttaatgttttgcagcttcattgtaaaccaagccaaaggaaaatctttctgccctttggtcaaacattcctgagtgaagagagcactggctgacatggaggagtgccaacatttttgggtcatactttagaacttaagtttagataactgagataagccaggatttatggacagacagatatatccctagtctcaacattaagccattatttccatattgcatcgtctttcatgctctaagtatatgttggagtgccgactgtggatttagctgtgtgctaggcactggggaataagacaaataagaattagatatatgtggctcttttgtttaacttgaacataaatgttttccctctttccctttgcttgtaatttttctcttttctagcaacattgccctgtcaac

SEQ ID NO: 40392 - DNA, 626 bp, Homo sapiens
ttggattttatcaaatgctttttctgtggaaacctaaacttttaggctacagttctttttaaagcaggtagcaggacagaacttcttgaccaccactcagcagaggtttgaaagtttcccctcttctcctgtgaggtcactaagcatttgttacagagttaaccgagaagaatgcctgtgcttatcctctgggaacaactgtaatgatgggatgtttctctataagtctgagaaataaactgctggaatgtgatgccatatctgatatgctgtgtttgttttgccagtgtaatactgtcacaacactgttgagtgagctgatttcaagctgttgatatagttcagaccttggcagttctctaatctccttgacacttcagtgtttgattgcattcgtttgccctgcaaatagtcgacagtgtaagtgatctcaaagtgagaatatatctaaagtctgtatttgtaatagacaaggtttgaaggaaagctgagaccttgttaaattcacatatggacttcctgagcatgcaataaagacttaacttctacttgatggagcctgtcaaacagccatattacaggcatgatttggttgcatgggacttctattcttaatgttaaaataa

SEQ ID NO: 40393 - DNA, 1161 bp, Homo sapiens
gtggaggaaagagagtcttctcttagccattgttctgtgtggagttggcggactaacacatttttatattcatatgcaatattttcaattctaaaaatccttatgtttgtaccagaactaagatgtcctggcattatggaattattcatgtcagttgcctatctctggtcaggtagttagttgtgacatccagcagctcagactacaatttgaattctggctcttgtcccacttattatcagaatgacctttggcaaatgacttgaaggttaacttgggtaattttctcatctggataatgcggatagtagaaggacttaacctcataaggtttttgagaggactgagtgaagcagtccccacaatacaccatcatgtgctgggcatgttggtaagggctggatttcaaggatgaaaacagaggccagagaactttctgtggctttctgaatgtcaaaactgagactgtgcagatcaagcagaacgctttctgttccttccaaggcttgttcccttcaggtttcagtttcagacggaagcgaagttgtttgtgatgccggagcacacacctgcgggaactgtagacttcttaggagtccaccggggttgcgtcgcattgcttccacgcctctgtcctcaccagtgttgccaactgtggatttgtgtgtgtgtgtttatcgttgttggccatgcaccagaaacagagatatcagtcacatttaaactctgctgcccaggaaactcctgcctacaaacccagcccagccctttgagaacctcaccgaccaagtgagtgatatgttgagagatgagcatagccatcttaccattcatgtctgtgaattattatttattcagactggatctcgttaagagaactgtgtgtaatcttagcatgataatcggattccacttatcacttggaactgtgactcacttttggaattttaaggacgtaattacaaaaaaaattcttggttatcttttaaaaaggagtctgttgtccttagacttgttaactcttcaactgctgttttccaaatcgtggtacaaagttattatttgcaggtattcccaagtggccttataaaaaccaaaaaggcttcttgctaattctcttcagatgctgatatagaaatgacactgatttttttcttttta

SEQ ID NO: 40394 - DNA, 639 bp, Homo sapiens
gaatgaatgcaaagagaatttggcccatactagccctctgatacttaccattgttctctgtgccagggttcatgttagaactggcctgtgccgtgagtagttggtgagactgggggaaatgagtggtcttagacgtcactattggggactttaaatgagcacagcttctgtgaaggcgactgggccatgtccatcacagttagatttgcctatacccttggatcaggaaactctgcccccaggtgtgtgccccacagatgtacttggccacagtgcaaaatgactcatgtcaaggttattccttgcatcagtgtttggattttgaaaggattggaaataacctgacagcccattaataggggctgttttaataaattatactatgctaaataatggcatatgtgcagatgttacaatcagagaagcattgccctatgaacagatacatatgtttgtctgtatatcgaaatctctatttccctagatagccttgttaatcaggtgggggaaaagcagggcgtacaacggtatttagttaaagctactttttttatgggacacatacaggattatctttagcatcatggtattaatggttggtgttgtcttgagaggtatggggaagaggtgagataagga

SEQ ID NO: 40395 - DNA, 569 bp, Homo sapiens
atcttgagctgaagggatccacccaccctggcctcccaaaatgctgggattacaggcgtgagccaccacacccagtagttttttttttattttttagggatatttgcctccccggaacgctgtgtcactttgtgctgctcctactaacaaagtatgaaaggactgtcctttctgcacatctcagccaactggtgatctaagctcattaaaaaaatattgagtcactatgtcagggcaactttgaatagttggtcttctgtactagtgaagagggcatgatgttttagagtcatgatggaagcagtgacctgcctccaggagtgtctcaggagcatgaggacactgggcacctttctcacagcccaactgggggatcattagctcaccaaaacttcttatatcttccctaatgaactgggctctctgcaaatcttttttttttttttttttttttttttttgagacagagtctcgctctcttgctctgtcaccctgactggagtgcagtggcgcaatctgggcaagctgtgccccctgggttcatgccattcttctgcctcagcctcctg

SEQ ID NO: 40396 - DNA, 942 bp, Homo sapiens
gcttccactgttaaactcttacataattgcattctatatagagagcttccctttggatccagcttgcttttccccttgtcttcttcctcagactttatgaaagtatttgcagagacgccttgtcccctgccatgagctgtaaatacttatgcagatgaagggtttgttactctagttgatgagtgttagggaacctggagcctttcctggttttgagctgtggctgaggacgtaggcaattctcatgcacactttgcattggctgaagtgcatgtcctggagtgcctcatgctacaggactggcagtgaaaagcctcttaggcttggggtagaggtgaaaacctccctccatgtttgcactctctctcgccatgcccccaccttcacgcgtggttgtgactgctgggtggggctgaagtcacagccttgctgcagtctttgccctaggcaggctctgtatgatctttggtcaagggaaagcactttgtgtgcctgacctctgagcagcccattttggccctgaaatcctctgttggcaaacttcacattcagtgagtcagaattaaaggaaaatgctgaaggaacatttgcattttttatcttttccaagttaaggctgttcttttccaaagtggagttatactttagagtatcttaatatatcttatagcaactcatcaggtcttgcaaatgtattttatcttttcatattagaattatttcagactatttttattcattatgcgttttgttaaaccaggttgttcctataatgaacatggaatataaagacttgctcttccctaaattgctcagtatactatatcttgagtcgtctttatgctcaatctaatgctttattaaaggagaagacacacccacacacatgtatacatgtgtaaaatacctgtactgtgctcctactatgtgtcaggcactctg

SEQ ID NO: 40397 - DNA, 1276 bp, Homo sapiens
tttggactactttggttatgcagggagcacagaaacatgccttagcatttggatatttattattttctaagtattaagaacgtggatgttctgcagcattggagagatgtttgagaatgctggcctggcctggccctcagaagttaatttagggtttttaactctggtgcaaatgcttaggttaccggcagggggttaataagtaaaccacagagaagccacaaaggtgcctacatgtggttgttgtgtagtttatcattagaccagaaagcgggggaaacagctgaccaaccaattcacagaaatttatcataattgagtggttaatgcaagcatactaaacagattaaatctcaatagtttttgtgtataccctggtagaaaaagtagtaactgcttacttgcacatcggaaacatgctcatgggatgttaacgtgtttgcatgcagaagcttatgatgcaatgagactgaaataatgaaaatgatgacagtaaaaaggagaaaatgtaaaatgcatgctagttggtaaaagaaaaaagtcttctctttgcttccaaggtatttaaactctgaacaaactgtgtgtgttgtggaatatattgggttagcgacctttcagaattaggaagaagaagttgtatttttgaatatagaaggccagcataattactcagagtacagtaaatgtccctatcattctttgagtttaatcttaacataattagctcctcgcacaatagagtgtttaatttgaaatgctgccaaggctcattaagtgagagaagtacttcctgagatctctgttgttaaatttgggattttttgtatgagataattttctcaagaagtgttagggtatcagaattgttgttcatattctgacatttatcacccaaactcactgaaacacttaacattttctgttttattgatggagccttttattaatattggggaatttgctatgtcacatggaaagaaattaatttccgaagtcttgacaagcgttctgagtgataggtccatttgccctgctgtgccttccccacacaatagcgatagtaaatatgagctggaaggatttatatgagctggtaggatttaattcttctatctcttcttttgggttctgtttgattattgatttctgagtcaggataagcaatacaaaatgtgaacaccagtgttttgttgttgttgtttgtttttagtttgcatttctattttggcttgacttgacatctccccaggttgtttttggtttgtttttgttt

SEQ ID NO: 40398 - DNA, 1010 bp, Homo sapiens
aagtcatcatatatataaagtatgtatatcttagaattatattaatattagccaacctcacctaatcctgtctgtcctgggcattgttctgagcacttcatatagaatatttaatttaataactgcttggtttaaatgatggtgttcccttcaaaatgcgtgttgaaacttaatccccagtgtaaaagtattaaggtgtggccttggatggtgatgaggtcatgaggactttgccctcatgaatggtattactacccttataaaagagattaaagttgaatgaagtgctgtcttgcccttctattccctctgccacatgaggaaacagcgttcctcttctctggagattgcaatacaaggcaccatcttggaagcagagaacagctctcatcagacatcagtcctgttggtgccttgactttggacgtcccatcttctaggaccatgagaaatagatttctgttctttatcaattactcagttgcaggaattttgttacagcagcacagacagactaagacaattaccctgtgggacaggtactagttctatcctctttaagtgaggtgagtaacttgcccatgaattcttttcagagatgagattcagtaccaggtgacttgaatccagaactcatgctcttgagtaatcattaagctctactgtatttatttgtgacttttttagcttggctttgaccaggtgggaccatgggcatcatcatagtttactgtgcatcaaataaataaaagccagaaagtagtcacattcaaccccctacccgccccctactggtcaaaacagagctgtgctcggtctgctggaggtacagatgagggccagagcaagagctgtgtgttgagatgggctaattttcattgtagctgtgtagctccaattttttccttaacatgtctactatgaaaggggatcatcgctttttagttcttcctaacactgtgagggctttaggttatggcgtctgaaatccttacgttttggatgtggaa

SEQ ID NO: 40399 - DNA, 606 bp, Homo sapiens
gaggcagagaattgcttaaaatcagaggatgcagtaggtggagatcacgccattgcactccagcctgggcaacagagcaaaactccatctcaaaaaaaaaaaagaaagaaagaaaaaagaaaaagaaaaaggacaagtgctccaggcagaggtcgctgtgtaggagatgacccagaagcactggatcatggcacattcattatttcttagggcaaactctgccaaactgcccttcctttatgcaaagcaaagtccactgttaacgggtagaatcagattcttttctggaagattctacatgtacaaagtacaaaggcactgggtcagtcctggttgctcaatgtcctcttatgctgagggagagtgagaatcaaaaggtaggtttatataaaactttgtctagtttggaaaactctgagcttccaagtcattatttttggtgggtttgtgtgatcaccatcttttctaccaacagaccatttactggaccacaggtattctggcatcatttttttcttttaaaactggtgagtgtgccattcttttctttttggaacccatatctgtggccatatttcaagacttttttttaatcattaggaataa

SEQ ID NO: 40400 - DNA, 899 bp, Homo sapiens
tctcactttaaaaggtcttgaaatggagttcctaccagacggcctttccctagggttcataaagaccctttcaagccaccctcccgcgcgccgcgttaccacacgcccacctcctggttgccgcgactacacctcacgaacttttcgcgccccaaggcggccctttataaagatgcggtgacgtcaccgcgcgccgcgcgtgcgcaaatatggtaacgtgaccacgccctggcctgcgctaaggccccggcgtcggcgcagtagctggtgccttcccggaagggctcagaggcgggctcggtgagtggagtcggacagtgggtgggtgccctgactgcctgacggccgcgcagggccttgcaggaccgctggggaggatgttgttaacgtaaagagccaggctgatgaggaaggttcatgagtcctttgggtataagcgggagttggggcggccggagggcagatgactctgagaaggtgcggatcttcgattctaaggggagaatgtgatttggttttgtctaaagtgctgatagtgggcctcacagaaaagttaccatgaaccgactttccgggattcccttggcgctgcattaattggcctcgttgcaaaaggaaaccgagaggaaggcggcaagacttggcctgcgggtgatgttagcggaaaatatctgtaatttagaccccggagggcgggcctgtgagcgattgctgtccgcggtgctgaaggaaaggcagccacgcccagaggaggaaacctaatgagggcagggcggtgtttccgttttccttggccgggttcagcaccctacactcaataagcgtgggctttctagcaggactggacactcaggcggtgtgtcaatctttagacaatctttatagagtgcatagatgtt

SEQ ID NO: 40401 - DNA, 2920 bp, Homo sapiens
aatcccaaagcctagtccaggaaggataaatatccactaaataaatgaaactggaatgaagcaaagctgaaattccacatgaagttcctgggtctttagtagcctcccacctccactactctttatcagtctggaaatttgggcctatcactgttcttcccatggccaggccctttaatgtggagaccctggtggtcttcaactcttaagaagtggcctctccacaggcatttacagttaccggtcaccatctcctgaaaaacacccaagagccctagatatccccttcccagatatcaaaggacctccttcctccctaaccagataccttgtaggttctccctccagttgccaatcatgccccttcccccaaagtgtcaccttatttccgctctcagtccatagaccatctcccttagactgtccacaaacccagcctttgcccctctaaattcatcccagctgacaaccacccttcctaacacacacacatacatcttttatcgtcctgatctaccctagacggtctcatcactatactggctcctccttacccccgtaaatctcccaggtacacttcctgatcaccctccggatacctcatccctatctattccttttataaataattccctgctcctccttctcacccacaatccactcgcagttcaaggcctcattgccatcgactccactgtctgtgagtgcttcccaatatgccccaggacccctcctggtgtcacgctctgtatcctgacaccccttgtagacgagtcccgaaattcccgccccgtccctggagctcccactccctcccagacctccacaaaccttccaggcccccagccctaagcccggcaccactgtccacccttcgcggctcctgggtcctcaccgcgcccctagacaaacccggactccctctggtcccacccgcccttgcaccgcttctagccgtctcggccacccacgtgtgttcccagcccaccgaccacgctcccggcacaccctatagccccgcgctgcctccgggagagcggacggggaaagccgagggtctccgaggggcgctcgggctctggcgagaggaggaaggactcagggaagcagccggggaggcccggggctccggggagaggtcgggaaggccgaagcgctctggcgaagaggccggggaggccgaggggttcccggaagcgggccgggaggccaggggtctcaggggaggcccagcgggccgtgcagcgggcgcgtgtggcggcgagcggggcctcaccgtcagtcacggctcccatggcgtgcgcggcggcggcggcggcggcggcggcgcaagctgaggcggcggttggcggcggcggaggtcaaactcccacaatgcagccgggtaaacagccatggaggaggaggcggcggcgcccgcggccgcctgctccgacgcctgagccgcgccgcgccgcgccgccgccgccgccgccgccgccgcgggacccgcgctccccgcgctcccggtactccccgggggcggccgcggccggcgcgagttggggcgaggcttggcggccggcggcggccccggctgcagcccgggctcccgccgccccccttgcagcccccgcccggcccacgcccagaggccgccccggaggccgcagccagccgccaggtgagctcgcccggacgccgccagggctgcgggggtgcggcgggagctgcgggccgcccgcagtcggggtcccggcttcttccccgggaaggtgactgcggccccgccgccccatccagggtgacgctgctaggggtgggctcgtttccctggggggtggggagggtgacggggacgcccggatccggctgagcccaggagaggcgggactaggggtaccgaggggggcgcgtcgctgggggtccccgcgaagttggcgcccacgcgcgctggggcgggtctcgaacgccggcacttgcgcggggcgcggccggcaatcaaaaaaggccccgggttccaggtcgcgcggttccggcccctgcggccgcccccttccttcctgggctcggcgggtgcgggaaaaagggtgaaagagaaacttggcgacctcccggaggagttcgcgaagcgaccaggagcgtgttgccatcgtcctcacccggcacccaattccaccacagagtcgggatttcgtcggtgatcgtgatggggtgcttttatttttctctttgattttcaaaaaatgtctatgtgactgtccctatcttaaggggaagttgaaagtgggggcgggggtgctcaatgagaaacgttgccttgtgtgtagttgtttggagcacactgcaaattatattggcatctctttccaaaagtcactttgattcaacttcgatagctttctcgtaaatggcacgtttaggtggtgagaggtggatgaggaaacaggcaccagtgcagctgatttgacctccagtgggatagatacgattagcaccaggatcgtgtctcattttgaacccaggtttgttattttattcagccataccgttgttttccaattttcctgtcccccaagtagatcttgcatcttcatatccgggatgaagaagttgtgtaggataaacttggttgtttcactttccttactaaatttaggtacattctccctgttttcccccagttctttcaaagaggagaagttgcagatgcaaatgtattaaagtgaagtgtgtttaacctctagcaagaaatatgtacaattttagtcatattatgtgagaccagtgacttcaataataccattacagtgctctcaagaattagtgctcaagaacttgacttttgtcacaaagacaaaaattactttacatgaagattctgagatgtgacttgctctcccctaaggtatgaagtttccgactttgaaaaaatactgac

SEQ ID NO: 40402 - DNA, 628 bp, Homo sapiens
attttcatcccgtagggagcctgaggtaaataaaatagtccttagtgttctggtcttattatggtgtaaagtggggcagttcttccttgctgttgtcttataaagccatgacagtttgtttgcagaatcagagaatgcagtatttctaaatgtcctcctgtggaatttcctactggcatgacttttttcccctttgcttctgcccagtagcagtcccttgagtggcatttgctgtcctagttaatcagagggtaggagaaatgaaaaactctcatcttcccactcccatgaagtttcaatgggcactggaaatgtaggtcaaattgcatcaccatagaaaggagcgaacaggaaggtatttatgaagtgctgccaatgtctctttagattcagagtcatgacgaactggtattgagcccgttaggtgtgagatacagggaatcagggggcatgtttgtgatgtagtgccagaatgttatatttcaaccagtgataaaagatctctgtctgaaacctagtggaaatgacttacactggctttgtttaatttgcatctcccagcttctggaattctttttgtctcttatttattattggcacattgcaaaaatttgtattaatttagcca

SEQ ID NO: 40403 - DNA, 2831 bp, Homo sapiens
tttctgcaagttggaccaacaaagaagttggctacctctgtcacatcagatgtttgaggtacaaaaaaaaaaagaattccacttcctccccatctagtcagagaaagcacttgtgagcaagcatctctgacacacattacaggagttgatactactgcagtgtgaaacatgcgtgaaacatgctgataagaatcactgtttttgtctcaggcttcaaattttcacatcaatttgagaaaatagtaatatcaacaattattgaaagtggtgtggtctgctactgtttcaagtatttttaatgctttaggtcattaagtagccttttattttgccatctgtagcctatcgctaagcaaatgttgtgtatgttggggaggggtgctaagttttgcgggccaatgcttaatttagtgaacaaaatttgaccgaaaacagtattttctaaacatgttttgtaggaattccttatattctcctaatccctagggtctcgtcctgcccaagaaaagacaaccataaagagggaaggactaacaactcaagttaaaaatgaatcagatttttacttttggggtgaatgaatcacttccagaaacttggggtggtgcctctaaaatatgtacacgggttaaagcttctctcggtttgtttcactctcctccattccctcgcacactgatctcatgttctctctttgctggacgaattcaagttccccaggcgcacagtgtgacttccaattgcgggtcgggggcacacatgtgggcggcgtggcgtgcacacggtacttcgtcctgacacctgggcagacacctgggaggcacttccccgctagcccaaggttccctgcacgcccggagtccgctctgcggcggcttcccattcatgcttttgacaactctgcggccgcccgcaagccgagggcaaagtgccccctgcaccagcctctcccgcgctgccctggggccggccggccggctcctccataggtggctgcatttccgacttcgccctggctccagtccgggggcttgacgtgcaaacttcgccggagcgagctgagagggagggaccggcaagtgggaggaggcggcgggaggcgtctccgcttaagggagccggccgggtgccgccgctcggacggacgcgcggacggaaggaaggagcggggcagccgggccgggcccggggatgcaagcggccgaagggtgggcagctggaggtcctggggtgcggctcgggcttccccgcgcgggctgccatggtggggcgcggggttggagccgggccgctccggcgctggcctccgcgccaggtcctctgagcagaagcaggcaggggacccagcgccgcggtggcgggccgcctgctgcccgtcccctccctcgggcggccgcgggagtcgaaagcgaaagctagcccgcgccgcggactttgagcccggggcggggggtggccttgaggaggcgggctcggggggctgggcggccatgggggcgctgtcagcgtgccccacccggtccgcgggccgcgcacgccgccggaactccctggcgcctccttaaaaaacggcccccgcgcgactctttcccccttttttttgttacattgtaggagcggaaagaatgtcggagcgggccgcggatgacgtcaggggggagccgcgccgcgcggcggcggcggcgggcggagcagcggccgcggccgcccggcagcagcagcagcagcagcagcagcagcagccgccgcctccgcagccccagcggcagcagcacccgccaccgccgccacggcgcacacggccggaggacggcgggcccggcgccgcctccacctcggccgccgcaatggcgacggtcggggagcgcaggcctctgcccagtcctgaagtgatgctgggacagtcgtggaatctgtgggttgaggcttccaaacttcctgggaaggacggtgagtgtccacgccctcctccccccttcaccccctcgcgaccccctcctctctcctcccctcccccctgcccccctcctgtgacccgccccctcgaggggcagagatgctatcgtttgctgggttgcggaacgcggaggtgcccacacctaccccgtgcgtgcgtgagtgtgcgtcacactcctggccactgacctgcctctcccctcctcctgtgtgtgtatatctcctagggacagaattggacgaaagtttcaaggagtttgggaaaaaccgcgaagtcatggggctctgtcgggaaggtgagtccagcccccctgatggagtttgtacaaacccctgggaagtttcattgacagttcactgggaccgggaacatcagcccaccataccgactccccgactccccgtgcctgcgaagatgctgcctgaggagggagggagggggcagagcgcttggaaagtttggtttgggggcctcctgtaatgagagcgtccggaatccttctgtgaccaggcaggagcagcattattggtgatgagcgctgggaaccggcgggaagtttaacctagatctctgcatttctgacctccttacggagaaacaggagtagaggaaggaattctcagctttgaaacctttccacgaatgcttaggggacattttctgttggcaatcgaaacgaattttgaacttaaagaagatgctttacctatgcagtcttatttctgtaggatttaaggtacaagttggggatgttagaaaaaggtcatcataacccggagtgcattttggtcagattttttgcgagctgccaatatcacgggggaaagaaagccagaattttatttggtcaaataagcctttactgcccgtggct

SEQ ID NO: 40404 - DNA, 1600 bp, Homo sapiens
atttacaccagccaggacgccttgtatgaccatattagatgaaattagactccaccccctgttttctgttgatctgccaggacctttgtaattcaagtgctttttacagtagtagcaaatgttacataagcccaaacatggagcatatttggagttggtgggcagacccaaatcatgatgcaagcctgcagtagcaagtgtgcaatgaagcacaaccaaattctgtgaatggaaggtagcaagacgcctctccaaagcagcccttctgcgcaggagctgaaagctccactgggtaagttttctgaggcagttttcagagtctgggcttggctcagggcccagctctggatgagcctgtggacggtggggtaggtctttgctaaccttacatagaaccaagcagatttgggaagagtttatgcaggcctttttcctcctggcatttgtcttgccttgccagcaggccaggagggttctgctgctcaagtagtggagggagggagcctgcagagctaggggatcagcgtgggtaatcgcagccacagggattagctgctgcaagctgtccacagaagccattctgaaatgtcatttgagtgatctggccaaagttcagatgcagacgggagccgagtttgttattaactccaacaaaatgctgaggtttgcaccaaacagttcccatatctcaaaacagagagagtattggttacatctctctctaaaaatggaggaacgttgtaacacgctttaactgtttgttttttatcttacttgtggtaagtgaggtttcatgacaggcagtttgcagtgtttcctgtagaatgtgtttgaaagctgttttgtcagatacttcaattccacagcaaagtttcaaacagaacactgcgtcaagaggaagaacaacttcaaaatacaaacagtaaccctgggaagtcattcagtaacttaaattgagtgtataaaaatttaattatggactgactgccagaaaagatgattttttttagttgtgttattaaggtagccagcagagctaagctgattcttgggtggatgtgtggaggctggtctcaatattaccttacctgtctcagaccttctgtcttcatgcgggaagtgaggtgtcaattgagttcttcagttttcaggggattcagatttcatgccttgtgtaataatgagcttgaccggaaggttttaattgaggttgaaattgagctccccagttgtaggactttaaatatgaaaagatcttaaacctttaatcaaattgctgttgattctctataattgatttttctgaaaactcttgtcagacagttttaggttcactgtttctgctttcgtttttgcatgtcacttctgatgttttattagttgacagccctggcatgcaggtggagcagatactgtttctctcttcagaaaaaataaatgtgtgttgcagactcattgaaaacattggcattcctgggtaattaatcactcattccttattaaaagaatgtataatgaaggaatctgtaaggctgtgttcaaaatgtgaggtttttcttatttccatgttctggtcttcaggtattctgccctcccccac

SEQ ID NO: 40405 - DNA, 437 bp, Homo sapiens
tggaattccatattaagagttaataggcaagaaaagaagattttaaccaaagaaaacggggaggatggacagtgatgggaatggaaaattgaaaggacaagcttaaagttacagtcagttctgctatagcacaacatgcattcctaaaaaattactgcacaatgcaaaattacgcaacaaaaaccacatgaggcttattgggaaaacagggttatggcacaacactcaaagacctcatcagtgacacacacagaaaaacataggaacctaatgaaaagggtagcacagtcttacaaatgttaaatggtaaaaaaatacataaatactagaataaacatggcagttaccttgaaaagacctggcatttgcttgtggaaggcgtgggaagggttgcagcttgactgtgaagtcatggaaggaggttatctgaaattgga

SEQ ID NO: 40406 - DNA, 1487 bp, Homo sapiens
ggtccacgtctatctgccagtcgagggatttgcacaaggcttcatagtaaggagccatgtctaacatgcaaaaagagggatgtgtgagtggggacacttgtgccctcaagtcaaagtctgcccacgtatttcaccccccgccccgccacaagtcatccaccagtctcttccccactaacaggaaggcatgcgatggcgcttaataatcggcttggcaaaacataaacgtatgctggtgggaggtttgcgtgacggccaatcctggcaatgccaacctctactagggctggagggagggcaatcctcggtttgctcttgccggattctgttccaaaagtcttcaaacagggaaagactttttatacacacatactcacatacatatgttcaaacatacacattcactacagaagggccagaaagaaccgaacccaaatttcccttccacaggcaagctgaactctcccacaggaataccccgcgcccgggagcagtccccactgacagaaagtcacggggcctttactctgtgcctagcacaggggtaaatattaatgcctcacgattctcccccaagctgcccttacaggggaaggcggcacagagagatgcagaccccgctgaggcaagtcgaggtcccccagggtatccccaaaccaaagcaaaaccctaagggccggagaagccaggcctggtctctgagaccccgtcagaggggtctggagctccatcaaaaaaagtccccgcaggctccggaacgcggggacggcccaggcctaggccgctgactcggcgctcgtgcgggcctcactgttatcgcggacggccgccatcagctcgtcgcgcacggcagcgtctccgcggtgctcgggcaggctgagcaggaagcgcagctgcgcgatacgcaagtcggggttcttgggcagaccctcctcctccaggttctccagcggcatcgcggcgaaggggacagcggctgacaggacacaacttggttacgaccggctgcggcagcggaagcgggaggagtcggcgaatacgcccggccgcctgcggcccggcttccggtcccgtctccgccggcagcgtcctctgctggacacctccgggaacgcctcacccggcctgggcgcctgcgcccctgtgtggtcacgggggcttttccaccctcaaggccccctgcggagtcccagagtgggtgcagcccaactcaaaagcccaatttcttgaatctctttctcactccctttttagctattttactttccgtttgtaactgatgggagcttaaaattttttgaaaactgaaaatgtaataacagcattaataaaaacaatcaccatagtttgtcgagtcgttactctcattcatcttattaaaatcatcttcatgctgcgaggtagtactattagcctatttagtaggtaagacaaatgaggcacaaagaggttagggaaacagaccaaccaaggtcatgtaacagcca

SEQ ID NO: 40407 - DNA, 3351 bp, Homo sapiens
ttatgagcccagaaggatagttactcaaaagacagaagttatcggaggccagcacaaagcctgatgtctgcatgggtcttccatgagacactttctacatctacctttgtatggctccaggccacctaaagcaacatataaagactggtgttggaaagctccagtttttgattggacctggaaaactgccatattgaaatcacacctatactaacagcttgcacatatgggtacttaataaacaactgttgaacgaataaatggctgaatgcacaaataaatgcataaaggaaggcacaggcagataaatagattgaggaaggaagttagttacttgctgatttggtggtggattaatccaatcatcccatgaaattactcaaaatatctcctgcgtcataaggcagaggagatcatcttgatactacattaactctcacaccaggctacagtgtagactgcccagtcagcagaaagggtgtgcagctgtgaatttatgcaggaagtctaagtaagaggccaagtcccaaactttaggaccccagagtgaatttactgtaaaggttggagatacctgtcttgaaagctagaactccaatggcaggtctctcatcctgcatttgcaaatgagccttggcctttctaggcctcataatctgcacgcaagccttgacaagtccctgctggtggaatctggccgtgttgctgctgacttcatctggcagaggccctgaagcctgggaacccaggttctagtcccaactctgacagctccgttgaaaacaagtttattaacaggcagttttagtgaaagctgcacacacaggcatatttcccattgccatctgatgacatcagtgtatttctggagccaagataaatacagcattgttcatgtgactagcttcccaagaagagtgaggtggactgctctgaagcctcctcctgccctgcccccttcttccctcccttcccaactcatctctcaaactgcattgaaaacaccgaggtgagtgacagtgaaggctaactaggagatgcagcttagggggaatttaatccaattcagttggagagacatgcatctccctgtaccatgaaattccattttgatctcagcatgtgctgatggagtaatgaaataaagacaacactctgcaaatggctggtgagtctaatgatggtttttatgggggttttagaagggctattagattgtgcattcctttcctataagccaaaaccacccagcagaccttgggagatgaaccattttatcattcttctctcccttcccccagcatctgccagcctttgtccctcctggtataaatagcttctcacataaaagagcaaactgtcagtagcctgaaagctaacggtaaagctggacgcctggcactgtggccccagccgggtggtggtgagtcacagctgtataattcacggtcctgcagtaaaaggtatcagcgcatgctctaggttaacaggccagaaagggagctgaagaaacagggccaatgaaagacttttaaaagcatcttgagttttcctttaacaatcagccttgtatttgggtgatatccagggcatgccagtcaaaggcaaaaagacaggaatgggattgggtagcttctggggcacacccttcatccgtatctgcacgcaaatctgcttcagtgtcttggagattcaaataatgattctgatgaggacagcagctaccatttgctgaggacctatttggtgtctgctttgtcctaggatccttacaaagatgaattcacttcttctctgttagctactttagacttgggcagaagcatccccgtgttacagctaagaaaactgatgcttgagatgcccaaggttacagagttaagtgatggagtctagatgtggcctcatctattcctagcaatgtggcttttccattagccaacagtaatggctctcaagctttgtcatgcatgagaaacacctaaaagctttgttgaaacagattgttgggctccatcttcagagttctggtttatttggtctggggcaagtcccaagagtctacatttaacaagttcccaggtgatactagtgctactggtatgggaacctcgttttgaaaaccacgggacgaggcagaccaaatctgggtaatcaagccatcattccatgtaaagtcccagctcaaatgtcacttctgcagagaggcttctcttagccatccaatataaagtagatagattctctaaatcaggggtctgtgtttcaaatcaggcccccttcctgtttttgtaagtaaagttttattgtcacatgaccatgcccatttgttcacctattgtccaatgcctgctttcacattacaacatcagagttgggtatttgccactgagactgtacaatccatgaagcctatatttactatctagatctttacagacaaagcctgtcaactccttgctccagatcatatcaccctttcttattgctttgttaatagacgtcggtctctgaatgtgtcttgttattcagctattaagttgtctgcatccttcactaaactgtcagctccacaaaggcagaagtacttgcttttctattcacagctgtcccctagtgcctaggaaagtacttgccatatagttggcactcaaaaaatatttgctgaatgaatgtcactattgagtgcccaggtacgtgacgctgtctgtaccagtaacatgagagcccctggaggaagtacagtaaagccagggtaagagagtgagaagagataaggataaacagagattgtcgatagggaaacaaatctttgaagcagggccatgctgcttcctgcagtggtggggaaactggaggtggggaaaagatgaattccttagtcactaaggtcaacctcagattaggagaaatttcccatccctaagaatgaaagagactgtgtgactcatgctgttcccctcctccaactcacaccaagtctgctttcttggatctgattccctgagtggagcaatgtgcatgctcttcactgtgcatgaggaaggggtggaggaggaaaagcccacacgggcactagagtcagacaaatggctggttcaagtgctgtctttgtccctcgctgactgcggcatcttggtcaagtttctgatcctgtgagcctcaatgatttcaatggagaaatagaagattttgtaccaaggattaaatgggactgtttattcacgcaaaccctgtttattaaatggctagcatgtgcccagcattatttttggtactgagcatagagtggtgaataagacaatgtccgtctctaacagactcacattttggaaggtagtatggacataa

SEQ ID NO: 40408 - DNA, 1276 bp, Homo sapiens
cttgagatgttgaaccttgcaacccagaaaggcctgattaatctatccactgtatcactgtagtgcatggagtccgacatgggcttcccttcctagcacagagtgaaaccccaagtccttttccagattggcatggtcttatagacactggcatttcctgcattgtgctaatataggtgctggtccctctgccagagatactcccccaataaccagcacacctcacttcctccagttctaaactcaatgtggcctttcctgacattttctttgcaggagcaccctcagcccaaccccagcaacatagtagtcaccatctgacatgctatatatttcctttttgtctatcttcacccattagacatatcagatcacgagggcagggactttgtctctattgtgcacatgttggatatgcaaataggtgctcaataaagatattttgattaaatgaatcaatcaatcaatcaatccaacatgtggtgcccagtctgagggaggctggttatcttcacttccatgactaaaaggcttagcaatataaggcttaggaatttgaaacatttaaagatgagtcaaaaccatccccgctccaggtagtccctgctccacgcaaacacaaaaggatcacagtccactttgaatcaggagagcatctgagtgtcaaaaacaataccaggagctggcagttcccactctgccaccacttctgcatgtcctctcccactcccccaccacagtaggctccttactggttctttgtcagtgggacaggggggcaagaaatccaagttcccaccaagcaatcatgttatacctaatcagtatgcataagatgacaaatcctgatacagccgactttgacaaaaaagggaaaatttcagtgtggtgggagagagccagctatgagattccccttcacatattggtcaagaagcagagagttcattttgtttacagggcaggggagaagcatggacagacatcagagtttggggctagctcacacctaggtgtctcttattcagtgcctttcatcttgatttgcaagtctcaagtgttccatttctgaatctgcatctgggccccttgatccagattgggttttcccttgctgcagagcaatctagttatatttggtgacttaagctaagaacatttcacatcatgaaatctggttcatcaaatactcaacaaatatttactaagctcctactacatcccagctctgttccaggctttggggacacatcagtgcatatgggacataaatgcc

SEQ ID NO: 40409 - DNA, 2176 bp, Homo sapiens
ttcacactcttaaaacgaatctgccttcagaagaagaacggttttctggtcttgaaaagcagccacaatttgttattctaacaaagtgttcctttcctccaaacagaaataaaagttgctcaaggagggcttgtcctgatttctgttctgcatttcttgaaacttccatccagtcaacagtttctcctggcaggttctcagaaatccagagagagctgggtagtcagtgactaagaacacaggatcatttttatatgcctccctaacccccactttttggccccatgggaagatgctttattgtaggatgagcagaatcagctgcatatataaattcttcactgcccagctcacttgacacctttatctgaattgcccaacaggctgggaagatttggcaattgatgatttgaaaaggaaaggcccagatcttccccaagtggtatttgttctgtctgtacagacagggccatgtccatgtctctaattactcaactagctgcacagataaaaacatttgcgtacagaaagcagggaactcaaagtatacaaatgattcacaccacctaaacaactgcaaataaaggccggcccagcaaaataagggcttctagaagccaaaataatttaatatgggcggaaatggaatttggcaatccacacatcagactctgctccaattttggaaggcatgtcttccagctgcctcatcttaaaaaaaaaaaaaagtaaactgaccctctgcattcgattctcaacctcttgcttaggtacacacaagtgaacagatgggtggggggagctgaaacctcatcttttaaatcttacccagcacctacccacaatctttcctgattattttggttttaaaatttcccagggcacggctgcccaggcactccagatttgtaatcccaaccttcaccaagtcctgactcttccagcatctgagagggtgcatttggcaacttggaaagtaagaattaactctctcatctccaaactatacactcccccatgtagagctaggaagggctaggagaagggccctctccacctaccccaattcagaaagaacacattaacaaatccagagttgcttcattaccgaagtccaccaagaagcaaagaaatggatttttaaagttctgggaaaataaacaacttttatcttttcggggatataagctcaaaatataaaggtatgtgggaagaagtaagtcatgttttaaagtagatcttcctggagatgttaagaaatattttgaatagaaaataactaggtcattaacagtaaataccttttaaatatttaggggaaaatgaattctaagagaataaaggctatttaaaaagcaagtccagggatgttttcatgttccctcttaagtagtcctaatacaataataccaccatcgcctcgtgatattatgattaccattgctggttaataaagtggctgcgcgaaaggtggctgacactcagaccctcagttcaccaggtccccaccgcggggctcctgacttcccagcgtctgggtggcaaagcgcatctctcccagagcttagtttccagctgcaaggcccctttttcaggggagctcctgaaaccaggagcaaacatgcccctgcgccgccctctgtgctccccggctatgggggggccacttacccggcttagccttgcattgctccgacgctgcggcgcctctgccggcccgggaaactgcgggggagccggggaaagggggttggagacccaggggcaggggtagcggccgcagctaaggaacccagcggggcgtcggcagccaactgcccggagccgaagggggccctgcaggggctccgcacaaggcaggtaacattcctggggcggcagctgctctgtgcgcagctccggatccaggaaaatcgctcaggtcctggggagaggagctccaagctctctgggctgcctcccggctgcttaaagggacacctccccacctcccactcagcttattggtgaaaatctcgagccacaggccaatcctaggcctgttcccaaattgagatttcaatcaagggagctactactttaaaattagaaagggctaatggagtgctgagccacctttcaaaagcagaaggacacaggctctctggccctcacaccagaggtcctgagagctggc

SEQ ID NO: 40410 - DNA, 924 bp, Homo sapiens
agtgattaacttctccaggatacggtaggagtccaactcacatcctcctgacttcaaagtccttgctccattcggcctccctaacacagcagtcctgatgttgctcacaattatcagattccttcaggaacaaaatgtcacagtgtaatttttctaacaagatcttggtgccaagcttcctgggcttccagctccctggggcgattagcacaccgcgtactaagcacagcagggcgggacttcaaagaagaggcgctttccccaggacggtcagcagagggcagggttggcctgctcaagaccacctgggcctggaggatgcggctttcaggctccggtaagggagatctcccaaacccctcccctccgagggtgcctttcagaacatggcctctggtgcctcaatattgatttctaaagagacggtgcagcagaaagaccctctcgctgctttctccaattgtctctctcactctctctttcaaaaatgactcgcaaaggcatctgaaatactttcttcttgaggcttcctactccacaatgagcagtttcagagctaaaaatattccacatgaacactcctgattgctttctctctgaaactgacaaaccagcactttgtcaaaacagtcttttataaacaagaagagaggcaaggaggagctcacagctgatcagacccgcgtgtaagaaaaattctttcacctgtgattggatcctggccagatcttttctcacctcttggaacctcagtttattcatctgtaaaatggaaagcactaaaactctcttccctctgagcaccgtacagaggactaaaagaaatcagctatggctggcgcttagtagatatgcaaaaagatggtatctgtcttacattttctaattgttttgtaagtgttcgtgtgatctcttcaatgtaac

SEQ ID NO: 40411 - DNA, 1100 bp, Homo sapiens
gaaggaaggaaagtataaatgagtcaatctcagtttagaaaggaccttaaatcctatttacttcaaacacctactcacaagtgacttgatattgacacttatggccaaatgtttaccaagctggtgtctaaatacctccaggatcagggacatcagtaccttcccagatagccatctcatttcataacatggaaccaaacaaatctctttgtatgttccaggcccctgtcctagttttccattccaggaaagcataaaggaaagtttcagctctcacaagtaatctccttcagctatttgaagagggctttcctttagccccaggtgccttttcttctccaggggaactgctctcatgccacatcattctgcaaatattcactaagttcctactaggtgtcaggccctgtgacgggtcctgggtgaacaagagtgcacacaaatggcacattctctgttttcagagaggagcttatatgttagtagcaaaggcagacaacaaagaagatagctaggtagtgagatttaacaattactgtaattccgttttccagatgaagaaaatgggactttgagagcctaagttacttgccccaggtcacacatctctttgtgaggtagacgggacagctatgtttattcccataagccaagggatgattacagagcaagtggtatgtttcattctaggataatctctatgtccacagattcttatttgttttgctttagccaacaccaaaccccacccctgaagtttatccttagtgccctgtgttgctaaaggtcactgaaagcctattgtatctaaagcctctgtgtcacccaacatttcaagactcattgggaagccccagtgagctaagtgaaacctgtaccaaggactgctgcagtttcttaatttaggccagggattgaataccctgttggcaacgggcttatctaacaactgtgatttttgttgtgtggtcagaatgttgtcttttcttttctttcctttttttttttttttgagacaaagtctccctctgttgctcatgttggagtgcagtgatgtgatcacagtttgctatagcctcgacttccctcctacattttag

SEQ ID NO: 40412 - DNA, 561 bp, Homo sapiens
ttaatctgcatcaataagtaacagttcagagcagaaatacaatgaatcctaaatactttatgcttgttaagcgtttctctctcagtcttaaagaatggttaactactgtaaagactattttgccagcggtggaaaggggagctggaaaaatttaccttgaatataacttttacaaaattaaaaattaaactaagtaaataagtgacttgcccagtgtttcctaaattagtcaacagcagctctgaaaatcacatggcaagggttttctcctggaatcttaaatcctaactagggtatgggggctgggtaatcagaaaacaaatcgagtccatgctatcaggtttcatcagctttttgtaatatggcttccccctcaaccctctacgatttatgactctttcccctgtcctggaatatgatctagaatgttctgaaaaacagttggaaagttcaattagcctcattttaatttccaaaaggttttctctaatttcagtatggcttttagaaaaatctctaacacaagtaacaccaccagcctccttgcatttcatcacacac

SEQ ID NO: 40413 - DNA, 886 bp, Homo sapiens
aaatctcattccagaccttcctgccagagactctggtgctggatcaccttctgtaacagacccacagaggcacgctagaagataacatcagccagacatgaaatctgttgtgaatttgttcaaacactcgtctgctcaagctaaagggcaaagataggcacgtgggtctgtaaaagggtaatcagctccaggagggcaggcagcaatccttggaaggggggcaaaatggttgcagagttacatgtgcttgatccagtgccatggaggtgtcctgcatgccacccggcacagcggttaaatctccaccactggaatgctcctttgcaagtcctctccagataagaaggaaagaatgtagcagttaagaatcttatcgttcaaaatacctgtccccagggacccgcctgccaggatgcacattccggctgctgacaagtctgcatagatgttggcttggtctcagggtcacacattctatcatttaatcgatcttcaccaaactgacaccagacctggcggtgcttatgcccttttccacaggtgaccaagcactgtaatgaaaagcggagctagtcagggtcatttctgatcaatgtgttgtggtttctggggttatttattgatgagtaggaacaggtgtgtccttttcccacagcaatcactctcccatagcaatttgtaaatatactaagcctcatttttttccttttgttcgttcatttattcattcattctatatttatagtctctgggccagttttgagcacaaaataaactaaacacagctccatgctataaaatttgaaaaacaacattcataattttatagcataggagttaagcatggggaattataaatcacatcaacctaagttttaacacttat

SEQ ID NO: 40414 - DNA, 662 bp, Homo sapiens
tttccctcccattgcacccatcagagctgggttgctacaaaaggccctctctcctggaaattcctccctcctagaatacacagaaaagtatggcttggctgacactgaaaaaaaacataagggataaggatgaatattgcttagcaatggaacagctgtgactggactcaacgcgagactcagtgtgggttgtaaaaccttctcagtgcatgtgctgcatcttccatcaagccaagagtaaatatttacatatgccagacttgatgacaacatcaaattcttcctaacttgttgagtaaccaccgtgaggttcaaaggctctgaggtctcgactttcacactcagtggactgtgacttgcaatgtaggcttgcacacttttcatttgcttctagagagacttccttatgccaacaggtgactttcccattctattccgttaaagtgtcataactggctcagattgcctgtgccagatgacaaatcttccttaattttgttttcattctttacaaggagattaagaaacctccactgaataataaaaggttatcaggaggccctccctgaattcaggtgcttgatgtgcattgattaagttgacttgaattgaggccactacttggagggagattgtttttccaagaaagggaagaatagcag

SEQ ID NO: 40415 - DNA, 740 bp, Homo sapiens
tcttatggctattttgagaattaaataagaaagcatatagagaatttcttataaattataagttacatttttaaaaaaattcactcgtggaacatcgattttgtgccaagtactgggctagataagttgaaataaacaacagcaatgacaaaacaagaataaaacgtgggtccaatcttttaaaaaaaggattacaaaaatttaagatagtatccttattttaaaaaacctcacagcaaaaaactttaacatctgctgatttattggtaaaaatgttttaaatgagcttcacttcacgttgcaatacaataaaatgcacagtatgttactaaataactggaattatttcagcaaataccagccaggcctcgttattcagtggttactcactgaagtgtttcctaccaaatggggttgggccgaggagatctgaatgttaacattaacagttggaaagttaattattgctctctattttgtaaggtttatcaaaatttaactgagtttcctcaaggcgctgggctaccttgtgacttcacagagcacaggaccaaagggaggattcaggagcaaggcgagacccctttctgctccacccaagcttgacagagagaaggaagtctgcacaggaatcatctgtggtgttccacttggattctggagccaggccaaccctggtttccattcctcccctaaagctactctagttgccctttcttgtgtcatttccttctttaaag

SEQ ID NO: 40416 - DNA, 2627 bp, Homo sapiens
tgacgtacacacgcagtcctatccctacggtcctggaattgggggttactatcttggaatctaggggcactccaggctctgggctcagacggctggcttctgcctacccgagccttaacctttcaaggaccagaaggattccagagctcttgccctaggtcctggggcagcgatgactcactgcagcaccccctcccacttcgccaagctgccgtctccgcccacccccaaacaatctcgacagcgcatttcgggagccacggctccgggcgctttgctgggggctaaaggggtttatccctttccttgaatcccagcaggctagaactaccccctcccagtcttcaggcttgccacgctctccacccgatccttccattgaaaggcagagaaggaaggatgtgcttgggaactttaagacccacgaacgacagcgcactgatggagcagcccagtgtctgggggtgagtatccaaggccccgcttagaaaagggagggaggggctgtgggtgcttcgggaagaataaaggcatcaccgggcacagtgcctacgaccccattgcgcttacagcgccgtgcgctgggagagactgacccgggaaagtttctgcgtcacacgcgcgtggcagaaacgcacgtcgcttgggaaagtcaaggaccacccttgctcgggccagaaccgtaccgcagcgactcctcaaatgtcgtggagaagtggggggcagatgccttgtaagatccactggagggcacatgcgggggtcgacagagagtcggggaaccaacgtggattccctgctaaatgctatttggcagcgcaagaaggcggcctccccgccctgcctcagtccctagggaaacgtgcgccgcaggctccctctctccactccctggaacccgtgagtagtagaaaccccagaggaaccgaaatcacgtccggacagcctctccaggctgtctcccactatcccgtttctcccggccaccccgccagtagggtgcagagttggactgcgctgcacccccactctcggttccaccccaattcaaagcgtccggggtaggctccgccttctcccccgcccccagagccctcggcccacccttccgttcctgggacgggacctgctccctgtcaatccagttcagcctcagggttcctggcgcgtgaataaaggccctgagagaaagcggggactctagattacgcaccgccctccacaacacacactgaaggaactcccagtgccttgggcaggggatcctcagccccacatccccgatgcaaggcgcaccaataaggagtctggtccgccctgcgctcagcggctccgctcccgggtggccaagtttgctgcagggaaccgcaactccagtaactttctccgagtttggaaactgacttccaggccgcctcgcagcgttgggcaacgcgccgctgaaccgagtccaaactccagaaagctctgaaacatccagaagcccctgggggcgggtgtgtgcgctccacgccagtgtactcgcacgcacagagctagctacccaaaccatacgagtttctagctgatatttaacgccggagaggagcggagcctcgccacagtgagggtctctaggcttagaggacaattaagtcttctagaagcgggcgaggaggcggaaggggagaggaggtggcgcgcgcccacttaccattcctgagcagaggctgatgacggccgtgtgctcggagttggtattgacatagcctttgtagaaacagtgcttgagttccgcttcctcttcggaataaaacttggtctgattcaccccgggcgtcccgaggagggtgacagtgaacagtggagcgataaatccggcattggcggtgagattaaatagaaactgctggccgaaggcagagaggcggtaatgcgcctgggaggaggtagaggaggaagaggaggaggcgaaggcaggccaggggtcagtggcagagttaatgctccgtcgcgttcttttgaagtggacgttcgtgggaaagggttctccgagagcgttcactcggatgggagacacgatttcgtattcgctcagggtctctaataatttcactgcggagagaagcagaggtatatgaaccaataattcatttttccttaagctttaatttaaaacgaaggtggggactttgttctgaccttattttccagcccattcgagtcaatcccttcacccttaatcagtggacaaatatttgctgagcacctactatgtgccagtaacaggacctgtgctaggtgctgaggatacactattccgagccagacaattaacaagtcaaaatatatatgatttcagatattgataaataacctgaataaaataaaacatgacgctatctggtgcccccaattactaagttactttagtttgcggcgtgggagtggggatggggatatatctggcaacagcaaggtaggggggggttgcctaaattcgtttccatagtgtccctccctagcaattggttggggatgacccaaagaagggagaggctgcaaagcgggagataattctttctaggaaaaggagagaagcctccgctgcggggtgcccctgcccaggagcgaggaccgggaggcgg

SEQ ID NO: 40417 - DNA, 1456 bp, Homo sapiens
cgcgaggcagcggccgtggagagcgcgcggagcccggcgcccgccgccaacttttgactttaggagtcgctgaggtctcgctgcgagggtcccgtctgcgctcggctgagcaacgccgccgcctgccgagagctgagccgctcgggccgcaggaggagccggaggagcaggaggaggaggaggactggggctcggctgcttggccgcataatgcccagcgagcgggcaggagaaggcgaggaacttgcgctccgaggcgcgccgggcgccctgtgctggccgggatagctgagcggcttcttgaatggggggctgggggggcggaggcgggggggccgcgggtccacagcctctcaaatgcccccggtgcacgcctctaagaggaggagaggggaggagaaagcgagacgaacggggaccgcctccttccagaccatgtcccctcctcggccggcccgtgcgggactcgcagccggaggccctgccggctgcaagaggcggaggccagaggcgtcaccagcgccggggcagctgttcctggtccccgccacctcgctgaagtggggttttctgagattccctgccccggggagggaaagcagggaaagttctctccctttcctggcgcgcgtgcagccacttcccctctcgtctttttcctctcctctcctctctctcctcccttccgagtctctttttcctcctcccccttgtctctctgctgctgtgcctctcggactctgtcccttctccccattttcccctgtgatgtctgtcttctccccgccccaccgtgtccctgtctgtttctcacatttctccttttcctttcctttctcttccgtccccatctcttgccaccagtccccatcttttggtttcttacaagtgaaagtggcccagcgccggagcgccttcccttcctacactttttcattcgggaagagatttggcacctgagctccgctctcgatttaatcaccccaagtcaagagttttagaaatggggttcttaatcctgcaggtcggagtgtgtttctaatacgtggtctcttgaaaatttcgcaaaatatttaagctgtgctttccaccaacctctgtcaccattcatggagggtccatagcattctgtaggtcccctgccccaaaaaaggttaagaacaaattttggcagcaagaaggggcggggactctggcgcccctcactaccagggggtttagagatgggaggggaaggggggatggagtgtaaagttgtagatccctgtgggaggcaccagtccctggagggatttctcaatcacttccgcttgctttcagcctgagagatgcttggaaagactgggaaagactgaaagcaggcgcttcaagctacaccttcgtgtgtgtgtgtgtgtgtgtgtgtgtgtgtgtgtgtgtgaattgttcaatcttgggtggttcagtggcgcctttt

SEQ ID NO: 40418 - DNA, 1162 bp, Homo sapiens
aagacaagaaagtgataccatatctccatttttgagcagaatgaaagatcatggtcagcaggggctggtgaatttacatcataggagtagagcaacttctcagaagacaaaagatagggcaatatgtttcctacttttgtggaccacaaccctcagaaagaaacatattttatgttgtgagctagtaatatactcagcctccattctatttattcagtttcattcagaagaaaactctgcttatgactcaccaaaatgatttcctcaccctagggtcacaacctacagtctgaagaacaccaggttagggagttcacatgcaagtccttccaggaagccttcctggaacacccttaccgggtggaggttgttaccacacttccatttccctggctcttacgaattcaggctgtgcctcaccatgtattcataactcttctcttgcctccccaaatgcattcactattggtgtatccttcctctactacttcattactttacatgaaagagacttgctttgagaagctgggatagttttatatttgtgctgggggaggtaggggcaggcagggaggaaaactaacatctcttcaaattaacctgcattggctgagtggctgctctgtgccttgcactgagcaaggcttaggaggagaatgggacctttccagactcccaaagccttggaggctgtgcagaatctcagaatgtgggagtggagcacacggccttcggcatgaagcctctaagggctcctggacaggggcatggcaccgtcagacctctgccctgtgacgaagaagcatctttagtaatagaacaagactccatctgcctaaggagaggaatagcacagctgtccttgctccactttataaaataaataatgtgtttgcactcaaagttcactctccagtgtgaagtgcacagagaatcaggtagcgactctatgccggtgcttcattccagccggctggacagggaattgatcttgtttctgtttggctgtttaagcttagaatgtacattcaggactgaagcagctgagaaactagcccatgggtgagttccttccagccatgataatggagagaactacaaccatggacttgttaggaggcagacagcgccagatttcaattttcttctactgtttactagc

SEQ ID NO: 40419 - DNA, 1242 bp, Homo sapiens
aagggaggtcaaatgaataccatttgtgggcaagaggcagatctcttgcaggtagatgacaatggtatgtgaaggaactgtattctaggacaactaagcataaagaaatagtgggaagcagaatcccaactcagagggagaggatgaaagaacatttattacatttccctacccagtgttcatgctgtccctgttttggtagagaaaccttgctgccctttgaggaatcttctaggttatgtgtttaaggtgttgcagaaactgttccctggactggtgggggtgggagggacaaatgacccaggtccagccagagggaattttttcagcttttgctgaagtaatttagaaagtcactttcattctctgtggaagcttaagctggcaggatatgcccccagggctgctggggacatcccaaaaggaatctgcttgagaatgaaaccaatgcagaggaaggagtgaagaggtgaagagaggcaggtcggttggatcattgttcgggaatctgtatccagccagccatgcatcccctggacttttccgtcacaaggctggtaaattccctttttgccaaacccagttggagttagtttctgtcacttctgactcatcagtgaggtaaaggggaagacatacctatttatagtatgtggcactttttcctcaaccaccaagtctttaataggatctctatcttggtctacagtgaccatattttcccaaccacttccctatagaattaggatatctgcccaaacagaattttactaatagaagggtagaacagaatgttcgaaaatcagaactattctgaaaatccgggacatgtgaaggaaacacacgtcctgagagtcataatcacacagtctcgttacctgagtgaactcctgaggcatgcatttcaaactcacatttctgcatttggtaattgggctaaaaatatcttgctcatactgtctggctaaagaatgaaacacattgctcaaggagcccttgccccacctctaagcgagctagtcaatgtttggaccctgcaaagagtcccaggtggagaattcagccctcctgccatcttggccacttaggagtgactcagctcagtaacttggttcctcagcatctcagtagctacttgaccctgtagaggtgacatgctatgccttagaaaggtactcgtaggaagcagtgccaagccacatttgtcttcagagatgatctatcttcagttcttaagagtag

SEQ ID NO: 40420 - DNA, 1961 bp, Homo sapiens
acaaacaagcacatgtaccgcctgcatccaaaatgtaaaaaaaaaaaacaaacaaaagaataaaattgactgttgtctctgttcaaatcactattctaagtcctttccgtataacccactgacttctctgaataatcctactcattagttatttccatttctattttgcagttgaagaaaccgaagcacaaagaataacttgtccaagatcacagagtttaggaagtaaggaagcagggctttgagctttgcatcaagtgatgacccataaatgcaaatggaatacaacaggagtgggtccctaaagtcccacccagagaatgcccttctgccaaaaaatttcggattgaaacagcaaaaacacctaagcaactgatagtcaggtatggtatttttcgatgtccaactatagaactgaaaagatcttttctatggttagtctacacgaatttctgttaaagaaggaacaaatgccaaacgtagggcagggtactgtttgacagtaaagaaggaaattttagaattgctttctggtggtatcacttattgcttattgttctccaccaaaaagcaacttttaaaaatcagcaatgattgaagactgtggcttgctaaagaggacagatttttctggtctattattctggagtgggggcagagtggatgtttgcttagcaggcagagagctcagtactttacatgtggcatggcatggtagataaggttaggaattatgtcctttttttgtttgttttttaagatttggaacctaggctcaaaatgtgctaaaggtcacatagctgctaggtgctaaagtgatgattcaaatccctggtttatctgactacaacagctcttgctccttccatgatcctaccattgcaatcccaccatagaaatcctaaatacaaataaggacagatatcattgtccaaaatgagtttccattgtcggtttatctgttgagatcgacattttggctttgaaaaagaaaattactggttagtgtttcaccctatttcaacctctctttcagcttccacatgagatgattcccttaaaattttaatgctttcaaacgaacgaaatctagagatattagctacattttccaaacaaacaaggggtaggaagggtgggaaaataacctaaccttgttcttgagatcagaaatgcttaaaagcatgtgttaaaagcccgagggagaaatattcagtatttttcacgagttcagctcaggctccatcgcctaatcattttcttatcgccaaatattacatatttacacaggtggttctctgatttaattgtttgaaagcagtcactggaagcaaagctatgtgactcagctttggtgatgtactccagctggagtctgacaggtaaataattaccactaatcaaagcctagatgaattcaggttcttcaaagtcagatgggtgagaaggggacagggattattaatgaactgttaggaatatcgggagaaataagagcaggacagtctagtctcagatgaaaacaacaaagagaacaattaacatcagtaagacctcgggtgccatgtgtattacagcacaaagatctttggctgggctccgttattccccattcaggcataattagtttgggtctcttaggagcctctctgggtctacgaaactcagttggatgatgagctaggtccttctcggttctcacagggtataattgcatgatttccttaagcagaattcagatttcttgacatcaagagggaaaatctctttctcttgcttctgcatgagtaaatattgtttaaaataaaaattaagaatgaacacatttgctccttaaaagcaaatcatatgagatgagtgcatattaagtgaacaaacttagatgggaggggggactaaccatccctagggggcccacagatttcaatagaaatttccatggagttattatgaaggataac

SEQ ID NO: 40421 - DNA, 599 bp, Homo sapiens
actaaatgagtttctaagaacaggcagtggagatcagctgtgggtatctgtcacagtcctcctatcaagatttcctctactccaggaaatgatcacatcccttccatcatttgtacatcaactagactctctagatcatcttctttctgtctcataaatgtctgtctgggaggtgggcgggtctggagaacaggccccagcaaatttctgacaccaccctctatagagttctctccctaaaaaggaaaagaagaacaagaaaaaagaataatgaaagagaacccttcttaaagaggaggagctctctcattacaaatccaccattgcctctccgacagctcaaagagaaactgcagtgatttccacatcacagaaactcaacgttaagtctccacattcctttcctattacacctgcctgccacctgcagagatgtactcatctcatttcctgagagggtttctgcacatggcaaggtggcctcaagttaaaggaatgatgcaggtcaggagacacacagtacaactctttgaaatgtttatgaaatcagatcctgaacttgtcctcccaccattatgttgcatgacagctatcatacg

SEQ ID NO: 40422 - DNA, 677 bp, Homo sapiens
attaatttcagtcccattataaatcatgagttgtagcttgtgaccatagtcctttaaaatatcttgagcttcatagacagatgaagtctgtgacctagctcttcctcctttcatcccactctctcatacaatgttaggctacctattaaaaaccatcccttgtcccccagatcatggtcgggccaaggagataaccaatcttctccacgtgactcaaggccaaaaggtcccattgtgattctccatgcaggctcagagcagaggagttaatggtgtaagtggtcttgttgtatgcttggcacaaattcactgcaacaagtaaaagctctattgattttttggaaacacttaaaatgaactttgctctcagcaggcagctaaccaagactagaagttgttctctataatctgtaaaaccaacagagctgagggctgtgtacatgtggctgtcagctcagtccaaacgaagcaaccattttcaccatatgatcccagcaagtcattaaaggtgtgtggcacctatgcttatagattaataactcaggaaaatgcatccaacagcatccaaagtcaatgggcaccaggttaatccaagcctggactgtctatgcagtgacaccactcagctgctaaattctttcccccttttctagtataacttcccagcagtcattgct

SEQ ID NO: 40423 - DNA, 534 bp, Homo sapiens
aagagatgcttgggatctggtgatgctgcaccggagatttcaacctgtttttcaaagtgattcctagggagtgtgacgatctcaactcttttggaagtgacttgtcaaaccatgagccatgctgagttcagcacaagtaatatgaggcgaggcaaggcaagtgggtgagtaaggaggaagcagcccagatgagccggcagagtgcccactgggagtgaggcatgatgaggattactcgtcgtgggaggcatgagggcactctctggcaaggttccttgcatcaccaaaatgaggtcaccatggaagcctggctcccagacctcagagggcataaggcacactcagtagtttgtcagaaatgcagcagcccaggtcccaccactgggggccgaggaatctgcagtattaacaaaaattccaggagattctgatacagagaatctgaggaccatatttaaggaaactctgatatggtagagtattactctttcaaatcaggcaaactcagataggcatcctttaacaaagtgcttt

SEQ ID NO: 40424 - DNA, 1063 bp, Homo sapiens
ccacgcctggctagtttttctatttttagtagagatggggtttcaccatgttggtaaggctgctctcgaactcctgacctcatgatccacccacctcagcctcccaaagtgctgggattacaggcgtgagccgccacgcccggcctctatactgctttttaagataaatgcagcatatttcagaacattttgttgcattttaaaatcccttgagcatcattgatctctatatcctccaagagttgcttacttttccccaaaatgaatgcatacatatagttttattaaagaaccctcatagattaggacctgtgcttgtcctactgattaaatgtaaatacggaagaagtaggagagctcagctgggctgttggggaaaccaagcagaagccgagcattgccatttcagcactgagacaaacaaaacctgagttgctgggaaagagagtggacctctctggacctaatttcctccaggtttaaaggaagtgggaatgccaaccaacctcactaactgaatgaatcaagaaaaactgcacaaagaggctttgaaagggtgaatcctaaagtgtctgtcacatacaaaatggatctacgcataagaaaaatgtactatttttgtcatcaatttacattttttcattgtgatattcattcccctctgcatttgggtctcccgacttcagcattttagtggaaacattttgctttcctcctaagcattccaacaaatgctgtgtcactaatccacatgtcactgaacacatgggataccttacagtttcgcaaggcaaatgttgcaataaaaactgaaaaactgtcctggagttggattaggtaatacagtgtgcaaggggcagggaactgtgtgtgtgtatatatatgtatacacacatacacacacagttatagatctctctctctctatatatatatatcgagggggagagagacagagagagtaggagctagagagggagtcatcagggaccactgaaagccactgaaagaaaatgactgtgaggtcttggtcaagggctggtcttagataccaaagaagata

SEQ ID NO: 40425 - DNA, 583 bp, Homo sapiens
ctaaatgattatttcaattagcacagaatgtgcatttctactcatcagatacatggacatatttttgcagtttgagcacctactatgtgccagagcctctcttggtgcttttcatgtattatgttaattaactctccctacaagtctatggggataatactattgtcccaattttataaattgcaaaacctcgggtaggaacttatccaagatcacaaagccagaggacagaagggctatgagtcaaacacgtatctttccacatccaaaacctatgtttactcagcaaccactgcaccgtgcctctcagtgccctgaaggttattttacttttactttctttatttttttattttgtttatttatttatttttttgagacaggatcttgctctgtcacccaggcaggagtacagtggcacaatcttggctcactgcaacctgtgcctcccaggctcaagcaatcctcccaccttagcccccagagtagctgcgattacaggtgtatgccaccacacccggatgtttatttatttatttgtttgtttatttttgagatcgaatcttgctctgtcacccagact

SEQ ID NO: 40426 - DNA, 997 bp, Homo sapiens
aagtatgtatttttcactttgcaataaatcttgctacttgaactattttctgcctcatccttgaattccttcttgcaatggggccaagagcctggatatcagctggaactgaagtcccaccggcgtttggggacctcctccaaaccaaaaccactctctgtgtcacagtgatgttggcctgggttctacatttctcaacccccaatctccaaatgagtggatggcaaaggtttccagagtttggttacaatctctctgtgctaaatcaagatcatagtttatgacccacccagaaccatactgacaagacacaaattacaagttggccacatagaaagcactcaaccatttaatctacctggtatttacaaaatgatttcgttatgccaattgttacatgttgtggggcaaatacaaaaaaagagaaggcataatttcagcttcaaagaaagtccaactttcttagaggtaaaggtaaagttcattgtggtgaacttttaccatagtgaggtaaaagttcattgacttgttgattcattcattccacaaatattcactaagtgagtgtctcatgtcatgcactctctaaggcactaacgccatgaaggtgaacatggtaaacgggcttcgccctctctgagtttatagtcaaaaaggacagatagacattaaatgcataattatacaaataatcacaatagtggtgaacactacaagggtgaagtacaagatgttctgtgaaacttgaccttgtctaggggcacagacaatacatcctaggaaactcagacaagtttaagataaacaaacatggacattgattagtcttctacagggaggtctagttacacaaagtgatggtcctctgacaactctgaaatcaacgcattcaatgcaaacaaagattattattgtcttctggaaaagtttccagatctcattagggaaaaatgaacccaatatttgttcttaacatataattacttcaaactatggt

SEQ ID NO: 40427 - DNA, 432 bp, Homo sapiens
tgttgggagctattcattcactgtttttagctgttttatgatgtaaaataactgaaactcatgaattgtaatgatgttaatatttatcataatacctaatgcttattgagaatgtagaatcagccatgcaattcttctaagcactttacattactcctcaccacaaccctgtgaagtaaaactgttaatatccccattttacagatgagacaactgagcttcaagagactgattatgttgcctagtactacagagctggtaagagctaaaatttgaaccgggatttggcactctagagccaatgctatgaatcactgtaaagcaggtgtttctcaatcttggcactactggcatttggggctggataaatctttgctctgcattgctatgcactgtaggatgtgcagcagtatcctcggctcttactgacta

SEQ ID NO: 40428 - DNA, 571 bp, Homo sapiens
gcaatgttgcttgaactctttaagtcttggctgctctatctgtaaaacaggcatgccaccgcactgggttgacgtaagggttaaaattaacccatgtaaagcgtgttcacagtgcttgcatacacagacgttccgtaactggcagttattatcaatatgacacatgaaagtgccttgagtgactcttgtagggagaggcattcctccaatggccctgacccctgaatgttcctgcaaagaacactaaggcctgaacaccctctgcctggaccactgcttggggttatgttcgcagtgaacaatcttgagagatgaggtaatgtctccatccaggaaagagcaggcttgcagtacaagaggcagattcccccagctcagggtttctcagtggcaaagcaaactcagtgtgtacaatctccacctgggccccttcgaatcaccctcctcaggacttggggagcatgggagcctacgtaaacatgatgctcatgccacttgttgtgctgtgagcaataacagcctttatctctgacccaagagtctcatgttggttgccagcatgcatgaaact

SEQ ID NO: 40429 - DNA, 639 bp, Homo sapiens
aggttggctaaaatcacatgaaatcactatgtatgagcattttgggtataatactatgcacagtagacaatataaaacataaaacatatatattttatacagtcatttaagatttggttttatctgaatgtctaagtggactaacttccagccaaaggtttagaaacaacactgaatctaactcagggaagagccactgccaatcctgctttactaaacattacaaccactacccagcaaggccaaattccttgagcaaatgtgtgtttgctgaccctggaacccatctttgaagctccccatcgctaatgaaaagtgaactctacttcctgaccttttcagctgttctgggaatccagccataaccagagtctcccaagagaatctctgaatttgtctactgcaaatacagcactgcaatctaagcaggaaactgaactagattttaaaacaagccgttagcaacaaaaggcagaacattaaaatcaccatgtaatacaatcctgctaccactgacctttggttatataagtagttcagaatgacttgattgaataagagatgctgtattactttctttctgtgactaaacattttggggcctcatgttcaattagaaattaaaatttggccacacat

SEQ ID NO: 40430 - DNA, 1136 bp, Homo sapiens
cagacttgtctggcaggaagagaaaatagtgttaaaggggccacttaatagcaatgacaaatgtaccagcaagttaacttgtatcaagcaagtagagaaaatattcactttcaacccaaagccaatgaatttcctaatcccatgcatttgcatttcctgagtttctgattcttgccactttaacaaatagaactcatgagtatgataaaggccattcgtgataagccagtgtttgaaaacagatgactatatacaagaaatcaacgactctgtctggtgtatttactttcattgccagataatatttgcactaatattatatttttgtagtgaaaaacaagaaatctaaactatttaaatgtaaatgagaacattcttattttacactatttacagaccattatttggcagatttaagaatttatatttacaattttagcaccctctgcaccatatatagactctcccgccctgtgcttgaaaccagaatgcagcccttctgttcaatcgccctgtttctcccttgcagattacattaagcaccttgtttattcctgttttaattataaaaattggtatggtagataagagatgagagcagaactgaagtccacatcactgcaggcaagcaagctgggggttacctgctcaactgaggacccaatgtcaaggcacaagtttggtggcttgtggcatctcatccacatttcccaaggggcacactgctgtgctgtcatctaccaaccagacattgcattgagcaggttgtcagaccaaagatggaagggaggtacaaccattcccaagtaaggggtaaaaggtacagtgcataacattacaaagccaaagaaaaaatgatgtcatcattgcaaaatgtgaataatttgctccatgaacacatgcaagatctgagtcagaagaataaaccactctactcagtgatatgttggatggtaacaaagaaataaatctaactctgcaggcacagtataatgttcattcacctttctggtttcttaaagaatctctaaagtataaaatggctgaggactagtggcttagtgataaggatcgtgaataaaggacaaaaataaggaagcacaggacaaagacaggaccagataggtatgacgaga

SEQ ID NO: 40431 - DNA, 960 bp, Homo sapiens
tgaaagaataggtgcatgaggcaataatgtgcctccatctctccatgaaaatcctgagttctcctcaaaagctcagaaattcccatgccagcgtcttcacaaccaccatttccatgtgattaaaataaacagccaccttttctgaaaaatggataactttgcaatatgttcatggaaaagctcaatgctgttcttacaaatactactcaaggaagttttgtttggaagaatttgaataaaatgtcccacgagagggttctgcaaatgaggcacaaacctaaaaacacagctagtctctgtcacctaaatgagctgctgtggcctggctcatctggtagcaccatgactcgcagttcctgcaaacctcccagggtgcaaagccatgacagatggtcacactactgaaaggggaatacctacaaccacaaccaaagggagaagtccacagaagtccacaaccaaagggagaagtatgacaccttggaaacgtaaacagcatcccctaatcaagggctgcaaagtcaaacgtctacagggacaaggaaggtaatataaataactacgtacaacatctgctgggtattatgcaagaggggatggatggtgctggctgcagctgcagagggtgtgccacacctgaagcataaaaattattatttaaactctgggctgataaaaacctgcccaaatccgtggggggcgggggtgagtttacagcctgaagcacttagcaccctaaccagcagacaggatgtgctcattaaaagatgccattataagcaggaagccttgtgagtccacaagagaaaaaaaggcctgtgaaatgtttgctttgagatccgcagaaagagataaacagtaccaaagaaatgggaggaaagggcttggtgcgatggctcacacctgtaatcccaacactttgggagacaaggcaggagaattgattgaggccaggagtct

SEQ ID NO: 40432 - DNA, 431 bp, Homo sapiens
aagaaaagaaaacataattaaataaaatcagaaagtaggagatagcacatgtagatttgtaagaaccaacaccggatagcccattaacccccatagatacattggctctggtggggaaaagcaccatgccaattcaagcaaatgtgaaatgaagcccttcattcatgtgtatccactcactcattctttccctcacttacgcaacagctagtcactggaagcttctcgcatgccaggcacccctggctctggcctgaggacatggtgttagaccaacacaggactcttccagagcttactgtgtccagcactgaccagcagaattttcttgatgatggatgtattttagatctgctttgccctatatgattgctacatgtgtctactgagcatttgaaatatgactatggcaactgagggactgggtggga

SEQ ID NO: 40433 - DNA, 476 bp, Homo sapiens
ggagagaagaatgcatgcactctttcttcatgcacctgtgtaattaatgtttgacttgctccaggattgggacagcgtgactgcagcacagccagccagctgaaagcacaacactgagaaaagcaaatttgggaattgctgaaggggaaagagaggaaaataactgtggaattctgggtgcttcccaggaggccagtattacagcttagaggccaaagcagtcagcagtcaagagctggcatgaggccagtacagctggaaacacagcaggtggagtgaggtggagggaaggaacacgcaggctcagggatccggcttaggaaaaatcaggctgggggacttaaagtaaggtgagcaggaatcataactacttaggtttacctctgtgcaaagttttctactgaatgctgggacagaaactcaaaaccttgcccttcagataaggctaaatattacaaaaagaaaatttccaactt

SEQ ID NO: 40434 - DNA, 872 bp, Homo sapiens
attgcaacccaagtcccttcagtatacataatccccctcactctgttcttttttttcttagaattttcacctcctaatatgcaacacgagttacttttacatgaatttattttcggccccactccatgaagacaaggatttttttacagcagtgttcactgatgcacccctggtgtgtagagcaatgactgatacatattaacaccagacagccaactgtgtgcaactcctcccaatactaggttcactgagtttacagtggtcacttaatactggccgtggagggagcatttatacaaaggaaattggcaaacactacaatcagtgctccctgcccagagctggttcttaaccattaactagcactgattgcacttgctctgagaacttgaggcaacaagaatataagaatgaacttaaagaaagtttttcagatattgaactggtaccattgtttcaacagaaactggatgacctcatttgtcaggagcacatgagatgaaatcaatgtattgcttttccgctggcctcaactgctctatgagggcaggaatctcaactacatctctcaacattgtcacggtggcaagcaagtaactttgagttagttgctgtattccattgtttcctttcagccgaaagactaaaattctatagtacatgtcaaactacattaagtctaatttccacggttctaatcactagagaaaatgggtcaatgccttcttttaaatatgaaatgtgtagtttcccttttaaaacctacgttttcaaataaaaatgcaaccacaatgagagctgttacataaggaaaaccacaccttgcagggtgcccattatttcagcctctaagcaaaataatgaaaccttct

SEQ ID NO: 40435 - DNA, 1307 bp, Homo sapiens
tatctcacttccgatttctgtatgtcatttctcttttcttgcctataaatttattctgaccacagggcatccctggagtctctgtgaatctgctgtgattctggggactacccaattcgtgaatcattcgttgctcacttaaacttctttaaatttaatttggctgaagttgttcttctaacactgccaatccctgttctaggtgctagagacagagcagtggctaaaggcacacttgagaggcaagcaataaagtggtaatcattcttttaaaaatctttagtattaaaatagtatttattaaataaattccctgaaaaaaaatcaagagccaacattttcctgctctctaatttatgttttacttaagaggaaatgcaccttagaaagctctctgggcctggccctagggtccgcctacagcatggacactggaagggggtggccaccgagggtatctgtccaagtgaggtcctggcacttcctgccattcctgcatgccctcccagggcactaagggtgatgactgggaattagaaagggtggtgatgaagaaggaataaaaaatgtgttacttcaactcacaagaaacacaagttaaagaactttcgggaactacaagtcctcgtcagcgtcttgtgggctattgacgctgacctcccaacttggtgccagttagaatttcctccctgccttttctgcatttcatcatttatttcctggtttggaatattaaaactttgcttacatcctgttttggtccctttggtttttttttccgttgggcagaaatttcagcaacctcctccaggttagagaaaagcagagccaagggtggcaatgactttcagcatggacgagaacagccaccaagaggggagagctcaaacctatttgtcttggcaatggcattcagtgagctgctggttatgtcatctgcctacaagtaggcctcactgttttgcagtcatccatttcccaataatggtatcctgacaccacacacgcacacccagatctggcagcgcacccaccagcctgcgctgactccagaagaggtagggccagggacaagaaaacgaaaaacaatccacatgaaacagatcacttaagaatgttaaatattaaaaatgctgttttcacctgcagagtaagaaaatataggaaaaagtggatagctggagaattttatgcagctaatgagtttatacagtttaaaagcacacttttgaactaaaatctaaagtgacaaaatcatgaaagctaagcagtatgcaaaactctacaactgaagtgtttcacctcag

SEQ ID NO: 40436 - DNA, 2315 bp, Homo sapiens
tcataacacttaccatgtgcagatactgttctaaggactacaaatactaactctgcaatccctaatacaacctatgagtcaagtactattattatcccccttttacagatgagacaactgaggctcagggaaaggttaagtaatttgcccaaggtcacagaattggaattccaacagagagcagctgcctatggtgttctcaaagggagggcaatgccaaacgaaaacaagcaacaagactctactcattgcaagtgagcaaaggttctgatcaaatcttcattcttgcttccaaatcacttgctgaaaaattaaaactagataagtaaggacagctgcctttataccttctggcctattcacaggcagatttccagacgaaaccaaaggccttcatgaggaaaaacaaagctcctcagtctcagggcagctaatgctgggcctggcattttttccactcttatctaaaatatgctacaggagaatctaggcccagtgataagccaggtttcaacttcacctccccagcctgagagcgattacacacatacttgggatttaaccagcaagagaaggacacggaaacctgggtccctccgagcccagtttctgttgacactgttgccagggctgagccaattgcaccagtgtcaagagctccacagggaggtttcagcagggaaaccagccctacaggtgtatccagggaggcaggtgtacaaggccacattctttcctccactgaacaaatcaaggtttgtctccctgctgtgcggggctcacagggccagataaatctctctcagacaacaacctcagcacagaaacagtgtagcttgctgccactctgtagcaccgaaagtaaaatgccaaccactgaaagagagaagcagataatgttacaataacatttatctagaaaggcaatgttcgttaggtaaaatttaactatggcaaaaatctttaggacagatagactcaataaatgtttgtggaactgaaaacctagtgctaccttttaaaaggtttcttggactaatttaaaagcttcatttggctgtgtgaactggcattccctttctaaaatgatagagtcccagtggtagctataatgttaaataaaatgacttcatttcctccagaggaatatttttaccccaaccccccatactccggcactcaactactcaagactccaacatcagggggcaaaaagtcaggcctattaggcctggatcgttctcagattaacaaccttgggggaataatcctataagaaaatattttcaagattttgggtaataacatttttgggccagatgaaatttgttagagtttgcacttctgtttctaaaaacctctgaagccatttgtttcccacagtttttttcagaagctattttgtgggaaagaaagccagggcctaggcagcaggccagctagaacggggttgctctgaaagaaagccagccccggcaagcaggagcgacatgggcagcgcttgccaaggtggttaattttttacctgggtagagccataggcactgacatagaaaatgtctgtgacacggcggatccggaaacaggcaagatgcacaggcagtggagtgtctgaccccaggtttgttgctacaaattacaaaggaagttatgccaaactgaaatagttatctacagagagaaggaggaggggcggggtgtgttgtcaggcggcacggcggggaaatggcagtgctgcgacagaggacctcgactctggactacacagcctcgcactccaatctcagttctgccacttgttgctggaggaatcttaagtcaagtttcttaaacactctctgcctcagtttcttcacctataaaccacaggccccaacccccagggctgctgggatatataccaagcaggtactcagaacagtgcctggcactgaggaagtgccaggtaagggcagctgttgctatttgtgcaaattctgacatttgtcattctgaacataaccctcataacaaaagaggtacaactgttacctccactgagagatgaaagaattgagacttagaaaaatgaaggaatttgctcaaaatcatgcagttagcaaaagactacctgtttgtgaaatcagagcccagcagttttaacctctctcatctggtctttcttcccttacttaacttcccgaaagagagagacagagacagaaagagagaatgagagatggggagaaacacagagacagggaggaggggggaagcgaagaaaacacgttagaggtaaataactttttaagctaataaaaaataaccttggccag

SEQ ID NO: 40437 - DNA, 1187 bp, Homo sapiens
agggcaaatgaagcaggagaaggctcggagggaacccacctgaaatgaagctcagctgtctttgaagagtctatctattctaaggctcaggagtggtggcatgatgaatatcgctgctaggagaagaaatgcaaaaccatataacatttttgcctttccatccttgaaatgccttacaatttcccttggaaaaaaaaaattgtcttgtaattcttatttttctttacttcactttttcatttccagaactgctatggttctggctgaagtatcagaatgacaaccatggatcttctacaatgccaccatcagtctctcagcaattgtagcaaagggaaaaacaacaccactgaggccgccagtcacaatatttacccatgccagagtgttctgtttgttttcggtggaggatgcagagagtagataaacgaaaagcaaaacttctctgtgtcaaaacacaagctgaagatgatttccttctccactgcccatgtatgaaatatacacaaatccagggcagccctgggccgaaggagtgtttatggttctgcccggccataaacatgccagccttcaaaacaccaggacatcaaacaaacaaggcagttccagaaaggatatatcgacttttgacgtctaatgctctgggtgaaataactttgtttcccctaaaaatagataaactaaaataaatataagagtattctacagcaatgtagctagccgcatcttcctgtgactcactgtttgataataactatgggccaggaactaagtgctttttggtggaatgactgatgctcttcataccaactcggtgaggaatttaaaatgacatccctttgcagataaggagactgagtctcaaagaggtaaataactatgtaggtttacatagcctgccaccggcatttggaccttggtgtgtgagattctgtagggtgaagtctaacaaaatggccccaccttcagttaaggattcaaatgatcacctagtagcccttcaaccagggttaaagctaaactcattcagagtttctggctctaaacctcactctcatttctttacagtgaaacacagaaatttaaaaaattcaaagtaggcatactttcaggtggctaaaattaaaagatcatcaataccaagcgccgacaaggacgttaaataatggaaacccatagactac

SEQ ID NO: 40438 - DNA, 1596 bp, Homo sapiens
gtaggatgggcagtttgtaacttttctataataattcttatatgattttaaaagggccctatgcgaactactttaacatgcactattttacttgaaatcgcacaacactcccaaaacaggagaaaaatttcataaagacagagagctttgcttgttgtatacatttatttatttcaagatttggcacaatgccagggatagagtggtacttaatgatatctgtggactgaaggtcaacactttttcatatattagacaaatacagctcataatgattaagaaatttgtctgagaccacaaggctgggaaatgactaagccaagcttccaatgaagggcagtgagtcagattcctgagtctagttcatctaatataattgttaagggtgttaacattaatctttactgcatcacatttctgcaaggaagctttgagccaccatcctgaagactgagaaaccaacacaattttaacccattaagcacagcaactgccctgccctgtctttcaatatcctgtccctgtctcattcacagtgtacctctgcccccagtaattaccttagcgtcagagatccacaaacaaaaacaatgttaagacttgagagaagccaaaccactcacctgctgaggtatggcagccctaactgtgggagtatcacctccctactgatatcaaaatcagaccctacaaaggagaaagaaaggtcatctgaaatcaccttgacactccaaacagggacttatatctgtgggtcagagagtgaatgagtcatagagagaagaacacttcatagaacagggcatgagtcactggttcctttcttattgagatagaaagaaaggtatatccttttatacatcttgggggtagtgcgggggcggggggaaccaccatctctttcatttgctcccattctcatagctccatgaactgtccacaagttatcaccggtgagtatgtggttctcttttcaaggcagggctatcgcccttaacttccactcctctccaaacttcaggttgtttagcactaactccactcagacagattttttgagcagctgcacacctttgtctccctgaccagaatccccaggaatcatgcaaatcctcaggcatatcctaggttcactttcaggggattccctgaggatgccccttttttatgttcaacagccttaggaagccacccccaagtccaacagatacacagtcccctttttgtggatgtccaggccacacaagaaatggaaagaatttcaataagaaactctcccggaaactatatgcatatgcatatctacttctaggtactgatgatgccaaggactctttcataaagacaagcacattcgccaaagccccaaggcataattagccttgctctaaaactttcctaagtggccagaatctactgcatatatttttcttagccaagaaacagatgtagagtataaatggttttccactgagtaccttcaaaacagatgcaactatttggtaaatgttccatctgcccagagtatccattgtcaatggagaccagacatacaaactccgaggatcatttaattcagtgttcaaaagaacttcc

SEQ ID NO: 40439 - DNA, 703 bp, Homo sapiens
tgttcaactattgcttttgtgtttcctcttttccctctccacacacaccctctccccctcgacaccaggaacctaagacccatgagagcaaggactgttcgccaactctagtctcacaagacaaggcaaaatagtagttgttggctgggtgtggtggctcctgcctgtaatcccagcagtttgagaggccaaggtgggtgtatcacttgaggtcaggagttcaagaccagcctgaccaacagggggaaaccccagctactcaggaggatgaggctggagaaacgcttgaacccgggaggcagaggttgcagtgagccaagattgcgccattgcactccagcctgggcgacagagctagactctgtctcgggaaaaaaaaaaaaaaaacaaacagtagttgtggtggattccgttattttttttggcaaatattctctccctcctcctcccccagccttcatgggaagactatacttccctgacttgctctgggtatgtgctgaaatgacagtgtgtcatgtcagtcccaggaccaggctgcagaatgagacacatacagcacagtttcccagtcaacttgcagacccctgagtgtgagaatacttcatgctgaatgccacacagtttagggtagtttgttacatagctttttcgtgccaagaaatgagtgatacagcaagctctcaataaacatttgctgaag

SEQ ID NO: 40440 - DNA, 1100 bp, Homo sapiens
atggtactgatatgcttactttcaatgtgccaagcatatgcaatatcaaaatttcacatgtataaatgattatgacctaccgatatctttctttacccctcaagtgtgaggggaaaaaaatgggaaaagcacctaacagagtcttcaggccttatggcaaatatatggtgaaatattccatgaataaaacaagtctattttaacatatactttcagaccaccttgggaagttaatcgttttctccatctcaaatcactttctacacatggtattaatgttggtttattcctttctttattatctgattgctaagttcccttttaagccacaataggacacaccaatgctccacaatcgttttgccattaagaactagttgcatcatgttttgcaaatacagcccagttcgagaagtctgtgttccccaattgtgctttcgaactaataagtaacctatctgcccccgagagagccactgtaaccacacagagttaaccttactctacctaaaagtaaagaaacttgacattttagttaaactaggtaaccatatcttgagaaaatgtactctggttaatcaggtcttgttccccccacgcttttttttttttttttttgatacggagtctcgctctgtcccccaggctggagtgcagtggcgcgaactaggctcattgcaagctccacctcccgggtccacgccattctcctgcctcagcctcccgagcagctgggactacaggcgcccgctaccatgcccggctaattttctttttgtatttttagtagagacagggtttcaccgtgttagccagaacggtctcgatctcctgacctcgtgatctgcccgcctcggcctcccaaagtgcccagattacaggctcaagccaccgcgcccagcccttgttcccttttaatgataaaacagcttgacattccttccccagatgccttttaaggcctccaattgggctcaagaaaccaggctgggaggtgatgttctgttttaatctctatttctccatctctttcttcctaccccaattaaattttcttattgaaataaacgcagggtttaaaaaaaaaaatttttaaacct

SEQ ID NO: 40441 - DNA, 1400 bp, Homo sapiens
aaagtaaggagcctgctcaggtactgagtgtgagtctctgttctgtggtgccttggccactcctcagggctcccaatatgcatatccctaggcaataacttgggcaattcacaaagtgctttcccccttattctaggtctccttgaactacggaactcttagcatgatattcactgatgcccaacaagcctgcttcactcaagtaaaaggctgaatgaaagaaactgcctcttgaaagaatctgatcctctgaccagggtgcaggccggcagatgataagaggctgaaaacaagcacacttctaggcgttcctcacttacaccattataatgaaacgaagctttctctggctatatggggctctgatgtcattagtaggacagctctttgaaaatcccaaacacccaaattttgataaaatctaactttcttttcagaatttccagtttgtggtatttggagaagtcccataacccctacatgaactgaactgtgtttatttccaaattttctgcacaccactcactaccaacttggtgtttacaaagcacctttgccctcaggatttccaggcagtgataaaagcatagagcaaatattttatggccggtctcatcctagtgccgtagtgggtacacagaatgccagccagctgtaagcaaaggggcaggacttgaaagctttctcagaggaagccaagtgttacctgtggtatttaaatggaaagaggcctgttgagtcaagtgccttcccagggaactggagggacaccaatttgcccaaagtcatccctggctggggaatataatagagggctagagttcagacttttcttccagctgatgattcatttaggacaaaagaatttacctttcctttcaactctctgtgacaaaaggttggagataccagaggaagccaattcagctaacttcaagggtgtccccacatggcagcacacataaatgcgccaaagggaaaatgaaagggaacggcccaagtattcttttctcgacaacaaacgttgcaacagtcctagagcgacgaaaagataggtttgaaagctagtcaaacatgagctcaaatccaagcacacccacttcccagatgtgtgttcttggtcatgttactgaagaaggtggtgcttattaagccaattacacacacacaaacatacacccctatgtcatatgcccacatgcagtgaacactatgctgtactatgccacccgcctccaggatccccctccaagacttgtgttggctgcagagagtcaccttccctgaggtcacatagccttcccagaacagccgcctccaatccttgttgacttgagggtatacaagccttgccctatcatcccaacccaggacaatactgaagaaccatctcaatgtca

SEQ ID NO: 40442 - DNA, 4342 bp, Homo sapiens
gctgctcccatcctatgccttcacacagtattttctctacagccctatcaagtcataattatccaggttcctgacactaaaaactagtttcagaaataaatagctgctaaaatcaattcaaacataaatagctaatctttatggagcacttactatgtacaggcactgttgggtgcactttccacgtgttagcttatgtaatacccacaggaaagccagtgtgaggaagacgcattgtcaggccaggaaaggttttgaacctcaagcaaaacctggagaggtatgccaggaatgaggcacaatctctccctttaatgagctcactaccttgtatggaaatgaggacctaactcagagttcagagtaagtaaaaaagccacaaagtagacattaaaggagcccaaaggaggaagaatttgtgcatcctagcaggattctggagggcttcttggaggaggtatcccagtggagaatgaagtcataaatacaaggagctttccatagctaagtgtcagctcctcagctcccaaagctgctaaaaggccaggcgagtcggccgccccctcctccatttcatctggagcacgcctgtttccaagagaggaccagctaggcccagcccttcctttgacacattcctccagctgctgcctgtccttatggaaacacatgggaacttttcaccatgttcaacttcacgacttccttcggtgctttcactggggagaacctgcgtcatggcacttgcttgcacaagggagccctttaagggcctcagctggtctccattgggttgacatgaggacagccccttgtctgtaccaaagtgagatgtaagggacctacatcaccagcagccagcaaatgcatcttttaaaaggcctctacagatttctgagagaggaatttgcttccactccctcctcaggaatcagccccttcagtgcggtagggtcatccccccactccttcctcctccatacttaaggctctgcagcaagggctcaaaccctcgcttttggcaactgtgtgaccttgagcaagtcacttaaccagtatcaatcccagtttccttatctctaatttggggtatataaataagaacaactcgttcttagaactgttgtgaatcggagtgagatagtgcaagtaaagtattttacacagagccgggcatgtagtaaaccaacaatgaatagtagcttcattttcatcatcaataatgacgatgatggtggtggtgggagggtaaacttggacccgattcgagctaaaagcaagcaccccttccccctctccccctcccaagtgtatggctgagccacacggtggagacacatgcgtcatccggctgaggggtgaatgcaggctcttctggcggcgggctcaggaaccgccaggcagtggtgtcctagctcacctggaggggtcgcggggtgaagcagattttctgatgggggaggtccaataaactacagaccctctctttctgtatacccactcagcaggtatggaaactgactcgtggccaaagaacgccagctgcatccctcccccaaggagccaggacagcgtccaccatgcccctgactcagttccccaactctctctcgggtgcaggcgagactgcgctgcacttagtggcggagataacaggttggccagccaggcctgagaaacgtccccccgctaccttgcgcaaacccagccccctcttcgaaacgcaggtgggcaaacaaccctcaacctcgcaacaactttgtgtatttcaccgccaccacagggcgcacggcctcaacttctcttcactgcgctccgaggagggaagcaggaaatcgagaataaggggcagcccacagaccaccctccttttctcggggcgccccccaaaggcgcgccctgccttaccttgtctgacggccttgaaggtgacggcctccttgcagctgtcgatgacccccagcacgtcatagcggggcaagccggacacccggaccccctgcacctccagaagcagctccccttcgcccagcctcgggccctcgccgccgccgggaagccccgctgcctcgaccgccgccaccgctccgacgtacggaaactccccgtgctccgcgcctcccagcaccgtcacccccagctcgccctggggtccccgcttcacggtgcattcgtgaaccctgctagtccagtggttcttcttctggatcactttggacatgatgagttacacccctcctccaaaaaaataaaacgagagacaggtgccccccacagcacgagcccccaagcctccgcttgttcatgggagaaacatctctccccaaatcacaaaacaggagagagaaacttggcagcctcgctcccctgcacacgctcgcgcactcaagccatcataaaacaaactttctgggcttccccgcgagccccgcacaggcgcccgcgagctttgtttgcattccggtgcctctgggtccacgttccggcgcccgcccgtgctctcccggaccagagtccactctgcgccgctcgggttatttttttttccttccttcctttctctcttgccttttacaaatgcggtgcctcctctttgcctcccgcccggctcgcctctcctcgctggcaggctgttactgagggtgagggaagcccttccagccagttgccgggagccctgaagacgcggtggcggggcggcggggagcagggcgggaggtaagtgctcgcggcccctttaagcagatacaaaggctcggcttgttttgttacagttcattctattccgcgccgcggagcgcagcggccggcgacaggagacgcgcgcgcatgcgccccgcggccgccagccggccggcccacccctcccctcctccccgaagggagagattccaacgtgcttcccgatgggtcctaaaaccgacctgccgggagaaggcaactcccccccaacccttcctgaacccctatcctctctccttttctttcagtgccctggactccgcggattcctttggggctggagggccgcacacgtgttttactccaactgtttgcaacttttgaaacccgggcaatctggctttggcatttgaaaaccatttcaaacaggtgggggttggggaggctgccacactcaccctggcgctcacactcacgcacacgcgcacgcactcgcgccggccctaagcctcctaaccgccctcggccagtggctggccaggctgtcggtcacccagcccggctggttcgccgccccccttgccgcaggtcccactgaaacccccgagacccgccccggggcgctcgccgcctccctgcctgccctgcgcttgcgggttcgggtcctggcgcggggtctgccagggtctctgcgacccgggggagggggacggtgggatcctccggttccccaactgggatccctgtgcgggtcacacgcgctcttacacacacccgcatccttaaactttgggaccaactttttaggacacgggaaactacaggcaagagagagaagccatggtgctagtgtgggttcaggtattcaaccaaaaaagagatccctctagcttttcaactgccctgccagcagagactgctggacccagtcaatcatctgccccggcctcaagttcctggcagggccgagaagcctgcggacctactccggggccaggagataaggatccccgccgggcgcggacatgccctgcgtcctggcgcccgcgggggcgtgagagaactcggaattcgcagcccgggggtagctgcggcctccggaggtcgcccgggggtgcggatggagtgacttctgtcccggcgaggtggcggacagaaagactcccataccacaggaaggctgcccttcccaaatactcctcaaatcaggctgctgagtagtctccccagcagtttgttttcctctttagtgatgtataattttgttcatctttggtcacaggagagattccaagaaatgaggggggtacgttgaaacgatgaagaaaggatggacacagcagtcgaggttgagaggtaggctcaggggtccacccttgtgtgaccttgagcaagcttggtgacctccgcgcctccgtttctcgctgatcaaataagtagaacaagacctcacagggttcttggaagtattacgtgggaaaacacttataaagtggcaaataataaaaactcattatattcttaatagtagtattactatttgggaagaaaattgggaaatcatttggggattcaagttagtaagtatgataatttatcctctcctttctagaacttagaaaatatgggcatactttgtgtgtttgttttttgatggtgg

SEQ ID NO: 40443 - DNA, 1128 bp, Homo sapiens
tttttttttttgctctgattctcctgggagttgaggaacgctggaaaataactgcagggtttggcttccagttggttaaccctgatgctgatttctctgtgggacattttcaatctctgttcttggcaagaaactgcagaactacaaaaactgccagctgaatgaaaatatgttgaagagcaagggggttgggagagatggaaatttggggagtgaagggtttaacactattcccattcctgtttgtacattctagtctaaccaccaactgtaagaaagtttgactgacatttgacctactggattaacatcatcaaaagggctgaaaccctctttctttttatttttttatttttttatttttaatttttgaaacaggatcttactctgttgcctaggttggagtgcagtggcatgatctcagctcactgcaagctccacctcctgggctcaagcccaggagatactcccacttcagcctctggagtagctgggtttacaggcctacaccaccatgcctggctaatatttgtatttttagtagagatggggtttcacgatgttggtcaggctggtcttgcactcttggtctcaagtgatccacccgcctcagcctcccaaagtgctgggattataggcttgagccactgtgcccagccccctctttcttattccattctaccttacgtgactcctccaactaggttaaatgtcttgtatttgttttagcagcacgtgtacgtcctcatgcaggcattcccaaaatatttgcaaggcttatcatgtgccaatttgctacaccttaggtaatgattcgtcctttaattcaataaatatttattgagcacctaagatatgtcaggcacttttgaactagtgggggaaaagcccttaactaattgggcaaaggcgttcttctcatggagcttacattctactgtggcaatacacaaagtagaaaatagagtctctgaagataggtgctatggagggggaaagggggacttttgatgcccaaggttaggattgttgttatgtacaaggtgataaggggaagcctcgtggctaagttcagaactgagcagaggtttgaagacagtgagagtgtggatcaagtagctatctggg

SEQ ID NO: 40444 - DNA, 655 bp, Homo sapiens
gctaaaatgtccatgactattccttctattctgtcttcttctgtttcagcaagtttatcacgtcaatgcagagcaataatatttgcagtctgaaagcctcagctctgtttgcattgcttcccagaataatggtgttcggtgaaatggaggaaaataatcacactcaagccatgtttttccaatatgctttccccctttttgtcaaattgtgttaaggttttgtatgtatgtatgtgttttccctttctatgtgcttttcagtgtgagacagagcaagtattcatgactctggcagttcagcccgtcggttgagtacacaatacattggttaatccaaggtgacctgcgggttgaaactccgtttgcaaaggcagctgcagtacaaccaccaggcaattacgacattataagccatgagtgtaaagctagagagataacttctaaaaggccccaaagagtttttacttcttaggcttatgaccagaaattcatggcacattaagttttccatctgaaagctaggagaatcccttgtcacaccttctaacttctaagacattgcagagagaaaatgtcaggatttctctggatgaaaagtattctccaagtatagtgataaaattccagcttcttctctgtacttttaagattaaat

SEQ ID NO: 40445 - DNA, 1348 bp, Homo sapiens
tactggggttttgttggagtcccctgggatccaggatatagcgggaaatagccaggaaagaggaggagctgagctgatagaaatacatgccccatctcccctaattcaatcagattaactgcattttatgcttttttttttttttttacattgtttcagaagctagttatttattgctcagaacccttccctcactctttcttcctgaccctgatttttgtgtgcagggaaatgggctcaacttcaagctatggagtgtggtcaaggtcattcatgacaatcctcttcctcagtttctcagtctccctggaagctatggattggcatatgacccagttttagcccatgaaatgtgagaataagccactttagcagttgctgctaaagtttttaggaagcttttattttcttactaaaaagggacatatgtggctgatatggtcctttcctgtcttcctcctcccttccatgctaacatcatgtctgccactacaacagcaatcttgtgaccatgtggctgtaagcacaggaatgcctggaatctcagaaacattggctctgacctccgtgagtcactgaaccaattccggcaaccacctggctccagacttcttgccatgtgaggaagaagccactattgtctaaaccagtgcagagttttctgtccttgcgtctcaaaaagcattcctcacagatatacatatattgtgcttccagataagattttgtttaggattctgagtctaaaaataatttgaaatctgatctcataccatcttttcattgtagagagataaggtaacagtttcagttgtctgttgctgcattacaaactatctcaaaactccctggcttaaaacaatagctgttttgttacctcttagaattctgtgagctgactgggttcagctgggcagttcctctgttccttgggatgtctgcattgcctacagttaccatgaggctcaatgggcttgtctaatgccttgacaggaatagtcagaaggctgggctcggctgggacacaggtcctttctctctcctcatgcagtttcagagcttctctctgtctacatggcctctccatgttgacttcgtacatggcaccttcacgcccccaaaagcagaagccaccaggccttcctaaggcttaggcccagatccagctttgtgtaacatctgcggcatccctttggttaaaatgagtcaggttcaaggatagaggactatctgagggcataaatacaagaggtgtgttttatgggaggcaatctttgcaggttagctactacagaaactgagacttagactgtgaaaagtagttgtctaaactgatagagtcataagt

SEQ ID NO: 40446 - DNA, 1635 bp, Homo sapiens
ttaataacgtgtgctttgaggtgtacacatgagtacaacagcgaacaacatgagcaggtaaataactgaacaaacaaataattttaaatgcagtaactctgtaaagagaaatggaggatgctaatttttaactccggtcaggaaacttctgatgtatttttctatatctttatttaataatcttctgataatgagttaatttaatataaactcagataaaattttttgacaaaactaagagataaaccaaaatgaaatatccgattaggatcccgaatcgcgcctcccgaggttagtactacccctcacgactcctccctccgccacagccacgcctcttctgggtttacagttcagaatcacgccggcctcattctaccgctgctctctcctggatctcggccacggatcttttgctcgcgaaagttcctccgtctagctgcacacaacgctgctgcaggaaaccgaggtaagggatttgccgagacttagctccaccacactccccgaggccccgcccctcctctctggccctcccctaggcccaggtgtctcgcgttgcacgtgcagttgttgtggttctacgtcacgtggtcccggaagttcaagacagacccgcctcaaacatggcggcgcccagcgcgcgaggacgtgatccgcttctgctccggcttggattgtagccttgacgaggtctgagcgaccatggaccggccggggttcgtggcagcgctggtggtgagtgcggggcggtggggtgggttgctcagagtgccggcgtccggcattggagcccgcgggggttctctgcactggttttcttccggttttgcgggctggactgtcctcgggttactggcagccaggtctgagagggagcacgaggctcccaggccaccggcgggccaggtgttaaggctatgtctgtactgccaggtcataagagccaggtgggggaaggaaggtgactcattgtcttttgcaccctcatttacttaaaaaagagcttctattatacactgttaactactctttcattaaatagtgtaactactctagagatcttgggaattaaagaaatgtatgtaacacaacaacaaaaaccttactcacatcgctcccagcccttctattcaataccacgtttctcattttgctgcatctcttttcagtcttagaaaatgacatgtccttctgttcattcaatacataatctgctatttctgctccaagcctaggctttggagaaatattgatgagcacacatagctcatcgggaacgctgcggagtcaataaacaggcttagtatttaattccgtagcagaaaactacgagaatcaacatgaattaacagaaaaaaaagtcctttaccaaatattttggagcgtctggtagaggatactagatacagcagttaacaaaacagagtttggctgcctacgttttcattgtgtggaatgggcagagacagacaaataatttttaaaatgattttcatagggaaaatggaggcccacagtgatttagtcacttaattatcgaattttggtgttgcaggtgttgaggataacatggtgaacaagatagacctgctcctaagggtcaggtgttagagacaaaatagtaaaatgact

SEQ ID NO: 40447 - DNA, 946 bp, Homo sapiens
tgctacagagaaatctttcatgaaaagaagagtccatcaatgcaacaattactatttttagaaatttccacagccactccaaccttcagcagccactaccctggtcagttagcagccatcattcaaagcaagaccctctatcagccagaagattacaatttactgcaggctcagatgctcatgagcattttttagcaataaagcattttaaaattaaggtatgtacaatttttagacataattgctactgcatacttaatagactgtagtagaaacataacttttctgtgccctgggaaacgaagaaatttgaatggcttgctttattgcaatattcactattatggtggccaaacttggcctgggaccaaacttgaaatatctctgagtcatgcctgtactcttggtgaaaaggttcaaaggttatggaagcgtgggccaggaatgtgtcctataatccacaggcagcaggcattcagtttagggcttaagacacatccctggcttgccttttagatatggaatcatagtccttggacttagttttttaaacctgttttgtaatttttttatgttggcatctgtagatttcctcatctttatcagctacataatcatccactgtatgtttatactgtgccataacttatatcaccatcagcaatgccacaatgaaaatttttgaacaaatatctgagtaggtatggggagggggggcagttttaaagaatgaatccccaatttgtatcctcgtggcattgtagttttactttgcattgctctgattattctacattgcaccttggctggttagcagcaccttctgtgataccaaggggactgtgcaggtggaggcatgctgcccccttcacagccacagcccatttgcctttcatgcctttagacagaaaaggaacacagggaatccatggaggttcaactcgtt

SEQ ID NO: 40448 - DNA, 1824 bp, Homo sapiens
ggttgctgcattagcagtagttaattcttttctatcactgtacgatatttctattgacagaacatacagcaatttattttttctttctattgttgacggacattgagttatttccaattcaggctattgcaaaaatcacagctatgaacacggacttgtcttctgcacttgctttctggtgcatgtctgcatgcatttttggcaggcgtgcaatgtccaggcatggaattgctactcaggtcattgagcttgcatatgtctggccttagcagacactggtagttttcttttaaatcaagtcccccagggttgaaatgaatctgaaaaccattagctccaagtgccctgtttcatgctgcttcatttgaccacattctcagatgccactgccctcatatgtcccctttctgacccctccccaaaaaacacattaggaatatagcctggggccaccgaacatggccaagctcaatctaatcttcttcaggtgtccagtagaattttttaaaataagtgagggcctaatgatcacaaaaaaaaaagaataattctaagtctcaaaattggcaagaaataatgttgatgctaaagtccacagcttacgataatgcacttgtgccaggaccaatgcccatacagaacttgaaaattaagatgagacatttttcaagaacaagtgaatgcggaagagctttcctaatccaacttgaataaaagtctcccttctcagaatgacagttgaaaccatttccctctagcctgctttacatccatcttcttaaaaattaaaatcaaaatcatttgttctattgcagaaattgatcatttactcaaagaactgctgtctcgtaagaaacagcccagcctgggttatttgctggacaggaaatgagaatcagaataagcaggtctctctctcttgcttgttccctctctcttcccctgctgctggtgaatcaccagttccctggggaattttggcagattctcagcctggctgcagatgacgttccagatctgtttattcaggtggagactggataaaaaacaagagcagcccagtggcgggataaacagcctccgccaggcagggtcaacctctccaaaggcaggactgggctgtgtcaaccaacctcccaacccgttcacttcctttagggtcaccctcccctttgggtcttcaacaaacagcttccattaactccttgcaaagacgacccaatgtcccatccccatgagactacctaaccccagggaccttgctacagcagatcccatttggttctcccacccatcaacttacacccattgaactgaaagccccggatccctgaaacgaaaaaatctaggtacgatcaacagctggccaccactgttctgtgaagtctagagtgacccaactcatgaatgacccaggacccaatccaaactatcagaatgttctgcatttaagatgcacaaataaacaagagcagcagcaaaactcctaaggaaatacacattgttgagtaaaagatgcccatctgaaaagactaccaattgtatgattccaaatgtatgacattctgagaaaggcaaaactatggagacagtaacaatatttaactgccagaggctgggtagagagagatgagcaggttcagcacaggagatttttaggtcagtgaagctattctgtatgacactgtaatggtgggcacatgtgattatacatttgtcagaaccaagactgaactctaatgtaaactataaactttagtaataatggatcgatattgactcatcagttgtaacaaatgtaccacactaatgcaagatgttaac

SEQ ID NO: 40449 - DNA, 779 bp, Homo sapiens
attgctgatgtctgaccactactgaacaaaacacaaacagtgatttcatgggactcaatatactgagtcaactattctatctttaaaaactcttgcctttaaacaagcagggggaatccaatattccctatgtatggcccaacaatgacaggccttatgaaggaaaggcccggcataaacacaaacacatttcttccacttgggctataaaagctgaaaatggctcccaggtgtgagcagacacaataggccctgccttctctgcaaggtcaccacacaggtcaaagtcaagccagccattttcagattaggtgcatatgcacatgaggcttcccagtggtaactggattacagaagccacctgcaggaagtgaggagggggaggaggaggaggaggaggaggaggaaatggtcccagttggaatgagactgttgatatgggctggagccaacccctttcacacgggagattgtgcaatgacagagcagctccgcttcccggctccatttcaagcagccctggagggttttcagcactcactgctggaagaagcagcacttcccctccgagaccatccactgcttctccaacattggggagcaacccgggtccccagtggatcttgggctatatttaaagcttgcatggtcatcaggaaaagggaaagaaagagagaaagaggcgggcggggtggtggaaaggaaaaaagccctacgctcaacaaaagctaccgagtttccaaaagaggcagtgatctctgtgaccaagctcctattcc

SEQ ID NO: 40450 - DNA, 658 bp, Homo sapiens
cctcatgtataaaatgggtcaaaaatgcattatgtaaatgagggaaacgaggttcagagagactaggtcatctgtccagggcacagagtgaagtgcaattctaaccccccacgctctcctgcaatcccacaatgccatgaaaagggttaaacccaagaccatgtttcacagggacacagcacctcctgaacacagggcatgctgccagccaaagatccgagatctgtaagctatgccagcactcttattaatagcaccttcttgcaaagtttctctgctcagcctgccgagcctcagtattgagaaaagattcatataggtgagcaaactaattataaaaccagcaaaatcaaaataaaattaaactatgaaagcctggagtggaaacaggaaattcagtgtgaagagggaggtgctctgctggggaagctgccaataaaatctggcagagaaaactgttggactcatggctggtttatctggaaagtcttctgggtgagtttaaaacaagcaagctcctccacctgactgctgaagaaataggggtaggatcagtgctcagttctctagcaaaggtttgtaacagcacaaatgataatattcccaatgggtgccttcatgtctttttagctaaggcccttcatctgctttttcattt

SEQ ID NO: 40451 - DNA, 1227 bp, Homo sapiens
tggggaggctgaggcaggagaatggcgagaacccgggaggcggagcgtgcagtgagccgagatcacactactgcactccagcctgggtgacagagcaagactctgtctcaaaaaaaaaaaaaaaaaaaaaaaaaaaaaacactaacttcggatggtcacaggaaagatgcaaactaacaaggaaagcttcttcgactgccatgtgccacacaacagaattgcgtaaactttggcacagtcaccacccgtaagtgatgctgtgatgaatctcctgttccgatacactgaaatgattcaccacttaacggtgagtgattttacacactacacgctcacacctaagggccctgagatgaaccctgctatcaaagagcaaaatacctgttttaacacaggcccataaaattgctcctggtcatgagagcagggtggccaaattccaagcctgcctttccggcagaaggtacaaccacggatttcactgggataaagtgataagaaaattctatagcagtgactcttggttctttaagaatgaaacctccaataatatattacttcctctgggtgcgacagacacagattaaaacatcaaaacaaaaaaccccttccctccatctgagtcattcattacacactattctaaacactcttgtctaggactttcctaggaccaggaaaggatcggacattttgggcctttttaactctcattttgacaattcactctctaacataatccaatcaatgaaaatattagtacaaaaacctcatgttacagaaatgtatgtcagaagattaaaaaaaaagcaaactcagtggtgactcacttctggacgtgtagtgattaggggtttttgttgttttttaaagagactgagaagggcaattttaggcaaatacccttctgggttacaaaagagcaatgtataggtttcctatatgtcctatttgaagaagaaaatgaaagtggtttgttttcaacaaatacatctgcacaaacaacagcttaccttagtgctactggcatctccttcattccccatccacaaaaaattttaagggacaaatgacataagtgggtgtaactacctttccaggctggagctgcttgtaagaaaaacccttcctgggaagccagaagttccccagagtacgggagtcctctatcagcctccactggaacttacacacgtcctttatttttcaactgtgtgacatcacacc

SEQ ID NO: 40452 - DNA, 1411 bp, Homo sapiens
cagattgtcctatactcgctcccaagctctgtccatgagtccatcagatgcagaaaacctcagctagagtttaccctcccacagaaaacacattcttggcattttgaaagagcatttcttttcttcctttgagaaattatttagcaaggctgtggaaagcagggctcccagtggccattcaaaaattaagaccaagccagaaggcaggaggaaatgtcaccacaatggggagaaaataaatcagttagattaagattaagatctaacccttttctgtggttggggcaggcggatttgagaataatagcatgctatttctggaaagtccctccagagtaaaagctgggagggtgggggtgtgaaactatatgtttcagtgttagattaaaatttgttgaagttgattgaaaacagatagaaatggccaacggtccccctgcccagcacaggtatgccagtcctctgtggctgaggtccctctatatttcagaccacacctcagcactgccctcgccagcaaagatgcagttaaacgggaaggcccaaagtctaatggggccaggatgctacacaacatcaaagagattccagttgctccccttgcgccataaactctttcacccaacatcattcacactttcagagtgcaaagttcactctgatattggtggctttctcactttgtagcttttttggcaagtgccccttggcctggttgttcattaatatataatcagaacattaaaagcattgtttcaccttctagggaggctgtgcccaatttaataaagccgacattgtccctagggtggggggaaccacctcgaaattggcagagaattcaaagatgcacagaccggagggtttatgtacacacacacacacacacacgtgtatacacacacgcatgcacacagaattaagtatttcaaaagatgttttttatattccccatggcaaaggagcaaaattaaaatgcttctcaccacagaaactgacctggcatttctttcccttaatcctttcaataccaaattactccttacctttaaaacctttacaggaagtagtgatctttgtggcaggaagacaaataaacgagaagggatgtctaaaactctatcacaattatctatgagaatgctcgttcagtgcactacttttacttttcaaagcacatgcatacaatgacaactcactttcgagaccatgtttactttgctgaaagccacattctaaacatgggctcgcttgcagaagggaagcagcttacaattcaaccttgtttatgctccaagtaggtttgacagaaaaaccacataaatttgttttaaaataatttccatttgctggaagctgttcctgaaaggttctcagccacgctaatctgcgctgattcctaccagctgta

SEQ ID NO: 40453 - DNA, 1024 bp, Homo sapiens
aatttattatacaataaatattaaagcacattttaaaaactgcttaaagtcagggaaaatattcaagatattgagtctttaaaacataactgaaataggtattcagcctcacacattactggaaatttatacactatccagtgataatatttatcaccgaacaatgaaatcagttgttttttcttttgtactttcttctttattcaataaatgcctaacatttgtcaccagaaaatcaaaagtaataaagacatagtaactaggctaacagatcaatagcaccccctccagcaccccccgtaaggccaccaagacagtaatctgcctagactattccagctcactggggacaaaaggcttccctacagcatcacagtccaagatctcgatagccattaaaagaaacatgtgaggctgagctcatcagggagaacacagcttcccattgccccttgctagcatgcctgggagactgcccagagaggagctctgccagctgggttcgcagtgctctctctgccatggatggagatcctgcgtgtctgaggatgggggtgggggccaatgtctcacatctgaagtccaagctaaaaaggcccagatttagaaatgtatctgcctgaagtctcctgccatagaagcttctatcaatttacatagttacttgggctgggtccacagagggcagggtaacctgtccttagtgttctcacagctccctctggtcaaggaaagcagtctttctctctgccagcagcaaagagggagaaaagctaccttggcctggtcatcctttttgtcaaagcagaggcctgagcaaagtaagagctcaagcaaccgaaaccagctgcctggcgagggctcagcataaactgagcagaataaccacaaggggaagggtgtctagacagcctcggtctatggaagaagccaccctcccctgcagtgtcaactctggaaaagcaggctccaaaacgcggctccagcaaaagagcagatgagagaccatgtcaacagctgggaa

SEQ ID NO: 40454 - DNA, 2199 bp, Homo sapiens
gaaaaggaaacgcacccacatacccccacagacttcttcacactcttctccagacgtttcccacccacccacccgcaaacacactcagctccagactcccactcactcacccccagatggcccgcacgacgcgtgctggctaacccccaaatctctacgacccacgctcgctcgtctccagaccccacgaggcacgctcttcttctccaggctctctcgcacgcctactcccccggacctccacgcagaatctcccttccgccactccaacctgacagtcttccaacacgcacaagcacgcacaactccacacacacaacccagtccgcaccccctccctgagtacgaacccccgccgctccatccccaagtgacagagccccggggcgcagagagggcggaaagggcggcactcacaggctccgcgtccaggagggcaggtccccgggcaacgcagccagcccgcgcccaccgcagtccagcgagtccccagcgcaagtgcaggcggccgcgcagggcgcccgcgggccggccgcggcggtcaccggctccagccgaagcaaaagcagccagagaaggagaaggcaaggcgagcggcgcggggccccgagccctccccggaccggccgcgccatcttgtctggagcgcgctgcgaactccgggcgcggggactgtgaggacccgaacggccgcagacgcgggcgggcccgcggggcgctccgctcggctctagactccgcaccggggcatggcccccgccccaagttctctctgcggccgcggctccggcactcagcgtgcccccggtgcccgggccgctccggagcacccggcgggggccgcaaaccccgcgcccatccgggccggccggcccgcccgcgctagctgcgaactccgccgattcgggcaaggtgtacccagcctgcgctcttcgtccgcccggggcacgccgagtgccgctaccgacaccggccgagggcagtgctgccgctgcgcctggaagacaggcgttcagccccgcagcccgagctcggtgccggcaggcatcttcctctgggctcggagcgcaaagccgtagacctcgggctggacggcgcggccggccccgcgctgggaggccccagtgcgcctcgctgtccccacgccgcggccagagagcgcgcgcgcgcgcgcagcctcgggttccgcacggctcctccgcgcagcaagagtcccgccgacctcgcagccgaacaatcagccgcttgctgttcgcctccccgcggcccagccccggccggtcccccaagccccgcccccggccgctcgcccgcacacaccccctaggctccgcgctccgcggccgcctgctggcccacgttggatgctttgcaacagcgccccgccacgcctccccgcctgctgctcattggctgccggagtccaccgtggccagcctcgagggccattggagcgctcgctgtgatcccgcccctcccgcttcaccggctaccccgcccccacactcttttcccacccaaggtgtgaagggcgggagactgggaggagaaagggagggacggcccccgcctcttaaaggagacacgcaggttgttgttggagaacgggaacgcgggctggggaaaggaggcgtgaagatacgccctctgcgtcaagaaggggagagaaagttaagagggtaaaacgcccccgttttggggctgtctggccccaaggctttttacgtcctcctcaggctgcaagcaggactgcagattagaagcaaacccgcgtccgttttccaggttccttccaaaagcgaagacacaggtttaaaacttaacacatttcttcctgactgggacatccttggttatttcattaggcgtggtccccttcctcctcgagcagcctggagcatctgctcctgacttgttcttcacgtcctaaatccagcaatatgtccttgattactaaaatgaatgtgtgctgcagaaacctagtctcaaaggtgcaccctcggccaggagtggtggctcacgcctgtaatcccagcagtttggcaggccaaggcgggcggatcacctgaggtcaggaattcgagaccagcctggccaacatggtaaaaccccgtctgtactaaaaatgaaaaataaaaaaattagccaggtgtggtggtgcacacctgtaataccagctacgggaggctgggacaggag

SEQ ID NO: 40455 - DNA, 1129 bp, Homo sapiens
aaactccatctcaaaaaaaatatatatataaaagaaaaatagaaaacaaggataatggtacttgacctgggtgctgagtgagtaaagaaggatcattttgataaaggaccaaaggggcattataaactgtttacatctcattgttttcaaggtgttattgatttgttaactctgaaaaactgagagcccatatgtataatgtagatggaaaatcttagcaggttgtttcagcaggaaagtttcttgtccaggaatgtgacaaagggttaataattagctatgaaacccctgaagacttgcagggtgatgacagccctgctttgagcctgttttctatctctcttccaaggaaaataaaactgtgtactcattaactccttcgtcgcaataatcttgtcaaggagatggatgggtggagaaggtaagagaggaggctaatgagtctgggaatagaatataaaaagagaaagattttgagatctccccatcccccattccaacatttgcctttggtggaggtagttttcttgtgcaatctctggctattggaatattggttaatgcccagacagtgccaagctgcagctgctgcagttccacagcaagaatggttgttgcctgcagctcagctgtgacccttcacaggatctgccctcctccacagagcaccatcgacaggggccaaaaacctttagagtccactttctaacacaaactagaaccttgacacttgtccttgccttgtgaatgtgaaatgtttactggttcactgaaaggatgaaaaaaaatatgtcaaaggtatgagcatttcataattctgagattgagattctggagtaatggtcattgtaggaggcagtcccttacctctgacggtgatgatgatgggatggactaattacatcatcaccagagaccgcacctctcactcccaatctgctgcctttgcaaatgtcactccgagaagtacatgagggcgagtgcagggaggattcaaagtttatgcctcactgccaaccactcagaactaacactgcaatgtatataaagaacagcacattgatcataacataataataatcttatgaagtcatataccttacatttttcaaagcactgtcacatcata

SEQ ID NO: 40456 - DNA, 532 bp, Homo sapiens
caagtgatcctcccgtcccggtctcccaaagtgctaggattacaggtgtgagccactatgcctggcctcatgcaccagttttgctctcaaatttgagaatcaaaaaataaggactgactcagtgattccacttctagtaattcagcctatatacgtgtaatccatgtaggaggttactctctttgtcatcatagaaggtagaaacagcccaaagtttcatcatcaatgtcatgtagcttttagaaagaatgaggaaggtaaacaaactgtggacactatggaattctatgactcaccaataaaagggaataactacaaatgcatgcaatgaggtggatggacctcaaaagcaagagagaacttactgtatgatttcatttacaggacattctagagtgggcaaagctattttatggtagaaaaagaacaagagctgcctctgagggtacaaaggtggggactgatgggtaaagggcatgaaggacgtttctgggggtgatgttgataccttgtatcttgataggggtttggg

SEQ ID NO: 40457 - DNA, 858 bp, Homo sapiens
ggaatttttcacggagatcagatgtgaagaaatctatggcagggtgaaattttctagtctagaggctgcctttctatgaaggtctcatttcccttcctttttaaaaaaattaggctgttttagggcgggtctctgtgggtgactcaaattaaaacctttttagtttgggaagctgaagcaccaagatattttcacgctgggattacttgtccagatggtttgagcacaattttcttggcatgctcgtaagaacacaggaattttcaggggaaaccagagaacatagtagtggggagggtaggtgggggagggcaagtcagggctgagaaggcagaaataaggtttggattccaccaaatggcactgaccagctgaattggaatcagtcctagttatagttggcacgggtacccctctctccgctccaagatcacggactttccctcttcataatgggaattacctggctttcctaacagagaacggaggggggaagaactatagggaaattcatggagctgatgaagataacgattgaggtgcagcccccaaacctcaccatcaggaaagcattggtcaactcctgtatgcatgcatgggacaccgagcaaggtggggaaggaggggtgtgaagggcagtgttaggcctggaaacacagcatgggcaggcaactctctttgatagcgtcagcaaccactgcttaaaaacacagaaattaaaaatggcaggcagaattctgagatggctcccaagatttccaggacctgatgcacacatactttccgtgtatgtgaatcatgtacagtccaacgtgattccaggtactgctgtgaaagatgtacgcagatgtcattaag

SEQ ID NO: 40458 - DNA, 684 bp, Homo sapiens
aaaataaaataaaacagtcctcacatttagcttggtatattgatgtttatacacctgctttccctaccaatgaaaagcagtccacagttcatatcattacatcatcaaccccaatatgttattgttctctctttctgcaatagggctactaagctaatgatctgagataactttccataagtgaaatactgaacggtcaaagtatttttactctaggcttcccagaccactgcccttttgttgtctcatgccagagctggataaataatcagatcaattcatgtttgcattgaggcttgatttggcatacggcagccttataactgaagatttcttcacctgtgcttgctttgtggttacagatctcaaaatgcccataaacttgattaaacttgtcccttgtatgcctcctcatttcacatgcagattgtttgtgattccgagttacataattctcagtttctcaataaagcaaccagcaggtggtatgcctttttgtttgaagagttacctccctgtgtaaaaatgtggagccaggtgtctctcactgagttcaacggatccaagcatttagacctcctaggactttcttaaaacctagccctgattttttttttcatgtaaaataaatattttgaaagagggaccaaagcatttgatcattctctcttcagttactgcaat

SEQ ID NO: 40459 - DNA, 1787 bp, Homo sapiens
ggtaaaacaatttagcatattatgaaaaactccttgttggcattttaatagccttcatattaaaaattattacttcccctaaggagaaagtttttagcatgtcttatgaacctggaactgtaagaggtttctggattttggacagaggcaaagccaaggataggtgaaagggatcaatatagctctcaaaagaatttaagtgccactaagtctccttgactttaccaaacttctagcaaatgcctcacagtgatgttagtaaatacagaacaagtctatcattttgggaaagttttctttttaaagactattatggcaccagaattaatgcttatgaaattttagatgatgattcaggcagaatgataatgttgggtaaacgattttcctcccaactttgagtctctgccacgctggccatcacacatattgtatggatctgccaacagtaccttccttttctttcagagtagaaagattaaatgaacttcttcctagcacacacagatggcttatcagttggcggttttcttcaagtccctacttgcaactcctcaaaacttatctaaaaatcattaccaaagctgcaaatacagattttcagatcaggaaatattacctgatttatgaatcgtacacatggggtataactgacaaagcctcatcactcatgataggctcacccgctctccttccctgttcacagctcaaaaacctcatttaagatgagattagaacaacacagcttcattaaccttggcagcctggcagatggcattggccttcaacccgggaccagccagtgagcctggtgctggctgctgtattgatccatgtgtcattctcctgaaagcaaagctgcagactgaattccttttggtgaaattccattccaggcaaacacctggattcaccccagtgattggacctgtgcaggcttttgtctatcttctgagaattactctgcaaatgctggaagaatcagggtttaggaagctccaaatccaaaatgaaaaatgagatctggcatatgtgctacaaattggaaagaccttactgcttgtgatatccgtgggcccttaatcagaaaactttaatttcccgcttcccttttctcttgtttgactttggattctgtttcaaagtttctaagtcaacaatataatcaactgaacttagaacaacttcctgctcctgacaggaagaaaaaaagaaatctctttgtttctccagtggttggggagtaaacgaacctcccagggaaagaaaaatcctttggctatatttctcttgcttgagaaagagcagaacaaggagggtcttctgattttgaatccgttgcatacactggagttaaaagtcgagttgtctatagcagccaggcagataagtggttactgttcaccaatctatatgctcccctgtatttcccagtctccgttgcagttagcttaggaccatgtgactagttctggccaatgggctgttaggggaagcttctcgtatcactttcaggtcaaggttgctaacagggggcctgccttctccatctccttcctctgctgtagtgactttggaggccacatcttccatataagagagagctatctggcctttgacctatagtccacattacataaagtagaaataaatcttcagcatgaggccactgagattttcaagatttgtctagagcagctgctactcaaatgcaacatcttcagttgtatattttaggataagacacactttatcaaatataaagacatgttcttcactgtcccaag

SEQ ID NO: 40460 - DNA, 620 bp, Homo sapiens
ggctggctatttatgaaaaggtgaaatgggaaaacaaatactcattccacttaatcaattcttggggaatgggacttgtgtgtgtacatattttaccgtattttcatctttgcttagcttggcatccaacacagcagcgggacagattttgaattcaagtagtaatgtagtcccataagttgccacaggaatactgctgtccacagaaagatgacagttttgaacactggattccccaaatgcaagaggtcatatgaggtggactttacaaagtttacataacaaagagcaattctgttaactaaaatgattaattcccgtcagtacacatcaaacagaactgttacaaaacattattgtctgagttcccattgcatagtaagggtttttcacaagttctatttccaataactcttttgacaaagccagagcttttttttttttttttctttttgagggggtggaggtagcagacattaatttccagaggaatctatgaatggggactgagtaggctgccgtcttaaatgtgagatatgttgcactgatgttgtggcaggaaaaagacaacagcccttctgaggaatggggccttccagggatccgggatggatgaaaaa

SEQ ID NO: 40461 - DNA, 1731 bp, Homo sapiens
agtggaaatgttcttggggagtccccgtggtcagcattaggaagaggaattacccgcagggcccaaaagacagatcctcccctttctaagaaggattgcagacatttgaattgagctttctcgggaggtttacgcagcacactcccaatgttcagaacagggagtaaagaaaacattttgcttgagaagcttccagacccctggggtgacttgtaggataagagtttggttgggatcctaaaaggtggtagatgttcagctcacacggactaagtgttacagggctggcttccagcttgggtaatggctgaacctgtgaatgttgcaagttggcttcatgaggtgccctaaaagtccagactatagactccacctgactcgccaggtcaatgctcccccttgtggtgatttctggagctgttatcagctgtctcctaggtggcccttagacaagtaagggtgcttgaaaacacatggtctgggaatgcatattggtgcctctcaaactcaagaaaggggtggcgacattccagttatgtgtctgttccaaagaccgcatatggccttctctaatttttagggttttttgagaaaaagttcacactagctgcttttaaattctcttgcctctgaaatccttacctgaacatctcccacctagaaaatatttttcactggcgacatctcttgttttgggtgagcagagatgaaatgacgcatggcctgtgtgattacggtgtgatgtctgcaccaggtgtaatgtgggctgaacagcttgacgtgttttcgtgaaaccaaagtataaccttcccaaattaacctctttgtttctgttaatgcagtcttacctaccaaagtattttaaatggttcttatgtatagtttaaaagactataggttatagctatgcagggggcacctatcttatgggtatttaacaacagaagcagcttcctttaaaagtggaatcagttatgaaatatatcatttatggggccaactcctccaagtactcattctgtttgcctttaagcaatatcttccagtatttgtaacagttgttctcagcagcacaaagaccttagcagttgagagataaagcatgagtttggtctgtgaccttgattacaacatgttgtgatgtgacgatatggctttgccttgactgacatttgtttggccactgccatgggtactgtttcaagtcagaagaaatttacatggagaaaaacatcccatgagcttaagttaatacattgggaacttgccctaaaactaggtggcttttttttttttttttttttttttttttggaaatcaaatagtaacaagtcctatgtaacaaacatctagtatcagggttactaggtgtattatacgtttatttaaatcaagatcattactaagcacctactatgtgcaggacaagtgtaagtgccttagtaaacattgttttttatgctatacaccattttaaaagttccaatcaatatttgctttccattcattaaacattgaaagttctttcagcatgccatctaatcacacgtaagtatttgcctttttccaggcttaacaaaacattttagacacagactatcaaagagcgaggactgtacaaatgtctccttctgataatagaactcggtggcgacttcagtggcccaggtcctgggaaagtttccacggcctccctggtgccctccttcccacatgactgcaggaacatga

SEQ ID NO: 40462 - DNA, 811 bp, Homo sapiens
gagagggagctgcaaattttgtgtataaattctgtcctaatctgtggctggtcccgagtcatatacgcatgggtcagatgcccagaaatccagctaaggctaaatgaactgtactaagagtccagctgctgttcacagcaggggagaaatagtttgcagttttgtgttcagcaaagttaacttgctgcttacaaaaataaccaatagttttcaaaggggcataacagaatccagagcttctttgtagtagtcagggttctctagagggacagaactaataggatagatgtatacatgaaagggagtttattaaggagaattgactcacacaatcacaaggtagagtccaaaataggccatgtgcaagttgaggagaaaggaagccagtggtggatcaatccaaggtccaaaacctcaaaagcaggaaagccgacagtgcagcctttagtctgtggccaaaggcccgaaagcccctgccaaaacttgtttaagtccaagagtccaaaaactgaagagcttagagtctgatgtacgagggcaggaagcttccagcatgggagaaagatggagaccagaagactcagcaagtctgctctccagcttctcctgcctgctttattctagccaggctggcagctgattagatggtgcccacacagattgagagtgggtctgcctctcccagtccactgactcaaatgttaatttcctttggcaacaccctcacagatacatccaggaacaatactttgcatccttcaatccagtccagttgacactaaatattcaccatcacactcttcaacgtatc

SEQ ID NO: 40463 - DNA, 1134 bp, Homo sapiens
agaagactacctctcccggcaggcactgcgcgctcgacggccacaggctggccagctccctgctctccacctccatccgaatcagccaataggaattcccggcttgggcctccgcccgacccggaccacgcgggagccggggcaatcaaactacatttcccgacacgcatgtgctcgcgtcgtggccaatcagcgccaggaattcggaggctaggggtggagccagatgcacaggacaccccattggccaggggaagcttagaagagccggaacccgggagctagagaagcgaaatgacatttcctttttaaatagctggagtcggggccccatcgagaaatggccgcgtcggcaggtgggtcgtgtggtggccagggcggcgtggagggaggtgagggggaaggtgggccggggccggccacaggcagtgggatgaggacgtagcggtgcggagctagagggaaggatgaagcggtggaggggaatgagaagagggaggatgaatggtgcggagggcggtgggcggtccggcgggaccgggatggggaggctgggtacccgccggcgctgcgccccaggaggcagcgggaggcggcttgagggggcaccggcggccgccgttgttcgagcttccctcgtgaggctctgccctcggctctcggcggagtccgcgcagacgcctctcctgggctgcgagcgcgtttcctccgcgagcacgggtgccgggctcgccgggctccgcaggagcaggctggcctttgaacttgttccgccgatcgcgctccgccctctgtctcccagatccttaactcgcggtcccacgaggtcgtgcgtatatccacagacatttgtatatatcttgtagggggaaaaagcctagcaagcagacacacaaacagaaaaatcccgcgatgccgtaactggctcggcacttcttgtagttgtacgatttttctcctcctagatttaagtaagtcttccccaacaccgaatgggattccatcttcagacccagccagcgatgccatggaccccttccatgcttgcagtattcttaagcaactcaaaacaatgtacgatgaaggacagttgacagacattgtagtggaagtggatcacgggaaaacattttc

SEQ ID NO: 40464 - DNA, 884 bp, Homo sapiens
gcaggaaccggccattttcacttcttttgtgattcttcacttgcttcaggccttctgggtatatatgtgcaggtcacaggggatacgatggcttagcttgggctcagaggcctgacagtatacagatgcagaaactttggaagtgtacataagaaaccagtaatagtgcttatttgttcagaggctgggaaagtgagtacagatggtcacaggtgagaataagatttttctctgaatccctttttatattattttattttgtactactgattcaaaaacttacccccaaaataagatctggcaaataccttgccttttctaggcagctctaattcattccatcaattcttgttttattaagtcatcatagggactatgtgccaagcacagaattcttttctggcatcagaattgtacaatattgacttaaaagtaattgacctagaatacagtaccacatggtgccaaaatacaaaagggtctgtgtaatactcagttcgagaaaggtaaggtccttttgggttttgggcctctctggctctcatagccacttcagaacagtgagttataaccttgtaactttctgaatccatctaccaggctataaaactccagggatctggtgagccaggctacttggggccaggaattgggcgagtcaatccatgactaggatacagagttagcaaataagggattggccaggattcccactctgaatttctttctctcttcccctggcctcaatgatctaccctgaccacttacctctatagacccctatgagtgctgacattgtgtaagggtcaaaagagagaaatagggaggaagtcagactgagagggagaaaattggcatttgcaggttctacatacatgagtggt

SEQ ID NO: 40465 - DNA, 1523 bp, Homo sapiens
gcctggcaggtgacccaagtaggcaccagactcctggaccacagaaactgtgagatcataaatgtgagttgctctaagccactaagttgtgttactttgtgacgcagcagtagctaaagaacacccattttacagggaggacacgtgggatattaaccatgttgctcagggaatccctgggatttaaattggttcttccaataataataagagctactatttctgagcccttacaacaagccaggcattgtgccaggtgctttacccatgttatttcctttaattctcacaaaaatgttgtgcaataggcactactctcattttactttatagctaagtaaactgaaatcgcaaaggctatttgaccaaacttacagctctttagtgttgaaaccaggatatgaacccaggcagcttgactccagagctcattatttactcttaattctctattcttttgcttcctggaacagtgcaagtaactgcaggtttattctgataaaatgggaaggctcagctctctaaaccaggctaggattctcagagctgaagctaggcaaagaaactgaatggagaggtaaacattgtcttccccagttgcagatcctagaggtaagacagtcatcaatgatgaatccacagcaaacaaaagtctgagccaaatatcctaagcaacatgagggctctgggagggagatttaaagtctgagtgaggcaagaccatgaagacagcaccctcagcaagaatgtggttggagaaagagggggtacaatagtccttttgtaagctcaactgcctccctgcaacctcataggtacagtcttatggtataaatctagagaaattctgcaggtaaactgggcatgtctggggaacctaatctgttagccaggagcaccctgtcaaatatgcatctatgaaacagacatgagaacatagtagtatacactcagaattgctagagtggccttacaccagctctagggtagaacctgccagcatcacatggcctggtcatttcaaaaaccttgcaggaaagctagaagagaaggccaggtggaaatgggatctaggagctgctgtaacttgatttagcttggcctagattctgtccgttctgatgatgtaataggctctgtccccaaagatgagtgacacagcccctgccctcaagaaactcacatttgagtagaacacataaaggtcagcaaaccactagaaaaccagaaagtttatataagctagagcagaggtccacatgaaatgtggtgggagaaactaactccaaatagcagaactgggggaggcttcatgaaggtaggattctgcatgattctagaaaagtggttaagtattaaataggcagaagcaaagagaaaggtggtgtactgaaggatatagaggtaagagataacaacagtattcatagagcaacaagaaataagtttggccacagtgtgagaagccaggtaaactaagtaatgggttacaaagggaaaaaaaggctggggccagattatct

SEQ ID NO: 40466 - DNA, 1290 bp, Homo sapiens
tggtatacagtggttaggatttgaatgtgattaggatttatagtttcaattagtgccggagaacaattttagaaagttattagcaagcaactggcattcgcaaagatggctcatttgtgtgttgctcaagattagctgggtcttttagttgtttacaaacacacatagtggcttgtcttgaatgtgtagaagtgactgcaacattacatactcagagctctttagcagaaatgaagcctagagctttggtttcttactattcctgtgtgggcaaagcaaaactcaattttgcaacattttctttatttcaaaaaagaaggtaagtttccctacctgttctaaactccaacatgctatttcaaatgaatagctttcccattcaacaaactccttcatatttaaaagtcttaagtgcctcaaatactccatgttgtgttgcctagaatacaaactaattttttaaatctccctactggattgttttccactgaaacccataagtctttacattggactgtatatatttttctcttttaaagcctttggggcattattcatacagggcaaaaattctcaaatagattagaatcctggttgaggcatctgcaaacacaacaaaaagcactcagtctcagggagttgaaagctgtgcctggttttgttcatgtcaaaagccatggaaggtattacatcaccttgagccagcagaccttgaccttagcctcccgctgagcaatgagacagtttccccaggcccggaatgtgagaaatacaaaggaacccttcccacacacggtgacattaggattcctcatgggatgacaaggccttgctccagggatgatgtttcccactgtaggagaacagctactgtctttgatgaactgagtctacagggctattgaaggtatggtctttgatctcaaaattcaagtgcttacaaaatatccatttctttattttctctattttgtaacctaactaaagatatttccttatctgaaaaacatacattttaaatacaaatatatattttctgaaatcagattaatgtgtctaaaccttcgtttcttcagctgagaaaaactagtgtgtgaaatggaatccgggaggcttatctgatagaaaacagggccagagactgctcacattgaccagtcctattccactgtggacctttgagcctaagcattcttctattatgctactttgtcaataaatgcactactatgcacccattgccttctgggctcttatcttcttgtttcctaaccctcctatacataaata

SEQ ID NO: 40467 - DNA, 542 bp, Homo sapiens
aaatgtttagaaagtgccatcacacaaatccttattttttattgtgagccttcccagaaccctatttattaggtagggtgaaggttggctctctagctgagaaagccatcgggcgcattggggcatgttgtcccaaggtcacacagctgtcatgtggctgtggccaggcccaaagccagctccctagattgtctactgatttgttcattgatgttgttgctagggctgggaccttggtcgagttacagaacctctcttgaacatttcctcatctgtattatgggaataaaaagaggacctagcccacaggatgttgaaaggcctaaatgaggtaatacatgtgaaatgtttaccacatggctttaaatgtacttaatgggtatttacacttgcatttattcagcaagcattgatgaaagtgggcaagtaagaaaacctttttcagtagactgcagctcatgttgaattcaaatataatggaaatacaaacttattgaaattcaacaaaaaggtaatgccttaagaatcaaagaaatgaacaa

SEQ ID NO: 40468 - DNA, 593 bp, Homo sapiens
ggggcagtatcttgtgatgtacattatactgttattaacttctctagaactctctattatgttcacctcctgagcttttaaatatgtggtcagcagattttgcccactccagatttatttatctgccatgaaaagccacctattgctgagcctctaggaacttcttcaaagtggacacctagaagtgttgtttcacctagtcatgcacatgacaaatgtttcttgggcaataaaaatagatgccaagcactttgccagctgctggcaacacagcagtgagtaggatggacaaagtccctgccgtggtaaagattaggatctagcaaaggtgactgcaaataaataagagaaatatacagatgtccaaagtgatatggaggaggcagacagggtcactgtgcaactctggagctgactgccagacagtgcagctagaccacagtggctgtatggaaaacgggctcttggtgaccaccactgctacaggagaagccccttaataaacatcaaatgaatggctaatgtagctggtatcctcattctcaggaggtgaaaccaaccactgtagcacatattcaggaatcttccaggat

SEQ ID NO: 40469 - DNA, 827 bp, Homo sapiens
atttgcacagaggtgtttatagtattctctgactttagtttgtatttctgtgggatcagtggtgatatcccctttatcattttttattgtgtctatttgattcttctctctttttttattagtctggctagcagactatctattttgttagccttttcaaaaaaaacagctcccggattcattgatttttttaagggcttttcgtgtctccatctccttcagttctgctctgatcttagttatttcttgtcttctgcttgcttttgaatttgtttgctgttgcttctctagttcttttaattgtgatgttagggtgtcgattttagctctttcttgctttctcctgtgggcatttagtgctataaatttctctctaaacactcactgccttagctgtgtcccagaaattctggtacgttgtgtctttgttctcattggtttcaaagaacttatttatccactggcttgaaattcacaccgccagcacatcagtctgaagtccacctggggtgcttggtgggaggaggggcatctgccattactgaggcttgagtaggtggttttcccctagtagtataaacaaagctgcttggaagttctgactgggcagagcccaccgcagcgtggcaaagtcactgtagccagactgcctgtctagattcctcctctctgggcagggcatctctgaaagcaaggcagcagccccagtcagggacttatagatcaaactcccatctccctgggatagagcacctgccagaaggggcggctgtgggcacagcttcagcaaacttaaaagttcctgcctcccggctctgaatagagca

SEQ ID NO: 40470 - DNA, 814 bp, Homo sapiens
ctcattcacaccaccatcttctctcacttggaagaccataatgacagctgatctctttctcacttctcctgcagccccattaatctatttaccacaggacagtccacagggtgaccgactcatcctggtttgccttaggctttctcagctttagcactgaaagtcccatgttcagggaactcctcatttttgagcaatcaagagcagttggtcacccccgactatggtgaactttttataagatagataagatcaggtcattgcagaaatcactagccccaattcctcatctctccctggatccatgccattttccaagtgactatgcagttcttcccactagaggccctgaccccttgtctttggattccaacaatgggatattagcagatgtgatgcaacaaggagcttgaaacatacttgcagttgggcttgctctcttgcattccagccacttccttgtgaaaactatacccacacctagcccacaagtccgaggaggatgagaggcacgtggtacaggcctggacccaacctgcagtttgcagccaagcccagagagggccacctcaacccactaatatgcagacacttgagcaagaacaaatgactccctgagtttggggatggtttgttacctagcgttgttgaggcaatacctaactgacatggatttcatccaaatcttttggtagcttcccatttcacttagaataaaatcaaatatacttagctgagcacaaagccttatatgatctgggctccaacccatttgccagacctcaccatactatccttttctaaacttcattct

SEQ ID NO: 40471 - DNA, 1679 bp, Homo sapiens
cacattcaccatcaccattaccaggggtcaaacatgtcatctcaatgcatcagatttgactgtctcacagggccctgctaccatctccacaccctgcagttagcaatttgttagccctccttaaattactccccacagtcctttccaataaatccagatgaaagcttgcaagggacagactttattcaatcaacccactcctgctccttctaaggatctaatagtgcttaatagtttaggatacatttgagtttaatgggatttacctgatagcaagagacttctcatcacttctttatagcggcagttttgagtgacctagctaactcaatctcacaagtttgcctgtcacactggcttgccaaagaaatgacttgtagagtaggaaatgagcgaccttcgctggggaaattcctgagatcatctgacattttgaatgttctctgtgcagaatgataattggtgtctgtgaggtctgaagtccactatttgtgtttagaaagacatttcattcttgttgatgaataaaatactactgctatggaaaacttgatcttagatgcttttaaagaaaaatataacattgcagagagcaccctttctttcacaatttcattgtcaaaatctccatttaaggagaaataataattttgatgattaaattccatggccctccccaatattccacataaaatgccctagttataaaaaagaaaaacacatgccaaatttttccatctatgttagtcatctcttctcttatagtaatttgaatttctttagccagggagggggagagggtaaatcatccaaatattacttttatctataagaataatccatagaagttaaattcaaggtgagctttcagaaaactagatatcatgaaaaggaaactttaaaataatccctgaaaaaaaaatttatacccaagtgcagaatgcacggtagtcaaatgagcctgtcacactgtccaggaaatgtgtgaaatacatactgtcattcatttgaaaagtccactgtgatgacaaagacctcagaaaagtacacacaaaaagactcttacaaatagacaatctgacacagtatctaagcagcaaaggaaacaatatcctaaacatactataccctcttaaaatcagaggagccgaagaacctaagaaacatcaagaaagttttatactaatgactcttcttttaggaacccatagtgaaatgctagatgatattgctacaagctaacaactggcccaaactagaagtgaagagagaatgaggcagaaaggatcaaagtatgctgtaatgtcaagatgacagttctgggagttgataattgagaaataagcttaagtgagtggcatcgaaggctcggtgggtcatcttcaccctgccatttattcacaggtgacctctgtttgtttatgctaactgcaaatatcaaccaccatgaccttacaagtttgctggcaaagtaaaatgaaagatttctgtgaaatctcttttccacctcgtccaggatcaagaagcaacaccagggaggtgagaaatgcaccacagtggggatttggttctatgaccttccaccaggtagatccagccagcatctaattagctacccaatgcaggagaaagatctaaacaactctcccttattggccattactctcttctcttgagga

SEQ ID NO: 40472 - DNA, 2169 bp, Homo sapiens
ggccgaggcaggaggattgcttgagcaagacccactctcaatttgtaaaattatattaaaatttaaaaaaaatttttttaagagtatatgcttcttttggagcagatttcaagaattctggtgcaaacaaagtcaactattagttatcttataaagtttattttcatcatttcattctaattaactatacttaataatttgctcctcaatatgaatgaaaatttcagcagtattctagctacaagagtcagtaaaccattgcctacagaatctaactcatctggataagcaaactactcagtcactatttatctctttaactaaaggttcattcaatctttgggctctcattagtatttcttagtcttttccctgccaagttcatgccagtaaacttgacagggcacagtatcatgaaaatggtatttttcatatttatcttcctcaggaatctgctgaaactcagtgcagacaatacctgtcttccaattctaaccacatgtttgagaatgtgcacgtgtgtatatgtcatactaaccaatcttccttttcctattagttcctggctttactacttaatagctgtgcattcaaccactctgtgcctttaatcctcaactgtaaaacaagaataataaacaggattgctaggagaataggatgagtaaagtgcttagggcatctgtcacgtaaggagagctcagaaaatatcagctattctcatctattatactatgatttttgcgatattcaacactgcttccaacatcatcatgaagagccagcaaaacaacatgaagtgacctaggacattcaaatacatgacgaaaatcttcatgacacaccagtaattgtgcaaaagaggtaggaactgtggcagaaccatcacccttaaaaattcatatcaaattcctgccttggctgaggctttgcactggttatcagtttttcagacctcttgcctgcctttcaaagcccaacaactgtgaactaagcatatgaaactgagacaggcaactgaacagtgggaaaagagaatatttacattgtgtgtatcagacataagtgaaaaaagctgagatcccagtgaagagtgattcatgggtgacacatattcagactcaaactgcaaactctgtctcttgggcagcagctcaagtcttactttagttcttttttactttagctgggccacttacagtcagccttatgcatgtgttgttcatgaaataccttctgatttggtcagtttatacacagaatccaggactcctcctctctgactctctcctttctgagacaccctcccacccccagtttcccgctgcttagggatcctgaactctgtccttcagttctccagtgcaaaaagactacaggttttctaccggagtttagccaccattgcaccctgtcatcaagaccaaaaagctggaagtaaaagctggaagtaaaaactggaaactcaaagcaggccttttgtttcccatttcaactcccctccttccagtttcgactcccctccagggtctcccagcctttggcactttccaaaaccttcaagtacttgttttatattttctccaaagcagatagttactagctatgcaaagcccagtctgttaagagcttacatggtcacacaggaaataggatctgtcaatgacacatattccagagggattcaagctcaagcggagatgttcttttctattccacatagccagggaacactaactcatgaacagggacaatactttgaaagttcatcctattaaatgacaaagagtcttcaccttaggagaggaagtcacttccaagcagaaactccaaagaaatgggtaaagactggccaaagaataagtccaggagcttgtttgggatgaacaaactatgcagacagcctgagagctatgaaaacacacacaaagtatggtaatagaaagggtctagaaaaggagaagattctcattcaaagaggtaggaaaatggacaccaaggcagaatcctttttttttttttttttgagacagagtcttgctctgtcacccagactggagtgcagtggcaggatctcggctcactgcaagctctgcctcccgggttcattccattctcctgcctcagcctcccgagtagctgggactacaggcgcccgccactgcaccc

SEQ ID NO: 40473 - DNA, 6102 bp, Homo sapiens
ggagttagcattgaataggtacagagttttagtaggggaggatgaataagttcaggaaatggatgatggtgatggctgcataacaatatgaatatataacaatgtccgagtatggttaaaatggcaaaatgataaaaatggcaaaaatggttaaaatggtcaattttatgtcatgtatattttactacaataataaatatataataaaaattttaaattaaagaatatacacattcatattttttagtatctttagaagctttggaaatcaaaaacaaggtttcagagacaaaaaaggaacttaatgatccaaatttttaatcaaaaaagcaattcttttgccacctccctcaacaccctaaaagtcaatcagaaaacactgctttgtgtcaataattaattttacctaaattatgacaatgttgcttaacatcaaaattccaggaaaaatattccactgacctgaaaagaaggactctgaagtatgcaggaggaaatagattcatcctgtagcacatgacaacacatcttcaagaaaggaacactatgactcttggcttaccataagcgtaacattactgatatactgccaatattaagcaaaatgaaataccactactaaatattctcacttggggccctttaacataaagaaaatttagtatttttctctcatcttcctataaagtttaactctgtaagtctccccacatattaaaattatattttatacaaaatatagtcataaaagctattttatactggtcataaaagcctcatcatatactcatatcaaacaaaaaagaaaggatccattagacactcacaacatgctatgctgtgagttttggacgtgggactccaatcctaaaagcgtcctcaggcccaccctcgcttaggacaagtcacaagccttctgcctccatttccaaccatcctattcaacactcagccattcagtccttctgcatcattttaaaattcatgaggataatctgtttacaacttcaccatctcaaaatttacttagtttttctaatgtgccaaatagcacgtatatttttttccatggtaattataaaaaagttaaaagctgaaaaattccttttttccctgtattgttggctttcaattttaatgatacatcactttaaaagagccctgaatcttaacaaagaaacactcatcattaatagtttattcccttaatcaaaaataattcataactctccactttctattacttattaaaggcccacgtaagccctcaggctggaatgagaatgcctatgagaactggttttccccctttctttcaaaggtaggaaaggacttactaactcaaataagtccttcaagtccagatggtatagcatagcatctcaacaacaggtaagagagtacaagcagaagctggggacaaaaagcaaaggataaaaaatagttccttataaaaatgtgaagagatctccattgataaggagaaaaccttaatattttctggtaaagctataatgctgatccctacttctattcaatgctgtgggcaagccaatcaatgctgtgggcacggggaagggaggggaatggaggggagggcaggggaggggaggggaggagaggggaggggaggggagaatatggtgccctaaatggatcaggccactccccagacactgtacccagagccctgagccctgcttcaggcagggaggaaagcatggtgctgttcctctccacaggcctcccgacttcagccacagacaataagatgggggtggatcccttacttaaaaccagacaatatcgaaacaataaagtttggccgggcacggtggctcacgccttaatcccagcactttgtgaggccaggtgggtggaccacctgaggtcaggagttgaagacaagcctggccaacatggtgaaactccatctctactaaaaatacaaaaattagctaggtgtggtggtgtacacctgtaattccagctacttgggaggctgagtcaggagaatcacttgaacctggaagatggagggtgcagtgagccaagatctcaccactgcactcaagcctgggcaagagagtgagactctgtctgaaaaaatataaataaaaataaataaattcagctttcagagacactgaaatgtgaaaaagaaaaaaaaaaggtatcttacaaagaaatataagtaattgtcacaagatcacaaagctatggagtgctgaaggcaagagttaaacccgggcagtctgattccactcacggtgtacgtctagtatcctggcataatgactcacagcattgaatcgatgccaaagtcgcccaaatgatctccattcttgcatttctccaaccctctccacactatatccagaaagagtactctacgcattaaactgcccttgccacttcactgtctaaaacccttcaatggctccctattgccctcctcaagaacaagcttagcttcattaccaggcctaccaggatcagcgatcttgtccttgctcttgtctctggcctcatttctcaccgtaaactctacaaggcagccctcctgaacctccttagggctctcaagtcacaactctgggactaagacagcccacaaatggaaatacagcaagcacagggagaaatggatgggagcagaaaaaagatgctagtccccccactccaacccacaggacccaaacttacacaaaccatgccttgtgctttgccatgtctccattaacaattcatatattatgtcaaatccctcgaattttaaaataaaaataaaattcaaaggtaaatgttagaaatctatgcatttatggctactgcctaagtcctattcttttggaatcatttctagaaagggtaaaagctgaccatactcagtacactggtcaaagtctgaacccagaataccaggaaactccatcctccaacaccatcccccaaagcccactctgcaaaggcaatgacatttcacaatttctccagcattcttgaaacgctgagggcagtagtttgtgctaagcacacagtgaaagtcatgtccagttggccgttggttcatgctgtggctactgccaattctttaagtgttccctcacctcaaatctttgatgcacgaggtccagcagtcgtcactactaagtcaacactgagacatgtaaatgtttgtgaaatgagtaataaccaggatggtacaattaagctccccatgagctcctccccactgccacctcaggcctcaccagacattcatcccaactgtggaatcctgaagataatcagagcccgggaggcagatcttcacccctctgagcctcagattccccagaagtaagctgggaacaataactcctatttcacatggctactgcaaggatgaagtgaaataaaatgtatggaagcaccaagccagtgactaatcctgagatggcagcacatgataaatgcttactgaatctgggaaagcaaaattattctagctcaataaagccttttaaaaagaccagcgaatttagcttcaaattcagtgcaagagaaataatcatcctgggcccaccatcgggtcatatgccaaatgtcttaaatatcatcttatttaatctttgtaactatctgtgcaaatgatccccttttcaagtaacagtaaattgaggctcagtcaggttcaataatttgctccaggttgcagagaaagaacatgggagatcccataagaatttgaactccgttgaatttgaacccagacttcgtgtctttaatctccctactactctgttgacaagaccctgaagccagagagagaggaaggtggataagagtccagaaagggcaaccatgccaagttgatcagcacaccttcatcagcacaagtccaaatgaccaaaggcgagtgtcactcaagggcaaaaagatggggaaaggtaagcaatcagtttaactgcctagttcagcccaactaggatctttcagtgacagagcttaataatttaacagcataagtcctttatcagcatgaggcgggtgactccctggcactgtgattttaagcaaatgactatagggcctctctatgcctctgactgcttctataaaacatggagactgtgaaatctcccctgcagtgatgttgtaagggttaaagaaataatgtgtggagattacttcacgcagccttgttatatactacatgcccaaggaacagttctatgattatgaggaccctttcacaactaggatttctatagccccttccttcttcctcatttgctgaaatgagccacatcatccctcaacttctcctgttccttacctccctctcccttctctgtgcaccctactcattgactgagaccacaaatgcttactgaataccaactccggccagctggggaatcactcacgctgttacattaagctgtatcactttgcctttgtggagcttacattcttaaacttgtaggagagcggggaagacggccaatgaacaaataacactaccaggtacagtcaagtgttataaagaacaaagcagataagggtacagagaataatccctggaaaggcagggctgggtaaggtaattaggaaaaagcctatctgaagaatcaacgttgaatcagaaagctgatgaagacagagatcaggcaatgaatgatcagagggaatagttctgcagacacagggtaagtggttgacagaggccaacagtatcttagaaggctaagaacacagctcaattgcagtacccactatgttttagtataactacaggtttataggccagttgtacctctgtgccctctgaaggtaggagctgtgtttcttattcctgtctgcattcactcagtcatatttatctgcccaacattctataaagaatgagctgtaataagcattcagaaaatatttgctacataaatgatatttgtttgatttttcagttgtgggggttaattttattccctgctgaattctgggctttctgaagccccatttagacttctttgtatacccaaaagtgccattgtccctcaacttctgctatccacctctcccttctccatactaaactgctcactacaactactctccccctgttctctcacctctgcctctgcatgaattcacctggactgccttcttcatcacctccaccttcctcacaaactctcaagattaatctccaaatttcattagtgtactgatattatcatttgttcaaatatttccaaatctctcaagttcttcagtaaaacttttccatcaagtaacagaaagtgatgcatcaagtgacaattgcagattgagtggtaaagacagctgaaggacaaatgatctgaggttacttatgtaatttcttttcctcccccaaatatgccatatttcagtgactttctgggctttgcgcctgcagaactagaccagggtacgagggcaggaatgttctcactactgtgggtctgtgcactcaatcactcacccataaaagaaatgccttatttacagcaaacaaaaccaatttaggacaaagctatcacttaacggtcttccccacaaggaaggtcaatagtttagcatctaaattatttgagatggattcccttttctaaaagcagaaattgcagctgtacttcattttaaaaaaagaaaaaagtcaaatatttattctcctaggcaagagggagatacaggtaagtcacaacttccaatgcagccgccacagcctcatttagctgataagaacttgcccataacctttagtccttcacttacaaaagtcatgcattcatctttctcctcccacttccgtaaaggcagaaaattaggctggagccattctttctgagtatacaacagcaggggcatgggtttaagcagtttctttgacaacatacattcctctgtaagtccctggacagaagctctgggctgcacagaaaacatacaacaaggattctaaaataggaggcctggccaggcacagtggcccacatctgtaatcccaacactttgggaggctgaagggggcagatcacttgaggtcaggagtttgagacaaacctgaccaacatggcgaaaccccatctctac

SEQ ID NO: 40474 - DNA, 3497 bp, Homo sapiens
ccacctccattaaaataaagtatcacgtggccaaagactctgcctgcctcattcaccatccccaaaccccagggcctacaacagtcctgccaaatggtatgggctgaataaaaactatatgaaaaataagaaatgactaaagtggaccctttaaggacgtactatcaatcaaaagtcaaaacagtaaagctaacagcaaaggtgaaaaaaaaaaaaaaacttcaatgacactaagcatcaggaatatgtgtcaaatgttaaatttaaccatagggaggaggtagacaaaatgtcattctatgggtatctttgagagaccagttaaagttatttctctaagcagaaactgggtcttttatttctgtacagacaacagtttttcacaaggcctggtggtataaaataggtctgggccaagagtggcaacagatttctgagacacttggtgaggattcttaagtatgatgagagaagtgggccatgtttaactgcaatgtctgccacgggcaagggactatggaaacgtaatatcaaatcagtgtacatgaaacagatcataggaagcacccaagaatttgaaaatagcaatactcaccatttttatggacaattctaagatggtcataaagaaaaaaataaaaatgtgtcagtggtgctaatgacttggatgttatatagttactactggcatgcagattaatttgcatgttgatataatatattttcatgaggaagtatatactcaccaggaaacagcatggtgtaacggaaacgtaaaggtaagcctttactctggaatgccacaaactctcactgtatcgttgaatatgtcattgaacttctttaggcctcaatttctctacccatgaaatgagctggctggactaaatgattgctaatgtccatttccagttcttggacactgtgtacctttctatctttaaaaaaacctacttttaccttctaagaatttacagaaaaacacatcatccacaaatatgtaaatcacagtaaccagatggggcgtgctaacagatctttttacccagttttcttgacaaaccaagagtatctctccccaaccagattttctcctgtgttgcgttcagcctcttatttcttggttagggaagtaggcttcacatatttcagctaaacactctgcattttcagtttctctgtacaattcatgagttttcactgccctgggccccatgtttctcatcaattcaagtctacactcatggtaagcaccctagttcttgttttttctaacacttaaataatgaataggacttcatctcctagagctattctccttactctattacaacagttattagtgagttttaattagacaaaactgccattccttttgctacctcactatactgtcaagcacctattaagaatattacagtagtaagtattagcaccttttaaatttacattaacaataacagagaaatggggaggcaggaaatgaaaggagaggggtaaaaatagctcacagatgtcataaccaaagtttagaggaactcaaaaaatcattaatcactattttttaaattttctaaaaaactatactatgcacatcctggttaaaattgtatgagtgataatttgcctctcatcaattaaaaatggggaaataggcaaggtcattaactctgctgtggctgaatcccagactgtgctttctttaaaagggaagagagatagtctacggagactaaccagttcagtggttgagtgatttctacaagagtcatcaccaactcaaaactttcctgaagtccttctgactattttaacgcttgccatctgcagaaggtaaaaatctgctagaggccaagttccaatcgctatccagcccaccactgaccctctttgatttcattctccatcaacaaggaggacatggacagggtcaatggtctaatgcgttttagtgacagccctgatttttcattggaaagaggagaaagatcgtttcccatttttctccttgacccacggatttgaccaactcaggcacattaaaagtctgcaaaagcaggtagcctgcaggaagttcaccctagggggtgagttcctagttgggctgaaacgggtttccaggcatgtttatcacgtggtctaaacgtgctcagggttagtgccagaagtttgaaaagcagaattagtagagctgacaataaaacctcagggctccaaaacccggtccaagaaacttttcttaaacttgcgtccagcgcctgcttcagcgccttcgccatgagtctgcgcgggcagacagcggagactctagtgcgttgggtcgctcataccccgaggcacccggggctgccgccgcgccgcccctgccccacactggagcggggttccctgctgcgcctggacccggcgccgcgtcacctcccgaagtggggcgcccgaggggccgcgcagggggtcaggcggagaccaagagtagcagggggcgagggaagcccgggcaggccggcgccgctgctggcgcccgcagctcctgcccccacgctcacctgggacccggccgccaggaagcggggccgcagcgctagggctcgcagaagcttcccggcctgcgctgctacgggggacgccatcttaaacaggaaactcggcacggggcagtagggcgggcgcgggcaggggaaggaggcggaggaggagcagcgggaggaggggtcagaggagaagcgggcgcggggaggaaaaggaggaggaggcagaggcggtctgggccgggccgggcctgacccctgcgtcccgggggcacaggcgttcttaaggctgcagagccctgggtcccccacccggccccggttcactttgagcggtcccaaggcctgagggcctactgtccagtccccaggttatcgtcctgagcaaagacagaccccgagccctgcggtcttggggctcaaacagtccctggatggccaaacaagcaaatattcgccatggcagtgggtgctggaagggtggctcacggagctgacgccctccgcagagaaccgtggtctagtcctgcggtcacgaggcctatctgggacagtggtgtttgagctgagactttaacgaatagagacaggtgaggttcctgcagcccagggcttcaggtgagtcaaggagaggccattggaggctctccatcccttaaggagttgtgggtgttttgttttgttctatccttaacctaaaatcaatgtaaagctgagagatgaagccgggtgggtcggttggggacttggagaacttctctgtctagctaaatgattgtaaatgcaccaatcagcgctctgtgtctagctaaaggtttgtaaatacaccagccagccctctgtgtctagctaatcaggtggggacttggagaacttttctgttagctaaaggattgtaaatgcaccaatcagtgctctgtgtctggctaaaggtttgtaaacacaccaatcggcactctgtaaaaacgc

SEQ ID NO: 40475 - DNA, 1274 bp, Homo sapiens
taaaattcagcaatcttattcagattttccaagttttatttatacttatgtgtgtgtgtgtatttgtgtgtattaaattttataccgttttattacgtgcaggttcttgtatccactgccacagtaatgatactaacagttccaacaccacaaggatcctcttgttgcctttttatatccacactcacctcctgcttgccaccctccttctccaacccccactccccatcccctaactcctgccaactactcatctacctccatctaaattatttttcatatttcaaaatgttacataaatgaaattaacagtgctatgtagccttttgggattagcttttttcactcaacataattttctgaaattcatctaagttcttgcttgtatcaatagtttgtttcttttattgctgagtagtattccatggaatgtacttgtcacagtttgtttaatcattcatgtgttgaacatctgggctgattccagtttttagctattgtaaataaaactgctatgaatatttgtgtatgggtttttgttttggtaaacataaattttaatttctctaggaagtgtctccaggagtgcaactgctgggtgttattgtggttgcatgtttagttttagttttgttttgtttttgtttaagaaattgccaagctgttttccaaaatggccagaccagtttacattccctgtctgtctttttaaacattgtagtttatcttctgtttgtggaatcttagctgggctaaatgaatcccagtgtgggaaggattttagaaaccttgccaagacacaaaaaataaagtatgttctgaactaatctgaagaagagaaaatcttgtttaactaaacctgtctatgtaacaaggtcataaaaaaggctacacaataagagagaggatcgttcttttggattttcagagaagcctttgttaaaattccacatgacccaatgctacttaaaaccaaagtcatggggattaaaggggaaatataaagaatcaaaaatctaattcacagtgagttacgcaggctgctttgtgcctggattcttgtgtacttacagctgtctacagcacattccatctagagttgctagatgctctcctttaaggtgttagctttcccagacatgctttgatgtcctagcagtaccaacgtgggcagagtgtcatgggctgcaaggaaatgggagaatgctgacactttctttacatcctatcaggactctttggaatgaaagatacattttagttattgttttcat

SEQ ID NO: 40476 - DNA, 4210 bp, Homo sapiens
tgcttctccccaaatatgaagaagatacatgggatatgaccgtgagtgcaaatctcctgaacaaattccctgtcctgcaagagtctcaatgttgtgtcaagtacgtggccatcttccctacttgacctggttctgaccttgtgcttacttgtacatacttggataactgctagatgcacttccctagaggagctccctgtaaatctataacaaaccatgtcactcacaggagcactcttgtagctacagattgctcacagggccaaaagcaacttttgcacgttttcagattagtgctatggttttgctggccatgttgccttagtctgagagatggcattgaatctgtaaatggctaaatgcccaatcttttcctgattccctcattggaagtgaatccttcctttccccagtatcctgtcttttgtacttgcattgcagcattagccagagttcatcttaaatcagaattatttatgcaaatgattgtcttcttaacttgattgtgggcaagttaagagctaaagacagtgtctcaatttcttttctagtctttggattatcaaagagtggacctgctggttgaatgtaacataagatcaaaaagccccagaaatctcatggggggctcatggactatgagggctcataaacagatgttgagaaccatgcagtagagacaaagatgatgtttgagtttttacaatatatttacacgccagagaaatacaaatacaaagctaggtgtcgttccttctcttgatgaaagaaatatcgagtagcagatatttataattttttattgtatgtatctaaaaatattttgatatttgaagagtatagaaaataaagataatacagagacagagcttatagaattactgtcactatagaagctgaaaatgccaggcactcacttattctggcaagggctgttgtacagtcagggcaagggctaatgataggcttggcaagtcaggcacatccatcccaggctttggtgacttaggatctcccactagcagaccttgaaacaaggtctttggctcatgtgtttgttttggaagtcaaccaggaagctcaagtgaaggaatggggaaggcgaaggaggggagagagtgaagcctgttaaaaggaatgttaatgagtgggttactgctgtagacaggtgggtctcaatcttcccgagaatcatcaaaaatcttctagaaagcatagtagaagtgctgcagtgagaagcggggctatttattcaccaacttccactcatcattggttgagatttttcccggcacacaggctagtggagctcttgggtacataaagtcttcaggtggcaaagtagaaagagagggaagatgatggcatgatgatggacatgatggcaggtcagctcagagctgtgctgcggagatatgaggtgggcagggtattgacagcagctgcctcattctgggagccagaagcaagaagaataaaactgggggaatctgctgtggtggtgcaaccctggttgaagcactcagggtcttgaatcagcattggctcccaggatagagtgctaaagtggtggcgatgcactccaaggttatttcgtgtaatcttcacaactctgccatattgggtgaggaaaaaagagagccttagggatgaaaaattaacttgtgtaaggtcatacaactactactgtagtaaagataatctttcaaggagtgcaaaacagataaccaacaatgataatgattcttaatatttagaggtaattaagacaataataataataataatatcattatgatagttctttgcctgtgtagagttcatatcaatgtgcttttccaaacatttcatttattttgcttcattcatggggaggcatttctgttgtcttgtatagatgggaatactgagcttccaacatgcaataacttgccaggaagccatggaattaactgcagtctaagcacaattcccttcccagagtgcttaccttccttcatccctgtaggcagcagaagacaaatgtactatgcaaatagtacaattcatttcttttgcaggtgtatgtctctctgtattcaattctcatgaaacctttcatgaggttaaagtacctgtttgcagaagttttggaaagccccacagttgcaaaagtaaacacacaaccttcatacatattctagtctccttagcatagcaaaccgttgatgtaaccacctgctattctctgggggaaaagaaagatttagagggaatatgaaatctggagaaatggttccattgagaattaaccctcttttaagagaagtctcaggctgttacaactggatatgtatgagttttcattcagggcttaaaatagaacaaaattagatcttatgaaagatttatgaagcagcaatttgctcatctatgcatttggattttgtgtgtgttctctcattttgggaagtgcagtggtaaaagtgaatggcaatgaccaaacttagatattttgactgtgtgcagtggtccccatcacctatagaaatgtgtggttctgccaaggcaagtgatgtaaggctggaggatggaaagtgtcgctgtgcagtcagtatctttttatcatcagccctcaaatgcattggggtgcatgtagttttaaatacacatgaaaccatctggtcaattaagtcatcatctttgtacttttgaccagttagcttttttttctgatgtttttatgataaaaatgaacatgagaagtaacgaaatgttaggtctagatcatcatggtgtcacagtcaagatcaagaaagagaatttcccttgcccttcttccttgatgtaaaaatcaaaaagttgtgaacagaacagtaaaaaaattgttattagtaactggtatcaaataacatgcataattgtttatttggaatcaatatgttttacaaagcaccaataaatcactgtgggctggttggggctgcatcaagatgaacttttatgcagagtgcctataataaacagcaccgggctattctttaagttagctattccgcttatttgttgctgcttcatgaatgaagccacactggactaggtggcttaagacaataaccattttatttatttggtcccaaactgcatcagctggggcagcttgttgaaggctggagaatctgcttccaagatagcctcagccacatggcagggaaatcagagctgcctgttggctggggtattgactggagctcctgatctgggactcagttcacacgattaggttggacttagcacagcctggcacttttaggatattcagatcttacatggtagctggccttccccagagtgcaaaagcagaggatgatatacattcttaagacaggcacagaacaggcacatcatcatttctgttacattctgttggtgatttgatttaaatacggagaataaatcctctatttctctggaaggattgttaaaacttgggtaaaatttttaacatactattatcattcagcacatacacagaatcctttcttctgagcggggaacaaatgcaacctaggaatggaggaaaatctctttcattagaattcagactaagtatttctgaatacacctccatcaaacatagttatcctcaccagcatcactaaaatttgataatttgttacaatacttaactctctggaaatatatcaaagttcatatctctacccttgctaataggacttttaaaggaaaccttgtgagttcatgccctaaaataatattccctgttgatcaaagtatcaggccttgcaaatttcatgatcattcccataattaagatttctgcctgaggttaatttccctagggactgcccaacttcttgggagggatatttcctaatttatgataccttgttagtgagggtttctgtagcatcagggaaggtttctaagcctgtagcctgagtcatgacaaaataggagggtagctaacaattattgaacactttctatctgctgcatgctgcgtagaattatcataagcctgatttttttttcaaaagaaatcaattgtaatacaaaatagcaagtcatatgaattatcagtggtcatttagctaggaagtggcagaacaggattcaaacctggacagctttcattgcagagtctgtgtgctgacctccggcagggccatctgcaatggcgagtcactatagttgggtggttctcaaa

SEQ ID NO: 40477 - DNA, 2984 bp, Homo sapiens
gttttaaaaatcgtcacttcaagaaaatgctgtattaatcatagggctgactgattaaagctatcatgccataggcttctcaaggcacctcaacaaagaccaacatccttcacagaaatgatccacattcaacaaacattctagctgtagcttgacttaatgatcatgtctttcgcatttggcttggaatacaaattcactccatttcccaactctccagttggttctatgcttcagtttcctcatattaaaatatacataatgatgcttgttctcttctctcacagaaatagtctaggaattaatgagctatattaaactcattcagttcctggaagaaaggcagtatataaacactatattaatattttaagcaggttaactttttccatgtgaataaaagccttttttcttttggtcatcaaacatgttgctttttctcaaaagaattttttgattctttaaaagttttcttttttaaagataccaaccagatttctttccaagtaccaaagggaagagtatcaggatgagaaaacatttttatgagaagagctaaagttttaaaattcctggttttattagcgataagaggcagtgtggtgttatagcaagaacactgagttaggatgccaataatgccaagtttaagttctccatgctacttttgaggtgtgcaaactagggtaccctcttccactttttaggcctcagtttactgaactataaaaagtggcaatataccaaagaattggagtctaggcactggcctcaaaaacctgggtgtgaatcctggcttggccattcattagctgtgtgacctaagattagttacttactttccttgatcacctgtctcctcatatgaataagaaggagagcaacataattcaataaggaaatgaaaccaaggagctcagcttagtgcttggcactcaataataagccctggctattattaacattaataaaaattcaggtatagactagatcatcccagaaggcctggctgctttggaattttaggatcctctcagaagtttctcccagaatctccagttgctttcttccctaaggattcaacattcttcattcaatattcttcatgtatttattgagcaccgactatgcaccaggaccattagaagcagtatctctagtgaacatagagaaaaatccctgccctcgaggaacttaacatgctagggggagcaggcctttcataaacatactactctaggtacataaatactcaatacatcttgggccaattgaatggaatttctttttgtgttgaaaaatcttcaacctagatagaaaactatttttcttagccttcatctattcagagataaaaacctccctttgatgagtgcttgagagctctgctcttatatttttttaattctatttttaaagtgaaggcttccctcttagtgaatgagtaaaggaaggaggtgggtggaggaggtgggaaggaagtgggtgtcccttgcttcatcttgcctgaattgagggaagagttgacaaattagggtaggttgggagcatgacaacttggttaacaggaaacagaagatattttgaaatctatctgtttagttgccaatccctgtttgcaggttaagaagaaagaagttttgacatttgggtaccagtttgtgcaagggagtccacatctatccagaagttttgggaaatctgaaatgatgttgtcccaacctgtttggaggaggatgttgctaaacctttctggattcagagagaaaatcttcctcctaatgctctttcttcatgatacaggaaaaacagtgccagatctcggctgacataaacattttaagcaggaaggagtgcacttcttctatttcttaacaacataaattaaacatcacagtagacatcagcctggaaaaagttacaggaacccaaggttctttcagcagtttattaatgcagtctggccagaaggttcagaggggcagtgagatcaccagctggtatggagccctgggtgatccacagacagttggctgggactcaaaagacaatttgttctggttctgaatgctgtattttgtgcagcccacttaggtctagagatgttaattggaaatacaggcacacaggcaggaccaaggaaccttatcagccacgtgcagcagcactgaaccatggtcaggagaagctgggaagcatcaagatcagaggtcagactgggctggtgagagaagtggccaacgtggtacccagactacagtagaggctgtgccaaggtgcttgtccacatggaaaaatggcatacagtttacaatgaggcctgacggcagaataagctcaagtctagattgccaggctgagttggagaccaatttggtctccaaggagacatcagggtgtagcagatgtattagtttctgagagctgctgtaacaaaactgggcttataacagaaatgtaatctcttatagttgtagaagctagaagtccaaaatgaaggtgctggcagggttggttccttctggaggctctgagaaggaatcagttcatgtctctctcctagcttttggtggctgcatggcagtccttcatgtttcttgacttgcagatgcattactccaatctctgcctccctctttacatggtcatctcctcttgaatctctatgccttttttcttcttataaggaaatctgtcattggatttagggatcatgctaaattcaggatgatttcatcttaaaatccttaattacatctgccaagacctttttaccaaaaaaggccactttcacaggttatgaggtttaggaggtggcatatcttttgaggatgccaattattcaacccactaagtggatatacaggtagaagtcagaaaacttgggtttcaattctaataatatgacaatagctatcctttaagaaaattttaaatcagttgtcaagcactcatttatgatgaacaaatacactgttctaggt

SEQ ID NO: 40478 - DNA, 5246 bp, Homo sapiens
agtttatttaaaaatattttaatttttacagattcaggggttacttgtgcaggttatttttttttacatggatatgttgtataatggtgaggtttgggcttctagtatgcccatcaactgaatagtgaacattgcacccaataggttgtttttaagctgatacttccccacatgctcccaccatttgaagtctccattgtctattatttccatctgtatgtctatgtgtacttattgtgaagttcccacttataagtgagaacaagcagtatttgattttccaaattattccacttagaaataacttagttatttcacttgaagtataatgactttcagcttcattcatgttgccgaaaaagacatgattttattctttgatatgtggagtaccatttcttaaccataattctcttctgccaatctggaatgatgagatggagaatgatgcaaaggtagaaataggaagtagcaagcatacaaatagttgtcttgtttggtcttttaaatcttgagaaatacagaaaatggaaaatttagaaaagtatatcacaaatggtgggatattcgcattgataaaggctttttgtcagtcttgttttatatttttttaatgtaaaacaaacaaaacctgacaggtaatgttcacaatccctttatgcctcccaattcacattttctctcccaccctttccagagctgtgcttgtttacttccaggtcatgtttctctatttctagaaaatatttttctgtattcttgaaagtgtttttctgtaatattatatatatgcaacacaacatatatattgtatcgtttgggtgttaaaaatatccagaagttataatatgctacgtgtaacaatctacaacatacatttttcacttggcattatgtttttgaggtctgtctgtgttgaatcatataggaatagcttttcaattttaatttctactacattccatcttatctgttctactgtcaatggatatttagcttgattataatacaatttcatgaatgctgatgtaaacattcttgagcagtcttctgagacataagtgcaagagtttctatagaatctataggtagaaatggaattgttgaattttatgttcttttaaaaattattgatatgttgacaactattctcagaaatgattgcagcaacttaattccttccggaaatgtatactgttatcaacactttgtgaagtctgatatttttctccctatttgaagagcataaattggtatccaaatgttaatttaactcgcagtactttggttgccgattcaagttatgttggtttttgtttgttggtttgtttgttggttgttggatttctattttgcctcttcacatgtttggctcattttttctaactagtttgtaacagtccttgtctgttcttaatactgtacttaatacttaatcctatttgcggttcattacaatagctatttgtattctctttgttatttgctttatactatccataagtcaatactgaacacttagaaaaattatattttttctttcgtgagacgtacttgtcacttacaaagggcttctttggggagaggaagcataaaagaatgattaggaactttgtctctgcagctaggctgcctgagatggaagctgagctgtctcccatcccatcccatcccatcccatcccatcccatcccatcccatcccatcccatcccatcctaacctctcctatccatcttatcacattgcattgatctgaccttcagtacaatgttgaacagtagaggtgattggaggaggtagggttagcagaattccttgtgaagtagcagcatggtctcgattgcgaattacagaattttttttcaggcctgtcctgtgtagcaggcatgaagataagaatagcttttgttgctggtgcttcatccttgcaaggattttagtcaaattatcatttggagggagtagtcatactgtatgtgaggacagcaggcttaggttagaaatgctgaaaactattttgggtccattcaccacgaattttctgtttaacttcatatgcattttagttgtcattttatttattgatatcccccactagactcatgaggataatgtccatgacaatattattgactgatatagttccaaagtctaaaatagtatctggcatattttaggtatatatttatcaaatgattgaattaatgatctcactttgcctctctgtccaattatatctgtaaaatgaggtcagtggaatttgccccgctcccctgaaagagttggcaaggttaaatcagataatgtgttctgaaaaaccacccaatttatgatgatcacaggtcatggtggatagcagtaatcaaggaagcacaagtaggtgacacatttgtctgtctcctccaccagaatgggaattccatgagaacacagattttctacgacttatttgttcctgtgactcatgtgtctggaatagtgcccggaatttgggtacttttggataaatggaatagagtggaatttaatcaatatctttatttgacacaaaaaataaaggacaaagcgaagttgaattcaagaatctgatgtgaaagcatatatatgagtgagagtgtatatgagaagagtggaaaagaagaaagcagaagaaaaaaatggatcggaaaaccataagtgagaatgaaggagacaatgtctaggatttttaaaaaacgctagtctgaaaaggtcaatttgatgtttggggttgtctttctaactgaataggatcgatccaacgaccagtatgattgcataaaactggtcattaagatggtaagggaaccacaatttaactgtaagtgcctgatttaggatttgtaagtcagtgaagagagatgagagacaagagtctgcagacctctgaccctatgtattctgtggaagtgctttaagacttggacagttgcctgagcttagaaaacaataataatgtatcctgaagaactttgaatttatacttgggttttgtccatcctaacattctctgtattctcataaaagtagtttcagtaggcatctgttgttttttccttgtcctgcatttattttctttgttttttttcccttgctaacagcttcccagtttgttttggggaataacttcccagtttcattcctttgatttgtgtgatgatttactgctcttccatctataggagtggccatgggacccaggccagggcaatgaacatagaccatttcttggccacaatgttttgctcaataatgttcacaaggcctgatataggcaaatacattcaatctttggacttctggtctaactgttgtgaaagagaagtcatctttcaactaggattactgcactgaccgttaaccaaagaagagaacctgaccaagagaagccaaacaaaacaaaacaaaaaaaagctaatagggagaagctaagttgtgatgataatgtttaggtatgtgaatccgttgttgcctaaagttcttctgcatgagccatttcaattgtatcggccagtaaattctctagtacatttaatttgaatggagattcacttgcagtcaaaaagcatattgattactacactttgattttttaaaacttttcaatggaattgattcttgagagcacagcccttatgcctaggctgaagaaagtcagaagtatatgtcatgccccaagtaaaacattacttctagataattttttattgaaaacacacttttgggacctttgaatcttgtcagtgtttgcacatctatagcaaggtatggttgaattagattacgtccaggtcaaaagtgtaaaattttatgacagcttttcttgcaatgatcccatgatattgcctggtattttctggcaattcctgatgaggaggttaactcttgccaagtttgagagtacaccctgccatttatcccactttcttatttcttttcatgttcatgtttcttaatgccccaataacattaaaaggcactgcagctgtgataatgatgaaaatagctattattttgaattcttacaatactaagttcttgacataagtcatttcaattaatcttcccaagaacacagtgaggcaggaattaatatgcaatatataatcatggtttcagcatgagggtcttgggattatttagattaacctcacctcacctacccctcaagtatagataggcaacttctccacttaccctaattagtgtccagagtctcattatcattttaggggcctacaggttccctgagaggttgtgtattagtgaggtgtcacttgggccaatcaggtgagatctaccaagttgttttccataaataggcataactcttgccgagtgtttgcgggtgatatactgctattttggcttccaatgaaaatcacttggaaggttcttccttttgtgatggctaagcaggtagtgatgagagtgatcatttatctccaacatgaccctttagtagatgtgaacagtgccgctccacgtgatccttccaagagtttgcaagctggctcttgcggggtaggataatcttttatctttcaaggaagttgtctctaggatcatattctaacatctcagagctttttttcttttttttcttaaagtaattcttccactttactttgatctctatgctgcccctccctctcctccttctctttctttttgcaattatttttcctcttgttctttcacggttgacaggaaggattcattaaacttataattcaaattattagcaatcaaaaatgttttaaagttgacttttttaaagtttgacttcaaaatcaaaaacctaaactttaaatgatgccaggaagtaaagggaaattcttaaaattaatcttcagaattcataaggaaaaaagaaaaaggagttaattctcctttttaaaatgttgtgaatgttcatattctaaaaccatttcaatcctcgttttacagattaggaaaccaaggctcagagaatgagtaattagtaattagtaatgagtcaaagatcacagagttaagaagctgtatgtagagcttgtagtcaagcctaggtgcgactgaatataaaaccttgctactatccatttagcccaaaggatgtgggcaagatctggtccataacgcactcttaggaaaatgatttgagaaaaatgtcataaataatggcttttagaaaaaaaaaggatacgccacaagatttgtcagttcttttctacaggttattat

SEQ ID NO: 40479 - DNA, 697 bp, Homo sapiens
ggggatattagcctgggacaactttaaacccttcgggggccacaggctaaatctaggaatctcaggttctgctcatctaatcatctctgatagtcatgttctcctgaaatctagacatagacaatattcaagcgtatgcatacataacctctgacagtgtatcagatgtctcttatacagcactttatataacctctttgtgccatctctcactctagccactgatgcaatgatggcctcttccaagttttgaccagctttgtgctggtacaaccttatgtgttctttgacctctaggctgcagtgattaggtaagaaagggccctcaatccaagtcaggccaattagaattttatctgagatttggtagctcatcaataaaggtgcatatttgaggttacttgttgctatcttctgagccttctggaaacatgagcctgagaatgaagcccacatactatcagaagaaataaaagctaagtgaggcagagtgctagggacattgtttatgcttctgagtcagatgaacttgtgaccttctagttttatgagtgaataaaatatctcctcccaccccttttacctaaactagtttgatttgggtttccaccatttgtaaccaaaagaattcactgtttcagacattgctttcaccaagaatctttcttcatgcacacaattgtatttatctcttatg

SEQ ID NO: 40480 - DNA, 1363 bp, Homo sapiens
tggcataaaagctttactaggcccttctgtaagaggtgataagagacactgagaaaaaaaaaattgaatacatcgcttgtagtcaactatacactcagaaattgaatctcccttacaatgaagtacagtaagtcatgatttaaaataacaaattaggaagttcagtgtcactaacaacatacagacatgatacagagcttcctaatttctttctcaatatttgggttctaggcaacagctgtgggggttatagtggcatttccctaaatgctagtatgatttcagaagagacttccacaatatggagaagtcacaattttcatcattagtttaaactaaggcaccttatctcacttcctctaagtcacataattctcattttatgttaatagaagttaaacctaattatcaaggggagagtagatttctaagttatagtttcttcttgaagagttatgagtgtaacctccattaacactaggccatgttaaaaaggcaactctttgaatgttgggataaaaatacatccctctagtggagggttatattttatctgtaactgagtaatttggactcaagtgacctacattgagaaataggtttaatagtgaaaagactgtggattgatggatccctgccaggcaggaactgaaagttcagagcattagcagtagctgacagaatataggacatgatgttattcccaaaattatcaggaagagaaaatataatagagaggaaaaaatagtgtgagacgatttctactcccacctccccggatgttcaagctaatgtttccttagatgaagtttttgcatcagatttcacttttcaaaaagttcagccttttacagactctctcccagtgagaaataaaccgaaagcttttgtttatttttgtagtgatcactgtgtcctcactatataattctctgaagcccacttgttggtattctaagaaaatttgctgcctcatatgagataaaactagcatacatggtaatcttccaatataaagttaagaatgtgtcctagtcatcttgcaagctaagtgtctctaatagcattgcttctccatggaaacactacttttgggagtaggctatcttggttctcttcctctctccctccctcctcctcccctcaacctgcctttttccccctctccttcctccttttcttccttttcttctgcctcccccccttcttcctcccacgttagttcccgtaacattgctgaaaaaaaatctgtcccagattttaagcactttgaaattcttatgttaggaaatgtatcctgaatttaatctgattattaaaaaagaactgcagatttaatttcttataataacttgctactatg

SEQ ID NO: 40481 - DNA, 555 bp, Homo sapiens
attagaggacatcattatctgcttataaatgctggaaatacaatttacaacctcctttggatcaaacatgatgaacaaatagacacatcatttgatatcccatatcacctttcacttaggagtttggtgtacttttcagatcagttcatttggaagaaatatggacaggttacaggatcaatgtgaaataaatgagagcataatcacactgtaaggaagcaaagctgtatagaccggagcaaagatcttcattgtgaaatcgctcttcacctttgacctacaaactagagacagtggtgtcttctgcaggtacaaaattgcctacttgctacccataaccacctccagtgtccatgacctaatttatagattaagctaaataaatagtaccttggacttgtgaaagaaaaaatgacccatgtgattttagcatgaaaggagactgagagtccctggaatgcttcctttacttgctataggatgctgttaactatgatgataatgacaaatgtaaacataacagctaacatgagacacttattctgtgccaggcac

SEQ ID NO: 40482 - DNA, 1169 bp, Homo sapiens
agaacacaggacaggtgggttttgagagcaagagggggaatgctgggtagagagtgcagatgcaggtaagggaccacagcagtatcttgacctctacagtaagaaaggggcactcagtgtgtgtctgcacaatgacagaggggcctgggatatagggagccaataatgaatagtctttatctagtccacagtttagccaagggccagccctagctaaatgaattaaagaatcagagaaaataagatcttttgtaaaagtgtgcttgtttgatttactgactcatttgggaattattaacccaagtgccagggtggaatgagcataattgtttttacttagaagagcacctaagcctaaattgctgggtgcaaataaatctattcctgggaggcagctggggagcccccgcaggcttgttcctggcctcctcctctgggggctagaggagccagctaagcacacggcattctttaggctgaagtgagaatttactcctgaatgctaaaggggcttgctccatgtataatcaaggcttactgaaggaaaaaaaaaacacacacacacgcacaaaaaactgggaaggaaaatttatttttgatgcctccatatttttctctgacttatgtgcctcatcacctcaaaagtccaccattgcaactgtgtgtgtgtgtgtgtgtttgtgtgtgtgtgtgtgtgtctttcagaatctcctttttccctctggggatgtcaacttcctaaattgccagtgccctcacaatttttcacaatccctgtcttcctcagccttctcctgtggcaccacctccacacagcagcttcaattacatggtttccatgggtagaaacaagcaaaggcagacactggccataaaactgactgatgcaacttcaagttagcctggggcagatatttttaaagaacattgttttaggccataacactttaccttgacggagtgaaactaggccggtagaatttcaggcagagaagcggacaggtgtgtggactattctagaccagcaaatgagatggtgggtccttctccagaaatccttgcatcatgtttttacagtaagcttcttgtttgcttatgcataacattactctggcccctgtgaatgtggagaaactggcctccatgtctcttgggtcagtctctgttga

SEQ ID NO: 40483 - DNA, 2203 bp, Homo sapiens
tgttatgaccaagccctgacctttggttatccaagtccattgtcctccagtgagctctggccatcactaaactcaccgatcagtggagaagtaacgcttaggcgatggaaaaaatctaaagacgcagatcagaaagctggcgtctggcgagggcatgtacccacttgcataaggcggctgggggtggctgctgggcctggcacaaagccttcctggtgtcggtcgtcctgcaaggcccgccgggatgggtggctgcactcctccagcacacggacgctttactggccaggctacttttccttcagctcaaagcagctggaatcactccactccagaaacccttgattcgatttccacaggcctaatgaggaaggaaaaaagggaaacatctgaaagatgatggataggaggcaaaacctggggttgacacagcgggcgaaatggggcaatgtcgcagagagagagagcttggaaaagtttaaagacggcagtgggcaaatggaaagttcaacacgtgagaccccgaatgacacctcaacggctggcccctacttgtgccaaaaagtctctcggcgggtgccaggcagggctcaggaagtgctcggctgccccttgaacgtcagtcccggcagagcccagctgtccgcttgaacgtcagtcccggccaagggctgaggggtcagtggcgagcaccccgccgcggctgagacgccgcgctggggttccggaccccgggcgccgccagggattgcttcggggtcggtgatctcccggggccgcccgccaccgtgcaccgcggcgccccgggtccccagcgcgcctgggaggggccccggggagcggctccgccccggctggaaacctggtcaacgcggctagggcccggggcccgcctgcgctccgggcgctgggaaggggccgggcgcccggggccggggagggccaggatcggcttccgacgcccgcctcccggcccgcagggaatgggaaggcgcgggcggagtgcgtgcgtaggctatagccctccgggaagccgcgccgggagcggctaccacccgggcaagaacagcgcagagcgctgcggcggcgggaaggagagcgggggaaggctccgcagattgcgggggagtcccacctggagccggggcagccgtgaactaccgaggaggaggcggaggagacggcggctgttccagaggagggagtcgtcataaccggctactgccgctcaccggaaacctcgggcgcgggagctgggccagggggcgccaaggagcagctgggacaccttggccagccggcgccgtgggcgggctcgggccccgcagaggcaggaccgggactacacccaggagggccagggcgcggggcccgacgctcggagcggcttcagcccggcgagcggcctcgacccggcgagcgcagcagggaggggctcagagtcgaggaaccatctgcccttcctggcgttctcccgcgaacgttcgcgcgagtccgccagctccctcaccagggccggaaagaccgacggcacgtgccggcgccggacgcccatctccatcgcagcagcccgcgcctccttgagcgagagcgttaaagcgctcagaggatgttaggacggggtgggtagaaaacctgactcttcgtgtcttctgcgttgcactgaggtggatttttacttttgtcttatttcaagcagaagttgccgccctaacttccaaatttggggactgaacatcgttcaccgaatacactttgtgatggtgaggatactttggagtccacacacattttaaaagcagtatagttttacctatccgtaaactcatcaagttcaaatgctactctgtggagtttaatttttatggttttgttaatttactttattactgcttataattatttgaactcccatcccccactgtcttttcctctaagctcccccaggcctagtattccatctacagcacagtagagttgatcattaaatagtgactaaagttgaactgattatatgaaggtgatgacttcaaaataaacatgctcaaatgaatatagtcaccagaagttaaataatatgatcataaggaaacaagtttgtttccaaaggcttacatgctttttacgtaatttttaaaagtaatgttgtttaagaattgttacaagttccattagtgacctgctaaattaggaatcttacctg

SEQ ID NO: 40484 - DNA, 1514 bp, Homo sapiens
gcactttaggaggccgaggtgggtggatcgccttaagtcaggagttccaccagcctggccaacatagtgaaaccccgtccctactaaaaatacaaaaagttgccgggcgtggtggtgggcgcctgtaatcccagctactagggaggctggggaaggagaatcgctagaacctgggaggcggaggttgcagtgagccgagatcgcgccactgcactccagcctgggcgacggagtgagactccgtctcaacaacaacataaaaccacattacgcgctaccaagcgcgaaatgttcactgactgttagcgattgttcttcccttccctgatgatttacgtacttcagaccttggatcccaacagtgcccgagacgcgaagcaattcgaggttcaggttcgggaaggttgtgcttggaagctgcgtcgagggagagcttgagggcaagaccaaccaaccaagtcccctgtcatccaagtccacaagcctcgcacccaggaccaaagaaagacaagggggaacctggatctgggttttccctcaggaaaacagcaaagaccgacttggaggctgaagcagcattagggaacgggccggggagaaattacttcctgaaaactctctcagcaaggaaggacccctctctacaccacttaacctgcctgcatcaagagaacagcagcctccgggagccaggaaccccgctcctctctctcttacccggctctccatacggaatggtctcggcccagatgctcggctcctcttcctggatgtccagaaccctgtcaatagacttctgggcctgggacagggcctgcttagcgaagctggagagctgggaggcgttgaaccaactcatcgcccctcctcagccggcagtggcggcggcagcaccaagcgggaaggcctcaggcctggggaagggtgcagaggaacggcttcgctccccttttccactcggctggttctgtcagcgtgtggccattaccccgacagcctcccgcgagcccgggatgttaccctcggccgttcccgcacagctgagacgaagggggcccatgtgcgcatgcgcttgcttcttccacgtacacagcaaccaaatctacgagcccagagttcggtcgacagacggaagaacagaagaacgttgacgtcacatccgggagcgcagggttgccgttagttaccgaggaacgcggaagggtttctattgatgtcgatttcgtgcttacagcagttcttagcgaaggggaagctatggctaccgatagaggtcgatttccccggaaggaatattcaagttttcgtgtgtgtgctttccaggaaaatagttcacgtgctaaaagcttgcaccttgccagcaataattgcaaagggaaattgggcctcacacttctcttagccctttgtctcaaatatttaataagctctgtattaacttggtattgtaaggagaaacacttgtttgggcttgcctaaaagacaggatcacgtatgaacactgtgtccaactc

SEQ ID NO: 40485 - DNA, 1493 bp, Homo sapiens
gagggacacacataaagatcaaagcactgctactgggaatcggcacggaaatttacaaactcaccataaccaatgcaagagtattttttccctgcccaggcagggaggggagtaaattatgtggcgctggccaggttagaaaacacttcgattaaatctgtctcaccagcatagaattaagcatctgataagaaatagggtgtgtagtaaaagggataaataggctgtttgaagtcaacaacctctttccagatcttttaagagccaattattctgccaaaatgactggagtgcttagtacaatacctgacatgtagagttatcattaaaagtttgcaattagtactactgtctcagtgtttgcaaaaggccacaaaacggtcttgtgtccttttcctgtgtgtttaaggtagattgccttttcacagggtcactgctctgacaatttgggatggaggaagaggagtgcacaagggtccttcctcaagacctttacgtcaagcaccccggagggcccctgcaggagctggggcagtacagcctggccccgacgcccgcaccgggcagataccgggagcggcccgccaggcccccggggctgcggggcggggatcaggggatgaggcagcgcggcctgcgctccgggtgtccccctcccagccccccgggcccgctgcggctggtcccctaggcctggggtggggggaggcgggggtccccggagagggccccggcctcccggcagcactaacttctcagccagcagctcctctattctccttcttttcttctccctaaaagagagaataaaagaagggtcagcatcgcgctacacactgggcgccgcgaggggaggggggcgaggggacggggcggggggtgtggggaccccgggtggcggcggcaaccgcccaccgccgcgctctctcacaacccagcccagcccggcgcgtctgcagagccccggtacttacggctcctcgccatccgccatattgttctccgcctcttcccaggtgcccacgcgcggcagggcggggaggagcgggactggcaaagcggggaggggcggggctggcgaagcggggaggggcgaggccagaaacacaaccggcagggaggtgcgaggttgactgcggctgggctcccatgggctttaaagtcttgccctgtaattataatcttaattacctacgcttaattaggtgaatcttataccgtgcataatgttgctctgcagcgtgaaaatgtagacaatacattatgcgtttacacaaactatatgttaatacgtaattatacaaaatattggtatattctatgaaaaattcgtgaagaaccctcccagtatgccagagctttcctctgggggcaaagatcaaggaaattttcactttctgcttttcaggatggttccaaagtctttgcctttataagtactcacttgaataataaatttatctaaatccgtttacattggtggggtgggagat

SEQ ID NO: 40486 - DNA, 591 bp, Homo sapiens
aaacctctaaagaggtttaattctttcttgggtatcaattgcctgtgatcaaggagtaatcatattgttactaatacactcttgacagcttttggtcatgcagttctgagcagttggaagataaagttcttagttacagcttctaatactcataaatctcaccaacagtgtggggccccactggagttcccactctcatcttgaccaagatgatttactcagcttgcccacagtgctgcctcttgacattctgaagccctggggaattcctccacaccctctgacttcctgtaactgagcactgaggctcagtgcatctctatttagcactcctcttactgtctcatatttaactagtgtttccactggattgcagaagttttgaaggcagagcaggattacatttttctcctctttaaaaaaaaaaagaaaagaaaagaaaaaaaacccacagtgctttcacagagcctcaaaagaactcgaaatacttgctggcattgtactgaatattctcaaccttttccccctacccagatacatccacaacaataaagttggagcaaggtagagaaaagttagtagatgtttata

SEQ ID NO: 40487 - DNA, 3223 bp, Homo sapiens
aaaattaaattatgttttctagactttgcattagtatatttcattactttccaagttttcaaaaattggtgatctgagtagagtgaattcaccttgtctaagccacttaggggcttagagactctgttatcttagaaatcttcaccttagaattctacctattacattatacaattaaacaaactactttttttctcatgcattgtaccaatcagccccttaactgaaaaaagatgacccttggaagcttagaagagaattgacaacgaatacttcttttgccaggtctttgggctgggatacaaaacatcacgttatctatgaatatattgtggtccctcagtgaaagctgtcaccaaatattgcaataaaactaagaaaacttttgaagtggaatgcatatttctgcccagaaaatgctggatgcagaacaactagttcactgcagacaactgtttgctttaaaatgtaagcaacatgcccagctcaggactgaagtggccagagtgcctactttatcagaatggcatagcagtccaacaatttagcctagagagaacagaggtggagaacaaagaagagaagtgaaaaaaacagaccagcccttctgttctacatgaccttctttcccgttttgccaatctgatttcacacatagtgactcatggtgaaacagagaaaacatgggaattgcattcagatgtgtagaggttagtaagacttagttttcaaaagcagctcattctccattaacactgtagtcgccttccatttcatttcacttagattggcatctgcacagctgccaaaatttttctctaagtcagagaacacactcctaggtaaaccttcaaaaaaggtatttcgaaggaggcagcttctctgctgctagagaaggcattgccacctcccttcagacaggggatttccgctagttgctttctgtcatttcgtctctattctgcactcagtcccttgttctgtctggaggttcctgttttcctgtacccaaccaagagccaatgaagaagtaaagaggagcaaacacgcccgcccactcccaatttcctttgctctgctgtctgccaaccgcaaagccgaccgagacggagccgctgtcaactctccaactcagctcagctgatcggttgccgccgccgccgccgccagattctggaggcgaagaacgcaaagctgagaacatggacgttaatatcgccccactccgcgcctgggacgatttcttcccgggttccgatcgctttgcccggccggacttcagggacatttccaaatggaacaaccgcgtagtgagcaacctgctctattaccagaccaactacctggtggtggctgccatgatgatttccattgtggggtaagtggggtccccctacccgggacaccgatccggggcgagcacggaggggcctcggggtgcaagatcccgggatgtagagacgctctctgaccacgctcagcgcctgccctggcaattctgcaagcggccaagccagtggaaacttgtttgcagggcgaggccgcagtaacctggggccccattttctgcaccaagggctgagacttgaggggggccctaggggaaagaggacggggaaaatttgccagccgcagggaagaaaaatgagagttcccccacccccctgcccccgcccgcgtgccaggatcgggctcttgctggaaagatatttgtagcgccctcgtcttttaaaaataagaagaaaaaggaaagtggtgtaaccctaccctggagctggctggggcggcagggtgtggacccgggctagtgtaaaaagggcaaccaagtggcgacgcactttgctgctttctctgcctaatgcctgccacactgtacagtaaagctgagcttgggatcaaaagggggggtgtctcctggtggcgcatctcccattgtggggtaaaggctgccatgactgtgggaagatggccttctggcattttcttccagcagtggccaggcgtggtcactttctctgtcttcgcttcctagcctgaggtttcaatgtatcagaaggccttttcaatacctgatacttaacaaagtatcctgtgttgagactgcatgtacacctgctttcctagaaaccacctttccttctagttcaccctttaagaaatgcttctctcgcttatgcaggatgggtggtgatattctcaatcttgctgattatctcctacacatctttaaagaaaaagccaccctcagactttataaaggactcacttgcacttaaatgtctgacatttctatttcagggcagacgtagagggaagaagcagcaagctggcttgggagaaaagggagaaatttgcacttgaagggtgtgggaaagggtgaacagggtggcttcttcagttggctcgcagttaattggcttatacattgagccacctctctgtgcctggccccatgccaagctccaagcacaccaagatgaatcagacttgaattctggcccaggggctcctggcagttgttgagaagctaaaggagcaaacacacagcacagaggagagggggagacttcacagtttccgagtatggttcacagcaatcacccccatgcagaggtggaagcccacatgtgggactctatacacaatcgcacagatccttcttctgcattgcttaaggaattcttaaggaattgcattctgggaatggcttggtgtatagagggcacaggctctgagtggactcggaactagtgtggcagccaaggtacaagttagtcagggcagggtggggcaggcccaaggcctgaggcagctgccttctgaaccttccctcagctctgtgcttcaggctgctttcctggaacactaaaaaatttcttttttttttttttttttgagactgagcctcgttctgtcgcccaggctggagtgcagtggcgtgatctcgtctcactacaacctttgcctcccggattcaagtaattctcgtgcctcagcctccagagtagctgggattacaggcacgtaccaccatgcctagctaatttttgtatttttagtagagacaaggtttcaccatgttggccaggtgatctgcccgcctcagcctcccaaagtgctgggattacaggcgtgagcctctgtgcctggccaaaaatttctttttaaaaatttttattatttatttacttttgagacaaggtcttgttctgttgcccaggct

SEQ ID NO: 40488 - DNA, 3326 bp, Homo sapiens
ggaggaaatgtgttccataagttgacttattgagacttgactattcctcagccaaagacaacactggccgctagcaagatcaaggctattttttgtcttaaaaaaaagtgtgtatgtgttggggtgtggattgggggaagaggcgaggtggtaagtagcacaggaaggaattcaggaagaagggatttagttctacagaggaactgaactggaacaagacaaggacataatttgggagcgaagcccaacaaatgcctcatcactgggcgtttgttgtcctctctataaaaccagttctgctccacgcctaggatggacaagataaccacacgccatgatactcgttcaagactcaaaaaccagcactgccctttttccatttcctgtttctggcttcagacctactcctcttctctctcatacacacaaagtgcctgtgatcactatgggacaaacgcatttcaaaactcatctgtggccctggatgtcatgaggtgttgactaacagatgtaacactctgagtttgagcttccaagccatttccaaactgaaatcagaggctctaagccttggtggttaagatgttagagctgtggggctgggtgtgatggctcatggttgtaatcccagcactttgggaggctgaggtgggaagatcacttgcagctagggcttagaggccagcctgggaaacagagcccagtctctacaaaaaaataaaattagccaggcatggtggtgtgtacttgtagtcctagctacttgggaggctgaggagggaggatcgcgttgagccaaggagtttgagactgagtgaggtataatagtatcactgcactccaatgtgggtgacagactgagactgtctctttaaaaaagaaaaaaaaaaaaaaaaggagctgagctaggacagaatccccagaatccccatcccaccacttagtagctttggaacttgggttatttaaactctgtagccagagttgcctaagctgcaaaattaggatgataacaataagcataacaatagcaatcactatatagaactgttgcatacattaaataggagagtgcatgtaatgttctgaatgtgcatggcatctagtaagctgccaacaaatggtagttgtcattactaaaactgagtcaccgagagatccttcaggtggctggaagggactacaatgccaggactaatctggcaaataactggaaatttatcactccatgagaatgacgcctgcctgttgtaatacatttctgcagttttaaagtggagacagaaatgaggggaattccagcagggaattctgggagtactgattccacccctgtagttctttaaagagtgatgccttttggtctgtggggccacatcttgctggtgtcagcaaggctcacaccaggtctgaaacaggaagctttacctccatttcacctttactaagctagcagccaggaatgttgagtttcctcagttaacacctgcttcccccaggcaccaccccagccctgtgccgtagtgaccatccacatgcatctcagccctccttgtttggtctttcccttgtagtactctgtctgttctgcccaggtttgacctgtgaaagtttctcacatcttgaactttaagaggaagaaaggtgttttctaggtcagagccataaataagaaataattaccgaagccctttcatatgttagatgtggtaatagatgggacagccctagtggaagtccaaagtcctgcacaaataggagagaacttgaacccaaatagaaatctccatggaaacgcctcatcaacaagtacatgaaacttttaaaggtgtagttttcacttgactattatacaatgactcaggaatccttatactatgtctcactaaggtgtcatgttaataagggagaaggtgagactcatgacctacaggttttctggcagtttgagaattcattcatttcttagcgttttaaaattgcttaatttttaaacattcctctggctgctgactctgagctcatcgtggccaggaactagttcaacaatgggtcctccacatcttgaatgtggctgctcatttgctgaataaataaaaccatacacagagcctcccctatcttctatttctctacttaaagtacctagtacaactgggagtaggcaggaagtcctccacaaatgttagcagagttaggggccaaagtcaacatcaagagtataaaggaaacatctctaatcaaaattatctttgaaaatcccttaagtcaaccacaacataggtatatatgaatactgaattacaatatgcatggccaggcactgcggctctcacatgtaatcccaacactttgggaggccaaggcaggagggttgcttgaggccaggagtttgagaccagcctgggcaacatagcaagacccaacctaagcctccttgtttctacaaaaaaaaaaaaaaaaaaaaaaaagcaaattacttagaacagtgcttaatcaatgccagctcctataaggattcttacgagccttatgcaggcacttgcctaagtacctgcataatcccaggcttgcattcaaagcagtccttagatgatcaatcttggtggtgaaccaggagggatgtataattctaatgttttctgcttacctgagggtttattcttttaaaatatcaagcctcaatgacgtgaacacatttaagagatgtgcctgtcaacgtaaatcctaaaaagacaaagcaagtgaaacccctaacacatcccagcctaggcgacagagtgagactccttctcaaaaacaaaaaacaaaaaacaaaaaaaaaccctaaaacagggcagcacagagagtaaatgctcaatcaatgtttgctggatttgaatctacaatttgcttcattagactcatgtgtactgagttctttggagagctggaaagaactgtttttaagttggaaattcttattgtggggttccaccgaatggttgccccacttttgaccctgagtactggtctcatgatccgtgaggcggttttaggtgggcaggaaacacgatgtaaataaaatccaggtgttgcgtgtttttacagtattctcacctgaagagtacgaggatgcacgactgcttggagaacaaggtacttgcagccccgcaaaccccaggcatctctgtgatcccctgtctgagtcaaagctggtctgcgggctgtgtccctgatccttctgcccagaggcccgctggtaccagccacgcaagtgctcggcaactaaggccttgtggatgtttttggtgatgtgctccgattttgcagcagccttccttggc

SEQ ID NO: 40489 - DNA, 994 bp, Homo sapiens
aaatggcttatcgctgtccatctcggagagcaggtgggactgggactccaggcttccactccgctggcggcagtgctgagatgaagattcgggtctgaaagaggagaaaggcaaacttctcaacaccaagaagaaaaggaggacccaaataagaaaaaagaatagcatgctgaatgactgaatagctcgtgaattacaataggactttgagttgccaaagctgactgcacaatagaatccattgttctccaaatctgttggctcacatgtaggttcattttgaccatggtcaaaatgagaaaagagctggcttctgttagttgcgcaagccaaatccttccttgagggtagggaaagacacagactgaggatgcacagtttgcatcacagcctggaaaaaaaaacaaaaacaaaaacaaaaaacccaacgtgtctttggagggtcctgtcttcctagaggatatgaagatatggtacattcgagtggaggtcagaggtggctgggctgagtcatggcactgctatttcccagctgtatgagctcaggccagatatttaacctctctgaatcttgcttcctcctttgtaagatgaggatgaaaacaatatataatatctacctcacaaaaggcttgctgtagggactaaataatccagtgaatataaaacatttagcacagcactcacaaacatttcaaaatgttgctattgttactaacttcatcctcaccattgaataatgaatggtaatatgtgactggggaaattaaggtactaaaaatctaatgtatatttgaacaaatcaaatacattttctttgccaacatatttgaaaccataagttagcagaaaatgtaaaaccataaaacaaggtcctgctacagaaagtcacttgaaatgattaaaaaacacaataaagcaagacagaacctcaaagcaaaaatcaagacagctaaagcaatgagaaagaagctctcttactccaagtggctgc

SEQ ID NO: 40490 - DNA, 2260 bp, Homo sapiens
ggaggctgaggcaggagaatggcgtgcacccgggaggcggaggttgcagtgagcccagatcgcgccactgcactccagcctgggcgacagagcgagactccgtctcaaaaaaaacaagattcacatcaccaataaatcttccttgaacaataaaaccaaccatctgtggaagaacatgtacactatttttcctctgactcaactatataataaggaaatctgcacagattccagtaagcaccagccttctcaaagatgttgatttcatagttaaatggaaagatattcaaagggatatttcaataacatcagagattgaatttcaaaagaatacaaagtgaaagtaaaacggaacccccatgcaggggtgattctctgagataccactttcctacctatgaagagttcccctaaatgccacagaaacctagcaccagtaattgggggcagagaaggggtaggagggaacaccagagcctcttcttggtttctgagctagaacctccagtttttgaacatagctagctcccagtgtctgtacactctgatatacacactactgatactctattgcggcactcagtgccgtcagtttgattgggaggaacaaactttactagcaatgtgcatttgaaaaccaaataatttgatagaaagcagctcattcacagaattgaggatgccttgctatgttttctgggctgcttcctaagctctttataagacattgtactatcctgagccttggtttgtcctgtcaacttggacttcatggtcaaattcctcttctctgcccccagacttgattagggaaataacagcagagagtttcattatattattagacttcggctggattttaaaattatgttcaaagaatcttaaaagattatttttaatagtctatacaataagcacttctctgcaatgcactatcagcaaaaccatttcctgacatacgggaacccaggcttttcacagacatgtaaacctcatcatgtaaaggaacaaaatgagctgaaggtttctatacgtatgcaggcatgggaaaaaagggttcagactggaccccccaattccgaacagtgaaataaaccagcacaccctaaaaacacagccctccggggtccgcacacatagctgtctgtaactataacactcactcaggttcacagaagaattaataaaagtataaagttacatacccatttcttaaaatctccacaaacttgaggttttcatttctttaaatccagaggttccaaaaatgggacagaaatgtgaggaaaaacctcagggttcttccgccctcccccctcccagacggcagctccggtgagttctgaactgagtttcataagacacttaggtgtaactcaatttcacaaactgagcctcccacggctgacacactactgacatcagcaactctcctgagtgacacctccctaattctactccttcctcccatcagggagaggagggcaaagttctcagtggcagattttcccagaaaagagacctttctaaaatggagggcagttgggatttgcctgatacttcctaggaagtaagttgctttgaatccaaggacgaatttcaccggaggctgttttaggaagacatttctaccctagtttactcaccctggacatgaacaggttctacaggaagagttacaatgcagctcagctgtgttttcctttgcgtccattcccacacacataaaaaccagggctggacttgaaacatgatctctgaaagtcaccacctccccctcttatcacttacaaatgtgaaaccctagcgctttggactccattcagcctgtccctgcattgagagcaaatacgctccctgcaagcaaaaactctacttaaaaggcgaaggacttcagcttagagaatttgaaataactggattgtaactgggtttgcacaaggttatgggaacaagactgggtttaaagcatgaaaggcagagagcagttcattcccctgcctgaaatcttaaaagtttgtgcaaagtatgatttcatatatgtgcatataataatataaatgtggattggaatgatacaaaattcagtgattacttctgggggcagatggtatggggggtacgttgtatagaaacttgaatatcattagtaatgttttcttttattaataaaaataggatgaaaaatgacaaaatattagtaacagctatttaagtggttttacaggtattgtcatatctttaggactcttggaatttc

SEQ ID NO: 40491 - DNA, 1511 bp, Homo sapiens
accccgtctcaaaaaaaaaaaaaaaaaaaaagaaaaaaaaaaagaaaaaaaagaaaaaaagcgataacaaaagatggactgtgtagggtctttttaaaaatggagtggcatgttttggaactgaaataaaaaaaccctgcaaatccaaaaaaggaagtagcttctgacccttttctagactctggaatgaacaagcaaaactgattatgatcagtgtcaagaagtatttgccaatttctatgaaactgtgaacgtaaagaaaggcctgtgagtcataagtacaggagaggaaattaactgcaatatttactgtgcagattctgattcactactgttttgggacaaagcctggttgctgttagcagatgcatttacattctgctggaagctcaatcttatcaagccacattagctaataaattacttgtgagttgtcctaatattttacatggaagattcagaaaaaccagtaagactcctgagtgttatttcttaagtaaaattcagaagagaaataagttagcaaaaaaatctcaatacaagtgaggtctaccttaagaaaacatgatagacagcattttggtcttgcaaaatagataaactagggtaaggtatttgtttgactgggtttttttattatgctctgcaaactctctccactcctacaaatggaaacaagtatgatgtccatcaaaagtgaagtggttaaataaattatgtatttccacatcatgaagcactaggcagctttaaaaaagtgaaaagaaatcggtttataagtgagctagagaaatatggcaaggtatgaaacactgtatatattagatttctctgtctttgtaaatgcttagaatatacactgacaaaatctaaatgaactggtaccatttttttaacagttgctggttgtcatggaggaaaaatggggattgcagaagacttcttcccctaaagcatttttttgtagtgtttgctgccattttttcttccttgccctcatgagtatttcttactctgggtaaaaaaaaaaaaaaaagctaacaataaataaaattgattttaaaaaatatttgaaaaaattgggtatccttcatttctaatattattgattagaaattaggttttagaagtcaattttgaaatataagcaggaacaatagtacttatactcctcctggaaattaattaagtattccttaaattgatcttggtcacagagcttatagaataaaaatgttaacagtatgattacaaacatgctctctcattgtcctctactgcttgttgaatgatgcgctgttgttttcattgatttttttttttttttttctgacacaaggttttgctctgtcacccaggccggagtgcagtggcatgatcatagttcattgcagcctcaacctcccaggctcaagtgatccttctacctcagcctcctgtataactgggactacaggcatttgccaccatgcctggctaatttgttaagttttctttttctttttttttgt

SEQ ID NO: 40492 - DNA, 1447 bp, Homo sapiens
aatgaaattagattttagagctttaagtgctccagaggtgtaataactaaggggcaaatttcttgaaagtgtttttatcctcccttccttaactactctccagggcatccaaagaaattcctttcccatgggaaatagctgcatttttttttttttttttttttttttttttttttttttttttttttgtagcacagctgtaacttgtgaatattcccttcccacttgaagctgggtgttaatatactctcattctgacccagcactgaattgcaaaatgtagtcactcactttttcttacaagtagaagcaccctaatcacatagttacttggtaattttcacctctcaaaatcttaggaaaaaaaaaaaaaggccgggctcgttgctcacctgtaatctgtaatcccagcactttgggaggccgaggatggtggatcatgaggtcaggagttcaacaccagcctggccaacatggtgaaaccccgtctctactaaaaaatacaaaaattagccgggcgtggtggtgggcacatgtaatcccagttactcgggaggctgaggcaggagaatcgcttgaacccggatagcagagggtgcagtgagccgagatcgcactactgcactccagcctgggcaacgagagtgaaactctgtctcaaaaaaaaaaaaaaaaaagctttgcttttacaaactcatttgtggctggcagctgggtgataaagccttgcctccttgccgtgtcagctttcaggaattctctgtttgtctgtgttgtgttacccaagtagcctgttatctttgcggtttaagggctgacttggaaattcagactgtcatctatttaaagaaaatggaagtccccactccactattttaattaactttcagagagcagggtttcctactggttatgataatgttaacttaaaatactctgaagggaacacggcaggaaacaaaataaaaagggaggattgctgtttttaaaggtattctaggaagaagagtttgaacaaagccatgaaggcagatagcatgggccatgcggagaaaaaatgaagagaggcatgagcagatactaaggagtatgcacagcagagaatgggagactaaatgtgtaatgccaaccaaatatggccttgaatgccaggttgtgctggtgttggtgggcaggtgtctgtgtgcaatgagaaattaagagatttttagaaataaacaatgatcaaatctatgtcgtaggaaggtagctggaagttacgcacaggcagtagtgtgtggtggaatcagaacagatctgagaactcaccagcaatgtaacaatctctttgggcttaaattttacatttattactttgttcaatggagataatagctaatgtggtaagactgaatgaaatcagacatgtacatttaaaataatgctgtaggccaggtacggtggctca

SEQ ID NO: 40493 - DNA, 527 bp, Homo sapiens
ttttagaacaaaactttggaggaaaaacatatcctctctattcaggggagaagatcagatagggagagcatggtaatttgcaaaatgctcccacatgtcctgaaaaccaacctgcaaagccattgttttgattaaccccaatttacagatgagggaaccgaggctcagacaggataagtggccactcagagggatgttgccagtctgcgtgatttccagtcccacgctctctccactacttagtgtagtttggacaatttcaaaacagtgtgcgccacttcaacctcgtgatcactcaggaaaaccaccaggaacaagctcgagtgaaggcaaaggtctggactgggcttgcccagaattaactcgccaaccttgatgtcctagggctcaaatgtttgaacaactgaaggactgtcccttttaggccttcctttgcctcaggcaagggatcttccctaaggaaggtttgtgaaattaccctttctttttctattctccacctcccccataactataggttattacag

SEQ ID NO: 40494 - DNA, 967 bp, Homo sapiens
tttaaactcctgcccctttctttccattaaaaacaactggtgtttgattttcatgatttcttcaaatttcttaacctagaaaaatgtaaatacacacacacacacacaaatatatatatatagagagagcacaaaacagaactggtgggagattgtggtgaggaatcatggtgttttaagtggcatccttgaacattctaccaaagccgaatgggaagatgaggagagtgttgggagtttccgaactgaagtacaactccgtaactggaagttttcaaggttggaaggcattattttgttagtccgttaaggggcacattattcaaagacttggctgggaatgagtgctaggtgatctgtaaataatctacgagtaacgtctaccaggagtcgaacattaacatcgtagaggccaggctttcaaaggggtcattggcctacaaagggaagcattgcctccaccctttaactgtttctctacaactccaacgattgcattaaaaggacagaatggagcaggtagagggtgaattcaaatataaacaccctctgtggatgtggccagtgaggcagttagaaccattaagtgtctccgcagcaacaatacaactgttaggtcaagtgtatgaagggtgaggccccttcggggcagctgtgaaagaaagcccctattaatcccttaactaagcagctgatggatttaatctttttgtgcatacattataactcttcgaacacaagattattgtaaggtttttttttatcagcataagctatcaaagctttttatagatttcttcatctcactaattaacagatgacagaaaacagaactttggagagcttctggttccatcgctgtcattctggcttcaaaaactgtaagaaagcatcattccctgattcattcacaaaaagaataggtctctatttgaagagcgaagagatctcagtctcctgccttaca

SEQ ID NO: 40495 - DNA, 1251 bp, Homo sapiens
taaaaacaacaaacaaaaacagagttgatcaatatgtatctttgttaagctaaatgagttttatcttgattactttcccctcttaaagttcctgagttttgttttgaagagtgtttctcaggaatgctctccctataggcataagaagaattaggcattgataagaaaaccctgactgtcctgttaggaatattccttattcttaacaaaagaaacatatgtatgtgaaaaagcacagataattatttctcactgtacgtttttaagatcacatgataaatgcttttcattcaagtggcacactttttagactggaggaagaccttttaaaccacaatacaggtaaaccaacacatactatttgttttccctttactttttaaaccagcatggaaacagactaatgcctttaagaactaaagggctcttttactggaccacaagaaaatgtatacaaaagttactaaatttaaatgaaaattacagctgttgtaacaactgctgcctcccaaattcaagtatcccagagctctcttccaggaatatgggtttaattcttctccttcagagcagtctaaatttcatttttctttgagactcacaatatcacattgtagctcatgcaaactattctaaagcagaagacggtggcgcacatttttcatcggcaaacaactaactggcttaaaaatccaacaaacactggcccatgcaaaagtttcagagttgcaggcagttaacaaaaacgaacaaacacaagggagctgctaagaggcagtttgtccaatcttacctgtaaaataaacgctgctaacttgaagatggtttcgctctctacttcgatttgcccctgttgatggaaaaggaaagcatcattgaacatggggctgtcctagattgtagcaaatggctctgaagttgaggaagctgtcacagcttggcacctccagtttacgatcaaatgcagatcataccattgcaggggaaagtggggggtgtggagagactcattgagggttaaggcgaaaccactgtgtgtgcgtgtgtgtgtgtgtgtgtgtgtgtgtgtctattttaaatagctgtggtgacggattatgtgtagagagcagtattcaggaagaaacgggaatgactttgaggctaaacattcagaaaacttctaaatgaaaaatttttatctctgcaagttcatttttaagcactctgcagaatttcctagattcatttgttgagtgttttcctgggata

SEQ ID NO: 40496 - DNA, 627 bp, Homo sapiens
ggaaaggagctacttgatgttggtagtcaactgtatccactgctgagcagagtcagacttcaaagcttttacagttcaaaaattgacaagaatgatactcaagcagggtgctctggcttgcacctgtagtcccagctactcagaagactgaggtgggaggattgcttgagccaaggagtccgaggctgctgtgagctgtgattgcgccactggactccagcctgggtgacacggtgagacctgtccttaaaaaaaataaaaggttgggggggagggactatttggatgctgtctaggatgctctcactttggtttactgccaagccaacaaacagtgcaaagagcagatgtgataaggacagaaatgagtgagtgcatgcagctgcctggagtttaactcacatctcatttctcctgaggatagatctacatggaggtaggaatatgctgggtcagacaaatccacactgtttttgtttgtttgtttttgagatggagtctcactctgcctcacaggctggagtgcagtggcataatttcagctcactgcaacctctgctgcccgggttcaagtgatcctctcacctcagcctcctgatcaactgggattacaagcacacgctacca

SEQ ID NO: 40497 - DNA, 1112 bp, Homo sapiens
taaagaagatattcatgcatatattataagaaatagttttttaaaaggataaattacaaattagattttaaaaaatccacccacaatctcatcaataggaaaaagtctagaagaattttttaaaaaatgcccataattctaccactgaaatataaaggttacttattgcttataacttgcttttgtcaaattttcccatcagcaaatataatagatctaaccaatatcttaaaaagacaatcatatctacccctctcaggagtgcagaccaaccacaaagcaagttttatttttggctagaattgcatcaacagaaggcccattgtcacagtcccattggaagggacagtgatcaaaagtcacagttgtgttgtaaagtctatctgttatttcttggtaaacaaagcttatttagcaaagcctttcaaaacatgagaaggcaaaacaaaaagtgaaatgggtgaagagatggaaccactacggtgacctgaaggactggtgcctcaggagggccgtgactgccctctaggggtgaaagactaactttgcacacagagctgcgcaaggccctaacaagcgtaatctcagaaatgctatccctctcccagtaacgtgaccttgaatctgtggttgttggtcatcatcactgcttttattgcgtaattgccatctatttttccgtttctcctcttggcctgtggatgagttgtagacagtagctactttcattgacaaaatgttcctttcagctttaccaaagacaaaagacgcatgtggcatctaggctggaaaataaactcagacggcatcctgggagggccctcactcagtggttttacgggggcgaagggaggcaggaggaaagtgctgaaagaaaatactttccaaaaatatttaccaaagaaaaagaactaggcttgtgaccaagacattccaaggagacacccttagacataagcaatattccaggcccgctccccagaaaggtagaaatggccaatttccaccccctcaacagccccgctcatacttcttctgaaaataaacacgactagagccaggagacacctccccaaactggtcataattcaaaaagagactctgccgtcact

SEQ ID NO: 40498 - DNA, 1308 bp, Homo sapiens
tctccaataacgttttcattacagagcgaaggaaagttcttcctcgttgttccaatccgaggacaagctgatatgtcgcagcagcccagggaagcatgcgagctgataggaagtccttttattttaagacaggctcgaatgctaaaactttcttgtgccaaaacccttgactattttatttttaaaataagcacttggcgtgccctcgcagatgtctgagctgagaggtcggggcgatggtagaagagcagtcagtgtccattcttattcatattaagtagccaagtctgtacccttgaagcaagtggggagagaggagggagaggagctgctgacattgacaatgaatccaaacaggagttgcactagcggtgtccaccacgttgcctctcccccgcctggccttctgggagctgtagttttcgtgggagcggctccccaggcgagctgggaatgccccgcccgggccgaactacagatcccaggcggcgctcggccgccagcccctcccgcccgggtgcgagtgtaaactccccgcgctggggcgggcggccgcgagccggcgagcgggcagagctcggcactgcgccggggcgcacggctcgggggacccaggcccagctaccttccctccgcccccgggctctgttctcactttccagcagtggaaggacgggaagcgggagccatgcagtccgaatcggggatcgtgccggatttcgaagtcggggaggagtttcatgaagagcccaaaacctattacgaactcaaaagtcaaccgctgaagagcaggtgagtggtgacagctgggcagaggcgcaccgggcggctggggggcactgcgtctgccactctggggcgaggagagcgggtcgcgggagctctgggacaaggacccagtgcccttgccccggagcagagggcgaactgcccctcgcagttgggggccgcgcctgcccggcccaagtgcgcctttaggaagctcggatggagcgcacttcgcgggggcgcggcgggtcgccggggacgaagcgtccaggcgcggggaccctcggccgaggatgccagctgctgagactgattgggggctggggagcgacctggcgcgatgtgggggaggaggagcgccgggccgggacgctgtcccggtgggatgggggagaaagagttctagtgaaccccctttctgaagatcccagcgggttgagggctcggagagggagagctttgggtggactgagatgcgacattggagggaagcaattagttcgcttggagtcacctcttgggagtccggtctctgtgggg

SEQ ID NO: 40499 - DNA, 2346 bp, Homo sapiens
tatttttcctgccatcattatattgagctttctaaaaattattattttttgactacttattttgttctttctgaaagttagggcttcacaaagtgtagtcgttgctatgtgatttctttttttttcctttttgatacggggccttgctgtgatgcccaggctggagtacagtggctattcacaggtgcaatcctagtactaaccagcacgggagttttgacctgttccatttctaacctgggctggtttacccttctttatgcaccttggtggtcccctaggaggtcaccatattgatgccgaactcattgcactcaccagatcagcaaagtgcactacagcccggaactcctgggctcaactgatcctcctgcctcagactcctgaatagctgggaccacaggcatgtgccagtgccttttctttctttaaactggagactcaataatgcaatttctgaatttggggcagagttgccagataaaatccagaatgtccagttaaatttggatttctgatacagaataattgtttactataactttgttctagatatttcatgggatagcgagactaaaaaatattctttattcatctgaaattcaattcaactgggcattctgtatttgctaaatctagcaatgctagtttggtagtaaaacatactcctttgccctctcattcattttttcactcagatagatatttgtgtatgcttataaaaatgcagtgaacaacatccttggggcataagtatagaaatagtttcataaatttgaaaaaagatttcttagtatctctggtaaatctacctcctaattccttctccctgtgtaagccatgggaccatcaaattgagattatgttgatacttgagtatatagtatgatgttgcttgaaaattctgaaatgttctagtgttgcttttacctaaagggaatgattaatggtgacacattaatgggtatgcattccagagaatcctgaaagctttgtcatttttgaaggaaattacctcattacttttagagtcacctatccagggtaggttggtccctgtggttgacctggttttccaagtaggaaaataaacacttcaatggttaggttaataacttggagtgattttgttgtacttacaattcaagttaatttttaagtaggattggtctttaagctactagactagttggagactctgagagaattgcattctaagagtgagatcctttcaattcaatcagcatttactgtgtattgactgtgcaaaagcaactgcatatgaagagagaggaatttaaagtgttttgagttcctgctctcaaaaaccttagtgtttaatggagcacgaaagcaagaagcaattatgacaaaaggcaagataaataaggtcaaaattgaagtctagtaaagctaggtcccaggatggttgaatgtaggaagtggttaaatctggaggccaagtagagtaggaatggcttttattaggacaggtttctttgaaggtaatatgtgagagaactattcaaagataagaatgatttcatttgggaaatgaaatgttctaggtgtgggcttagcattaacaagtatccgaaggtggccacattttgaaatgcacgtgttacttagacatgacaaaaatatatacagcaccaccgtaactgacagcaaccgcttctctcatgtgtgactgtttatgatctagaatttccagatcagaaacttgattttatgtaggtggacctggattcattccatgttggtttcctaagtatttattgtgcacctgctgttgctatgtatgagacagccagagagacttgggcaacatttaggaattcttttaggtggtcacttaaaccaactgaaagttactccgtttaaacatgggtttttttttttttcctgaaatgaacacttccagtgagctctgatttaaattgggcaaaatcaacagcaaaagaattccatgagaagcatcttgtcaggcgctctgactttgagtatttgcttaaatgactttacaagccagcttaactcatttcctgttggatgacacttgtttattaaacttggcccaagtcagagttaatagccttaatggttttgaatggtcccaagtgattctccagcagtgtgtcattagtgaacggggaggattctacagataggatgcaacacacacatagctgcttcagccatcatagatttaagagaatacctatagccctcttaaatttagctaaggaaattgagaatactggaaagtaagtgttaccattgcagtaaatgctaaaatatttttcaacagttctagtagttttccttttttgtttttttgaa

SEQ ID NO: 40500 - DNA, 964 bp, Homo sapiens
gactgaacttcaccaaaggaagtgtgaaacctagaggaaaatcagggtagtttccaaagtgagaatggatgcagatttaaatagttgagactcatgacacaattgacctgatagttttcttgtattctcatgttagcagttatgtgtgaaactggctttttaatgaataaacgactagatcaaggtttaacttgtaaaggatcttgttccaagttcctctctgtttcttagtagtacaggctagactagaccaaattgaaggattctctttctttccactttttgaaaagtcttggtgtttggtttttgaatttgtaaagcattaagttgaatctgtatctggccgtggttttctattccaaatgccttttggatgagtcagtgtgaggtttcattagggcagtataaattaccctcactttttttctttttttctcttcttgatctcagtatgactgctccttatttctgacattgagcctcatgttttaatacataaaagattcctgttttcacatggatctcctacgtgtccaacattacattttatcctacaaaaattacaccactgataaaaataaaatagttattattgaaaggcataaataacaagaatggtggtggtagccagaagttactgagtgctgactgtgtgctgggtaagcgctgtgctaagtgctttatttgcattgttctgtttattcatcacagcaaccctgtgaaggagatgctgtcattatctctgttttgaagatgagaaaactgaggttaaataaggttcacaaggctgcatagacaggcagtggtggagccaaaacttgagcccagatctctttcattctgggacctgtcttcttaaccactattttctttttctttttttttttaattattatactttaagttttagggtacatgtgcacaatatgcaggtttgttacatatgtatacatgtgccatgttg

SEQ ID NO: 40501 - DNA, 1001 bp, Homo sapiens
tctcctactctgtcatgactggaagcagttaactttactatgaattatcattatgttataaattctgtaatcatcttgtgtctagcacaatcactttgcatttaatatttttccagaaaggattactttttaaatgattacaaaatatatatgtttaaaatgtagcatatgttttgcatttattcattttaaaatatatacagatggtgtaaataaaaatggcaatggcaatgacttgaacatctcttgacctctcttgaccttaaaaaggccttcgtgttatctgctgtctctctagttaagtatacttttgcaatttgccacaatgcaggcctttatcacgtttacatatttagaaatctgctcttgtttagtcttctaagagtggatttatttttagagggcaaacacagcaacagggcttatccaatgactgtctaagaactgaatatcggcttgctaattaacagatcacaaggatcaatgtgcctgagtccacatgaccagcatattctctccctgttagagaataaccatgagaatttattggtgagcatggactttgaacaaagtgagttgggtgagtcaaacagttgctggcatcaggccatatactaagtcactcatctcatcaacaaatgtttactgagcactgaaagtatgccatttactttgctaaagactcactttgctaaacacagtgaacatggcagatgcagtcccataataacagaattcttggacaaatattaaacagggaataatagcagtgtgatgaatctcatgatagggaaaatacagggagctatggaaactcttgggtgtgtgtgtagggacatcggggatgtattagtctgttctcacactgctaataaagacataccatagactgggtaatttatacaggaaagacgattaattgactcatagttccacatggctggggatgcctcacaatcatggtggaaggtgaatgaggagcaaagtcacatcttacatgg

SEQ ID NO: 40502 - DNA, 534 bp, Homo sapiens
aaggaatacattgtcctgctcttttgatcttgaaccctagtccataagccttacccctcataacttctgagtttcccaacagcaaaccatatggccaagatgtcagaggaagtgccaagtatgagaaattaaagaagattgagttggtttaccagctgtacctttgtctttcctaggcatgagctgtgatgccatgagcaaaggatggacttcggagtcagacagagtatcatatggtgggaaatccccatttaattaactaccaggagtttgtttttctggcagggaattcaagttgagggcaagatctgaattgcttggcaatttttagaggatgtttgcaataggaggcaagagtcccaggcaggaggagagaaccttaagtaaacacatagagtggaaaagctgacgcatgcaatgcatatccttctgcccttgtttcagactgaattgaaatctctccaaggagtgagatataatggggtaaaagtcctggcctcggccgggcgctgtggctcacaactgtaatctcag

SEQ ID NO: 40503 - DNA, 622 bp, Homo sapiens
ttttttaaatttatttgtactctcaggcatcagcttttcttttagccatcgaaactattcaaacttggttggctacccactattctgcttagtccctttttttttttaattaattaatctttctttagtttttaacagtaatctcccctcctgtttaaagatgatgagtcactcacattaaaaaaataaactgctgatgtaaacccctgacagaaacagacttgtaagtattcccataagaactcatttttatttttgtttgtgctcttgcctcacatgaaaacagattctgagaacaaaagacaaacctgaaacccaaacaccaagggacacaactgcgtagtagggactttcgggctcacagaacttgtttttctgctcttgttttactggcctgagccagctcaagtcctgctttaactgcatggcagtgtcatttctgggcatgaatcactgagttcagagacggcctttctgaggctggagggacgttaccaggccgtgcggagggcaggacaatgggtggcagcctttgttacaagcctttcctttcctttcctttaccatctcagcctggccctgttttagagaagcgaactcgtggaaggttatgacttactta

SEQ ID NO: 40504 - DNA, 923 bp, Homo sapiens
gggcacatcatggtgattggctcaaagctagaacacatgactcaatctgggccaatgacagtctgcctatggctttttctggggctacatggaaagagatactctgtgggattaataaacctgtcctcttcagttccacttggaaagagcccccagatgaagacaacatagaaaaacagagctaatggacaatcaatactccaacagccttggttaaatatcaggatctagccatgcttgaagccagctgtaccactggacttcctagcaataggggccaattatcatccctcatttatttatttatttttttcgcttcagccaatttaagttgggtttctgtaacttacaaacaaaagtcgtcttacaaatataagtcaataaataagtaccaggaaataaccaagcaacagttgcaggttgatagtgggcattccaattccactgagcaaacaggaactgagaacatgtcgtgtcatgtgcaaaaccacaataaataattgataggtggtttcctatacaagtgccagacttctaatatctttagaagagaaatgggctcttttataggaattgagtctaggccccaattctaatgatctttattttctttaatacgaaaattattctctctcctttttgggataatcttctaataaatataacctaattgtcagctcacataacaaatgaacctatgatttgaggattttttacggtaggcataagttagccattaacaaaatgtttaaaatgggtctagaaactgtcatttccctttctgactctgaaactgatatatgtccctgagcttatggatagcaattttatagttctagagactttataacaataaatcatatttacagatgtttatcagccattctacagatggaagaaatcggtaccaaggtatttatcaa

SEQ ID NO: 40505 - DNA, 2481 bp, Homo sapiens
caagatggatggacatagataaatatgtaagggggtggcactgggcaacctccccaagtaattgttgcaaactcacagaaatgcttgctggctcaaaattatttaaaaattaatgcaaggctgtatttcttttttgttttttaaacgtaacaaaacaggtaaggctgaaggaagttagcacagggaaaaggtcactttctgtttctgtttaacaaacaccaattttacatcagcacagatctgttgggtgatatggtcagtgattaatgtttaccagatattacactgatcaagattatcccagagtaaactactgaatcaatgagtttgaaaacttcacagtccccaaactctaggtctgctttaagtatcttctaagcctggttcatatccctgaggatgtatgtgaggaaaagcagagtcacaatcaactttttaggaaggttaagtgacagtcttgaatttttctaagaaattagggtatactaggaaggcagggtttccatgcacttggcacagtaccatattcagtcaaggtcccttccctctgaaaaatgagaaaaacctatgaaaacataccaactcataatatgcacacactcagtggggtccacacaatgtcaaatggagcaagaaagcatactttgaagatttgcagatgtatcttaatttgtaatggactaaaatatatctagtgtctccaacttctgatttcacagatatcatttcttagaatgaggctcattttatttaagaaatgacttgatttaaagaaaataatacaaataatcacataagcagacagggcaaacctcacaacaatggggcgcatattcaaacgactcaagtttggaaaagtaaaagctcataaagtagtccttgaggatccagtctgtagctgggttaacttcgcaggttgacactgacaaagtagcaagtctctgaagacgtactttaatttgaattttcacaggggatggcagagcctcacggtcgttctggacttaggggtcaaagacccacaaaggccccaacagcacagtgtagtgtgtctgatgcttttaggactagagcttcttcctccagatttaagggcatctcatttgtaagctatctatgtgaccagcaactggctgctttaccaatggtaagaacctgaggctaggtgccacgaaaggtagtaagtctggcagttattttcatcactaaccatgtcaccaatctcccctatctcccccctttccagccacactgggcaaaatgtgccatcttgattcccagatgccaggagtatttatgtggcatagcaggagaacggagcagagaatcagagctgtagtactggaggctggttggtgtgcttggatcacaatgcaatcgcaaacagagcaggtgatgacaagcacaaaatgcctgtatttgcaaggtgatgagtgaaggaataaataaaggaaaagaacaacaagaggcagaggtccatcttttgtttctgacaccagtaagggctattctgagtttgtaactaaaagtttaccactggcagtattaacactgggatctcgttaagaaaacagaatgctttccaaaaagtggtgtgagcaactgtgtcaatacagacatagggatcactaatccaaaagttattaacaccattaggcaggcattctcattatgtcaatgcaagtgtgtttgcactggtgagtcacaaggtctatgtggaaccttgtccatatgttagaggaaccaatgacacccaaaaaaaccaacgaccgtaaacaaagttccaatattaattcttattttcttcccctccccagtatgctatggaagtcagcaaaagatttctaagagttacatcatacttcaaaagcagaaccatacacaagggccagaccagaaagcaggagatgaagggacaagttagccaaagatacaaaatggctcaaaactatcaggcacttgcttatgtatttccttagaattactccctactttatgtaattacatttatttctctatagcacaagatgcctcattaacattcactgggttaaattcttctctacatttaattcagcagatttaattaaacacctactttgtgataatcatgttaggttcttagatcagtctccaaaactgggatgcatatgacctacatcatatatttaagatttgatattacatatatgagtcacaatattaagatttctgtatacacatattaatattagaacttgaaaatgtatatatacatttctcaccctcttagccaccaatttttataacataaggaatatatattagaaacatgtatataattaataaacatacttagtaggggtacacattcaacacttttatactgatgggtaaaaaatcaagtttggtggtcactggcattgactgcaactttaagtaagttctcatcctcggaaagagttctacccaattctctagttggggagacagtgataactg

SEQ ID NO: 40506 - DNA, 438 bp, Homo sapiens
caattagagtaattgtacaaaaagccatcttcaggaaaaagtaaaagaaattaagctgccacaactgtaacaggttagatgaaaaaaatcaaaatttaatgtattctcccctgtgtcatcttgttttgtcaagacatcaaatagaattgggaagtacaaaataacaagcccttgagaaatcacagaagccgacctttttgatgttgttgatttaccttgttctcagttatttgaacaatgatgtttcagatttaagggcaagataaagcttagaaattaaaacatgataccaaggtattctaaaaagctcaccataacatttagcctgcatcttcattgattagttgcttttaaccggatttgaaaatgaggcacaatgtatgtgttcagtattcatttttctcattcgaaattaatttctcctcaaacaactcacag

SEQ ID NO: 40507 - DNA, 4939 bp, Homo sapiens
gttgttttctattacatgtcatgagatcattcccttccagagaaagaagaaaaaaatcgagagtgatacatgttgcagaaaatgcacttgacattattagccgacattatcatagcttagccatgatgccatcacattttcatgtaatcaacccatgcttacaagtttcctttaataaaatgtttaataacacaacacaaacagaaagcctaccttacctaaattactcggattagataattgacatgttatacctctcatttccttaactaaccaacttttcgtcagacaagctgcacatttgggcaggaaacaaagttcttaaggcaaacgggtgaatataaagcccattactttccttctataagtcgttcttagggttaaaaaataatcctcaatagatttctttcttagacgctggtattgacccatactatttttttaaagaaaaaaatgtattactatgtgcccctttacctagtcaaatgtatttttatttgcatcttcttaatatttggttgcttatctcatgccttagaaatgacaggtgcttgcagtctcactcttgacaggcaactacacaaataactgtcttgcctgaaagggctaatgcagtactaatgaacaataaatcaactttgattatcaagtgtcagccgaatgcgttctcagttcagctctatcacatcctacagtaagtcagccagtgtctctgggtaggcagtctgtattttggtttcatttttacacacttttcactgaaatgtgtcaggcagctacaaagaatcacataaaacagatatagaccttttctcaatttatgcaaagggcatcaattaggacaacgtgcttctgtcttcaattgatttacttagtggtcaatcttaataaccaaggaagctttgtattcttttaaacaacagtaacagcaacacacacacatcaaaccctaaactagaatcttaatgtgatcatgttccagctctttggcagtgacatgctagcttgcgctctttaccacataaaccacctctgattgcatctatacattcctcttggaaaactcgttatataaaaacaaaaacagcaaaacagggccgcttttaaaataaaaatgccacttgctttaaactttaaaaaatctggcttaacactgacttcctaatgataaaataaatgtaacttattttttttcttaagcagattagtcattgatagtatgattcacatttcctgttatcaggcttaatttttcccccacatgtgtcacttttagaatgctggaatctatggaaatgaggtgatttgcattttaaaattggtttgattagaacatttggtttgtttggacaaaaatataaaattactagatattttacttgtaactgccaggacttgaaggagttaatcccaaagaggaagagtctatatgtactttgctctaaaactttaccacccacttcctaaaggtcctctccttcccaacaccgtacttggggaggagaggggtaaaaagtcccgtttccactgaccgtccttcatgcagttctgacagttgagttagctacattcagagccggttcagctgggagtaccccgtggcaattcctcagtctgctgcacgtccaaacccaaaccccgctcactacttaattaaccagccaagtaatgcaacagaggcttagaatccccaacctgccagagtgttccattcgctcgctcgcctgctccggtgtggggctctgtgcctctccctccccctttactgtgtgtgaactcgtcgaatttgaacagctaagctgaaaatagcctagacagatatagaaacaaactatcagaagcaaagaaacatccacatgggttacactgagatggaaggctccttgtatatttcacacgctctgaaagtgacagaaatcacaccccagatacgtcccccgaacggagtgatggcgagggcttcaccaaagtggctgcgtgaaggccagaccggcagaaaatgaatcgcaaacgaaaaagagagagagagaaacacacaagcaggacttcctccaactctcaactacaccccacccatgaacatttaaaaaaagagagcgagagtgtgagccaaagagcaaggggggtgggggggtatctctctccaggacccacaggcctgcagctcctttttcttgcccctccactccctccccgcctccacttccagagcgcaactcctacccaacttggtaaacagcgaggatgaggatgattttttaaaagactcaacttcagaaccctcgggctctcctgccttccccagcgaggcccccaggaagcgggcgccgcggagccgggggaaggagagcgaaaccggcaaagatcaatcagaaggaccaacctgacactctccatgtagccgccaggcgcgcggagccgggctcggggcgcccgcgcgggccgggcgtggggtccggcggcctcggcgtgcaggcggactgcacgcgcgcaggggcgctccggctcgcgggctgacaagacgcgccgcgccgcgcccacccgccccgccctgctccaccaatcacaacccgcctctaaacaccccgcgccgcgccgcgccgcgccgcgccccacacaatgggctccgcggcccgcgccccgcgcccgcgcgccccggccccctccgcgcggcaggtgaaatcacgctcgggtgccaccctgcttttgtctggagagcaactccacttaatagctgttaacccggtgacccgcctccggctgacgtctgggtcggccgggctcggcgcgcaccgctccctctggccggggctctgcggggccggggctgccggcggggcggcgtgtttgtttcgtctttgagactgacaaagagttgtcctaacctttccgagaaacccgggaggccgaagaggggcacccggcgctcgcggcgccaagccgactgctccgagcaactgttcggcttcgggagggtacgcaggtctcctaggcagcgcagaaaagcgcttttcctcgaaaacctccctgggaggagaactttcgcttcacgtcgggggtttcacagagccttggcctccccacacccctttctttcccagagtcggtctcgccaaagtgtgccagtgcgcaccgaggaaaactaagccgacgcggggtggaaataaataacaaccaaacgtgcctcgtcgctgaaccaggcgacttcccctctagaacgacagctgccgaagaaagcatctgccacacgtttgctaagaaataattctttaaattcctttcttatttatacaacaatagcaacaacaaaagctactctcaataagcactttaggatgaccttctctattagaaatagtcactgctctttcaggctattgaaagctgagtatagtgtttttttaaaaagtcaacaatgtgctaaactttgttggctcaactgacacgacttaagcgtcaggttaatctagtccatttcggcgactctaaaaaaatcacctatttaccaccttcaaacttggagaaaaacttcctggcctgtatattttttaaagacacacacacaaaatccccacacacatttttattctttttctcaaaatattagaggaaaaggagtagtgtgacatcaatgaatgcctatttgccttcaaaaaaaaaaaaaaaaaaaaggcaacaaaatctgacccagtaatcccaggaattttacttgaaagtacattttgatgtgaagtgtattaaatgcaggttactacagaccagaaagaatattggtaatatttccaatcaagcaaatgcctgaatttcaacagggtcagcggggagcagacaattccctctttactctggctgtaaaagagacaagcgcgaagtgaccatcaaagtatgatcagatgttaaatgggcacagcgcagatcgctcttcaccctaaagtgtttttgtgtcagataccaaatttattaatgggattttttcaggtcacaaaatgtgaccccaccctctcatgaatattcaacagagaaccaagggctcttttgcgaggtagaaggaccttaaatctgccagaaagtcccccgactatcagtagagttctgactcttaaagagaaaaggtgctctttccggaggggctggcagagagccccaacggcaggaaatacaaataaaggaagtgctctccaaccaatgtacagggagaaagtggaaagaatcatttcaaaacgcctaagtgactttctttttcccaaagtattaaaattgagttttaatgtttataaacaaaaactgggatgtactttgaatatgcaatgtgtttttattttagaaactaagttcttcatgaggcatccataaaactcatgcatgctttcagaaggtggactaactccttagcaggtcagtgtttatcagctaatagtctgcaggtgcatcaaaacaaacaataaacaagcaaacaacattacagacgctcatgacccagctgtggagacaagccttaaacaaaataattagagagtgatgcaatgcagtgcttactcaactactaaattgcacggtggtggctgtaagcaccatgggaccacaaagaaggaggagatcactaggaggaggggtctgggaaggcccactggggaggtggcatttaaaggctgatggtttgggtaagggggaggtgacaaaagagagagggaaatggcttggcatactaacttagaagccacctggagcccatctcgccctgtctccagacagacagatgatatggtgactcagagactacttctgggcaaggaaatgtcccatcagtgataaacctggataaactacatatgcccaggccactttggttaattctaaactcctgtggtcctgtgtacttgccctgtatttgggattcaggaagaactggaacttccataagtggaatataatataaaat

SEQ ID NO: 40508 - DNA, 1941 bp, Homo sapiens
tggggactctgtatgttgcctaggctgctctcgaactcctgggctcaagtgatcttcctgccttagcctcccaaagtgctgggattacaggagtgagccattgtgccaggccctgctgggatattctaaggtggggtctctgccccaagtgtcaagaacaatgaactgtaggttgaccaacatgagacctaatttatggaatcttcggcctatattttttcaatgttttgttactcacggtggagcctgtctccagaaaggctggctttcaatgtagtcccagccaccctggctccagagagggctcagcttgcacccaaatagcatcattgtttaacaggcctactttaagattatttttcaagttcccaatacccaactaactcgaaggaagaaatggaaatctattttcttttcttaccatcatttgatcatttgatcatttgctgaattaacaaatacgtacatacgcagacatcagaaaagaagggctcctaccttggcctcagggggaaaagggaacttgtagaataagacaagagttatgctgaagatgaaaggataatgctctgccgtagggagatgggcaggcaggaccgggaagggcatctgagctactggaatggcacgtgccaacattcatatggcagacaacatgagtcagaataccagagaatgtgaaggatttggtgtggctggggtgattataattcatgctccagctcccttcctttgagatgaatagtttttcttctttttctcaatttcacctgtatttcctatctcaaaaatttacttatctcttcctcttctccttcttcctgttttgagcatggtctctgttcttctttatccatgtcatggccatgattaacatgatctcatccagccttgacctcagctgggtcaaacacacatacatagttttcctccaagttagcagagtttggtgttctttactcctatcctggcacactctcaactgtgattgctaagcttctaagccagagatgtttgagtcagtggatctctaatatgtctctggattttttgaagggctaatctaacattcacacagggattggaaacacataaagttatggagcatgggctcatgggttagatatttcagtcaccaagtttttaaataatatcacatcagacatagttatcttattatacaattaagtagaacaaagcttgaagagagctcacatccaagcaggggcaaacttctaaaacaccaaggacttgtatgctaatccttcttagatgtctagaagaggaaatagaactctaacaaaaacggcatagtcaaggctaccactgacctttcacatgtcactcccattctgcagcaaggtgtcaatccctgaaccctgaggtctctttttagtgcactctctcctaaggcagcctcgctgtactgaagtgaaggtagctcttgttaatttttatttacttgttccttatgacctaagtggggagtgggggaaagacagctaaagacctgtttatagtacagtgaaaccgaatgtcatgaaaaggagccaagtctaaacaaaaagtattcctctgttaggcaaaattatcctttttaacaggaacgcacatacacacgaggagaagaggtcaccaacctagccatcttcccaaccatggcactaaatttggggtgttcccacttccccgacttcctacagcattcactctctgtgctagtcacttcatcattccattacatattgaactagctcatcaaatgccgttgtacataaccctgtacataccactcgtcaacaaagatttcatgaatttataaacaaatgaataaaccaacgaatgaatgttttctattttctcttctttgccttactcccctctcacttcctcccctcctaagaagcatttatgtttcctgtgcatatatttttttttttt

SEQ ID NO: 40509 - DNA, 625 bp, Homo sapiens
tcaagggatttcgctggaattactgagcaagagatactctctttctgaggggttgctaagctgtaagtatgtgaagcagggactctcagaagccctctggcctcagcaagggaaaaacttgacaaagaacggagccaataggaaagaaacagaacagaacagaacaattggaacagacccttcctgatgacgttacctgagtgcctggttccagctgggtctgaggccaggctaacccttgaacttttaagctctgtgagcgtacacactctctcaccccaacccctcatcacttgccagtctgagctgggttttgacatttgcatgggaaaaagtcttgactaatacaggtacctccttccacaagaagattaggaagtggtcatagtgtaacacttccaaacaacctagaaaagcactgcctgagggaaaccccaaattacaaggcacaccattgcagttgcaaatcttggttcatctgatgccattctgggagggattccccaagtcaaccccaactgtacacggcctgtcccagccatgcaccattcaccaggtttcagttcaccacctgtgcatttttctttcgatcaccccaattcacaaatttctttcaagggtatgc

SEQ ID NO: 40510 - DNA, 3298 bp, Homo sapiens
gttcttgcttatgtgacaacaacatatacaaacatcattattatgcaatgtaccggggggaaagggagcacatttgataaatgtcatgataattttattcttcgggaatctaaaattgctgttgccttttctaatctccagtgtctctagctggtccagagataacggctcccatcccaggctagagactccatctctaatttccccaagtctgtcaatgagaggcagggactgaaatcccaagttctgtctcaccggatattttccaggaatgcctctcttccaaatcatcagcgacatttaacatgaccctgagcagcaaacttctgccccagaggaaagcagaaaaccaatttatgtaaaattaaaagcgatttgcttgatccatcacttgcttccactcccgtcccactttcaactgcaacacattcagctggaattacaggctacctcttcgtcctgcactggggcatagaatctatctatgcacaaccatggagaacaaacattacagagaaaataatgactttggaagcaccaggcaccctacccaaacacaagctacatgtgtgttcacagatggaaactaacggctgtttaccctgaaggccccataagaaaaatgcagtcaccataacagtaaaatgcaacttactattcaacatgaaacaaagtgagataaagagagggctagggactgaattccaacaaagagctcttatagtaccttggatttcctcgggacagtccacaccattcaagagctgtgcaggccctgaagaggtgagctgcacaactgatgagatcaaaagaccaaggcaggaaaagggttgcaggttagctcagttctttgttgggtgggtcagagaacagaactcatgtgacatcattttgtgtcttgctctggaggtgcacttagcaaagccagaaatccaatgttaattgatcaaacaacgacaacaaaataccggttttgtctggcaaaggattatgcaacatattgatgtaaacggcatcgagccgcatcagaggtactctgaccatttccttgatgcaacaaataagggcacgcattccttgtcagtgcatcacaaaatgacaacaaaagtcatccaaggtttcctgttgagagatgccagctggtattgacaaaggcttaagagtgtctttctcagacctctgtggtttagcactttgtcaaaacaggatactatttaaattaaaaatttactgattcaagttcagaaaaaccctgctttgctgtttttataaccaaatttgtgggtggggaaactttgacctttattttttctttttttatgacaccttatatgggtctgagaaggtactatatttagcaggctagatttgagaactaaggtgtctaagcaagatgactatcactttctatgaattactgtacatgtgaaatcatgggcttgttatattatgcaaaagcgactcatgtgaaacaaacaaaaatacctgtttgcatgtataagttttgtaaaatctttgtggggagagaaaggggaaatacacactagactaggccacggcataatgtacctcccatgtgaatctggcttagtgtgcaaatgtatgttttcagagaaggctaagccagggctgtaagactatggtcaaaaaagcaaagctgacggtcaaccataagcagtgcagtggtgagaaccaagatgctggggaatagatggagtctctggaaattgcgaaagagcaaccaagcttgtttctgattgggggctcttaaacttgctcttccccgaacctgaaactttcttccctagatagacgcaagactcagtccctcactcagtcaaggtctctactcaaagaccatttcctcagagtccttccctggccagccagtcaaacatgggactgtcatcaccacggtgtttatcttaatctactttgttttcttacagatttcatcgtcacacaacatgtggtgatacattgttttgttttttgtttttttttttttggcttaccagtttaatgtcccataagaatgtaatctcccggctgctttctctgctgctcactctaggtgcctcactctaggtgtctaggtcaacacaaccacccaataatttgtcagatgtttgttgaacagggaatctcatgaacagtctatttgagttgcgtaaaggatctcattatttttcttgaactttcacctgtctagctaactatttatgggaaaggtactaacaaagtcattccaatgatgtcaaagacttctgagacaccagagatgcagttagatataaatattaaactacttattttgccttaaaatcactctgagattatctttgaaggtcttacagctttgagaatatgcaacttcccattgtttagggggaaacgctggaggaaatttgcataatttgagaaagaaatcgaactcaccaaataccttagtgcagttcatctcttttgtcaatctctctttcttattagtacaggcaaatcttttagtgaagtgaataatactttggccaatgaccttacgccaagagtacaccagtgctcaggtcacattttgacctttcttccatccaacatagctgaaggatatgacactttataaacaattacactgacttgctcttactctgattctaaatagggctaatgaggaggttggaatcagtggcacccaacctccgaaacaagccccaaagattctcaccatttggtattcatgccttggatagtaccttccaacaccatgtcagggccggtctctgtgaccaataaatatggcagaagtaatggtatgtgatttccaaggctaggtcacaacttggatcactctgggaaaagccagctgccacatcacaagggcactgaagtcacactatggagaggtccacagcctgagaacttgaggcctcctgctgacagccatgtgagcgagccatcttggaagcggctcccctagccccaatcatgccccagcctcacattttgactgcaatctcatgagatgctatgagcctgaaccacccagctaagccactcccctatctctgactcacagaaagtgtgtaaaagaataaatgtttaaactgtaagacactaaggtttggagtaaataacagagttatccaaatctgatcatgagggcagttgcatgtcatctggcttgcacacactttcttcctgcaggaacactcttccctgccccatccttgccacatggggatcactactacccacagtcctagttaagaaagaggaactctaattttcacaaggcagccag

SEQ ID NO: 40511 - DNA, 892 bp, Homo sapiens
taaattatcctccttactaatcagtgcatagggctatttcttaagggtcagtacttcaaaaccattccatttcactatcaacaacataaagttgtagtttcctttacaggtttcctcttgccaatttcttctttagtgaataacgtggaaatgatatgagctactaagattatatgcggcattaatgcaaagcaaaatgctgcctaaagcatgttttatataactgcaaataaaaatgctaaaaaaacacctgctgaatcttgtattttaacctcctccacttaaagcaagaatccacatgatcaccctgagcttccaagtggactaaagggccggccttctaagtgggtttcactttccctgcagtgaaatggccttctgagtaaggggctcacacatgacatcaccttggaaggaagggcatgggcaggaaggaaaactatcagatgactggcttcaggttcaaattctttatagagggcctgaagctggtgagctttccactgtaagcaacacacaaagtttactttctttcctaactttaatgctgccagaatacacatgtactcttactttcttaggagaaaatgtgtcatttgatttccttccagtttatgtactcgtgccaacaactaaaatgcttaaagaaccaagatgaattactacccagaaacggtggtcaaagttccaaaatttgatcaataaaattgctcatcgactcacaaattaatcttcagccagtaaagttacgcattttcgaggttatgagtacacctgcactgttaagcatttatttcacttgtttaagcaatcttcagaagtatataaatatttatagaagaaagcctatgctgggcacagtggctcatgcctgtaatcctaacactttggg

SEQ ID NO: 40512 - DNA, 3087 bp, Homo sapiens
aattcaagaggactcggggtatttttaaggctgtaagagctccaagagggaggcaaaaagaatggaccatcatttgaatcactgagtgacaggctgggctagctccctgtatacattaataaattagaattttaattgtgtctctgtccacaggagatgccccagtactttaatatgtaccaacaattggctatgttatggaatctgcaatgtggcctccgctgctgacctctgaaacacaattcccagtctgactacggaaactgttcagtttgatcctttcaacttatttgaatcctgacaaataagctcacagctgaaaggtcaacatagtcgtatttcatcctccagagctgttcttaagacatctgcacaacaaagcacttcttatagcacctgacatgggccctcaatggcactgtacctcattaaaaatgtcccctgcatgcgcacgcattccaaggcacatggtctggtgatggtttaccaaataagtgtttacagaagggttagtaaacaaggcagattgtcaacttttccaataaagcgtcactatagtgctgaactctctctggaaagtgacagtttcccaagtacatgtagaagaactagaacttgttggtcaaggtcagtttgatctttggggataatctgggaacaggctgtggttcaccctgacctgtgaaaagtaaacacaagctagaatttaggttgacctcattatccaattaattggcaccaagttatatacctatcagctaccgcttatagattctgtcccctcctgtgacaaggatgcccaccttcagctatgaaagtagtctgaaccacttaggacccgggtgccaagtgccctctcttaaacgtgagcatgaagaccctgattcaagtctctttgaaacttctattacaattttctactttgagtcaaaaacccaaattagattttttttgttgttttttgagatggagtttcactcttgtcgcccaggctggagcacagtggtgcgagcttggctcactgcaacctccacctcccgggttcaagcgattctcctgcctcagcctccctagtagctgggattacaggcacccgccaccaagcttggctaacttttgtattttttggtagagatggagtttcaccaggttggccagcctcgtctcgaactcctgacctcaagtgatccgcctgcctcagcttcccaaagtgctgggattacaggcgtgagccaccatgcctggccccaaattagatttttataaacttactcattcttctactccattaagcccttgccttcaatgtgcctgaaatcagaagttgctagaacaaccatttttgtatctttacataaaaatttcttgccatttaaaaattattgacctagaaacattctgaacatatccactgaagaattgggtatatattataatcattacaagccataatgttaaaagtaccacatcctcctcaggccgagtcatagttcttgatgctattgacattctgggatgaatcacggtgtgtcgtgtcctgtgcattgcaggatgtttggcaacatccctggcctgtacttactggatgccagcaacacctctgccctgctagttgtggcaacgaaaaacgtctctagacattgcccattgtctcctggtggtgggtgggggggtgggggggtcgccaaaatcttcccaattgaggatgactacactaaagtaaggtgtgtgtctgtgtgtgtttatgccatttctagacccaacataagagaatgtggtgacaattctgagtactatgaacttttctcattggtaacctacactgcctattagcaactcaacacttacaactccttatccttctattatattcactaatcagcagatcttactcctgacaataaaacttttggtcaaatacacattttccccaaaatgttacaacttgctggtaaaccaaaaatgcactttccacagaagattttcttacatgatttgcaatgctcaacacaatccactcctgaactgcttgtcacttatcccaaagggtataatgtcaatttaaaaagaaaaagaattgttacctgaagagctggttgtttgtcattcctcttgggagattttaatccactaacttgctgctgctgttgctgctgaagaaggagctgtcttgccacctgaagtgcctggaaggaaaaacaagaaaatcctttgcgttactacacaggttcaggggactcttcataaaaaaggattccaggaagtgcgctttgggactgggtcctgactttcctatttcctggcaaatgaaacagcaaatgaaacttcccaccagtcttagttggaaaactttccagaatttgtttacgttccctttgactcggccagtttcatccacggttccacaggcatctaagcagacattttattcctactaaagatctgacatgaaatttaagaccatgagtgattgagactctgaacaaagatgacagagagaccaggagggacccaagcaaagacgaaaacttgggagacactacagggcccttttcagggtcaccttcaccctccccaaattcttcttggggaaatgtagcgactcaagttgaaagtaatactttcaccccatctgagtccaaataaagaaaaagaactaagtggtggaccacaaaaaaaaatatactatggattaggctacgtagaaaggaagattaaacagatgagacatacctaggatgaccttgatagaaatcagagaggaaaatttggcaaatctgatctctagtcatcttaaagaggcacattatgtatctgtgaacaaaactggttacgtttattataaatgaccctttcaagcttacaatatgggatggtttctccttaaaggtagacattggggaggtagtatgaattggagataaagcaggaagaaaacagaagagtcctctaaaatgtttaacatatgactgacaaatctttttaaaagttcaagcaggctgggcgttgtggctcacgcctgtaatcccagcaccttgggagaccgaggtcaggagttcgagaacagcctggccaacatggtgaaac

SEQ ID NO: 40513 - DNA, 3813 bp, Homo sapiens
tgcaaaccccacttgagaactaaaaaaaaaaaaaacgcaaattttaaatctaaatttaatatagatttgagcctttcccttggcctctggaggaatcaatttgagataatgacagccttgaagataatgaaatgggttacataatattaaagactagaaggtatttctgagggacacagacatataagtagactctctgtattacagcacctgcctaacatctttaaagagaggggcaaaatgttggcctctgataaattacgttgtaccctagccacagacactatggtatactttcctttagttgagctattcatgtttagctttaaacatcagaatatagccttcgacaaaacggtaagagtcactggtttgtccaatggtattattatttaaaacacacacacatacaccacacagtcgaactactgaggcagacattcctaagtgaactgtctagaaaaagctaaattaatgaaccaagtaatcctgggaaatcctgtcccataaaaccattagttgcaataggctaattctcaataaaaagcctggcaaattctcagaaggcaaaaagcctcctgagccttaagggttaactcacttgccttaaaaaaaaaaagacacatataatttccttttatcataagacaatgcatttattattttctgtatatctgttaaagggcatggctttcggagtggaaaacaaaacagaacttggtcacatgtttatttgcttcagctactcccttccccttctgataaataatcaaacatgccatccagaaaaaacaaaacgagcgagctgggaaatttgatggtcatcaaatagactaagataccaagaaaagcagcccactgttcccacactgagttttcggcccccacacctacactaacatctgagtaaataccttcagtcactctttccattttccctgcaattactcctactgttaaacaaattgtccttaaggcagtcgcaaacatcttattttttcttgcaaaagagaacaacttctgaacattcaaaaaagccaccatagcgatagcaatacacacacatgcacacacacatacatacaattattttatgtatctaaatgtttcttctatgagaggtttggacaaccccagagcatatttctttctctattctaatagatgctgttttagatactaaaatttaaaaatatttagactgcggactagcaaacgaggttcacagtaataacaattctcttaagatcaaaagagcttattttccatttcctgtctattccctgaccaccatatagttaaaaaagaaatattaacacctggcttaccaattaaactgaagttgggggtcagggaaggggggtgtggagggaggggagagaggcaaaaggagtgactacagacaggaaaaggtggaacctttttcaaaaatgtcaaatcatgtgtttaaaaagtcatttcaacagaaaggactaagagagccgttagattgctcttctactcagagccaggaggcagcccaagtccaagggcttttcctgctatactgattatccacaaggaaaattttgaaaagagccttccaacatcaaagttaacaaccatcacggaaagtgaggcaggctttccctttccctctgcagcccactccgttgaaacaataggaatatgaatgagataatgaccgtgcgtgtttcagcagtctgacttttattggcatgaaattggtacaaatattaccaagaccgattcacaaatgatgacggtgtcgtgatgcaaacatcaggggacaattctgtagatgcagaattacaaaggcaccatccccacattctcttactacttgtgataacaggaagaaaaagaaggcaacacgaaacaatgtcacagtaagcagagagaggttccaatctacgtttagcctataaaactatcctgacaccacccggctgcttacttagctgattatatccaaagacatatttgaaaacaagagtgaattaaacaaggagttagaaggaaacggtcctctcaaatctctaaaaagaaaaaagcctctgatggagagaggagggaagggggaggaaaaaaagcagtaaacaagttggatcaccttatttcgcccttcagagaatgtctgcacaagaacggatccctagtttaaaagtttaacccagcaaaaaaatgtttctttttctctggacacttacagagaaaatgaagagtttggcgaagggagcccgtactgtctgcctttggatttccgtcttcttgctgtagatgggttctggctgtttctgcgaagcgggggttgccgagtggtaaaaaagatgtttgaataaacaggaagtactgtgcggctgaagcacactcgaagagaaaacacactggaacattgccctttgtaggcaacctcagggaggtttgcctccacagtagctggctgggctctcactaaatgacaaagaaaccacaagaattcctcaagtaattcttcactttcaaagttgaaagatcagttggagcttgcaggtaattttcaaagttgcatttagcacttaaagaaatctattaatgccacacatatctaaaccgctccaggtctgcaagcagcgacacagcacacgcagtgcgccctggctagaccaagccctagccaaacacagctcattcacgcagacaaatacacaccaacagggtttcgggaaacctgctcttgagatatttttgtggtgacatttacataggcaggatgctttaaaagaaaaaaaaaagaagaagaagaaaattcagattttgcagactttagaggattttgtcacatgtatttttaaagaacacatcgtcccgtattccagggatatgccctggatctggctttgactggctgtcctttacattttctttctccaccatcaaccaaactacctgtttatctccagatgcctagcttgcctaatggaacactccttaacccgccccaaaatgattgtcacagtcctgtcttccgtcaccggagtaattcagcaaatactgtgaagaaaagtaaactgctgaaggcacagcaagtcagcttgaaaaacaggaggaagagttgaacagccatattcaataacaaaaaaaaaaaaaaaaaaaggaggaagaaaaggattccttctgaaaatgtattgctcttgtggcaatgttcttctgccacagaagctactgatttgttatttagcatggaatgctggactgtctgtcatccaggtgctaatactcggctaaaataactcattgggagctgtcagtgggatgtttacataggccccaatcttttcttcatagaaggaaattttttactggaattcatcttcttttgatctcacattcaaagcaacggcagcttgatagacattcaagtctgaaagcaaatccagacgctgaagataaaccgccagaaaatgacaggcagaagcatctaaagcttataaaaatgaagagaacagcatgtcgcctgagtattacaatagcagaaatcaagagacatattaggtggaactgatcagccacaaaaacagttcaaaaggcagatcatagaaacagaagactaggctgggggaaaaaatgggaaagatctggtttactgcctcatctcccttctgagtctcacagtgcttccacgcctgccttctccactttggggaggggtggagtatccaatgcaaatgttcctctctaactcagctggtccagttagagaccaggaaatgatttcctagcaatcccttttcaaggggcaggagaaaaaggcagactcttaccttgctcagt

SEQ ID NO: 40514 - DNA, 4075 bp, Homo sapiens
ctcggctctatggatgtcactgctttggttctattacttcccagcacaagccagggcaggagagtcctcatcccaaggaagccaaccaagtggagacagggctgggcacaggcaagccagtctgcatttactgaaacagactctttcgctattatgtgttaaggaatgggaaaaggtgaacaggtagaagttgctttccggactggatatgaatcaatacttctaggcagccacaataaaatgctaactggagttcataataaaacccaggggcactacaaggttcctaagtgcctctgaatttaaaaaaagacaaattgtgttcacggtggttgtatgcagaacgtgtttatttcagtctaaagattttaaacaaagtagtcctcacttaatatatgataataaaaatctgttacatagaatatcttctccattgatcctaaaatctactgtaactttttttaaggttgagtactccttatccaaaatgattgggatcaatgatttcagattttttaggatcttggaatatctgcatacacatggtaagatatcttagagatgggacccaagtctcagcatgacatccatttatgtttcatatacaccttatacacaaagcctgaagacaatctgatacaagacttttgataatttggggcaagaaacaaagatttgatcgcatttatgactgagacccatcacatgaggtcaggtgtggaatttttcgcttgtggtatcatggtggcactcaagaagtctcagattttgaagtacttctggttttggattttcctgttagggatttcaacctgcaacttccaaaagctctgttgttaagatgagcatttcaattccacaccagatttgcagtcatagttaaaataatatagtctaataattgtgaaaacagcatttatcaatctcactttatgtcaggcatttgtattcgctatccttccaatgacttttcaaggtgggaattatcatgcctattttacagggaaggaaaacaaagctcagagtggttgactatcttgcccaatgtcacacagcttctaagtaggtatccaaatactgtgactgtctggaggtgaagcttaagggaaaatcagagagaggaacttttcgaaagaggactttgagaaaggagaggcatctgtcttgggatgttaaaaaaatgtgtcaagaagccaggcatggggcaaccgtagtcctagctattcaggaggccaaggtgggaggatctcttgagctcagaagtttgaggccagcacaggcaacatagtaagacttggtctccaagaaaaaaaaaaaaaattgccaagaaactgtgatccaggctgggcgtggtggttcatgcctgtaatcccagcactctgggaggccaaggtgggtggatcacgaggtcaagagatagagaccatcctggctaactcgatgaaaccccatctttactaaaattacaaaaaattagccaggcgtggtggcaggcgcctgtagttccagctactagggaggctgaggcaggacaatcagttgaacccggaaggtggaggttgcagtgagccaagatggcaccaccgcattccagcctggtgacagagcaagactctgtctcaaaaaaaaaaaaaaaaaaaagaaactgtgatccaaacatcagactgtccatgacttgaaaaactcatcacacgcctcctttccagtgacactgcatgttttcaaggacgacacaaaaatcattcttctttggctctaccatttgtagagtcccctcccccacttttaagagctttgtgactgtcaatcaggtgcttttcaaacaataaacgcttaagcagtgacctcatgattaactcggtttcactactcaggcaacctttcaaaacaaatgttaaagttaaccgttctacaggcaccagaacattagcttctatttacacaccaattaaacacataatttttggtgactactttgtactaagcacagtctaggcactgggcctaggagggagaacaagacagacctggcccttccctttctgatactacagtctagcaggagatagagtaagacatcagcaatcaacaaatccagaaataattagagccactgtgaaggaagcctcagccttcattaaaaaaaagaaaaacttaacttctcatttttaacctactctagataagtccatcaaggaattcatccacgaagaggtgacatttaattggaaacccacaagtaaagaagaaatcaaatagccaaggagcagaaagaaggttcaagaagatggagcacagaggctgaaaagaaagcatgaaacagtgcttaagaaattaacttattgaatcgttagtgaaacagaattgtgttgttcaactaatcctatgtctacttcattcttcttcaacccttttaaggtaaacagaagtacacagattacaaatatgctttcaatcaaatgacttaataaatacaaaatgtgtcatgttgacaaacaaaaaaaaaaacctgtaaaaacattaaggaattgatataattaccacagaaaacaaataccttggaggtggcccttggtcctgtcaatgtgtaccatttttaaggttgtaatgtcatgtggttggcagaattctcaggtgacccttacattcctatgcctggtataacacaccccttcccagagagtcaatcgtgcactaatccaggtgctatgtgaaggggttttgtggatgtaattaaggtcccaaatcagctgacttgaagaaagggagattatctgagtgggcctgatggaatcacatgaaccctttcaattggagtttagagcccagagatagaggaagtcagattctgaagcacaagaaagactgatgtgcccctactggcttcacgatggaagagaccatatggcaagaaatgtgggtagactctagatgctgagagcagctgcaggctgacagccagcaaggaagcagggacctcagtcctacagccagaaggaaatggattctaccaacatcctggatgagcttaggagcagattctttcccggagcctcttgacgaggaatcagtgcagcttccacttgcctccctattctctgaggagagactccattaacagtgcacctgggcttctgacctacagaactatgagctaatttgtggcaatttgttatgcaacaacaaaaaactaacacacgcagaaaaagagatgaaatcacactgcttgcatctaaagtttataaaagagtttctcttaatgagtaagaactcagatgggagggaggtgggaagagagataagggggcaggaaagaaagggcagggcagggcagggcagggcagggcttgcatactggtcccacaaggaacgacatggtgacccaggggagcaatcgcttctcctctctgggcctcactttcctcatctgcaaaaagttggcaataacaatgggtggtggtgagggacgtcttgggaaaacactaagtgaaaacagtttgaaagttgaaaagcacaatccaagttattttatattctttcctggaccattttcatttttagcttccttttctaattattttgattacttattctaataatgatcaggacacaaatacggaattgtccttggctagaaaagagaagaagcattttaagctattgtggatcttcttggcagaccatgcaagggatgtggggatacctccctgggaaaaagtgaaaggaggtcagcatgaggtccctggtgaggaaaaccctgtctctcatcttccttcccctctttgttgcacagtcttctggaagatgaagccagaggcctgcatttgaatcctagcttcactcctgaccttaggcagtgatcgaaccacactgcaccacagtttcctcatatgtaaaatggaaataataatgacaccacctcctaaggctgttgtgaggagtaagtcatttaaaatacataaattaggctgggcacagtggctcacatatgtaattccagtgctttgggaggctgagatgggaggatcgcttgagcccaggagttagaggccaccctgggcaacattgcaagacc

SEQ ID NO: 40515 - DNA, 762 bp, Homo sapiens
aggaggcccccagcgtgtgggggacagctgtggctctgacccccacacagacctgctcctgtgccctaggtctgtgacttactagttctatgaccttgaggaagtaacctgactctctgaggctctgtttccttatctgaaaaatgggtataacaccagtgcttaccccacagagctgtggcagagattaaaagagacaacactcagaaggcagtgaacccagggcctggcacacaactcacagtgatagaagttagctttggtattattgaaatacacattcctgttcactggcctcagtttacctatttccaacaacaaaaagggtggagtggaaaggttctgagctgccttcccattctgacgcacttacagagtctttgcttaataactcggcaagtccttgacaaactttccatcccttccccacccatgtgtacggcaggcactcccaagtcaccagcttccagagccccacgctggtccatctaaagccagaatgctgaactttgtgactgagtgcttgcaactgttgtcactattcagataagcacatcctgctttctgtttaccgaccagttaaaggcacagaggggtacccggcaattgtgcggcacttggtgaaggcgcctcccacacacctgtgtctcccaacccacccagctcctgcagccctctcaggagcagagctcaggctagtgaatataccagcaggaataccccagtgagatggggagaagtggctaaaagttactagaatgc

SEQ ID NO: 40516 - DNA, 1358 bp, Homo sapiens
agtcagcagcaaaaattttatgagttcacttccttcaagggaacttagagagcgggattttattgctgtgaattctggtcaccctttctacccctcagcatctgtttgaaatatgtagtagacaattgcttttttggctgtgactcaggtggtggaaacacaggacaaacagactactgtatataagctttcctccagcactgaaaaattttattaactctcttgcatagcaaacgtggcggctgctcagtgcccaatctctgcagcattatcaaggaatttggctaattatgaatcgtgctggccaagcaagaggtgaccatgttgaaacttgtcaactcgatattttctcacatttcagaacaagcagggaaacaacaacaacaacaaaaccttatattctgtttagttcatcattcctatgtgtaaaattccaagttaaatattacatgtgagcttgctacataaatatgtcagtcttgccaccgaggccagccaaaacaaacagtttcaagcagtcccacagtttagagcggtagagttttcatagaagccatgcacttgcccccttttaatcagttttttaaatttttctcccatgacaatagaaaagttagaaagtagtccacagagagtgtggagaaagggcttgctctccttcacaatggcgactgtgagaagatcaagggctgaatgtctgcctggcagaacatgagtctgtctgtaaaattctgcacagacgaaagctcaatcccatgccatcagtccaatccccaaataaagaaacagagttggttccaaagtaatgagtagcctatataatcagatggtttctcttccatgttagggctagaaataaacatggatgctacctacaacttagactgctgtacttatttatttatttttattttttatttttttttgaaacagagtcttgctcagtcgcccaggctggagtgcagtggcgcaatctcggctcactgcaagctccgcctcccgggttcatgccattctcctgcctcagcctccggagtagctgggactacaggcgcccgccaccacgcccggagaattttttgtatttttagtggagacaggttttcaccatgttagccaggatggtctcgatctcctgacctcgtgatctgcccgcctcggcctcgcaaagtgctgggattataggcgtgaggcacagcgcccggtcccgactgctctatttaaagtaatgaaagcacagttggctccaaaggagaaaacacattgctagaaacagtgaatggaatttgaacagaaacttcccaatattaattcccagagactaatacatttttatagaaagtctattcacaaaaggg

SEQ ID NO: 40517 - DNA, 837 bp, Homo sapiens
ccctcttccttctggattcactgttggtatttttacttgttgctgggaaatttcgttagctgcctggaattccatttttaaagggctgccctgcccactgatttgtgaggtaccaccttcccccaaaattactgaagcgccaattgtctcaaactgagtctgatttctagtttactcagaaacttaagataggagaagcaacatacagtttcagaggcaaaagtaaacttagaaatgaagtcgtatccagaggctcaaagagtgagtgacttgcttcaaatcacagggtaagttacagcagcaacactcaggctggctgaaacctctatcaacattctcagatttttcgcaagagcccatgcattttgcaaacttgagagattgcttttttttccctattggtccagaggtcaccttttttccccctctactgaaagtttctcatctattgcctaagaaaatgagtcagtatccctaaagatttctgaaaaatcatcatagttggataggaataatcagccagtaagatatttcatgagactgtctcaaccccagtctccattctcttctcctcaccatcactacccaatcagcctgactctattcacaaaatttctagaatgggaactgcctcaatttagaaaaaaaagaaaaaattcacacacacacacacacacacacacacacacacacacactttttgccttagttcttgccctgcataaaaagtcctgcaagcataggatagcatgatcttctgatgcaacatattagctgtcatacattagtaaaaccatacattagacatggagaagcagaaggcctaggccaaagtta

SEQ ID NO: 40518 - DNA, 2935 bp, Homo sapiens
ggagagctctctcccttcagaaaaaagcaaacaactgcatagatatcattacactaaggaaatctcttagaaaaaccaaacaacttgctaatctcaccagccccttcatccaagcaaaagataagaaaagcaaacctaagtctgtttcaaccacattccagggacaagttcccctttttctttctttatcaaaattctagcatttaagtttgtgtgtgtgtgtgtgtgtgtgtgtgtctgttaaacagaccttgcaggataaactgctgctcacacccgcaaacaaagcaatatctgtttaataacgattgctgccatgggtacagtaaacaaggggcccagcatttgtgtttatgaacaaacacatcatcttacaagagcaatttaacattaaccaggtggaataatcaacagatttcataggtgacagcaggggcagggctaacgtaaacagaactggggaggagaaagaggccactctttgagaatcaaggtcgaggtaaatgcattacagagtaaacagctgggaagaaggcaagataaacaaacagtcattctgacatttagagaggcagaaaggttgtatgttacatagatcagctgctgaccaccatgaaatcaaaccggttggagaccaagcctgcttgtttgcacaatgccatgtttgcttataaacaacaatttgctgttaccaacatcacattactcaccatcatataagccagagtgaagccagtcagatccgcttaactctttactggtgacattacttagaaattaaaaaacaaaaaacaggcccctttaagaaaaagaggtcagtcaccccaaaataagaccaagagacctcagtcaatacccttttatttcctggcttgcagataaaaataaagcatccacatggtttaaactactaaaggttggatttgaaaacagctttaaaacactataatgttttcatgcttcagtaactctgcattcatttcttgggctcatcttcttttatcaatgaaatatatgggtcaaacacagattcgaatctttaatgtttcatccagaaggaaaaccttaatgctccagtctcctcatatcaagcttctattctaagatacctttaagcccagtgggcccacaaacagatgcagagcattctcaactactctgcaaaaatccaactatatcagtttatgatgttttccttacaaaatatcaaaaaataaaataatcagttgatgtcccatgtaaccactcaggggttcattctgtcagcttatcaataaaatcttagctcttcaaagcccagaatgaacaataagttcggtgtgtccctaacaaaagtgttaagaagaaacgtttaatctctaaaaatttccctgatgtgcactaccacataaagcagcttactgtgtgttacaagaaagttatcatgccttatcagagatactatatttagaaacacaatcggcaattaaaacattagtttcaatctattttacagatactttaacaccattaatttaattttgatacatgtgaaaaacctccttccattacttaaaatttaataagcaaaacatactgaaaaacagtttggtaatttatctatatcttacacttataatcagttagctaatttttttaaattctgcgtgatgtcagtgcaaagtgcagcaaaacactgtctgctggatatccaaagcaaaatatggaaatgagaaaaggatattaaaaaaataaagatacacctaagtggattctggcaattacatgattaacaatcaggttattggaattttccactctgtctaaaaagaaagtaacaaaaattgtgttggtctgccccaacccccacaacagatatccccctccggagttccactgtgaataaactcctcaaccttctctagctgctcttgtttccaggccttgcttgaattatctaatctttgttctgcaaacctaaagtcacaaagtaactagtgtgttgtctttcatgtttttgttttgttgctctgtggtttgttccctaagtccctctctgccaaccatcatctttccccaaatcaacatagtccctgaggcctcgacaatgtcaggggaagaaaatttccactgagcattcagtgccctggtaggaggccatttttcaggctcaaggacctgttaacacctgatggacatgcagggaagagacatcaagaacttcccttaaaagccctctagggctggagctgttctactgcccttgagaaagaaaatcagacttgctcaactgattgatgatgcaagtccggctgctggaacaactaacagagagaatcttccctctaatgttttgagaacagaacgttctcagattccgtgctcactaccctatggatgactaggaggtagagaaaagtgaaggggcttctataaccaacaccccagtgaaaacctaagagaaaaacaaaatgaaaaagtcaaagtggagggctgtgtcctggtatcctcactgtcctgtcttcaggagaaaatgctgatgattcactctctgcacttcagctcttgtccagttctcctgagcttcagtttttattttcttttcctgaaccctggatgaaccagaatattagtaaaggattataaacatagttgacaattctaaatggtaatccaaagagttgtaacaatttcccttcataaagggaaatcataattgagtcctggagttttgaaaactaggctaaacctgggcatataatcattgcttgaatggggtactcttttctgtttgaagatggtttcacctattccttatcacgagcaggataaataatgtgtcttctttcctcttccccagcagtggtgttacacttgccctaacccacatttagttctatttttccatttttatttttgagatgggagtcttgctcttttgccctggccagagtgc

SEQ ID NO: 40519 - DNA, 1775 bp, Homo sapiens
gttacatttttaagaaaagttctgcaggtccaaagacaacaataaaaagtaaggctgctttcttgccatgatcacttagtacgaaaaccaccccccccccaccacaaagcagtgagtgaaacatcccactcaaaggtcagggctaggctgataaggagggtaacaatgctgatggggaccacagagaactaatctggaggcagctgagcagcagcgagccagctctggccccgacgctgagaaggcttccatatctttattccctaggtgagagccgtggctgctcttgaaagcagtttccccatgagatcagccaaaatgagggtgcttcggtagcggccagccctcggtgtgcaaggacgggaggacagggacagtgatgctgcctgcgagaacccgagaaaccttctgtgtaccaggcatcgaggcaaaacatgtgccatgagcaaaagggcacaggcagggggataaatgatacatgtaattaagaatgaagccaggctgatctagcaaataaaatgcatgtggccctggtgaaacttccaaagctcagaaagagttcctccctagcctggaacctctgggctgccctctaaactgccttggttcttatcagatccatatcgtacagaaacctaaaacccctgcaactcatgttttattaaaacatgtttagcattctttttaaagataggttttaaccccaaatacccatgaaattaaatctcctatgccacttatctgcactgctgggcaaaaactaaagttgagctaaacagagagatagcaaaatcaataaatcacacgaaacaagtagcagttcaaaagttcaaagatatgatggccagttcagcgcgtcttagcactcacccaataataactcgtctccgtcactcttcatcgtatagacaatttcatggcatcattttcattagcctgtctcagagaaaattgctagctatttatgtatacgctcaaataaattagccatttcatcgagcaatgtgattcttataaaatacattaacacaatactcgattttccagttgcagtaaataaataaatcaatacattcaatacagggtgattctttcactgtggcgctacagctctcagcataagtgtttttattgggtttatttgtttcaataaaaattgaaatgggccagtgatctcagtgctagcatcttaaaaaaaaaatccatccaatattggggaaagtattgtgcagaacattcaaacttataattttattcaagaatcattttcattatgtattattccacaacctggttctgttggaaaatttcacaaagggaaagggggaaatcctgccaggtgtttgactctggtggcgtttctgtgctgcagaccccagtctgagggtgatgcttctgagagacagcagcacttggctgagctgcgaccttctgcctggaatgtgcctcttccctgggcagggagaaacgacaatgggacaagtgccagatggcctcctctgtcacaccttacggaatgccattgattgtggctcagagaaggccatttattccaacctctgggggaaagaccggggtatcatgactgcagggaagaagagagaggtgtgctgctgctgtaaataaaatcaggccgagggcctgcgagcgactttggtggcgaaatcaagacacaccaggcaggagattttctccaagtcactagcacaatgaaaagggaaatatggtagtggatatctgttgtttttgtctgcccaacatccatgctccccttt

SEQ ID NO: 40520 - DNA, 788 bp, Homo sapiens
ttgtggaccggcatttgctaaaaagtttttccttattggttggctggcctcaaagagctctgcgaatgccaggacttatgataagctatgacacacttaactgttacatattaatgttcatgataatacaatctttcatttgggtgatttaaaagtccctctagtccgacttacagttagatatacactgaatgcttcatcaatcacaaccatttttattctcaatcttgtgcaaaaatactagagaaggtgaattccagttacacactgaagagggctttactgttagccctgaaaaatttcactcttttcacatgtacactggattccaacagtttctgcctaagcattctatttacctgtgtctttcactgtagctgatcttatctacagggtaaaagcaaatccacattcatatctctactatagggtcaaactccatatcttatatggagaaagcatttcagttatgagcttgacaaaatgcccagcattgcaacatttgaaatacttgggagcaagcagcatgagaaggtcacagcaacttgaacggagctttttaaaaggaggatttagaaccacctcacagcaataaccaatgggcccacttaacgccaagcagtgagtcggtgatcacacctaccctaataaatgcacttgaaagaaactacaccctttttccattcctgtaaaggcttgctgtagtttcatggccaaaatcttcccacaattaacctcggacctatagatcataaggcaactcaagacagaggcagcaatcagactag

SEQ ID NO: 40521 - DNA, 1208 bp, Homo sapiens
aaattgtcaggtccctactacataccagacactcaatgctaagaatacaaaaaagatatgatcccagcctgcaccatgactatcaaagctaggacctctttggggcagaggagaggggctgagcagatttctaatacttccagaaataaataagcaatagaatttttatactcatggtttacttccaacatcaaatttatgtagaaaagaaagaggctgccctttaaaagaaaaaaaaaagtcagcagatcaaaagcatcattaatcactgtctcttttaaattaaaaggtttgcaaaaaggtgggcacagaaccaacgtgggaaacaaatcattcccctcattgagtgagggtcagagtctaaatggaagagtcctccgtatttacccagctcatctcctgtgtaatggatttggaggagagatttccactggggctctgctaatttgaggcttgactttttgctttttaaaaatgacacttgggtggttaccctagtattgtgactagttttagaaataaacctttcaagtgttctctctgggaggtcctcacttacatgatctgacccggtagatcttgagccgttgcaaaggtgctccactaagaagctgtgggactgagtcttcgggtggccttgggactccattggcaaaacggctagccctttgaaagcaaaagtaaaacatgcccaaagcacctgagatagggcttctcacgcagtgcctggaagagttcaggagaccctgaaagtgattcatttcaaatcaggagtagctcagcaaaactaaggtcagtgtttttccaacccctgcccttcagaacacctctatactcaccctgggctaggtcacagggtgcagggaaagaaaacatggccctttttgctgtgtatgcagcacaaaggggacacagccatggacagaatcagacttcccgtcctgtggaatacctactgagagcaattgaaacctgtttaaaaactaaaagtaaaacaacaaaaccgagcctgtgcaacaccacgaaagccaggaataccagtggctgctgaaagaatataaaaatcggatgtgggggaattgggtttttattgttctgttgttgcttatcttgaattttgctgtctactcaggctggggcctgaattaaatgcttgaccttccttctcagtcagtgttcaacaactatgtatatcatgtcctacaaca

SEQ ID NO: 40522 - DNA, 935 bp, Homo sapiens
caacctcggcctccagggttcaagcgattcttctgcctcagcctcccaattagctgggattacaagcatgcaccaccattcctggctaattttttttttttttgtacttttagtagagacagggttttgccttgttagtcaaggtggtctcgaactcctgacttgaggtgatccgcccgtctcagcctgccaacgtgctgagattacaggcgtgagccactgtgcctggccgaggatcattctttaagtcttaaatagaaagtcaccttttccaagaggccttccctggctagacaggctttcccaaggtctgtgctttccactgtatcctgtgtgaactcccattccacgcagatatcttgttccttcgtttcacttgcactctctgcttctttatactagaggacaaactccaggagaacagagttctcctggtggagctgtcatagagtttgccctctagtagaaagaagccgagagggcaaaggtctgtttcctgccttgctatgcactcctcctcctgccatctacagcacaatgactgtcacacagcaggcactcagcagatatgcgttgaatggatgaattactaaatctaaatataccatgctatccttccattgaataaaaagctaagaaaaaagaaaacctcactcgaagctataatgtaacaagttataaatgccagagtgatttgcaaatgcacacgacaagatcagttacagaaatgatgaatctaggcttggaattcaggcatcagaaattgacttgggttgaggactggaagagattctcccttctatgtcgtaaatgacccttgagaggcccaccttgccccctacaaaatatctcaaacaatgtctgaaaggtaggatccttaactcttgacttcttgaacttctttttaatgtcactcactcccagtgccaggtgca

SEQ ID NO: 40523 - DNA, 790 bp, Homo sapiens
tggaactgagtggttgcaacaaagaccagatggcctgtgaagccaaaaatatttactacctggcctttacaaaaacagttttcccactcctgtttataccattgttctggcttcatagtatttactttaggtaatcatctagctgtggcaactgatactatttcttttaaggaacaatgtaaagccttcctctagatagactaatttatattctaacaagtgaggggattgcaggggatatagaagcaaatacagtataggtggtatttagatcaacatcgtggaaaatacaaggaaaatctccaagaatgcctgagcatggcaaagtctaaagaataataaaccaaaaagatgggggcgggcaggcagggaggagttgggatataaaaccaaagactatgtaaataagacttccagatgtagcaatctgtcttttaaggtcagagtggagtcagaaatgtggacccctagtggacagaggtcagggagactacccaagaacatcaggttggccagtctcaccatggtgagccgcaggttctaattttacatccacaataccctgacacactggccaagaattcctagtctggcaactgggaaggcagtagatccaaaacaaccaacgttgtgtaagtcaggtaaaacaacagcaaaggccaagaggctcagcatgagcctaggccaaaggcttcccagaaaatattgcttggcagggttattgtagccagtatagtttaagaaggctccctttgctttcttttcactctgatggaaatgttgtttctaa

SEQ ID NO: 40524 - DNA, 1576 bp, Homo sapiens
ccctcagaacaaggcattcaggaagaaaagactgaacatcattctgcccaacaggaccatgaagatcaggaagatattatgaagcaattctggaaactgtgtctcctgcccgcctaacctccaagtgggacactctgtcaagtcctctgcaatccctttttggttttaaaaacgcccttgttccaaatgtttcctgctgtaaccaaattaatgggaacagtacagatatgcatgccagtgcaaaatatggcagcagtagaagttgacagagctaatttccaattgttttggcaaaacagcttggtccaccccttcgggtttggaaagcaatcagcttattagcagagaatgggctactgtatcttaacaagtcttgttcagaggcctgccttctggtttttaatgtcatgagaagtccctattgagagtccattgttctaaagaggcccccctatgaaatgtctttcatgcccaaggtttgaaaagagcccttcaagaagcagagtcataaaacaataatagttaggcaggtcatgagattcaaaggaaattaaacatttgtgatccctacaatgagatgtggcctggacacacatacacacaaaagaaacttgaaggggaacattggaaagaaggggttaagcacacacttcaccttgggctgcaactgctcagtgagctctccccacaacctggctcggccaggaggcactgctgaagccggggctttcctggccctgaggtcccgttcagctcgtccattctactgtgcaattacagaatcaataaaacatccctttgaaactccctggactagtgccgacatgcagacagtagtcggctgacattttttgctatttccgttattacagccggcaagcacgaggggaaggcatcagaaccaaggcacaggctggggacgagaaggtggatgggagttccggcttcatgcaggctgccctcatgctctgcatggcccatggagttatcacccacaacctcgcccatgggtgggggcaaccagaccaaggtgacatcattcccaaggggacactgaaggaaaactatgggagggtctgggttctgtctgtcttcaccctttttggtgaagtgtggggaggaagaacagcaggaaaagaaattattctttaaggaaaaaaacttcttggacaggctcacctgagaaacactttttttttcttggtttgctctgagcatttcaggaatcaaaggcctgtgccaagaagcaggcagcgaggcggaactcagcacttgtgtgtgctgctcgtgagaacttgggggtgggggggcgggagggggggtactgaaacgtccctgtccatctgttgatgtctgggtggcagaaaatattgaaatagaaatagaaagttagaaaaagcttaggagcaaaacctgaaagagtattgtatttgaaaaggaaatgttagactgattgtataaaaatggaaaaacagaattaacatgttccataatgattcgtctgtgttaactaaatattgagctaaaatttggtgaaaccctcaaaataagactttccgaggaactcgtcttcaag

SEQ ID NO: 40525 - DNA, 1836 bp, Homo sapiens
ccacttcaaaaagcttgtcctgcccacctacttaagttaggttccaagttagtctcaattatatcatcctatgtgcttacttcagagctttcgccctgatctatttgctcatttgtcttccccactagaatataagctcaattagataaaagaactatttcttttcatcgcaatgctccaaaatttcagaaaaatgcccagctcatagcaagtactcaatatgtatcttttgagtgaataaatgaatcaacaactgaaagaagtaacttttcggtactctctaaaaatataattgccatttgttgaaaactcattatgtactgggtattgttttaagtcttttataatcattatttcattctattcttacaacaaagttcttagcagatattattattttaaactcaatatgtggataagaaaactgaggcacagggagttttagcagcctgactcaactctataaagcttgtgcccatgggaactctatattttccagccaataccctaatataaaagtcctgagtttttgtgatatacccttctgactcaggcttgctcaagtgaattttggcactacctgaccatgctggtactaacaatcatgggccacattttgtaacaggcaggtaatgcaaatgagcgaggaaggccaggtgtaaggtaacagggagagggaaggaatgtggcaagctgagaaatcctcactttatcagcttcaagggggaagccattgtacttccccctccaattactgccacatgggcacataccctcaagaacctcaagagctttcaattctacaaataaaggcagtaatctagatttctatttagtaaaattccagaatttttcaaagatggcagctaactttttaaataagttatatttaaacaaaacaaacatgttgcaatccctgtagcaaaggatggatgaggtcatgcactgtctccagttttatgattccagagtgattcagaagcacagagaagcagtacgggtgacacagaaaagcacagtaggtgtctgggcagataagagctttctagaagaattcattatcttgaggttttgggaggaattggaagattgggtggaaaacgcatttcacaggtcagaatatcatactcgaaggcttgggggtgaggagtaggcaagtcaacagcaaagatcagccatgaggagagggctggtggaggtttcctgtgggagtttcgttttcattcggactggagtgagtagcagctttctagctaagacataaatcggttaaacaatactctatgtggccggccacagtggctcacgcctgtaatcccagcactttgggaggccgaggcgggcggatcacgaggtcaggagatcaagaccacactggccaacatggtgaaaatccctctctactaaaaatacaaaaattagctgggtatggtgacgccagctactagggaggctgaggcagaagaatcgcttgatccagggagtcggaagttgcagtgagctgagattgcgccaatgcactccagcctggcgacagagcaagactctgtctaaaaaaacaaaagaaacaaacaacaacaacaaaaagacaaaaaaaaacaatgctctatgtgtatggtcattagtgctgtcttatttgacttctaatattttaaagtaaccaggcatatctaaaaataaagggtgaatcaccactgtggtgtgtggaagtgtgtgtgtgtgtgtgtgtgtgttgttaagaattcaacagtcacaggactgaattccatcttcatggaaccccatagctaactaaaatacttaactgttctgaactctagacataaaaaaatacag

SEQ ID NO: 40526 - DNA, 2530 bp, Homo sapiens
cattattggaaaaggagtaaaataacaaaagagttaagagaagaaaaaaaaggaacatatctcttgagagaaaaccaatggtccctgaagtaggatttaaaagtgctgtttacatagaggcatcagaagagcccctctgtggaggtaagtgtgaagtcccatagcagtggagccaaatctgttttctagagagttctcttggtctccatgttccaactagaaacaaaagccatcttaccagaggcctttgtagttagttacaaattacttaaaggaataaaaatacaggccaaattacttgctaaaataaataaagcccccagcccccaaatcatcttctaagcttatgctcaagttaagttaaaaagcaaacagaatttcaacatgatgaaaccccatctctactaaaaatacaaaaattagctggatgtggtggcacacacctgtaatctcagatacccgggaggttgagacaggagaatcacttgaacccaggaggtggaggttgcagtgagccaagatagtgccattgcactccagcctgggcaacagaacgagactctgtctcgaaaaaaaaaaaaaaaaaaaacaccacgaattaaggttgtagcaccacactatggtaaacctcctcagtgactcgatgttattatttcgtcaggtatggtactgtagggaggggagaatggcagaagacacaggaagcctgtatggagcctcatccatcattcaggccagatcatgtacagaacatacaggcatcagagtacaaacatactaagtagccttgttttccaaggttataacatgctctggggacatgctcattagggggtcaggagaaggagccaagggcatttggaggcagccactattcctgactttcagattctcttctatcaaggaagaagaccaaaataaataatttccaggtagttttagcagaagtgcagcaagacccagggggtgagtacacatcacaaattcccaggaagatcaacgccatcccagctttgccaacaactgtttgagatgtttcgcaagtcagtgagcttctcggaacctgagtttcccttcttataaaatgaaggcatttgaatcccatctttttgaacaatactatgtcataattttatgcctcaaatcgaaaaaaacactttgggggataaccgagaattccaggctacatcatccaatcaatacaatacttggagcactttcaaaaaacccaccaaggaaccaaagctaccataacttaaaaggagcagaaacgaaatttcagattaatatgacgttggccagtgactagtcatcaagcatacttcagcatttagttgtctgagcagacaggtgactcagcgggaaatgggttacccagccagccacgctcatctgacccactgcctcaaagtaatttttcctcaattttcaaaaccaagaaagtaaatgactaatgaaatgactgaagaataacttccagacaattcttacattaaaaaataaaaccaaacttcagcacaacagtaagtagatgagaagaaaacaacccggctcagagctgtccaacgtctgatggccacagttccttctgacaaaggaaacgtgcacattccagggtgtgtggaatgatgtggtttggaaatgtctcgaggcgccaagggaagagctgatgatcaggacaatgtcatcaagaaaagtgtcacggagcccaagtggtgacatttctgttgcaaatatgagaaaggaaaggaacacgctggtccttcaccctggtgttcaatgcggtcgtaggacttttggatattctcctgggtacttccagttctaacaccaactaacatgtgcaaagcctgtgctgcactgcacatgaggtactctgtccatagcattttcatccaccctcttattaagccttataacggtggcaagagtaaatgctattatcttacagatgaacgaaccaaggctggtgaagggaagtcctttacccaagaccacagtcagtgacagagccacatctttctgaaacccaagcctcgtcccttaaccaccagtgaatactactgagtaccatttttccaacagctcaaacaggaaaagtaggaacgtttggaatggttcccaaaataaagacaacctggcaacatagagttataattctgttcagacctctacgttgcctcccactgtctaaaacccttggcttcttgcgtgaagtcaggcaaacccgggaagcagaaaagcaaggacccaagtcacccctggtagtgcagcttggaaatgagacaggacatctcccccaagacaggagacaaggagggagtttatgacggcatatgaggcatgcactcagtcctcctattggactgtagaagagggatgctttttttttttttttttttttttgagatggagtctcactccgtcgcccaggctggagtgcagtggtgcaatctaggctcactgcaatctccgcctcccctcccaggttcaagcgattctcctgcctcagcctccagagtagctggga

SEQ ID NO: 40527 - DNA, 642 bp, Homo sapiens
agaattagtcctggcacaattacctaatggcctcttcaaccaaacacctggttggctacttatcagtagcaaccctataagcaacccattccagcaaggtccagagagaagagaggacagctgtgactattcaatcctttggtggtcatcatcacctcccatatttatgaggccttttggccacaatggtctgagctcttgttgtgtacatctttattagttggaagaaaaggtctaaggtttctttcccaactcagagaagtcctcttaaaccaaactgacttagccagccccaggtcagtacaaacagtcaatttcataagaggacaaagggctttggaaaagaagtgaacagagagagaggatgaggcaatctgcagttcctctttggctggggcctctcaatggggcctcattctttgtctcaaagatagacaggaattccagcatggacaacacccccaagtttaaatatacctttgaaaatgtgggtgactggcagattattgtaaaccactgatcatcaccattaatgtgggtgttttaaaaagttggccctatgaatggaggttgaatgcaagatccagctctagtttaaaactaaacacacacatacacaaatacacacacacacaaatagcg

SEQ ID NO: 40528 - DNA, 4038 bp, Homo sapiens
gactgcataaggtcaaatgcaaccaaatgaaatgtttatattaatttcattattctgcccaagcctcacagatgagggcttgtggggtggggaggtagggaagaggaagaaataagtttcattttgggtcttctggtagagcaaaaagaaaatgaattaagacgaaagcataggatgagcccagactaaatcaatacactttgtaatcagcccagcaagggtatttggatacaatgacttggaaataattaatagttataagaggggagtggggtgagaaggggggcgaggatgtcaccatattttatcggagcactttacactccacgctaaactttgatctccagattttcagatttaggaaagaaagaggggaaaagggtggaggggaggaagtccagtatttcgaagcacctaccggcctgaggatgggcacattcctcgctcccggtgccttatcgctaggctcgcgccaccccggctggctctttggggacggagaacccctagtgccgcctggggctctccggtgtccctggaccccgcgcccgcggccgcctcgacttacccgcggagtccggggagggagtaggagcgccgccttcacgcccgcggaggaggcgccggcagcaccatggtccccggcgccgctgccgctgcccccggcccgctcgctcgctcgccgcgcgctctcttcctcttacaaactttcgggttctgcagtcgacaagaaaccggggcgaccctcagcaagtcttccccgtgcaggctggggggaactgaaggggacgggacgggtgagtaggccgaggggccaggacagagagggcagcgggctccgaggacccgcgagtgcgcgtggagggaagagaggatgcggctcagggaatccctgcaaggatccagagaccgggaaatcggcccgagccaaagtctcagcaccttccccaggatctcacaaagttgcaacaacaaaaaggaggggggaggaatagggagaagggggtgggatggggatacgatcacgggcgcaaggtttggagttacaactgtttatttagtccttattctcacagggggcgggagctgcgcgggaatggggggctgcaggcagcgatttcgaagcaaacacatgggaggggggcatgcgactttgtttccgggagcggagctccccagagcccgtgtgtgtcactgccagtctcccgggaccaaggcggagctcacaacaggtggggaggggggctcgtcgagggccaaaaagaagaaggaatctaagtttccgagcgcgacgttgtctgaaaaggagggaggcgggaggcgggggcgagggaaggcggaggcagcaaatgaccgcgaccccgcggcaactggcaaactcctcggctcccggcgccgccgccaccgccgtggtccccactcgaagcgcacgccgcctcggctcgctggctccagggagtcgtctcggcgggacaggaatagagcgcagggagctcgggaggaaggctgcgcgcaagcgagggacggagagccatcggccgccaggacagggccggagggacgaggcgacacgcgcgcgacgcaggacaaatcggagcttgggaaatctccccgtcccccaagcttcagaggggggtaaaatcagaaaatgtgtgtgatggtgggagagagatccgggcgcggcgactcctcgcagcgcatccggctcccgcacccacccgtggatctggccacggctgttgcggactcgtctcgggaaagcggaggccgagcgcgcgtaggggtgcgtgtctggctgggggtgcgcaggtgcgtgtttgaattttccgggctccgagggggtggcgggagagcttcctcgccgctgactctcggggtaacgcgcgcgtggcagcggggaagttccccagtgcggggcccagggccaggcaccacagtcagtttgctggggcccgcggggcagctcaagggcaccgagggggcacacacccgcggggaaagaaggggaaaagtttgctccaagtctaaactttgggcctaggaggcgcccggcgcgcgccccctcccgccgcggccaggacccgggaccccgcaccggccccgcgcccgggcggccaccggacgccaacgccggacatcgaaagttgcgccaggcggcctgggcttattgatttctctcccctaggcgatcgtggagagcgcagagagaggcgtgaaggggcctacgggcaggcgatctcgcctcctcacagtcgccaccgcccccgcccccatttgacttatgcaaataaacccaaagggtgcgggcgccgccggagctccctccacccgcgcgccggcccgcagcccccacccatcccagagctgggcctcgacccgggggggagaggaagagaggggagggctgggggagatgcacgtggagcctggaggtggaaagtagttgtttttttttttccattttttttctctttttctttctttctttttttttttttgtgctggttgttgttgttgtttaaagtggcggaaacaagacaggaggcggcttgggaaaaagtggagcagaaatggaaaaatacaaactcacccgctgcaaatggtctctcggtgcaaactaaggtgttttcgggcctttccccgcgcgcgcccactcccgcccgcgcgcgcaccccgcgcacacactcactcgcgcacacacgcgcgcacacacgcactcccgggcgagggccgggccgccgcgagtacagcgtgcaaccgccacacaataaataacaatagattcctccgctccggactagcttcccggagcccagccagcgccggtggcggcggcggcggcggcagaggcgcgggcagcaccggcccgggggcgcaccccggcccgaccctctacctcccgcaggggtcccctctccgcttcacgcaccccgctgggcactccagcggccccccgagcgggagcggctccctctttgccgttcgccggggcgctggcgcccacccccctcctccctcccccctcccccccgacatcccggaacaaataaataaataaggcgcgcgagagaggccaacacgtcgcggagggagatgttgttattttttgctgttgtgcgtccctgacgtcacatccacctgctgggtaaacaaccgggctcccagaaaaaaaaaatcgcaattgccaaagaatgggggggggggttggggggagggatccagggagggggaagtgaggggcgtccaggcaggattggaaagaggagagggaggcagagccccgcggaccagagagaggaagggaacgccagagcagtccctggcaacagagggatctggcaggaaagacctggaaaataaggggcaggggggcggagggggagattcctcaggagatgggaaatggggggcccattcagacagcggaaaaaacgagaagggagagtgttaactagggacgaagatgggaatgcgatggctatttgcttggattctgagctaaaaatatgaaagggaggggagaggacaggctagaatgtgagtttcctccagttaaaagtgaaagtgttttgccatcagtgacagttgaaggagagcggggtgggaggtggtgttttcaaccccctttctccctctctcccgtcctccctcggtctctcctctttctttctgcactttgtccaatgaaagaaggcgagttcgggaggtgaaagttcagcagaaggacaaacccctgtttgcaaggaaacagaaaccccgccagccagcgaggggttttctcccctgtttctcggaatcaggagagtgtgaatgtgggacgagcttctgcccccttgtcagagccactgcaggaatgtgcaatcgagtccactttgggggaaggtggctgcatcaggaactgtgttcttgccacgactcctcttaggaaaacgcctgggggctagcatgtcagtccgttgtttaacacaaattacctgctctcccagtgatcagtcacgtgcaaaaagctttgtccaattctttgaaaaggtgagattt

SEQ ID NO: 40529 - DNA, 982 bp, Homo sapiens
acatttaagatccatgccataaacagctgtgtgtttgctacattccaagtgctcaatacatattaactataataatagtgtgtattattatgtcctcacaagcttaaagcagtctcgctgaatctttaaccaaggccatggcagttagccagggaactgaaaagtgacctttcattcttttcttttctctttcctagcctgtcccttctggtctatgagtctcccacctaggaatcattgcttccgttttctatctgtccagctacactccttcaagctgttactgatgaagttgagagctgcgagaggctgttaggggaagggagacttcacccttctgctttgaattcagacaggattggcccacaagactcccactggttgatgatgaaaagtaggctaaactgcctgggatgagggcatttgcacggatatgaaagcgttattatttgtgacccaacgcagccaagtgagctaacaaggagaggacaaaactgcctttcagccgcttttcaaggaatgttgacatcatgattacttctactagagttcaaagtctagtaaataaagtgagtaaataaagaacatggaaaggcaaaaagtgttcatagtgaaattttaagaacaccttatattccctcattctcttatattctctgctgccctgatatttttcattatgtatgccaaataacagtaaaatgttggagcttcaaatcttgactaatagtttgcacctttgacaaataaatctggtcgtgtctttaggtatgttcttatagtaaaatgactccagctcaagcatatgggtccctggagacatttcagttctttgagcttatccacatgaaagaaaccatgaaaaggtaaaactgcctagcacttcccctttgtccattttcaaagaagctttttagtttcccagggcttaagataaccgattttaatgttcacgttcatttccagtcaataagatgaatta

SEQ ID NO: 40530 - DNA, 1369 bp, Homo sapiens
ttagatacggtagtcagggggtctttctgaaaagatggcacctgggttgtcccttgagaaagccataattcacccccttcctgacaaggtcagctgctgctcattattgaatctccagcgcatagcaggtgtgtggctccactgtaggtgttcaggaaatacctgcccagtggatgaggaagaactggaagaggagtccacggcagcagcggccggacacggggtgggagcgcccgccgtgcaataatcattgcaccaccgcacacctcccaagggatgggcaacttttccgagcgctgtcacagctgaggtcgtgtcctgagctcccaggcgccccgcggggtaagcaggacagccctctccctgcagcagggacgcggccacccccagctcgcctaccctctcccacggccctgccagcacgccgcgttccgatcggaagggaacaaggggtagaaagtgttgccgaaacttttcgggctgcgctgtcctcccccggcccggaggcgaggacgccgaacagccgcccggcgcggcccgaagctggcttccgacccggcggggcgagtcccggggtgcgcaggcggacgcgcggaggggccgaggtctgtgccacagcggagcggggccggggcgaggggccgcgccgagacaaagcggcggtggcggcaggacccgggtcggggccgtgcgcggcgggccccgcgccccctcacctgtcgagccagaaggtccaggacgagtgcagcgggaccccgcccggctcaggctgcagcgccgacagctgctgcaggccgagcggcggctcgggggcggcggcagcggcggcggcgcgggaccccggcggctcccgggccccggcggggggcgcggcggccgggggcagcgccattttctccgccccgcctgcaaggccggcggacgcgcggaccgcggggcgagcgcggctgagtcacccccggcccccgccccgccccgccccgcgcgccccgccccgccccgggctagccgcccgccgcccgccgcccgccgcccgccgccttcagggcctgggagccgcgcggaggggccgtgggaggcacggccgggccggggccgccgaacaaagacagacccacggagggatggggggccgatcccgctcaggcgcgggcccagcgtgggagactgacggcctggcctggagtggcggccggggacgggctagagggcccacgggggtgagagggaccggggaacggtctgcgggctggctctgcagccatgcaaaagggcagcgggatggagcggcaggctagggacagatggagggatggatgggacaggggatggagccccagacccacgtggtgcgagggaaggagggatg

SEQ ID NO: 40531 - DNA, 928 bp, Homo sapiens
gaaagaaaatatttttgtatagctgtacaatgtgtttgtgttgtaagctaagtgttaatacataagagtcaaaaagtttataaaatagtaataaaaaagatatagtaagccaagggaaagaaaaatattcttttgtagatttaatgtcgcctaagcgtccaatgtgtacaaggtctacagtagcgtacaataatgtcctaggtcttcacattcactcactgactcactcagagcaacttccagtcctgcaaactccattcatggtaagggccctatacgggtgtcccattataaaatcttttaaattgtgtttttactgttccttttctatgctcagatatgtttagatgcacaaatacttaccattgtgttacaatatcctacaatattcagtacagtcacatgccatagaggtttgtagcccaggagcaataggccataccatacagcctaggtatgtagtaggctctgccatctaggtttatgtaagagtttggactctgctctgtgatatttgtgcaatgacaaaactacctgatgacacatttctcagagttcattccctcactgagccatgtttaattgtattatccctaggggattgatgtgagcattaaaatttgagaagcgatccctaggctggagctcttcctccctggcccagatggacagagtcacccactgctttgggggaaagaagaaaacaaagcaggaagagggatgcaaattcctgactaccgagtttttaaaaatccacttgcttaaatttaaggcagaaatcatagtgcatatacctgcagaacacattttttctctgctgtcagataaattaagactccacccctgaaggagagaggaagaagagggaccatggagacaggagctaagtgagatcaagaggctccaggtcttgggagtgatgccattc

SEQ ID NO: 40532 - DNA, 646 bp, Homo sapiens
ctctgctcagcacgggtaagagaataataaatcggtcacttcactatccaattagcagctgttgctccccgctggaggaagaaaacaaacaggaagaccctgccctgttttgtttaggatcaaactcgcctctgtaccacctaccggagggactctggggtttgagttctggggacaagcgcgtgcccctgcctccgaatgagctccttttacgtgtgagtcctgggcacaaaaccacagccaccacaagccgcggatgcttccccagcgggccccgcgaagggaaactccgtgcaggggcaaagctgagttttgcaaccagtgagcgggagcccggggggcgtggccaggctgaggggatgcgttgtcctggtaacccgtaacttccagaaccatccatcctctggggacttcctctatggggctgaagggctttctttcagtctctcctcaagccctgtcaacatcacagcaacatattcccttaaattcctgaaaaggtgccacacttgagaggcagtgtagagtgtgaaccctggagccagaccacacaggattaggtgaaaggcacttagcttccgcgggagctggagcaagacatttaacccctccagcctcagttttcttatctgtcaagtggagatca

SEQ ID NO: 40533 - DNA, 2025 bp, Homo sapiens
cgagcgcaggaggttgaggctgcagtgagctgtggttgcaccactgcactccagcctgggtgacaaagtgagaccctgtttaaaaaaaaaactttagcctgtgaaaagatatctatatatgtatccaagggaaaacaacaaaacaaaacatcaggttgaatggtggagattgtacgctaattatccaagtacacaattctcaaagttccaataagattgtctgaattccagtcaaggtcctccaaaacttctaaccagaggtgtttggggacaatacggcagaagaaaggggatggtgtggtcatagcgtggaagtgaagtgctcctgcagagacgttcattatttccactgaggttgtatgttcattggaatggctagaggaggttcgttgatggaaattatgggagaatcaactttttcttccttgtacaagacctcttccaggtacaactctcagtctacatcaatgaccatatactagttgaagggactaagcagtgatgaagataatagccacattccaatgcagagaaaacagacattcacttctagaaacatctaactcttcgcaatgtctctcaaaaagaaaacgccatggaacatagttgagtactcttggcccttatccctgaacctatggtgagggattctaattcaaaagtgatttgcatccctatggtggataccttatggatgacgtttaactgagcctaaaccagaggaaaagtactcagtaaaagaaactttatcaccctcacgaaaggccaacagctggaagatattttgtacctattctaattaaggtagatgctttgcttttcttctggaattcctgcaggaatgaccacggggagaatgatgtcagtagatcatcatctccaggccaagagttgttccttccaaaaacaagaccccagaactccatctagaagggatcagccaagacttgggcaccttcgcctgcaggccacagttcagttgtgttagaggagaggtaagctgtgatgattttgaaagccgagatctgacgtggccttaaattcatgtgataacaagtttccagtcctggatttggaagatctccaaggaaacttctttccagagcatcaaacgaagccaagagagattacgacatctgggaccagcactgaacatttgaaggtgatgattgtttaggcaagtgatttactggtgacctgcagggaaaacaaagtcaagcagagaaggggactgacgtggcaggcagaagcagccagtgaaagctggtggtatgaatcatcagtggccccgagccaaaataagtacctaagagtgaagtagaagagattggtggaggggacaggagacctgtgttctggtcccaacttggccacttattttctgtgaccttatatgagaggctttgctgttgaactttttttgtctccctctatagcatagaagaggaagattaggtctcaacattcaaatctcaaaagccttcagggaccaggctggaaacatctatcatgaaggagattgggtgagacaataaagaggcagggaatgtgggtgattgcggctaaccaaaagagtatccactgctgggtatggtaggtcgcacctgtagtcccagttacttgggagactgaggtgggaggcttgcttgaggccagcagttcaagaccagcctggacaacatagcaagaccttgtctttaaaaaagtaaaaaaaatatatatatattagcaggatgtggtctcatgtgcctcgagtcccagctacttgggaggctgaagtctgggggatcgcttgagcccaggagtttgaggctgcagtgagctatgattgtgccactgcattccagccagggtgacagagcaagaccctgtctccaggaaaaagtaaaaatgtaaaaaagagtgtccactcctggctaaaatctttcaggtgcattattgctaaagtgctgcatgatgaatgtgcctctgttctgacttggcctgcagactgttatcttattcatccatgggaaccgaatgatg

SEQ ID NO: 40534 - DNA, 1356 bp, Homo sapiens
atcagtgttattgctgacaattttcagatgcactcactccaagcagcctttcttcatctttttctgagaggctaaaaaaaagttttgaatctgtgagatctataagtggtggagtgtgagtgggagggtgggagcaagagagagagagagaatgaaaaaggtctagacaggcaggtcatgcttaaatatcaaatcactcccagccacgctttggtcttcaataagagggtggcggatgtacacattgtgagtgctgacctttgaaatcgagagccagcttttatagacaggatctcagctcagtccagcagagtgagaggctacgtgcactagggaatgaaatttttgtctgccaaattagaccagccagagaccctttatctttaaactggtggttctatcaaccatagtccccacttagtgcagtcatagatctttgtggcctcacatttccttttcaaagccttcttgaatatcttgcacatacagatgacctttagactccatttagcaagttcttaaatctaccctcatcccactgggatctgggttggaatagtgtgaactttcccattaatttcagtgcaactcattgtctccatgaggcttctctgttgcaggcaacagaatccaactctggctaatctaagcaaagagaaacttattgaaaatacattaagggcttgtgaaattctggggagacttgcacaatttttagggactaggtttgacatggataggaactaaggaagcttcacagtatcaaggaagcagagaagagggctcctctctggaacctgaaagtctgatccaaatgcctctgactccaccatgaaaggcttctagccagttcctccttttgtactgggcatgactcaaaaagtgtacagagaaagtgcctgggtgactcagctgaggccttattcgctctctcccacctcttcccaactcctttcaccaaccagagtggagaacaggggatctggctttcccaattcaaagtggtaaccaagaattgccctctgcagaagatgctgtcaatacccgtgtgtatcctcttggcctcccccggaagttgcctctaggtttgcctctacacacattggtcatctctgtggccagtgggctaccctcaacccacgagggccaggatttggaagatcaatagcccagcatccttcaccctcaggaagaagttctgaagtgtgttccacacagtctctcagtgcgactgagccaagttgcccacagcagtaatctgtgcattaatgtcaataagggacattggcttcctccattccacgttgcacttcttagtgcttcctgagctctcctcccaaataaaccatttgcacc

SEQ ID NO: 40535 - DNA, 1730 bp, Homo sapiens
attttcactcaaattcttggagactttaaaaatagcccaaagctcatgatggatttggaggacctcctgtctccctgattccctcctgcgctgtgacagtgtcttgagggtttgtgggaaggatgatggaaggatcaatattttgggggaaaaggaattttgcagatccttcccttttcctcctcctcaagctccgccacctttgccctgtgccgcaaaccgatcaagggtgccactactacaagcttaaaaagcaccctacccctgtcaaacccaagctcttaatctcccactggagctgtggggccacccagctggtgctatcttatcagaggctggtgacagccacaggattcaaaagaggaagcggaggtgtcttatctgccttgctcgtatccggctggaagccgagctgttctttctcagtgaagggcagagtctcatgtcactgcccttggttgggaacaagggagaacaaaggtcattgccctttgcagactcaaaggcttagagggtcatgaagcaggcaagggcactgggacaaagaaaggctccatgctttaatcattagtaaattaaatccctgcgtggtagatacacctattatcctcatggaagaagaaatggaggctcagaaaattaacttgcctcaggtggcgcagtgagacatcaggatttaaatgcaagtctgtccaattcagggatcaagctcttaatgtttcggctattgcccttacttaatctttccaacagcccttgtccccattttacagatgaggagatggggatcatcactgaaactctcagagctccaggaggggccagtcagaactctacaggcctctctctgaagcataataacacaccagcaaagggctgcatcctttataagacagtgcatttctgtggggggcagaaggaagagaaggaggaagggagagagataggcaagacagggatctagaataatcattgtacacaagaggcgcaggcatgaacagcacatgcagactggcaggcaggctcctgcttatgctgaggctggggaaacttggaaggggagggaagacatcagagcagtaataactcccagccgcagctgccaagctcccaggatttctagagatgaggtcatgagaagctgctctcttttgttctcacggcaaccaggcctacccccttcccactctccagccccagttgtactaggaattggtgtgggaggtgggtaggaatgtcaaacagaggcggtgacagtggctgcggttaccatcactgtccttcaatattcagatggtacccagaggtaaccatggcaaccggccgtgggagcagtcgttgaggaagatgtttatcccacccagtgggcagggctgagggatgggcaggccacaccagggcacccagccccaaggagacagctccgtgtccactgcagccttgcttgtggaggttttcacctcttactccaggcttctgggggtgcaaatccccattctaacacatgggcaaaacttggccaagttcttaactcctctgagccgtggacccctcatctgttcacagtaagcatgtgatgatgatgacgccacgattgttattattcaaagaatgagctgtaggactcttcaatgaatgagtcagatggacctggctaggaacctgtgtaactgagacaagcagctctcctctctgggccccagttctttatctgtaaaaggtgaacccca

SEQ ID NO: 40536 - DNA, 1457 bp, Homo sapiens
ctgtggatcatggacctctgggtcattcacaaatcctggaacttcagaggtaatttgggaaggccaaggtcagcccacttaaaacagttctctctctttctctcccaatttgaaattcctactaaccccagagtgagcaagttacaagggaacatttgttgtgagaagacatggcaggccaggaccattggccaatgttgggccattcaacatgtgtcattgttggaaatgggacagatagtctaattctctagtgaggagatttagaattatgtggagataggagaaattcatttctttgccagtaatctagctcatcctgttagaaaagccttaaaagtgcatcgtaacagagacagctgagtctgacacccagccctgcatgggtaaagtcagctccatttattggacctagatgtaaattttggtaaataggctcttatctttcagggagggttttctgagagaccctttgcccagcagagacctcggggaaaccaaagatggcaaagaactatccactctgttctctggccctatctctcccaacttccacctttgctcaggtaggtggaaccttcatgtaaatggttccctgcttataatgcacattggaattgcccagaacgtctgttcaaaatgcaggctccagggtccaatgtccaggttgagaaagctgatatagcacccagggatctgcaagttaatttttaaaagaaagtcacatggggcagtaattctagcaaaccttcctcctaggccgctgcagagctgtagaaacccagttgcacagggctttatgcctggcaagggcaccccttgctgtgtgcatcccagaggaggcacgtctgaagtctgcagaggaagcttctatcttcccttccaacgaattcctgctcaggccagcaaggaagagagtttgagttgtttatggggtaagaacaagaaatctgttctgattgcacttcacaaaactgctttacacaattgtgacttgctttaccattgtcatttactgtggtgatccaaatgaatcagccccagtctctggtttcattccgccccttaagccttcccaggatttagtgctcctgagtccctttccactaggccagcaggcctggatccctgccgctaggtgcactgtggaacatttggagagcttctgttataatgccagtgcccaagctccaccctgaatcatggaagtcagaattgcgagggaggagtggggcccaatgtaatgctttctagccactccctgggtgctactgatggtagtcagagttaacatttgtgctaggttttctagcctggctgcacattggactccccagagcagctttaaaaatccagatgatgcccagttcccacacccaaagagactacattagttagtttaacattttttccccagcaatggagtgtttctaaaatcttgctcaaagttgagagct

SEQ ID NO: 40537 - DNA, 4790 bp, Homo sapiens
atgcatgctctagtttgagaagcactcccgtagtgtgcagaggaatcacctaagaagcgatattaaatgtaagattcctgcacttccctgcagagaggctgatcctggaggtctgaagtaggacccaggaatctgttctattagtcagcaccccaggataaaaatggttccagggtcacacctagaaaagtctagtagaagccatttgcccgcaaaggacaatgctccatctggccacgcatcccacagcctgcgaggcctccagtcttccctcccaggctcacacccccactcacaaagcttctggagtattaagccctttccactccccagccttccctggaaaatgggctaaaccaatccacagggggtgaagggcagaaccggtgtcccagcaccagggttctgttgcagcttcagaagcctgtatttgtggacagagctcttccgaaggttccaggaggatgaaaacatccagtgactcccagatgttgctgggctggatatatttatttctaataatgctcctggctccacgcttccagatggacagtcccaaagagaatggtttgtttcctttcgtcttcctccacgatgcattttacgattgcagagggtcctgcttgccatgtgtttgcttctaatctgtaagtgcttttccacgggcttggctcttggcagttcccatatttaccgaggagagcacacgccgtcagaggctggctcccgtccagcctcctccagagttcagtgtttggaggttggcagcagatgaagaagcatggcctctctgtcgccggctcaaactttcagggcgttttgcccctcgcactcaatttctgttatctttgaggggcttgccttttaatttgtttctccggcagccatgctaataaatgggccacggctgaagagctgtctgagaaacaatagctgctcagttccatcagccaatttgtctcaggcaccgtttgttatgaatcctccaagcccattaacccctgaacctgggagatgctatctccccagggatgaattacctttatttccagacatgtgtttgctcatttagtaccctattcataaaagcagccctgttttggcactgttttccagaaatgaaagggaaggacacatcatttgggaagagtggctggccatagcctaagaatgatggctgacatttactgagcagtgactctgggccaggcacaatgctaagtgctttttcggacattgcttttcagtccttgccacagtcccgagtcctggacaaaatcatgaagtgcattttgcacagggagcagctgaagcacagaggggttaaatgacttacccaagagcactcagctgtaagtggtgaagctgagagttgaaccctggtacctgtttattttaagtcaactctctcaccagctggccgagctcctccccttgagctcttcccacttgggctggggacaaggagggacatttgggtcacaggaaagagttcattggcctctaatgatcattaccaatggatttcactttcggaaaagaggtttgttgacaaaagtgccacatctgactattttgaatttgagtgcttattttaatcctgaagtttaagttacacacactgttttattcatgtgagtgaaaggacagaaaattgtacttaatactgcacagatctgtcaccattcagcttgaattgatatctacccatatctactcttgaaagtggtaggatgcaaccaggtctcctgatggctttgggcggtgcttgttctgaaaatcttagaagacagaagtgattcatcttctagaattagatttcttattgaagttgagttagtctgcataacaaaactaaaataccattgtttaaaacacagtcaattcccttacaccaggattttttctttagcagtgttctcgagcttaacactttagaatcaccagataaatttaaaagaaatcatgatgcctaggctgcgccccaaaagaccagttatatctggatctctgggagtgacatccaggcatgagcatttttcaaagatccccaggttattccaatatacagtgtggctgagaaccagaactctgacataaagcagctcctaacaattccatgataatggtgccacaaagtcaacccaggttctttccatctttctgcacttccaccctcaccctcagcacctggcattcattatcaagtttatcacatggtccagtagagctgctgaagctccagccatcacatccagattccaggtgggaggaagacagaaggaagggaagaactaaatgatgtaatgcctagccgtgatggcctaaattgtgtccctcctaaattcatatattgaagacctaacccccaaggaccctatattggagatagggattttaagaggtaattaaggctaaatgaggtcattaatggtgggatcctaatctgataggattggtggcctcagaaaaagagcaaaaggatctttctcctcctctctctctctctctctccctctctccccctccctctctctctctccctctccctctcctgcttctctccatgcccccactttctccctctctctgttcccttcccctgtgtgaagacatggagaaaagcaaaccaggaagcaagaagcaagccctgaccagcacctgaccatgctggtaccctgatcttacacttccagcctccagaaccatgagaaactaaatttctgttgtgtaagcttcccagtctgtggcattcttttatggcagccctagcggactaagacagcggctgaagtcttagtggctgaagtcagcctcctttcatcattcttcccagaagttccagtggcactgctgtttatacgtcattagccagacatcacctggccaccactacctgaaaaaggggtgggtgaatgttgtctctttgctgggttcatcaccatctttaataaaatcaggcttctatgaccaaggaagaagggacaaaaagcatttaggtggcaaccagcagtctctggtttcaatgccttgatgaaaaagggagatggggtgcaggggtttgggagatgagagtgagcaaatgagagctatgagagcgcctaggagagggcactttggaaacaaggaaattaagctctggtaagctctaccacatgttagggagtgccaggaacagacggcaggatttctgcgtgggagtttccatgggacccggcctccccaccgcctctccaccacatcacatctgttgttaaagaggccccagtgtagagtccagctgttggaagagcagcccttctatcggcttggccttgcaatcacaaatcagtttgctcagaggtccctggacaagcacagtgactcagacaagcagcgtgttttttcaggctttgtcacacacagggaatgaactctttggcagccctcttctgagccagcataggaagggcttgggaaagctggagaaatccgaggtgcacagacatctggcattgcccggaaatacagaccaggagcctgtctttgttcagtgagcaactatttgaggatttacagcgtgctgatgtgtgtgctgagaggacagatgaggtccgtgctctcacagagcttatgttccagagggatgaacaacaaacagttgaacaaataagataatttcagatggggcaatggggaaaagacggggccacattagataagagtcagatggttctcagggaagcaagaggttttgttgttgttgttgttttgtttgtttttgagacagtctgctctgttgcccaggctggagtgcgatggcacagtctcggctcactgcgacctccaccttctgggttcaagcgattctcctgcctcagcctcttgagtagctgggattacaggtgcctgccaccacacccggctaatttctgtatttttagtagagacggggttttgccatattggccaggctgatcttgaactcctggcctcaagtgatccaactgcctaagcctctcaaagtgctgggattacaggtgtgagccactgggcccggtcagcaagagttaattgatgaaaaagaacccagatgtggagagaactggtgggggaggtggcgggggaagaatgttcccagggaggagtgaagggaaagaggttggagtgtttggggagtagaaaggaaactggggggttgtggggcagtgtggacaaagagtgggcagaacgtggggtcagagaggaggcagggactgggtcatggaggggtggagacagtatggaaagactgaattttcatttaagggcaatggagagctactgggcaaatttaagccagggagagacaaccgctgcttactttttaaagatcactctagctgccatgtggatagtgcatggcagtatctggctgtttatcagaaatatttgccagcctctggactggaagggaacacagttgatggggatatatgttggttggggagacactgggccaaccagatatattggtagtttgggtgcgggggaaagggaatgatggaattcaaattttaggcttttggcttgaggatcttggtgaatgacagtgtcatttactgagatgagaagatcatgtttgagaaggaaaaccgagaagtcttttggacatgctatttggagatgcctgatagcatagggacaggcagagcacagagcatctctctgtacatgggtccatctgggttctcatgccattcagaggactcagtggctattcagaagttactccacaagggagccagccttctcacatgggggaacatgat

SEQ ID NO: 40538 - DNA, 1429 bp, Homo sapiens
tgtagggtgacataaggagccaaacatgtctgcacacaaagagatttactgatgcttaagggccatctggaccccactggagccaggacaatggggccaccagccaaactctacaagaaccatttcgaattcagcatatatgaaagagagaaggctttcttctcatattgccactactactacagctggaggcttactgtgggcggtagttctttatcttctcattatatgctcttccggtaagcattgaaagacatagacatttctaggcacttcttatctgggatttcctctactgcattcagcaccaatagatcagacaaatactcaggatgacatagtccctgcatggaccagatcctgctgccaactgaatacccatcccacccaccatcttctttcttaacataccttgattttgttcacctccttcagagcagctgcattcttcaggagaagctgagctatccacagagagtgactctttttcagtgcaaatcaaccatgataatgccattgcctctgccaatatgtgatttagaaatggatatgagatgcactgctggcccgggggacatgagaggccatatgggaaacacctaaaaagagccttctttattgtgacccttgagctcctaagaggcacgagtagtggatgctagctgtacaacccagatcctctttcaagacaagcactttccccgtacctgccatgagtgctttatctgaggtcaccccaccaccacctactcagcgtcagcacacatccagtgactagtcaatgcagaggtacaaaggtccagcctcttgccacggttttggaaactctgaagctccattccagctccagagggccctatgagttcagctgaggcctctgttgcagccgcatcgtagctcaactcctcattttggccagccttgcctctctcactccctaacagctgttgttcctaagaacattctccaacaacctccctgcacacaaatttccatttcaaggaactggtgttaagacaacatatgaggagcaagttcccttgttcacaagcagatgttgctttccacacatgcaactacagtggccatcttgggaccatgaggggaaccagcctaagaagataagtccatgctctgaggacaacagaacaaaaagatagaaagaacctgggtcttcaatgatgtcattgagccactaaattaaccaactctagaactgccctacttctaggattctggttatgccaactaatagaagttctttgtcttaaaacctcttcaagttgaatcttatgttgtttgcagcccaaatcattttatattatatactacatatcagtaggaggcaaagggaaatacttcaagccaaggaggcacccagaacagcatggattccaaaatccagcacttaggtgacttgccagagtac

SEQ ID NO: 40539 - DNA, 1394 bp, Homo sapiens
aaggtcttcacctgttgtacatggtccatgcacagaattcaggaggtctgtgaactttggtggaaatacaaattatatcttccttttccttaacatttacctgacatttagcactgccttccattttgaatctaggcaataaaccacagtactgttagcagtgcctgtggctttttcagcaatagatcacttggcgaacgccccacagcaacaaggggaataacctggctccagagtcaaagtctgctctgctttactcagatgcacatgttaattcacaacactaccaccctgtgtcttaattgcttgctcacttgatcaacttctcgtctagattggattacttctgaggccagaaactccctctcattcatctctaaattagtatttcagcaagagcctggcacagagtagaggttgataaatgtttgttgcctgtggtagccagccttctgcaatggtccctcgtgagccctgaatgtctgaggcaggtctcagtcaagttaggaagtttattttgccaaagttaagaacgggctcctgtgacacagcctcaggaggtcctgatgacatgtgtccaaggtggtccaagcacagcctgggtttatcaattttagggagacaggagacatcaatcaatatatgtaagatgaacattggtttggtccagaaaggtgggacaactcaaagcaaaggtgggacaactcaaagtggggaagggcttccaggtcataggtagataagagacaaatggttgcattcttttgagtttctgcctagcctttccaaaggagacaatcagatatgatctactgagcagagggatgactttgaatagcatgggaggcatgtttgccctaagcagatcccagcttgacttttccctttagctttgtgactttggggccccaagatttattttcctttcacaccctaatgaccctacctcctgttattcatatccttggcagtgttattcatgtcaggagtaatctttgacccttgagtgtggaccaagggacttgcttctagcaaatagaatgaagcaaacatgatgagatgccatttccgaaatcagattgcaaaagctgggacttctctctgacattctctttctgacttttcttgtctttttgccctgatggagagggctccctggcaatgaaccaagggaagcctctgaccaacagccagtgaggaactaaggtgcttagtctaataactcaggaggggttctaccaaaaatcactgagtgacttggaggtggatcctaccccagctgtgccatcagatgagaccacagtccctaagccagcatcttgattacaatgtataagacaccctgggctggaggacccaaccaaaccatgaccagattcctagcccacagcaac

SEQ ID NO: 40540 - DNA, 2008 bp, Homo sapiens
tcctcccctggagattctgattcagtgggttattttgaacacattgtccagaaaattccagtggaggtgcattcggaaaacattagactaatgccgcttagcaggatggcctcttttctggaaccagggcctttgaatggtggggctctttgaaacccatgagagtgcctctgcagcactgctctctgagtgaccctgatgtgtgacccctgacagagccattcagatgaaggctagcgtggatatatggtgacctccctgggccagcctaagccaccctcagcaaggactaaggaatggaaattccaggatgctggctgtagtcacatggaaagcagtactttctgaccatcagagccactgtgaaacaacagaatgtggcccttgggaggaagggagttccccatacttggagaaacccaatgatcaaaggatgagctttgtcaaaggaaattgtaccttttacttgactcagatgcccgatagatgcttcctggaaggacaagagggttgtttagagcctcactactcaaagtgcggaccacaggccagcagcatgagcctcactaggagcttttaaagacctctaacatcaacttcatgtcctaaaattccagccaccttgattcaaggttaggccctggcataaagacccttaaaatctccccagtttattctaatgtaaagccaggattaaaagccagagagagccagagaccccaagggtaccatctaactaagataacaagaatctctggctgggctggtggggaataaacttgtgagagaagggaagaaacatttgtgaaaagctgcagtctctttttcactttcttttctgcttacttcagcaggaatttgtctcccagctgccaaaagcaaaatgactcagagaagtgacatgacctgctcaaggtcactccgtggatgatgcaagactagcaggcaagaatatctttggattcctgctccggggcgtgacgacatcccgggccactggggtggggctgcaaagtattaaaaaaaaggaagaagacaagtttcccacccctagatacagcctggcagttaaagcaagtcaaaatcaaagtacagcagacatagacattgtaataaacttgtcttgagtgcttacgcgtatatgctaaccactgcattttctttatgtgtgtcacatcatttcatctctggaacaatctcatgagagactgttaggtcctattattaactcatgttttactcatgaggacactgaggctcagagtggtgcagtaatttgcccaaggtagcacagcttgtaggtatgatagcagagccgagatgcaaactcaaattcaagaacccaaacacctaagcaccgtggaccactgctcttgcctaaaaacaggaagcacagagtgagggggacctctgtgaaggctgacagacttaggaaaggcttcctgggggaagatgcctttctctgagcttggctagaatgggtcaaaaaagagtaggtgtgcggggcagaggtgaggctggggatggggagcaacaggcatcaaaactgagtgcaatctaggatttaaaattcaggtattcatagctggcatggtggcaggtgcctgtaatcccagctactcgggagcatgagacatgacacccactggaacagaggttgcagtgagccgagattacgccactgccctccagcctgggcaacagagggagactccgcctcaaaaaaaaaattaaaaattaaacaaaatccagctattggaggaaagggtgggctggtaagccctttggcagaaagaagaggcagtttttgctctgaagccctagagaaaatgaattgctgaaaagcagggatggaataaaatgtgtcccctttagactgctggatgggttctgaggtcctgtgagagaggcaggcagggagacaaggagctgaggaagttgtagaagaccctgggagatgcaggcttgaggagcttcttcaaagagcctaaccccagccacctatgtt

SEQ ID NO: 40541 - DNA, 812 bp, Homo sapiens
cgaccagcaggacgagaaaaccagttcaaagccttacgggaaagaccaaagtaactgcattggaggacagaaagattgctgaactaagacagcaaagtcagactcagaaatgatgaatgtcctgagggtcaataaaatcgtattcttcgagggtatcttttacactggacagaaatcattttcatgactactggactgaaatcatttgcaagttatcaatcttccagaaattagcatcacactttccagagtctgggcctgaaccggtagtaaagagtaaatcacagaaaagtatattcccctcccttgagcagggtcagcaaaagtgctcgataaaggggcagacagtaaataatcttcagctttgtgggccatatggtctctgttgcaaccactcaaatgcagccgtggttgcaaaatgaaagcagcacagacaatctgtacgcgaatgggtgtggctgtgttccaatagaactttatttacaaaaacaggcagcagccagatttggcccgtgccctgaagaattaaattgccattgggcagggcctgtctgacagtgctttaatgtggcattcaaaggacacgcagtcatcttcttccttatttcaaagtttcagatgctttctcttaacacatagatatggaaaccacagaggggaagcaactgggcccaggggacacgaccatgctgggcttccagccataaattccttctgtctcctggttctttggaagccaagacacggctggtctttcccaccaggagggcaggctgggctaaggttgaagcagcagagttctcacttcccca

SEQ ID NO: 40542 - DNA, 1204 bp, Homo sapiens
gagaactttgggtttcactctgtcattagaagccattgggggttctgagctgggaatctggtggtccaatttacatgttttaaagattattcatttgcagagcagcataacggttgctggattccggggccttgattcaaatcccagcagagtctacatgcctagctatgtgactgcagcaagctgtataatctttgggggcctcagtttctcaaccataaaatgggatgatcatagcatctcccttctagggaggcttaactgagtgaatattcatgaagcatttggaagagtgcctggtacataggcaatgatccatgaaagttaggtaacttaagtcaataagaaagtactcactggatagtccctgtcttcctggggagaaagcgctgccagccaggggctgctttccgctttgcaaagctctagcccctcgcctggctcaatccaacaagtaattgctccgaggcctccttccaaatgggccataaatcagaggccagggtctcctgttaccagcggctggtggtgaagtccctcccccgggtaatgggaagcagatgttggcagccccttctggcctccagaggactgtgtacctgggctgctcacgtcacagcagttggagcaagaatttccatgagcttttaaatcgaaggttgtcaaagaaacggcctcctagggcttccagatgttctgcggcgtgtttcaagcaggaggtgggcagctaatgggggccttcaggggctgagagaggaagagcagggtcagggataacactaggttccttccaaggggcctgaccagcaggcaaggtgtggggcctgagaggtggcaagctgtcaagaaagcagcacaggctttgcagccaggaggacctggttcaaattctgtttctcattttctcagcctgtgccctgaagtcaagggtaagtcacctttccagaccccagttttctcgcctgtgaaatgggtgtgatgttacttatctcacacatatttgaaggtgggaagtagtttaagttaaagcacagtgtctcaggcatggtaaatgctcaaaaaatgaaggtagttattagaagcgagctatgcacagagccttgttacccattaagtctttattgtcgctggacgctgagcactgtgacgggcaaggaagtgtagtcacctcacaagactttctacgtttcctaaggccaaggcc

SEQ ID NO: 40543 - DNA, 2885 bp, Homo sapiens
tgtgtgacgtgtggcatatgtgatgtatgtggtgtgtgtgggtgtgtatatgcatgtggtatgtgcacatgcacacggtgtctggtgtgtggcggggagtgtttgtgtatgtgtggtgtgtgtgtatgtgtggtgggtgtgggtctgtatgtgtgtgatgtgtgtgggtgtgtatgtgtgtatatgtggtgtgtgggtgtacgtgtgtggtgtgtgggtatgtgtgtggtatgtgtggtggtttgtgactggtgtgtgtatgtgtgtggtgggagtgtttgtgattgtgtggtgtgtgtgtgggggggagggactggcactgtggaacaccaggacaggatctgagtgtgggtgggttaggttcacctatgtagagcaaggcggaagtgacgaggaagtggaggagcaagaggagagggaggaaaaggaagggggaagcgagggaggcaaaaggaggaggccagcgattgcaggggtatctcatactctcactctcccctacctggggacagcaggggtgttggaaagggcactgggggtccctgctctgagaaaaccctcatggggcatccaggtggtggactggaaaactgtcccaagggtcttctgccctctctccatggccgtcagccccatggcctctctggctgacaagtgggttcccctgaactcatatgtcaacttaattgcctccccctgcccctatccttcctgatgaataggagtagctggctgactggggaccacttattctggacattgctgaagagggtcaaggcatgctttcggtttgatctagggtttctgtcagtgatcgctagtgattcatgtgatactgtaagaagtcagtcagggccttggtgttgacaaggttagatgattgattgactgactgactgactgactgactgactgactgatggtcactgtgggtttcactgtagctggctggctgtgatctggactgaccaggccatggactgtgggagcttgtgactatgactgggccaactgcaactgggctgatggattcagtggattgaacatgactggtgaggagacaggttgacaaggagaccaactcattgaccacatgcatgatggactgactggccagttgatgacaatgggtttggtgtatggttgactggttggttgtttaattcaaactgactggataactaggcagcttactatgactgactattgtgactgcctgcctggctgactgagggaataactgagtcagtgtgactggcaggctgattcagactgactggatgtctggatgactatgatctcctaactgatagccgtcagtgatgatcttgactgactgactagccggctctgggattggctgtctcttccagactgacttggtaaccgtgggtctgactgtgacccctgcgtcttgactgaccgccttgattgcatgcctgacattttgagatcaactgactggctggttgcctggtgtttcattgtggctgtggcacagcctacggctacctgtgactaaccatgaaactgactacacccaactcacaggacagaccgggtggactgaccacctgccttagtcatggaaaactgactctggctgactcaactgccagagactgactgagatgaacaggccagccaagagacagctgggtgactcgtggtgagtggctttgtctgactggatggctgtgacaatgtaactgagtctggctgtgagacaataacctgtggattgactgacttgaatgtgttgactgggtggctgaatctgattggctatgtgggtgactgatgactcctggctgactggctaaccctgccttgactgactgattgatgggctgacagatcgagtttgaccaggcagcaggagacctgctgaccacggctgtgactcactgtgtgagcggccatgtctgactgtgtaacacaatctgaccaagagacaatgactaattgactgaccaactgactgagattggctgggtgtctgactgaccagctgtgactgcaactcctgatgtgagtgggcgttgactgggtggccctgactcgtataggcaagtctggctgtgagacaacagctaactccctgactggcccagtgtgccaactggctgactgcttgaggctggccaacagaccagctgaccgtgcctgggactcacggtgtgcgtggccatgcctcactgtgtggccctggctgtgtctcggagtctgactgtgagacaagggcagactgactgactttcctggccaactgcctccaggtagcctgtcaacacagtccctacccttcccaaaaccattaaagtgctgcagtgggagctggcccagcctgaggggacagagcagcttctgtggagcagcagggacaggaagagggaagcaggagccgctggagggagaagaggagtaggccctgcccaggaatgggccacacggaaagttctccacctcaccctggcgggggctgggtcacaggcacacgttcttggagctgtgttttggctctagtcttatagctcctttgtttgggggtgaggggggaggggagctgggggaacctataaacatattgagccaataactcacctacaggactccaattatagggctgggggagagaggatagctgggtgggggtggggcgggccacgggcagccatttatggggcttggattggggccaaacgctgccctagaaaatccaggtcttggaatgcagggctggagaagtcttaggaaggagcaatgtgtctgtcagtcacacctctgttaccgccaccattttatagctggggaaacagaggcccacagccctcaagagcccagggcatttcccacacccggccccccctggggctgtcccccag

SEQ ID NO: 40544 - DNA, 1949 bp, Homo sapiens
aaatttctcagacaagagaaaagtaactcgggacaggcaaattaaaaccattctacacatggcaaaaatataaaacatctatgtcctacaatccatagcgatagtactgcttcctctcttccccagccaataccaataagccaatagacacaagtgtcaaataaatccagtgtccgtttgaaataaaatgaaaacctggaaaaattccctcccataaatcatttagcgaacacaaggcttttcacccaacacttaatacactcaacccaaaaacacacacaacccacccgcaaatacaaaaaaagccgtaatcaacaagttggaaaaagggcagaaagtaaggctcactaccctctcacttaaaaaaaaaaaaaaaaagtcctttaacaaaaggtaacacagatcttcaagtacctggtggaggtgcctttcctcacatcgcagatgctgcatttaaaggcttcagcactgtttctgaaggtgcagacgctacaatcccaaaacccttcgtctgcggcaggtttcgcttgtctttttggccttccgaggagtggagagtgggggaaaagggagggaagaggcagggagcaggaaaacgggggagagacagcaaaacacagacgcgggtgagccgtcgtaatttcgcaggaatccagtgctggaaacttcgctcgggagaccacccacccaccctttccggggactggaagagagagcgaggaagggaaccgggcgcccccactggcaccctgcaagccccgggcccgggccggatagcctcgcacaccaggcggtggcggcggcgccccgggaagggccgcggcgggcgcaggaagcgggcggacttgtggacttgagcgtggggctgggggggccgggaggggagccgcgggccggatctggagggggcgcgcaggggcagcccgaggccggcgacggggagtgggccggctccttccctctccactcccaagctcgcgccctccctccctccccacctggttaaatccatcacagtctccggacgagactagtccccgccagcgccgcctccgccgagtgactgacgaggggcggggcctggcgccgcgcgtcacgcgccgtgcggccaatgggagggcggcggccggcgccgcgagggcggaggcggggcgcgggggaaggcggggcgtggcggacgtgggccgggcggtcggtgtgcgtgcccgggagtgtgtgcgcgctgggggcgcgcgtgcctgtcggtggccccgcggcccggcgcggcggagcgtgcaagcccggcggggcgcacgtggccgcgcccgggagctggcaactggcttcgggccccgcacggcgccccgtgaggctgttgccgggaccccggccccgaagccgccccggggaagtagttccacgcagtttgcgcgcgccgcgggagcttgcaacagcctcaccgctcgcagcgcctcgaggcttgcagtgcccaggggccgacaaggtccacctttggaccgcgttcccccgcgcccctctgttcctctgccatgcggagctttgtatttgcctcttctgaagtccctgcgtccggccgagacgctggcccgaagccccactccctgtcaggcccctgtcgcgggagggaacagtagagaaagggcgtggcataactaaatgcccccaggccagactctgagcttctgctggcggactcctcctgggatcctcctctcccctagagtctaaatagggcgtttccttagggaagttgctattcaaattctggcgaccacatgcccgcattaaaacctcgtgcctcagctccttcatctccaaaatggggctcatcctcccagggttgttttgaatattcggagaaatcaggcatggaaggttcgctgatggatgcctggtattcacgaaggaccaaaacaagatattgggtattaggagctattataactggg

SEQ ID NO: 40545 - DNA, 1701 bp, Homo sapiens
tgatacgaagaggcatacaaagcctaaacacaaagccttcagtccacagttgctaccccatagctgttgaggaaaaagagagcagcctagaagagggtcttagaaggagtgatggagaaagctagaggatagccaggatgggatggtgtcattgaagccacagggtaagagaacttcaaggaggaaagagttggcaattatgtcatctggctgaagagaggtcaggtcagaagagggctgaaaaatgccctttggatttagcaattagaaggtcactggtacccttgacaagaacactttgagtggagtgctggggctggaagccaggaagcaggggtcagcggtcaagcccggaatccaagctgcctggctgccaacgtcagtgttctctttgctatgccaggagctgcttccttttgagaattcccattgaagtcatgcctcaaaaatactcatttggagagcactaaacagtacgattccacaatctgtgaatgaaaatggcccctcttcatctttttaaatttttttgtgtggataaagcgaaggtggttgtttcctttcattagaaatatgttatatccttttggagggtttgtatttaccatttcattgatatattcttctttcttatataacatattttgcaaaaataaaaacaaacaaaacaaaacccaaacaacatatgtgctttgcatgaaactcagaaagttcaaacccctcgctctgtgtacgtgtttgaggcaaagtgtgggactaggaaaactctaggagaaccgtgccacttggcaaatcctcctttaacaaatgatagcagttgcatttaagattcatttggtcatacggatcatgtttgtcagggctgtcattaaaagcctaatatttcccccattgcagactgtctccgagtaatccaaacgtgggcagcagctaagcacggtcaatttcatgacctccttcctgctacccacctccccctcccagctatctcaactcccaagtggatgatccctcatccctagcaacaactgcagctgctactgtttcttgactctggcgaagaaagtgggcttggggccaggcctactgtccagggctcccagtggaagatgctagaagagggcagcgcacactctctcaccgtcagtgacccaagttcatcaccttgaccaaacatctggattacaacacacagagttcaaaggtccagagtgtgtgtctgcacctggccaggctgtttaaacggagctgacttaaaccaaacaccagacctcggtgctgttatttatgtggaagattggatgccaagtataaataataactacagcatcttctctccacaggctttgtgattaaaggatgcatataaaggatgcatattcaccatctactgtgcatgaagagctacccacctctactctgagtaccagactcttctccctagcaggcagatttcctttctaccaaccgttttttaatgtttgtttgcctgaatagtatcgagactcccttctgctgtggagccctcactggcctcttcatttcaggtcatcaggtggagagcacgctgcagagaggactgttcccatgcccaggagaggcttgcgagtgagctccgtgtaatcactcactggcagaatgcagtgcagggggctggggttacagtcagcgaggagcgaggcacgatgatgctttggagtg

SEQ ID NO: 40546 - DNA, 1453 bp, Homo sapiens
agccaggatggcactgctgcactccagccagggtgacagagcgaggctctatctcaaaatattttaaaaagtaaaaaataaataaaaataaaaaaagcaatatagcatcctggttcttgagttttctggactgtccctacaccgggggcttctcttgctctagagatgtccttgctaatcattgctctcctgagctgcctctgtttttctctggaccctctcctctcaatcccttcctgcttcccatctctgtggccttggcttcttcttaacaagcttgccacccccaacttcaaattcctgtcaatttgttgtaaacaagctacctctgtttgtgtcttgccttttcccaccagggaggtatagacatggttaaagacacggcctctggcactggaaggcctccttttcactcccagctaggcattcttcaaatccttcctatccctattttacagctgacaaaactgacttccgggggatttggttttgctcaaggacccagggtccttcaggggtaggtaggaaagatctgggacaactcccaggcctcttccaggcagaaggagaagtaggttggagaatgctagttgagggcacctgcaaaagctaaatcaagactgcctgaagcttaggaggaaggaaatgtgtgtagatttagttcctagagggcttataaataggaccattgctcatttgtcctgaaaagtcgctgggcaaccttcccgaggtgaggggtgggggcggggccacatgccctcctgaggtcatttctagcttgatgattcacacggcaaaatcccagcgtgggttcagcgcccctccccgcacccgccccgtgtactttcattttgcattatgatttttcactcaagctgatgcgaacccaaattgatgtcatttccctcccaataagctcttgaccagaaaacatctaattctccatctagctgggattttttttttttcactcagtttctataaaatcatgctgcagtttgcctcgatattttcttctcttttaaagatagcatttgtcaaggcttatcttctggtcgtaaaactaatatatatgctcactgcaaaagaatctggaacacaagaggcctgaaagaagaaaataaaaattatatatagcatcacacacgtagacaaacaggaaagatcatagtatgttttctttctgtcttccccttgtatatatatctttaacataattagatcaaatgcttttttaaaaatctatttaagagtgagagggaagaatcatagattctggcttcagcagaacatgtgttttaataggttatatttattgagggctgaaaatgttctaggcactttactcagtgtgtattggtggaatgtcagccatttatgttcattgcttttcaaaatcctcacaacagcccctgagaaagatattactatcatgcccattttacaggtgagg

SEQ ID NO: 40547 - DNA, 1261 bp, Homo sapiens
gagtacggcccagaaatttgcctattttgctaagttgtcagggtattctaacacagatgaggtccgggaatctgcattttggtaagtccccaaggttatttggtgctggtaatctgtaaaaatacccacctcagaactgacaataattgccagttggtatggcagtttagaaattccaatacatttgggaataactaagtggttagaaggtcagccaaggacagaggccacaataaagtagcacatgggcacagctctccatgaacacccacacggagagagggcagcaatcacaacacgttttctactctcctggaccaagtccctgggagcttctcaacacaacactccaggcagccacctctaaccattcacagttggcgtaggacttgtgacctatttgcaatccttaacctaaggtcacatgcccaggaatccaccagttctgacatgtgacagtgctttagagttctggccagacagagatttcttcagcatgcactgagaaggagctgggcacagctatgatcaattttataaatgaacgtggataatggggtggaaagcagggataggatcttggaggataggaggtgttcttggctagactcatccctgggaaactttggtctggttcaaatgttgagacactcaagtaacaggctcaggatagaggcctgtacttccccctgatgaggaacagggtttaggaggtgggccagggggtggccctttgtttagttagccttttctggttcttcatggagcttgtaggaagattgccaggaccctctgtgagtttccaggcattgtctgggcccctcttgctctctttttatgggatggtttatgtctgctcctcggccctgggagggaacccgcacaagagttgctaagcagctggtggagcctttctgttttaagccaggacactattgtctctctctttatttcccataaggagccgtgacccaggtggttactgagctgccgccaagtctgcagtgctattggtccagaaaagggcaaagagcgaacagagccatcaaacagcgtgaggagcaggtgaggggtatgagagcccagtacgaataactgtggcaaagcctgggcctcacaccctcgtgtacacatcacgcccctgcaagttcacctccactgttcagggtccgatcgcctggaggatgggtgtggcttttcacgcagggacccgcaggctcagacctatttccccagcggcttctgtggactgcagaatcag

SEQ ID NO: 40548 - DNA, 1284 bp, Homo sapiens
ggattacaggcgtgagccaccatgccaagccaataacaagcttttaaatgtgcctcccttctccatgatagcaggtgcgatcacctagtttctgaatacattcatgagtgtctcgacccctttttaccttatcacctcttggacttgtttgaaaagaggaaaacaggcccacagtcaacgacggcttcctgtcatgaagctgaggccagaactggagttgctactcttggtcttcagcaaaaattcaaatgcccatgcaatcctttttttcccctccatgaaattcccctaactcggttaaagaaaaaaagtcagtcaatttacatggtaacagaaaaggacagggcctggtataaaatattcccccatctgcaccggagggcacggcctacacgcttcaagagcacagcggaggccccggggatttgtttttctttccctgacccggggactctgatctctcacttaacctctgacctcttcaattcagataacagggaactggcagctgggttgggggcagctctgaatgccactggactccgcctgggttcattctggccatggagacagaacaaagggaggtggcccttccccgtgaagcaccccagggcggcaggcagtcctgtgggggcccctgctcaggtgcccaccccggggagcatagagggttacctcattacagctaatgccatttagagcctactttgtgcggacaggaaaaaaaattaaagcaacatcaataccttgatttgactccatttaaaaacttcagactgaaataggcctcagcaaagatccatgcccctccctgcagagaggcctttttcctccctaccttaggcctcatttaaaacagggctatagtctgcattttaacagcagctatttagaggtgggtatgagccacttgtttgaaattgaatcagccatttttattaagccatatattttcattcttgccggtgacgctgggagacgattttccagcctctctgttttgctttccagtgtattttcattgggaggagagctgcaaatccaggccctgcaacctccaattaccctgctccaaccccatgctgctgggttggacccaactcttcacagcaacctcagaaacaatgaattttaacccccgcacccgcaacaccaaaacaaattccttcctaaataaggagcccgttggctccttcctagctgaattcccagcccccatctcccaactccagtttccagttttgtggctgccgctgctcctgcttgctggtgacttggcagctc

SEQ ID NO: 40549 - DNA, 682 bp, Homo sapiens
caaagcaagctccctggcagagaatgacaggcacctacaaggacaccatccctggctgtgggaacagtggtgcccagggcacatgtacaaggctgcagcagaggctgtgactaggtctttacccagtgatggagggcatgagagactgaggccaggaagaggctggtgagtgtggtgagattgacaggtgcagatggaaatgaggaggcaagggttgccatcaaaaggaggatggcaaccctccagcacgctgactgagggcacgagcaagtgaaacctttaatccccagggtcagatcagcacaaatacagccatgtgccggccaacaaccttctgagcatccatgcagggcaggatcatgggattctggttgtttgagctgcatggacttttggtttccaggagagaagaatttgcagtatttgtaggaggcttggctttaggcacataaaaaggccttaacagactttaattccgggtcacccccacccacaaccttgtgttcctccctctcctctccccatgatgtaatctctgatgtaatccttggtatatttctgttccctgtctctcctatccaatcagctgctgtgttggttgtgaattatttgaaggcaagaaatccactcaaactaattcaagtccaggaggccagttttggggaagatatgagagctgggg

SEQ ID NO: 40550 - DNA, 1010 bp, Homo sapiens
aggtccggaactttggaccctgaaactggcaagttttgggaggtggagggaaagtaaagttaaagaatatatgtcaatgctttgcaaagaatattatttttctttctaccaggaggagacatcacctcagaggacaacctaataaaaaaaaattctttccagggaggactacaagaaaaagcagggttttcagagccaggtaaagagaatccccaaagaaacccttcacctagatcacagtatggcctggggcctcctgcattcaggctaaggctgctaaagattttttgataagaaaaaaacaaagaagagatagcagaattgtaggagacgattaactcaggggcaaagtgacaaggaggaaaaggagggttagggttagggttggccattagtactggcagtaggttacaggaggttggtcattactgatggccaagcactggccattagtaacaaggaggccttggcgaaagtctagcataggatgagaaacttggaggccgaaggttaagttgccaaacccgggtggtgcactgaaacgtagcctaagtgaatcaggaaagccccgacctctgagtaatccacattaggcaagagcactcctgaaaagctgtatgcgaatccaatgctggtcaagggagacatggtgtacagtcatgcatcgcttcgtgaaaaggctatgctctgagaaatgcatcattgggcaatttcatcattgtgcaagcatttcagagtgcacttacacaaacctaggtgggagagcctcctacacacctaggctagatggtgtagcctgttgctcctaggctaccaacctgtacagcacgtaactgtcctgaacgctgcaggcaattgtaatactgtggtaagtatttgtgcatctaaacacagaaaaggtacggtaaagacactgtgtaaaagataagaaatgatacacctgtataggggacttaccatgaacggagcttgcaggactggaggttgctctgggtgagtcattgagtgag

SEQ ID NO: 40551 - DNA, 647 bp, Homo sapiens
gcgtgcttccttagaattttgcctgccacccaaggggagatgtagaggagacattctctttcagaaacttccagggctgaaggatggggcagaaggaggaggggaggaacccatctggatctctttagcctctggaacctgaagcactcaggaaagaaggcctggccctttgaagctgcccctgccaggccccacaatgggccagccctgccagccctcctgcacaggccctgaggcatcttggcagcagcatccccgagtctggcaggtgagtcaacatttggcttctctcctgggctttcttggaaagggctgtgttccagattggcagctgtgctagctggaaaggaggccagaaaagagccaagttccgggggccctgctgccaggcaggacacctggaccttctctcccctagttactgaaaatggcagaaggaaacccagggaagccagagcagtagtaaagcagagtggccaaaaaatttcaggctatggagtcagatggatgacttagcctctcaatttccccatctgtaaaatgggaatcgtcattagtagctgcaatgaaggggcctgtgacaattgaacagcgtgctacctgcaaatcattttgcacaatggctggcatatcgaaaacatgagtaa

SEQ ID NO: 40552 - DNA, 770 bp, Homo sapiens
gtaaagttgaaaaaacaacttttgcaaagtaatttgaagagttcctgctggtttctctctcctacctcactccccaatacattatcccattttttaaaagtactattagcacaacaattacaaagaacctaagaatttcacttcatttcccacaacataaaaccaagagaaaaagttttttcagggaaggtctgataatccctacatctacttggcagcctatatctttcttctttaatgaaaaataaacttctctctagctaataaagaatatcacaaagagagaaacaggcactcacagaaatgagatcctggtacatacctcaatattcattacatgtttacaaaatcatcattcctaaaaaaaagaaaaaccaaaacccacacaaatagactatccccatttaattttattatgaaaatgaaagtaacaacaggaaatggcagcagggtatttgataagctcaattagcaggaggatcaaatgaagtgatgacatgccattatgacctcaggggttaaacattcaattttccatctggcgaaatctagatttccaacacaaatgctgacaccacctgctgtatgttattaggcattatcttgagcaatccctaagcattttctgtacaacaggtatagcctcaagttttttcatatttcattctgcaatataattgctcccccatgaagagaaataaaaaataaatcccatataatggctcattcaaaacagacattaaaatccacactaaagcatttatttatca

SEQ ID NO: 40553 - DNA, 2278 bp, Homo sapiens
ataacaacaaaccaggaaatcactagagaaaccaaaagtctgagctccctaaggccttttttattagagctgtaaatcatatcacccaaaggggaacttgggggaagtttgcacacaatcaagtctaacctagcagcagtactggaaataactacagatgcagtgccaacaatgcttggatgattgccaccatgaataacatttgtcaagcatttgtatgacttagctacactacaaagcagctttgctatatagttcacaatgttttggctaattatacttttaaaaataatctccagtgaaacaaaagtcagctgaactctcaatacatttgaggaggaaactggtgccctagcattgaagcaaatggccaaggaccacctcccaacatcaaaaaccccaccaatatgtctgaaggctgcaaagggactatcaaaatgaaagatgtctgcaaggtagtcacttttctcttccaaatattttctaattttgttacttttaaatcctcccttcctctctaaatccccctcccaaacatccctcttatctgggtcaacaattaaatcacaaaggatctcaatgctctcagagtaacgcacatctgtctattacattgtacattcactggaaccagatcaagggaaccagaaaaaattgtgctgcattcaaaccttcagcctaaatgggtagccctgcagtgctacaactttcaaagttgacactgacagttatctctacaaacactgaagggctcactggtgccaaacaggatgtccctgctaggaagttcattgactataaatgttacgtggtgtcataacaagcaataacgtgccaagactctggagcttcagattaaccactgaaagacaacatgggaaatgcggtgagttcatcctcatgaaaccagagctcaggggaagcacggcgtttaacacttccatttacaagcctttggggaggaaaatctggatcactacaaagctggagaaaagtctccctgttgtaactcagggctgtgatgaaaacgacaagaattacaaccaagggagaaaaagagggagcaaagttcaccacctaaggcttatctggaattcaaagcaatctaggttaatattttatgatacagaatgaatcaaaggtacacccctcacctgcactgttgtatctgcctggcgacacctgatgaggaggtgttaaacagacaacagcccacgctatgacacaaagaggaagaaggccagagaggcaaagaacaaagaggaagaggagaaaaggtacagcagcatgcaccatagttcagcagaaaactgtgatgtttatttcttggtttatttcttttcccccatattttatcctggctcaacacacttcaatttattcctccaattctgagtgccccaaatatttgaaccaggatttttcaaatgagagagaaatcttgttaacaaggaactttcccttaaagctttctaaatgtataaaaattgtaatttcacagagaaaccatccaactcctggctctcctgtgactgattttactctacaataataatttctaacatttacaggattttaaatacatcgtttcattcaatctcaggacaactctgaggtaggtacagcattccacagcaacccaaaggtgcaagatcatatcgcaggcatgtggtggaacaagaagtccaaccccaagcctacatttagtttatatcttacatttggtattattagaagagacacgctgttcgacacaaagctcaagttcgtctaccttagatcacatgtccttgctatttttaaaggtggtttttagaatgaatcaccataatggctttgcagactatgactgttcctgatgcaccagcctggctatcagtcatgggtcagatgaagggtcaggagggcaggtggttaaaaggactgagtggcttgatctcctgctaaaattacacaaagaagactaagagcattgctgacacagaaaactggactgagaacaagctacagtttatcaaagtagagcaagttagaatttaaatcaaagggaacgccttctcttgatttttagggcaactagctcaccctggtggacagaaaactcaactacgcaaccatcaattttctcccacaccacctcattaaaataccgtgctaaaattagggaaactgactcaaaccagttgacacacttgatgatttaagtttgttcaaacttcatgatcagatctacctagcatgtacaattaactatctatattctgttagcaatcctaaa

SEQ ID NO: 40554 - DNA, 1223 bp, Homo sapiens
aagagattggcaatactttaggatgaatatgtagcagcgggttctgtggaatggggttaatagcagtgcttatccctaaggatcaccgtcaaagttaaatgagatacaccatcataaagcacttaacggaactgcttgtccaccacactacgagttatcagtgttagctgctaccaaggttacgattctgcaaggagaataatttaaacagatcaagtgctgacagaccctcacggagacttgggggaaacaaccacacttcagggacaaaaccaaacagaagagcagcagacagcagggaagcaggagaactaggctaatttggtgtcaagaggtccaaaaaaggtaagaatttcggtaagtagggagcggacagacaagagatagatcaacagaaggcggcctgggcaaagttaaaaggaccgacgggttgggaagtcacggagatgtcagcgcgcgccgttcccaggaagggagagactgggagagcaaacgcggagtgaaaggaaagaacagaacaagtcagaacgggacgagaactagggcgacagggcagaaacgggaaagtgacacggtccaaacgtcactttttcaagtgattccgcaatcctttgatatgggatttaagaaagctcaagaaggaaaagggcttccgcagcatctaaaacgcacccctggaagagggcagttccctggcaccaagagaagctgcggaaacgtcgggaaaaggcattcgcgcaatcgagcactgctctctcgaccttgcattctccctctaaagcagctatctaacgaatgcgcctttcctgcggccaggcaccccgaactcgcctgagaaagtatggcttggcgtagaacttgaagtcagacccctcgaagtagacgtcgaactcggagacccgggcgtagggcacgcggatggcgatagtcaggaagtccggatcctggctgaggtcgaacgccggggtcagcatcgccgcaccggacgcaagggccggcgccgctcgctctcactgccgccgcgttcccgccacgcaaactctccaactccccacgcgcaggaactctcggtgtgagggacggagcttccggctcgaggcggaagtgctcgcgcgtaaggcaggaagtctctccccacgccaatctccatggagacgggacgccgttcgagaagaggcggaactttcaaaacccccgggcggagaaagggcgtggcgagtggt

SEQ ID NO: 40555 - DNA, 1276 bp, Homo sapiens
cagtgaataatggagcagcaagctgattgaactcgaagtttttggaaggaaggtagcatttgacatccaagttcccctggtctccaaatcttttgtgcaagtaaattagtttcatttgtctcagggcaccttttccaggccaacttcttccaacttgactgcaaatgtttctcagtggtgtgtttgaggcttggctgcatcccttcgtctggaacaaatcttttattactaggaaatagctggatgatgattctggacccttggaccctatccctctgtcagctgttgactcaatatttgataccttgatcattttcagattaacctaccccctctcctgcctgtttctcattaatgtgaatttcatactggaagatgaatttcatacccaccacctcaccagtattggcgagacggtcaggattaacacctgtttcttcaagactctcctgagatgtcgtcagggcgcatatgttgttttctttgctcacctcccagacttgcatgacttgctttggtccagtggtcatgcattccaccccaacctaaaaacatccagatgatgggaatatcatgttgctcgtttcacatgggaaagccacaacccacactcctcttgttcaagttgcattcaaatctaatttccacggcctgtgcgagtgggagctccacagcccttgtgtcagctgtcgaagtttagcaatactatttccaaacatgggccagtaggcagccagcaggcaccagacagctgagtgctggcagaaaaagcctcagacacctatagcagtccaaacagtgactcatcctgctattgccaggataaatatgggaataaatggtatttttctctaagcaggaagaattgtcaaaatgcttatcactttataaaatataacagattgtgcctgatcatgttttgaaatgttctaaccattcactcgccggttttttgttgtttttacttttttgagtttagtaatagctttcacttgttttccctctttctaggaggcctggagaacccaggagtttccaagctgtgctgccacccgagctctggatccacctggctgtggtggcctgtggcaatcggctggaggagacgctggtcatgctcaaatcagctgtgctttttagccacaggaagatccaattccacatcttcactgaagactctctgaagcccgagtttgataagcaggtgaatttgcagaaatcatggcacagtgtttactaagtacaaacagactacattttaggaactgcatattct

SEQ ID NO: 40556 - DNA, 570 bp, Homo sapiens
atggggtttcaccatttgcccaggctggtcttgaactcctgggctcaagctatctgcctgcctcggcctcccaaagtgctaggattgaaattagaatcttcaaattctgttgttttgaagaaactgtgcccggcccactctcattgtttatctgttatcagtggctgctttcatgttacaacagcagatttgaggagttgcaacagagcctgaaatatttactatctggccctttagaggaaaaaggttgccgcatgctgatacacaaacaaagctagccaatgacttgcattgcctaatcccaagaccaagtcttagctaaaaatacattttaggcgggtcacagtgactcacacctgtgatcccagcactttgggaggccagggtgggaggatcacttcagtccaggagtttaagaccagcccagacaacataacaacacctcgtctccacaaataatttaaaaagccaggcatggtggtgtgtagctgtcgtcctagctactcgggaggctgaggtgggacgaccacttgagtccaggagattgagagtgcagtgagccaagagcat

SEQ ID NO: 40557 - DNA, 458 bp, Homo sapiens
ctttttaccaccagagtgtctctatgtattcccctgccagtggaactaccgtcccgatcactgcatgtacggaagcaactgcagagaggctgagcatgaaggtgtgtctgttctgcatggaaaccgaggcgtctaccatgacgataagcaaccaacgttcagagcactctatgaagcaatacgggatgtaagtgtgcccttgctgctgttagcagatgtgcttatcagcatgaagcaatattggcgctttagtcacctgtccctttgaaggccaaatattcccaaagcatagagttataccagttattcccgacctcagtcacgctctgtcactatatcctcttgccaccttgtactatgtcatatctacttgacttatttccacgtacaccattcattatcttttacttaaccaaatttactttaggaggaaatttctgttttttgtttttgttttc

SEQ ID NO: 40558 - DNA, 1189 bp, Homo sapiens
aaaaaaaaagaagcatatattctggtgggggaagccagacaatactgattgagaaaaagaaagaaaaattcagcctgggcgacatagtgagatgcgtctctacaaaaattaaaaaaaaaaaaaaaaaattagcctggtggcacatgcaggtagtcccagctactgggtggggaggggttggggctggggtgggaagatctcttgagcttaggaggccaaggctacagtgagctaggatggccccactgtactccagccagagcaagactttgcctctttaggaaaaaaaatagtaacaactgggcgtcatggcaagtgcctgtggtcccagctaattgtgaggctgagatggaggatcacttgagcccaggagttcaaggctgcagtgagccgtgattgcccctctgtactccagcctgggtgacacagcaagaccctatctcaaaagaaaaaaaaatcctctgagatagtgaaaggtgaaaggagttcaaaaggtgtaaaaagagtgggctgatgggtccaaagtcctgggctggagaggagtgttctaccagctgggggaggggcaccagggaggctgcttgtaagtcctagacttatcagatggaggcagcccaggggaaatctggggaaaatcccgtgaaacagaaggaatgaccaggggaaagtcccggaggcaggaatgaatttggtgtgctggaaagacaggaatggccagataagaggagagaggaggaactgagaggggagagtttccaggtcaccttgaacctttagaacaagggaggagttggaatctcattctaatggcagtggaaagccccttcgggaaagtgataggctctgatttatgatttagaaatatcaccttggtaatgtggtggaagggatgcaagagtgaaaacacaaaggctatttatttgtgagactaatcgcagccacctgggtgagcaatggggccagcatgggcttgcgtggtggcaggaaatgggaagaagtcgccatatttgggatatgctgttgagatagagtttacaggacttgctgatgaattggatgagggttgtggggggaaagagaggaattgagggtgattccaaggttttgacctatcctgttcccattactggagctacagtggtgaaaaggacagattcaggactggcttcaaggggtttatcaatgattt

SEQ ID NO: 40559 - DNA, 2073 bp, Homo sapiens
gctcactgcaacctccgcctcctggattcaagcgattctcgtgcctcagcctcccgagtaactgggattacaggcacgagcgaccacgcccgactacattttgtatttttagtagagacggggtttcgccatgttggccaggttggtcttcaactcctgacttcaggtgctccgcccgccccagcctcccaaagtgctgggattacaggcttgagtcaccgcgcccggcctgtatttatttttatatagagaagggcgagggagcggggtcattttgttacccagactggtctcgaactcctgggctcaagcgatcctctcgcctcggcctccctcccaaagtgttgggatcaccggcctgagccccctgcccggcctcgctctacgttttttaggcgcattctgaacgtgaagtgtatacactgaattctcacagcaactgcatagggcatcagtaccagtgcccttactgtacagatggggaaaatgaggctcagacaggcgaagtaagtagcttaagttcacacagagaggaaatggcagggattcaaagcctaggagtccgcctgcaaccctctcgcctgaccgtccagtcttcagctccgcggagcctgggcctggggctggggctggggctgaggctctggaagccgccgggacgcagacgccactgggccccagcgtcacacctcggccgcgcacgcgctctcgggttccgggccggagcgcgcggcgggagcgaggacggcggcagggagcgtgcgcgcggtgacgtaccgggcgccatgttggagggttggtggtagcggcttggggaggtgctcgctctgtcggtcttgctctctcgcacgcttcccccggctcccttcgtttcccccccccggtcgcctgcgtgccggagtgtgtgcgagggagggggagggcgtcgggggggtggggggaggcgttccggtccccaagagacccgcggagggaggcggaggctgtgagggactccgggaagccatggacgtcgagaggctccaggaggcgctgaaaggtgggggtagctgccccctctccattccccctcaccttctccggctcgctcttctctcctttcagggcggatggttccgaggaccggggccgggcgcggcgtggggagagtgcttcccgggctcccatccccctccacctccccaggggcggggagccctgtgggcagctctctcccgccccgctctggctttgtgtcggccgccggcgtctgggctgggggaggggagccggggaaactcttgcgggggccccagtctttctcccacccgttcaggggacgagtggcggacccgcagacccctccctcccagatatcctcttttctccaccaggctacccgtacgctaggcgttggggtgggagaaaaagtaaacggttggtgggggcgggggtagggggtagcatcgcaacttttaagttgtctcagtatgcctttttcagggcttttgaagtcatctttccgcgccctaatttcgaggtggttgccttcactgttcttgattgcacgccttccacgcaacaggcttgagaacagtggcttacaaacttcgagtagagagatttcagcgttttgagaattattctttgacattcagaatcatttggggacggcaacttggggtagttggtgcttcttagaaaggcagatttatggacttagatgaacaattggtgggagtcggggcctggggatttttattttcactggattcccagcttaatataatgctggtgttcccccggaccacacttcgagaagcactgcgttaaaaatggtttgtgaagttgagtgccccctttaggaggattcttgttatctgtaaagagggtgacatgttggaagtagaacttggaggattgaggtggtaatttggttgagaggccttatttttttaattttgtatttaattgatttttaataaggtaaaggactaggaggaaagtttgtttttagagcgcttttgagaaaactgataacgtttttttttcttccttcatctagattttgagaagagggggaaaaaggaagtt

SEQ ID NO: 40560 - DNA, 760 bp, Homo sapiens
ggattacaggcgtgagccacttcgcctggctagtattacagagttttgagcagagaagtgacactatcagacttaagcattaaaagaattgtccaatgaatggctgtgctgaaaatatatttgaggtaaagtaagctagaggcaggggtattgaaatcaggctaagagatgtttgtggtttgaattaagtggtagcaggaggtgttaagaattagtcacattgtgtatgtattttgaaggtacaaccaacaggatttccaggcaagatagagtgtgatgtgaaaaagaaagaaaggagtcagtagtgactcaggagtttgtctgagcatccgaagtgtggaatttcatcacatctgagaggtgaaaggctgtaggaggagcaatatgtgggaaagatcagaagttcagttttggacatgccaaatattacttggccaaatggttgggtggatgattggggatcaggagtcatcctgataaaattggcatgcagatagtattaaaaactccagactggatgagatcaccaagtgtagatagaaaagagagactgaattgtgagtgctccagcattaagcagtttgggaaaccagaaaaggaaaatgaacaagaaagataaaaggaaacccaggaaagtaattaaggaggagtgatcaactgtaaaatattgttagtgagacatttaagaaaattgtccactaaccagtggatttagcaattggagttcgttggtgatcttgataaatgcagattaggttta

SEQ ID NO: 40561 - DNA, 796 bp, Homo sapiens
gcaatgaataatccacaaactggttattatttaataacttttaactccactgtcctctaccacctaacaattgttttggtgtcgagtacaagtcacagaccacaaaccaagaaatgtaagaactggtaacaattttagtttttagaacttgagtgttttagaacttaatgtctatgacaagattctatttttctaagtggtaaaaaaaaattaatttcaatgaattcagggcttccctatttcctccctttctggggttgtatctaaattccagtgggtgtctgtaatgtcacaacatattaacttagagcgtgagtgggcacaagcttgtttgggtcattattagctcttagcactggcatttgctggtaagttgccattcctatatggactttggccattagtccatgtggctactgtgattcctccttgtttctaactgccagacattttccaatccttcttctctctgtcatctgggggcacgtggtagaccatcccccattcctgcactactctgagtactggggatctctgctcctatgctccctggcccttccagactctgtggtggtcactgaaactctctaaggaggtctcagtcccatctgcctagagaaaaattttctgcattcacactgtgctgggtggaaaaaataaacaatatctggccatcttttgggcttcagctagtgtattatgatagtagttgagctgttttatgagacatgaaaataatgtcacttgaatatggtagatgttcatctctccttcatgtgaaaatactggaaggtgg

SEQ ID NO: 40562 - DNA, 891 bp, Homo sapiens
gttaaatgtgtttttgtataaaatttaaattatgaagaaaaatataaagaaataactgatcttttcatcacttaagaatacatttcagcatgtttcctttgcagctttatcatgtcctattgattttaattttaaaattcaggcaagtcttaaagaaatctactttctttgttgatgtatattaacttggaaagttgactagttaggatttatttcttgagaattttatttgcagaaatgactgtccttttgtagtatctactacttgttcccatcaatgtgactgataggtagcattgctagctggtcaaagctgcctggaaaatcccactgtctgtttgctttcaagcaaagcaaaagccatagctatacttctagcccaattagaaacacaaaagctctgtctcccaaaaaaaaacaactcaggagatcagggaggtcatacacttgcattttggcttttcaggccagaacgcagagggcacttttcctgtcacgtgaacagatgagcacagcagacactgtctgtgacctttggtggccacgctgtgcagggagctacctgcacagttgagaaagaatagagttcaaaatgagacacataagattgttggttgatttttctttaatctttcattttctttttctttttaattgttttttccaggcagaaagggaaagcgtcagtatataactcagacattgctaaaatttgtaccaagctccccatcccaaactgaacaaccatccagaacttttttagctgatcctgaaagaaattctgcagcattttctgaaggcgcaacctcatactgtgtttagaaaatacatataaagataaatttgcagagcaaaagaaattgtagcacaaaggaaaaattgtggcttaaa

SEQ ID NO: 40563 - DNA, 2633 bp, Homo sapiens
tcaagctaatgtgcttcaaaggaaattaatttcccactggtcttgcaagtttgtgttacataaatccctggatttaagactaggaatatttctgagatgcttttgaaaatctgatctaactaatgtttaaaaaaaaggaaaacaaaattctccagaacataatgttgtaggcctttaataaaagatttgcattgagtaagtcttatcctggattatctcccaggaacagtaacagtggtcggtttttcaaaggtatcacagaaaaagaaagtcaaagatacggcatgctcactcaggaggcagtgcatgtgttaattcttttaactgagatttggaagttatccctgtctttagaggggacataattgaggcctaaaactggcttgctttttggatccttgtcaatgcatttcctaatgcggccagatctcgagggccattctcaactatatgcattcacatctcatctcccaatttacggcagagattgtattaaacctttgtaattagacagggtatttatgttctagacttttcatttggaatcttctatgcagctttgtaagaatctcctctgccttcttcagagtaattaccctacaggaggtgctcttgcattctctgatcttagaagaatttcatatcattcatctctcctttgtcttctaacgaagtcacatcattgtttcataaagagcaactggaggttgtttccccaaagtcttaactagtatccttctggaactaacatacagtaaaattgtctatacagttcttcactctattatattattttttatttcaagtgtaaaggttctctatttctttggccaatgcactacacacagcttagaagaagcagtcttccacgaagagccttgcatatatataagggctatatgttatgccctttatcaggatgtcttaccatggtcttgggtcatgttaaagtaaataagaaggccattcacctgaggctgtctctgagaccagagctcttaggtaaacaaactggaacttatcttggaaacatttttttaactgactaaaaccaaacaaagcaagacttagccaatcatgaacagccaagcacacaactggttacacagataggaatctcccactgaatcatatccagataagtaaggtgaatgcctgatcacactgtacccaaattaggcaaacacctagctgtcaccaatcaggtaacttctctatttgttttcatgatcagcatataaaattcttttacttttgttgcagagctctctgaacctcttccagttttttgtgctgcctgatccatgaatcatttctttgctcaaataaactctcttacatttattttgtctaaagttttttttttttaacagtactattaatccaactgttggttgttccatactattacaatttatcttagaagtctgtccctaagcatgtgtacaagaactggaagttcacaaaaatttacctagaaactattctttggacagaactgtctcatattttttgttttaacttttctctacatgacacttcaactgagactcacaggttatctgtttaatgccattttctttgactaagaagtcaatttttagcttattttgaagctcttgcaacttagagttattggaatatccattcaatttggattttttcactcattttacttcccggaaaatgccttcattgcattatgattttctaattgtgatgacttggttttagcaaaacagcatttctttcaattttgttgaagatacttgatgtttctcagcttggaatactacttccaacatacttcaccaaggatcagaaagaagtcatgaattctttaacaccttttatgagatgaagtgtgaatcaatgcattttggaaatacggaattttgcttctcctacactccactcatagaaagattcagaatgccttgactgcaccctgtggatgttacaattctctttatgtatccatatcttgttctaatagcccataaattcttcttactctctactcttgtactgcagagaacagaatcctcccattgtatggctcaggactgtccaacccctgccctctgcctaacctgtgaatctgagactcagaaccacagctatgaaaataaaaaaataacttttactgcttactagcactggattaagaaaacccatatagatttcatgtgagagccacaggaaaaacaaaacacatcatgtgagtatctgtaaatggttggcaataataagtgtgtgctgagaattaacatgtcatgtttataccagatgtcaggtgtactgcttctctctctgagttgtcaaaaagcataatacagagagaaaaggtcaaagaatcctgggggatgttagtggtgcttaaaggttataatgattgaaaaagattgctttaagtctacatgtatcaccacttcagatgtcatttcatgtctcaagtggaaacagaataggccttcttaagagatttgtgggatacaatatgttttggcagtagagttgaaaacacactatggttaccgtaagcctgccagaatgggtccccttatctgaagatcaatgattacagatgattgatggactagtttccccaccagaaaacaccagcctgttat

SEQ ID NO: 40564 - DNA, 2342 bp, Homo sapiens
atgaggcttattcatttttttattatctgtaaagaatatccttaaaggaggagactttcagctgtgtcctgtaggctgaaggcaccttcaaaccatgtagtgtttcatccataccatttaaaaaatattggaaaattttaccagcatacagtttctggcttttctttaaaaatttactttctccatggcaataatccactggagctgagtagcccatgaaccctccaggtggaacattcagtttaccacaatcccttctatactgaattttataccatttttcattatacattgttttctttatagtagagttggaataatgtagactggctatcatatgcagatctctgtcaaatatggaaaaactgaaaggaagaccacaaaggtcaaataactaaagaaaaaataagagagcatatggtgaattacgttattattatttgctgctcctctctgtggcaggaaagttctggcccatttggtcagcactggccattaacagttactttggaaaatggaatgagcaaaaatgatgtctataccacctgtgaacagcttgcatagttcagacagttttattttctctgtgtcatgaaaatgacacgtcccaggtagggaccactctttctcaaaacgacaaaatcacatggaatacagattcagccaacccactgcttagagggtacatggataggaaatcaatctttattcttagatgcctctgagactttggagttgtttgttgctgcaacataacctattgaaagctgacggatgcagagcaaatttcatacgaatagtgaaaaatatctccatgtgtttcatatacatatacaaaatgtgtctgtgtctaatgaatttaacttagccacggttaggaaaaaaagccatggtaagaactgtaaccagcaaatgggaaatgcatgtgccaaatcctcaataaactcaaaaaagaactgcattttctatattttaaaaaatgcaaataaagtaattgatgctgtttagagatttagctgttaccaggaaaataattgcccaagcctcaaatcctagccctcctttcgtttgaattacttggctgcatgctgcagacctgtgggaatagggaaaggtgatcactgtggagtttctgtgaatgaattcttactgaaaacttcatgcatgattcattccactcttacctttaaccctggtaccatttcaaagtccaacttgctcaatttaatgaggaaaaacaggttttaaataaaagccgaatctcaaaaggaaggggatcaattctgaaattccctccccacaagaccaatctgggttttccttcagacagagcaacagtcacaggcacagacacacaataacaacaataacaacaaaaacaaatccaaactactctggggtgaggtgccaagcagtgcctgtgaggatcaaaagctataaaaccttaaccaagtggtaagagaggtgctcaatctctgtgagcatcagtgcagttgactgcgaagcacccaccagctactccacacctgggcatgtggatggatgaaagtcaggaaatttcagttacacaactaggcagactagcaactttgctctccaagacagcatttttgtaaaagtttttttaaaattatcctcatacttttgtctctccaagacagctaaagttcagggaaaaaaatctgctgagatggaaattacctagcttataaataaatgagtatcaaagttccatgtaagccacaaagttcacttctgttttagagtttaaaatgtcctacctaataaaattcacccacaaaaatacttcaactcttgtacttgctctggcataaatatttctctattcctttaaatggtttttgaaagcatttacatttgtatgacttgaagacaatgtgtttcaaagtatggcttaaaaaccatctgaatcaagactctcctgggtcactgataaagaatgcaggtctccaggaaagaccccaccctatggggtcagaatctctgggagtgggactgtggaatctacattttaaacaagccccctaaatgagccactagagtttacaaaacactgccctatgaccaaaaacacttgatttggactttatctgtgtaagaaatatccctcagtttgatctaatacattgtcaggtttctttgtaacagcagcatgtgtaatattaattaaaacacaggtacacacaaatgcgctgtaatggaagcaaccaatgttttattgcccccacttgctagtgcacagatcaattcttggatctcacctggtgtttcctatagtcttttttttttttttttttttgaccaaaagcatcaactaatgg

SEQ ID NO: 40565 - DNA, 1103 bp, Homo sapiens
gcatgagccaccacactgagcctggaactattttgtaatgcagattcagctgtcacatatgaggcatatgggcccatatacttgtttggcttttacaccttagattacactcttatgaagtcataagagtatgcttcatccacactgagtaaatggggatatgaaggaattaatagatggatggctttgctagacactgtgatagagattttcttgaatttaacacatttatttttcacaaaatttctattttaaaagtattaactttgcattttctagaaaactgtggctgaaagctattttggaatgtgactaacatgatgcaataactgataaagctgagatcacatccagtcccattgatttcaagtccagttctttttgtctttgtattatgcaataggtccatccaaccctcacgctggtctccccgcctgcagcctctctcctcccatccaatccatctatcctctacacacagagttcagttttctttataaaacacactctcagtttctaacacctgctaaaacgcctatacacatatttcccactgccaagatgataaagtccacattctctgtcctaacattcattcaattattcaacagatgtgtatgcatatacatgtgtacatgaagtttatgcctaggttcagggtatttggacaagcgagcgtactctgtcacttagagtatttctgattctaactctttgcttatgctctatccttcccctttcaacttacatttactaataatcttcaaggtctaactaaaaatacccctcctatgtgaaagataccttctctgaacattttggatgtttacggaaactgcattttaggtctgtctgctcagtaaggctaaggctgagggcatgatccttctccagctccctttgtcgccttccacagacctcacaccacacctacccagtacagatggcctcaatctaagcagtacgatccactccctccatggcactctcagttgtccagggcaaacagaatgcttgtgcctggtagctgctctctagcaagcccttctgctttcatcatttcaattagatgtatttgctaacaaaactaattacgctagtaa

SEQ ID NO: 40566 - DNA, 859 bp, Homo sapiens
ccggcccatttcttgaacttttaagcaaccagtctgtgatggttaatattgagtgtcaacttgattggattgaatgatgcaaagtattgttcctgggtgtatctgtgagggtgttgccaaaggagattaacatttgagtcagtggactgggagaggcagactcaccctcaatgtgggtgggcacaatctaatcagctgccagcacagctagaataaaagcgggcagaagaatgtggaaagactagactggctaagtcttcaggcctacatctttttcctgtgctggatccttcctgctctcaaacatcagactccaagttcatcagcctgtggactcttggactcataccagtggtttgccaggagctctttgaccttcgaccacagactgaagcctgcactgtcggcgtccctacttttgaggttttgggacttggactggcttccttgctcctgagcttgccaacagcctattgtgggacttcactttgtgattgtgtgagtcaatactgcttaataaactcccttttatatatacatctatcctatgagttgtgtccttctagagaaccctggctaatacacagtcaaatactcatgttcacaagcattcaaataatttcaagttttccatttactttatttcatttctccttattttgttgatttcgcaaaattaactttttattttatgacttatgttctccacttcactcatgcttctgtctatacacatcgcgctgtcattcccatccacttatccaggttaacaaactaatagaacaagtattcttccataattttccctaattttattaatttaattttatttacacatacatatattcatttacacgta

SEQ ID NO: 40567 - DNA, 550 bp, Homo sapiens
ctcttaagcatttacacaagagaaaagaaaacatatccaccaaatgacctgaacacaaatgcttatataatccatatttacagttgtctcattcgaacctgtgggattttaatttacagaagtgactcaatgacaatatggagaggctgacaccatgccacacagggctacatggagacacaccagagttggtcagtatccagaagcagaaggcagggctagaaaaatagtttagaatgggctatttcgagtaattctaacaggctctggggcatagcggctgtcagtagttgtttggtacctggactagagtgattcagggcaggggaaatcctggtttggtgtgtgagagttaggtgaaggatgtggttcagagtgtgacctctggatcgcaggttagatgccaaataaagaaacacacaagctaagtaaacataagtcaaacaataataactcgagtctgaaatgaaacaaatgtccatgagcaaatgaaggaataaacgatttatgatctatccctaaaatggaaaagttcttagtaattatgaaa

SEQ ID NO: 40568 - DNA, 370 bp, Homo sapiens
gccaatcaaaggaagactgaattcataacattcagatgtcactaagagttgtgcaacatatcagaaaacacatcaacagttgcaactacaccttcaatgggaacccagtcaacaacttgactcagtgatattggtctgctgctgcagccatcacattcactgtgatgctataaatatatacaaatatacataactagttattttaaatgtcagatatgaagaaaaatgactcagatatttagctgactactatcttatttccctgaaatccaagcttaattattacaagcagatgcaagcattggcaacctcatcttagattccggtgtagtcacggctaatcatttacagagtaaaacaacagattata

SEQ ID NO: 40569 - DNA, 595 bp, Homo sapiens
gagatgaaactgctccaactcagatcatcaggcattagattctcataaggagcatgccacatgtagatccctcacatacgcaattcacaaatgggtttgcactcctatgaggatctcatgccaccactgacctgacaggcggcagagctcaggcagtgataggtaatagtaataggatacaaaaaaccatgtacaagccaccaaagcctctgtgggaaatgactaactgaatgtgaaatgttcatattgcatcagccaaggcaagtcacctgaccaagccttccaacatcaatggggcagagaagatgcaccctctcccagaggtgagtaatgactcccaatgatttctcaatagcaataaggcaaacatttggatagataggtctagatctttacataatgctgatgggactacagagacatgaagagagaacattatgttgaaccttaaaaaggatgggtgtgatcttgacagaagtaaagaaaaccattaagagcattccaggcataaatgtagggcaatgaaaaggaaagcacagttggttgatgacagttttttatttatctccatgtttctctctttacaagtgaggaa

SEQ ID NO: 40570 - DNA, 2529 bp, Homo sapiens
agatgccaggttactgcagccaaagtcaggttactgttagtaaacacatctagcaaagcaaaagtaacacatttgacttgatattgagatataagctctttcaaaggcaattactcctcctttcaatctctgaagggctctgactcattgttctgattaattcctgtttttaatctatttacagatcaggattctttttcagctagtgtgatattcatctctgtgggggtagacagaaaccacagcacgtacagtcttcctacttttttttttttttttttagttattcttgcttaatcattttaaaattatttctggatttacctactcaccatatgagctggggtttctgacctccctcctgcacatcacgccctccttgtctgttgctttttctagctctgtttccctgcatcttgggttgaggttagcagactggctacccctttcccagagctctgttcccctttctttgcctctgaaaggaggtttgctgtccttaccgtagcggacaccgtttgttattaaataatacctctggacacatctccttgttgtaaatcaataagcaaatgcaatacagggaaagacatacggattggagagttgtacggagctttgcacaagcagagcccagaagctgttcgttcatttcacgcgaccagaaaaaattcctgatggtgctatgaccccggtgcccggttggcacttcctggttttctgtttctgctattctgttacctgcttggttagctttgcaggctcctcagagaacacagaaacagctgaaaccagggtccgagctcaggaaacctggactacagcgcagcagggtaaacctgacaaataaacgcgacggggaactccgtcccaagctgctgatctgtgagtagaaagaaaatgcagcttagaaaacttgatcgctaatgaaagaatcggccaccctagctttctcagacctgggaatctgggcctggggggtggttccagcaaagaggtatcacattcccacattctgcatcatgcacctggaattgttcctcagcatccctaggagtcacaacttttttcccccaactttaactggtcaaatccactgcgcgaagggcaagcccaagggacctaccactcaattttcagcgctccagctggggatgcagccttcccaacccgaaaccaatcctcgccccagaaggggaaaaataatctccccagagcaagtccgatgagagaagcatcttttattctcgacccgtcaggtgcatttccctgcaaacaaacttcggggctgaggagccatgaagccagggcgtaaagtttgccctggcaggtggctcatccctgtggcccggccggcgccaggagtcgggcatcccggacttacctggtctctgcagctcgccagacgcccgccccgacggcccactcgccgccgccgccgccgccgccgccgccgccaccgccgccgccgcagttagtccgggcccggggggccgccgtgcgcgcccgcgtaagccgccgccgccgcaggcgcagcaccctcgtccgcacggttcccggcccagtccacggcgccagcccgcccgccgctgccaccgccgccgccgccaagcgccaggctgctgtggctgctgccggcgcctagcgagcactgcccgtgcctccgccactccggctccggctccggctccgacgcggacgctggagggaggggagaccgggcggactggagggagggaggggcggggagcgcggcggagcagccaactgggtcccgagcctcgcgtctgcggcgcccccagcgcctctgcgccggccggaccccgcgcggccctgcgctcggccgcgtgcacccacgtgtgtccggcctccgcagggccctgggcggcggcgcgggctgggcggcggtcaccgtgtcacctccgggtggcctcgtgccacgcagttagggccctcggaacacggggttaaggcaggaattccacttctagaaaagcctcctgcagctgcgctcccacaagtgcgcaaagattgccaattttaatattaaagcggataattattaagggctcactaggtagcaggtcgtggactgcgctaaatcaattagttcatgcagtccccagagcaacctggatctattattattcccggatttagtgatgaggaaattggtttgcttaaagtttcaatgagtcagttgtgagaataatcgcaactatattctgtcaaggaccctgtgaagtagatcttaccacctttatttgcccaagtatacacacagtggtgggttggagaacccggacttgaataagcctgttgcagtcctgagcctttgcgctgaaccgctggtgacttacttccagtcaaacccgtgcaaacactgcaactttagttgtacgaaaaacagttgggaacaacctacctgtccttcattaggagagtggctgataaaatacagtggagacatacagcggcagagagaaaggtgcatctactagtattggcataaatgacctccaagaggta

SEQ ID NO: 40571 - DNA, 498 bp, Homo sapiens
attccaactgtagttgatatatggttttttatgtaggtctgaaatccctacccagatgtagcttaagtcatttgtttttatcactgtttttttttttcccccgagatggaatcttgctctgtcacccaggctggagtgcagtgacgtaatcttgctctgtcacccaggctggagtgcagtgacgtaatctcggctcactgcaacctccacctcccagtttcagcctctccagtagctgggattacaggcatgcaccatcatgcccagctaatttttgtatttttagtagagatggggtttcaccatgttgcccaggctgatctcactgacctcaggtgatccaccagcctcagcctcccaaagttctgggattacaggcgtgagccactgcacctggtgacaaaggatgatttttttagtccagtgtagatatgggtgtgagattatattgtgattcccagaactctctaagacaacagaggccatgccaattttgtt

SEQ ID NO: 40572 - DNA, 1329 bp, Homo sapiens
atcaattagttgagtagatgactacccactatgaaaaaatagggattaaaacatggttcatacttttaagaaactgaaaataaaagtcactattttaatcatatttacacagcactctacattttacaaggttcttttatacagtgtcctatttaatgctcacaagaatcttttgaggaagatgtgggcctatgtgttaaggttatatgtttatttctatcacacctggttctgggatgaattttgaaggttttaaaaatgaatccactgtattatttcaaaatagacgtaattgagacaatcttggcaaagggaactcaagggtgaaaacatacacaaaatgcatgctgaggaatctgaattcagggggaaaaataagcacatgcccctaacatccccttctgtcccacatcccttgaaatttgagagagggagaggtggggacagagagagagagacagagagagagagagatccataaaagttttatacataagtgaaacataagagaacagaaacaaactgacagagcaaagaaagtgacagaaaaataagaacaaagaaaaatagtgcagaattcacaatgggacctaaggcctgttttctgagggtgcttcaggctcagagtcagtggagtggggggcagaaaattgaaggtaacttgagtgattaattgggtccctacatttacgatggtcgagttagtgatctctgagccttccttagcctgtgctgtttattcagggctggaacgagtcagtgggccttgtgtcagacagctggccattcccaggggaacaggatgttctctccacagcagataagctactggcacatccagtccagaggcttgttgtgctactttcctcaaatggctgaggccgagctcctgtaattgttatcagcttctcaatttgcaatgtgagtattcagcagacaagtattggaagaaaatcgacacaatggaagaaaagcactagaacttgggggttaaattaagagaggaatcagaagatgctttaatgatctctgagagatcaaggaggattaatatcctaagcacaaaaacaggctggaaaagcaacctattcaagaacttatagttcttaaaaaaaaatcctgtgaaattaaaaaaaaaatactaaatagcagaatgaacataattaaagtgaaaattaaagagctggaaagggaagccaagagattttctggaaatgcagtgcaaaggacaaaagaggtagaaaacaagtatgaaaagatatgaaggataagaggactcatctagaggcttcaatgagatgcagatggcaggagagaaaatgagggaaa

SEQ ID NO: 40573 - DNA, 1700 bp, Homo sapiens
acgactgttccttaggtcaagtttcttgaaaaaataatgtgagattgaggtttgctcacaagaagttgttgaggagtgaactgagacaatgcccataaggaaaagagtcaagcaggatctcacagagcaagaggctgaaccacggtaggtggtgagggagtagttccctttggtaaggttttttccttgggcaggaatcaactgagacctgtcagcagctgagatttctgagagttcagtctgaaagagaatacaagcagagcagatgtgattttattggtcatcgttactaaacactgcaacacagaggatgactactgatacgttttctttgattttataacagttttgatataaaaacaagtgagcatttagcattcttctgagcatgattggagtaagatcatattattcccaatgtgtggattataagcacaaagttctctaagttgtaatgattaactgtttatttcacaatcatcttatcaaataaaatgttcttattgattagagtgactcaaattaggaaaattaaatcacggtgacacgtaaccaaatattactagcaaagctaaaaataatgaaataatagcagttatgacaattttgagccttgtgcaaactcctatagccttctgtgtggaggatccccaagatgaccccaaagttcagtgattcaccaggaaggattgcaggagtcagtgtatggtcatactcgtggctaagatttattgcagcaaaaggatacaaaataaaatccgcacagggaagaggcacatggggcaaaaccccaagacaagttttcaaaagttctttcccattggagttacacagaatgtgcttcattcttctaggatcaaattgtggcaataggagagacgtgctacagggcagctctttgctgcagtgttgcagaaactgaagagatttagtgcccaaggttttcactgggcctagtcatataggcaccctctgcctaacacctgcccaaattccagactgttggggggggggggggacgcagatgttcagcataaaccacgtttgtccaaatggcttaggcacagtaaatcacattcatcaattaggaaatgacaggaacactcacaaaactcaagttcccggatgccaccgaggactaaccttgcaagcaggcctttctgaaggtagcagttaagtcctgctatgttaactcttttctgaatacctcagattctctattattatgcagtaattttactatatagtgtttggggaactggatccctggctttaggccttcttctaaaacatgtaacacatttacatttccaatatttagtgagattaatgtcagttctcttatgtgaaatgagaagccacaaaagatttcctggaaattatagaaaatatgactttgagctctttttcttatatgtgaataagaagagacaaggttagaaaaagaacagtagcaaagtcacacacagtagtggaagcaagtgagccatgggaagaaagcgcaaagtgaatggcttaaaatcacggatgctggagacagtctggctgcgacccttggactgtcttggcctctgttccctcatctataaagtggggctgcaaacggtcttgactcataaagccccttttgggaaatgagttcacttttctatatttgtcaaatatatttaaataatactgggaacatagtaaaggtaacc

SEQ ID NO: 40574 - DNA, 1414 bp, Homo sapiens
agcagtagaaacatgaagatcttaaatgtatttagatactggcaattttaaaagtgttacttaaaagtggcgttctgttcaaaaaattcagatgatatattggtattttaaatatattttacaaaaatagaaaacaaatcttatatttctaactcttacttgactaaaaaatagccaggaacttcttattcttcagaagaataatgttaaaccaagattacttttagtgcacattaaacattacaaaggttaataaatgtcacattacaatggatctgtcaatatttaagcctcttctaaggcaaagttcatgtgctctagggcaaggaaaaaagcttcataaatattttaattatttcagaaccggaaaaaggggtgtatttaaagacttgtaaaccataggaattattttatttttaaatctagcatccagaatctatacacattcctaagaacatccagcatttgagaaactccttctactatcagcaaacaaaactttttgtttaaatttacaacatcttatataaaacattctttaaattatggaatgaaataaataatttgctttctagaaacttgtggcacttctcacatacattgatgggtcttgtactgccagttgcatttcttaaggaagttagtagttagtagtagtagtagtagtcgtcgtcgtcgtcgttgtcgtcgtcgtagtagtagtatgaaatgagggtcttactatgttgcccaggatggtctcaaactccagggctcaaagggttctcctgcttcagcctcccaagtagctgggattgcaggcactctctaacctgcccagcaaacaatggtggcgtcaacacaaactttgccctgaaagttttctcatgaaatttgctcatttgacagaagagcagctgatgcttgctgcttagaaaagaggttctctttgcattccttatttcctgtagccagaggcatattgtgtatctgaagtttaccacccagaaagacaaggcctcggcctcctcctaatttgattattgacccctgtggccttgaaatagaaaatggcactagccaagataaatagaatggagagagaaccaaacagaagcataacagaagtaggctaaagaatgtaaatttcctccagttccccaagttaagagggagcaggttagtgggccagccacagttgattgactaaggagataagtcaccctgggaatttgagaaaaggaatttaagtgccattaggttaaacaaaggctttagcttaaacactttatgtaaaagttggttgtttgttttcagaccaataaaaaaaaaaaaagtagctttgacttccaacaaccattaactttgtttttgtcagcccatacttcatctcacccattaagaatcttccaaagtcaaacaggggacaagtttt

SEQ ID NO: 40575 - DNA, 754 bp, Homo sapiens
tttcaactctcactttctattactctaattttccaactcctaactgaaaaaaacaataatattattgaatactatgttatactttattaacttatgttgagcaccaaactgtggctagaggtcatactcctgttcatttagacttgtaagatttatgcgtttattattattattttaacctatcaaaaatattgtgtagagaaatagactttagaacaatgtttctcctccaatgttcacctaacgtcatgtgagtacttcagctaagtatggagaggtaggaaatttattttaatatgttcatcacaaaataagttctcaaattaacttttccatttcttcagtgggttgactttgagttggtcctttctaggaaatcagtatcattgcttgttgaaagagctacctcagaggactggcatttgcgctggggaattcccttccatgagcctctgaccccctttatcttgagttgttacataccactcgttgctatctgttagtagttgtgtccccagacctggctagaaaaattaaaaagaaacaaaactcttcttgtttattattaaggttgccattcacctataattgttcttctggtatttcagcctgcctttaatgatctcaaacttcccagagtgaacttttgaattagttctttgaagaaggcagaaaaatacatgtttctgtaaaacatattggaaagaaccacttaatacgattgcttctttgtaaatgaagttaattaccaaac

SEQ ID NO: 40576 - DNA, 849 bp, Homo sapiens
ataataaatcgtcaccatgccagcctttatattctctgagagaactgacctgaaatattcactgtccctccctcacttcccatctcctgtgactgccaatcaaagggagacagtcctgtcagggagctgagctgactcagcaagggtggaaacaagacctgcagttacttaacatttaatcacacaaaaggccctggaaaaaagagatcaaaatgtgacaaaaattaacctaaaaccaacagaaacggggacgtctaaatacacattgatgtgaaagtgctactcttagaatctgggaaactagtcaaacagtctcctgttcagggacatagacgttggttttctttttgtttccctcaaattcactttcatcttccattaaaaaactttgaatgacttaagaaacaaagttctcctgctataaacaaacacacacacagtgtgaatgcaaatttctaaccttctgctaggtcttcaggggaccattgccccgggcagttctggcctgctggactggagcctgctgtgtcaaggttgaaatttgctttgaagtctgacacagggcctcaaaaatctcttccagggcccactacctgagtctcagaattagtcattaattcggttgggacaagctgaagtgtacatgaacattattaaatacacattcctttgttgtgattattatggtaattttaaatggagagatgttaaccgcagggatctttagggttagataatctaatgattcttttgaggaactgagataagatttaaaagaagatagatctaaaactgacactcctgagagtacacctaattttgaccttgacttattttgcaacctaaggc

SEQ ID NO: 40577 - DNA, 699 bp, Homo sapiens
ctgctcccactcatggtgaaaagcaaagtggagtgtcatgtgcaagagatcacatggtaggaggggaagcaagagagagattggggacgtgccaggttctttttaacaaccagttctcaaaggacccagctgagcgagaactcacttacccctgagaaagttcatcaatttactcatgagggaagcacccccgccctacctccaacaatgggatcaaagtccaacattagccttgggggacaatcattcaaacttttgcagcctatcactattttcagttcttccacttagacatgtctttgctcaaaaagatatggccaaaaagagaaggggactctcaaccttattcctcatcccacactccccaacatggacatttctggcactcttagattaaacctggcactccttgactaaatctagatgttaaacattgtttactctgggctagtgtcatgttttcaactatttttaactattaccttgtttgataagcaaacaataaaccttcattccagatgtccagagagatcattttttaggtctatcattttctcacccttagttgagaattcttgcccaaggcatattgatctgagatgctgaattctccagatgataccaaagagtaaaaagctaagattcattgcattgcatcacagttgtccaacattcaagacaaaagtttgatcgctagaa

SEQ ID NO: 40578 - DNA, 1209 bp, Homo sapiens
atataataaattaagctctcaatcaattaagtcaaagaatatgaaataagctgaacaaaagtggaaatcctaattccccacatttatttcattaaggtgcaggctactgaacttatctttgccttatctgtaaatcagcaattgtagggtttacctgcctatatgtgtgtgacaaatagcaccaagaagactgtattaactccactaaatcactttatgccaatacaggtattttgagaaataaattgtgatcattccatttatatggattacagttgtttaaattgctatttttgtgttccctttacattgcttagaagcagccacattttaaaatttgctttgtaccctactaagctactatgaaggaaatacatatttgcctttctaagaaactcaaagtgaatttagttagaactaaactaaacggaggccttctccttctctgtcatttgcttctaagagaattgtttgtgtttttggactcaataaagatttttctgacctttacctgtctgcaattatttttttaacctcctttttctggattatccaactgtttaatatattcccgcagagtctcttggcctttcaaagtttaaaggacctattagaaaagaagtttgtgatatgccgtaattttacaggaacaaacaaaaggtcaaaggacctgagcccagagatgacaagatggttcgctggtaaatcaatactaggctttgtgttgaccatggcaaaagatttatgagcaaagggcaaatcatttagagggttcagggataccgtgtgcttgggtaacattgttctccctgctcttttacctcacctgaaaatacacttgatcctcaatataaacataaatataacaaaatacaagtttaaagtcaaaatctaacactgaaaatattttaaatgcaaatttttacatatattttcaagaaagtatacattctgtgaataatatggacgttaggatggcctcatggttcaataattagtgaatcctgcttccatttgagtgtaggtaaaaccttgaaattcctccaaagcagtctctagaaaatgagggtgtaggattaagtgcaccaccaaataagcatgtgcctaacatttgtggatttgaagacatatgtctataactaaggtaattatgttaaattaaagatcactctgatatcaactttagtcttgtagattgaagaaaaaaat

SEQ ID NO: 40579 - DNA, 1586 bp, Homo sapiens
tacatcacaacttccctaagaaatattaaattggcgcaacagtaattgcattacttttaaaggcaaaaccacaattactgttgcaccaacctaatattttcattcagtcaatcattcattcaactaaatttgttctagattctgaggataaggtagtgaacaaaggcgtctctgctgtcatggtgataagtactaagtagaaaaattaaagcacagtaaaggggtaagaaagtatacaatgaggtgcaggttgctgttatataggaggtcagggaattgtcttagcaactcttgtacagcacagaccttagagaagggaggggccaagtgggcatctggggatagaatggtccacgcagaaggtgtcctgcaagtctagagagaagtgagccactgtgggaaaaatgaggtcagaaaggattaggttgggtgaagaaggacagcgatcattatcaggtttgtaatccttccacagatcttggctttgacataaagtgagactttatcttaaagtctgtctaatctccaagtttaaagtagcacatgacctgacctacattgtagaagcatcactctagctgccttgagaagaaagagggtgtgggggctgggcagagaaagccagccaggagctaacttaagtggttatcgcactaattttcaggtaaagatgatggtggctcggtctaccatagtaatggtggtggaaaatcaggatgagaggctggacatatgtttaaagtagagatggcagaatgttctgatggattggatggggggcatgaaaggaaagagaagagtcaagggtgacatcatgggattgaagttgagcaaatacaagatggaatttctatttactgatctggggaattccgtgagtggagtagtctttaaatatttgttttggacacagtaagcttgaggtgtgttttagatcttctagtgggcatgatgggtgggcaattccgtggagcaatgctttgaaattataaaagtttaagggatcttaaccaactcccttcacttacttgtagggaaacatagcaaatgttctcataaacacatgtttattagagagcttttggcagaaacctcggtattttggaccccaatttatctctcatttcattatatcatgttataactacatatgaaaaaatggtcaaatttttataggaccttttaggacagcactttcacatgtctggctgagtgaaagtgattttacttatcacccctttgggagcgcacaaagcaacagttagtctctttttgatagtctggagttattataacaataacaactaagaaaagttgaaaataaatatcacagaatgttgtctttgtgtcatttaaaaataagttttatatatatatataaaatcacatcatatcattttccttttgtagctatggtacataagatgtaagagtaaagagatttgacaggaggttcaaagcatgttctcggagtaacatctaacctttactgtttaattcatgattttcaaatatctttcagacagataagactagaataggcctttcatgtttttgtttacagtcagtctctctctcccattaca

SEQ ID NO: 40580 - DNA, 463 bp, Homo sapiens
caaacatggatttcatgtacgtgctgaacccccaaactctttcattcagagttactttgtgactagtcctacctcttttatagatatgaactgtattcgtgaaattgtctgtgcaatacttggacaggagaaatggaaataatgtccgttgtgctgttggaaactgctgatcctgatcctactgagtaaggtgtcatgcactagtaacccgacctttaacctgaacttgcctttggggaattttgagaagcactaaatcaattgatatggtcattgcaattgaaggacttgtcaaattttttccagttttcaaagggggtaattggaatctaaaatggcctgtaaactacacagaactacagttttcaatatacacagaatctaacaacatttcatttcttctttatattctataacgcaaagcaggcaaaactattaaacaccacttcccaaggaaaggctg

SEQ ID NO: 40581 - DNA, 1518 bp, Homo sapiens
gtgctcacaggatgaaaaaaatgtatgaaaaccaaccatgacagagagcggcttggaaaagttattaacccaggaaagattctaacatggtatggtaacttttgttcaattcagagaactaaaattagttatatgaatcattatcccttatttggcaatttggggattttgtttcagttagtttacagcaatctttcctaacttagtgtttgctctgtgttttatactctttagggtataaaacaatctctaggtagtctgttagaggacagccaaaaataataaaagactggctcaattagattctggctttctttcttaaaatttccaagtttagactgtcaacttcagcttttctttggtcttctcagctgccttctaaggtacccaggaagttaagtacaaatatccatatgtcccacatacttctaggaaacctcatgtagaacacaatactcacagatactcatagcccacaaccataaagtgagtactttatgaaaaaaggatatgaaaaaggaagcattctggcaattgtcctaatctaggtaacctaattcttcaacacatgtttctgcaaccaagttagtgattctttcttgtggttctggagcaaaggaaagtaccacactgtcataattttatctacacttacaaatattttacccattttggaaaaaaggtcaatgacatatcgacaatatgttatttctaaagtgtcatattaagataattatgcctacaaccctcagacatatatcaatttgtgcttgactttcttaccggttattacatcagaccatagggagattatggttacgtgagcttcaaacaggctcaagtgtatcctcacaaagtgactcactggatcctctgaacaggggaattcacacacagactagcttagacagtgcaaggccagactgaaatactagtactttcacatcactgaaagttactggccagagatgagtaacttcttgtctttttttaacactgaaaaataaaaggtgattctgacaatataaaacaagcaaggttgagaatcaattaagtagaatcaaagtagatgggcctaaaagaaagctgaacatggcccaagaacagccttgtcactgcaagaaaatggaaatagtatgtgctaacacggtaagccaattgaagctttactgcttcccagctatttacttagtggattgtcctgtcaatatctaggctttaaaagattacctattccatgtcagaagatctcagtattgatcctgcctggacatgatctccctggtcatgttattttacagggccagattaaataatggtttctttacccaaagctactttgtctttacatcacagaaaaagttgaggaaggtaaatcgatggaggttaaaattataggccttaataaaggacaataaaggcaaaaagaagaaacaaccaactagcagtttacctccttttagcccatctcaaattttattggaggaatccattttttagtatactaatcttgtgata

SEQ ID NO: 40582 - DNA, 1674 bp, Homo sapiens
ctgatatataactagaacccatagactgatcccatatataatgagaacctacatggttctagggagaattaaaccagtgaatccatagaaagcccttccataaattaaagctaaatataaatatttattggatgcccactgagtgccaaacaccatggtaaaccctggggtacaagggtaaagatgacagagttaatccttataaagcactttatgcctggcatgaagtaagcactaaataaatgccagttattataactgccattattgtcaggcagtctttggctcatcttatccttttttcctctaatgctctgtggatcttgaatgtcttattattgcataacgttctggagaaaagcattaaggctcctgtttactgtttttttttttttgtaagaagtataatagagacaatggagagaaagctgtgaacatagatagaattttaaaattactgtaactgtgatttcttcgtttctctctatgaacaaacagttaaattgttccaaagtgcacataatataaaatggcccaccattaaagactgcaacaactactactactactgtcttaactgtcagacgccatactagaaccaccaatggcagcttattaacttcatcctgttcagattgtttgaaaggtttaaagcaatcgaacaaaggaaaagtccatttatttggaacaaagaaacttaggacttgtcaacaattgacctcgaaaaggtatctagagagttcatttactaagagaatcttgtttaagcaacagaaaataaacattttttttaaggcagcgagagaaggaaaagcaataacggaatctccccaacttgctttgctactttgagctttgctgacaacagaagcttttcagctgctgatcataaatagcctaaaatctcatttcaagcttcagtccacaaaaagaaaaaatatttaatactttgtgctacaacgctcacaggcactttggaacttctctgagctgtaagacatactcctcaagtaatatgccatggcatagaatcaatgagaaaataatttgtacaacaaacacaagcagacacagtaatgaggcagaaggacttatttaaactggaaagtcccagacacagaataaataagcatcctggcagtggagcctgggacagacatgagtgcatgtggatttgggaatgtgtttccctgccggaaatcattcaattatcaaaattctttccccctgagacttacaaacagaaaccttggcctgtgctcaaatattaaacattaatgatgttctcctgatgtttaaagaagagagggaaatctgtgttctactgcagttattagagaagcagttgggaggaaactttggatagatttgggggaaaaatgatattgtcatcagcttccagctttatttttctagtaagaagaaaagtatttccagccactcttaattatattttgagataggtgatcccttgttttcttttacgatggctagtaaatttattcatttaataaatatttattagatgctcattgtgtgccagacacacaatggaaaaccctgggtacaatgtaaagttgatagagtttatgcctaatagataaggtcctagatgggaagacagaccaaaaaaaaaaaaaaaaaaaaaaagagagagagagaataaaacagaaa

SEQ ID NO: 40583 - DNA, 1091 bp, Homo sapiens
tcatagtaatctattaccatttgtcccaactgtctacaggataaaatgaaaaaaaatattttttatttatttggcatgtacggccaaatctaatcttctactcatgttataaacaaatctaaacaaatattctgttaccgtgtatcttgattataacgtctaatgttagctggacctagatcataatcaacatcccatccttcctaatactcttctatccccaccccatgtgtctttgctcacatgtcctcattttgaaatagttcttccctctgggcctacaaagcactcgtgttcttgaacagttttagtcagggttctctggatatatatggttatacacatatatacacatacatctccttacagatctgtgttatacacacacacacacacaatgaaatgcattatatatatatacacacacgcataaacaactttatgtgtgtgtataaagatatttattataagaaattggctcatgtgggattacgtaaactagcaaatccaaaatctgcagagccaatgtcctagtctgagtccaaaggtcagcaggttgctgtagaaacaggaagagctgatgctccagttcaaaggccaacgggcagtcagtcttttgctctaaccaggacttcaatgattggatgaggaccacccacataataagggaaatttactttactcactccactctccactaattaagtaatgatttaaacattaatctcatccaaatactctcacagaaacacccaaaataatatttgaccaaatatctgggctccctatggttcagcaaagttgacacataaagtttactatcactagtactatcctacctccagatcacatgtaatcttcccagttcaccacagtagaataacttccttcttggaattcccattgcatatactatgtcacttgttaaatattcccatcctctagtctaattgagtaactttctgccagtacattttagctatacagctagattttaggtccctcaggaaagtacagcattcagtttaacatcctgggccctggagccagattatttagatttattctggagacagattcagctaattctt

SEQ ID NO: 40584 - DNA, 2169 bp, Homo sapiens
cttctcaggacagggagtttttggttatgcactctcatccttgtatgtttaattctacctatacaaagccttcctacagagatgctgactccagagtcaggcagacctggagttctttactagtcttagtattaagacttagcaagtgggggcaagatactgccctctaaacctcagttttcttacctgtacaatgggaataataatagcacatacctcacatgattagggtgatcgaataatggatgaggaaaattttggcatgaaagatttgacaaagttttgctgtttattactcttcctaacaggattcaaggaagcctattcattgggagtatgggagggcaatagtttttcttaaactcaatgcctccattttgtattcttgtctgacttcattcttctgattcaccatgaaactacttaaaagaaatgtactcttcacctctaaccctgtttccagcctcctctttctgactttgacattcaccactctactgcaagtcctcataaaattcacaacttcagctccatgttaaaagtcccttatcttagtgctctcttggcaagagagcaatgttttatatgccctccttactcatcgcctctcttttcttggctctcttggacgcaactccaaatagaatgcccagcacttggccggcacaacacagggcacataacggccaccaataaatatttgttcaatgatttaattaacacatgaacgagagttccagggtcacatttgccaatgatgtttgccgagttttcaatcctctcgacgttcacttccctgaagaaacagctggaatcctaaattccttgtaaggtagttcagttcatattagattcctgctaaaaggctaaaaccacattagtctcttaagaatattctatattaaggatgtcttagaaacagggggaagctcttaagtttacattatatagctttcagagctattgcacttggtcagaaataggaaacagaaatggtgaggcacatttccatgaaagctcaaattacactattttgtaaagtttaaaatctgcccatcattatccataaattgcagctatacattataattatttaatctacatttcttgttaaacatctaaattatgtcacttcaccaattacaggaattatgtgattaggtgtaattatcctaaatagctgaacacaattaaaacatcttacatgcaggaagtgtcatacatagtatgttattttttttttctcttgactcactgtccttggtctctatcagaaggagttagagactgactcagtttgaatggaatcagggaatttccagctttcaagtgaccactggctcaggggccacctacaacaattcctttctgatattaatctcattttcagacaatttctgcagttagaattccctgaagcttatcaccaataatataaagagcagcaatgctgactctgatattttatactgctcaagggtccaaaagatctatgcaagactgaattggaagattatattcagatttctctgcttagaagatcccccacacagtttgcctgactactgtctacccatcgttcgttaaaatgtgtttcagacagtcattcaacctttcaacctcttgatttttccatctataaaacatggatgattataatagacaataaatgtgaataataatagtacctccctattatcagtttcagcacatagaaagtacatattactcctgagttctcagattaaatcattgcttattcaggggccctgaacagcatttttcacttttctcacaatttgtaattaagtattacgagtttcgtagcttaatatcattttcctttattaagccatacatttcatgaagatatacagggatcgtgcttgttttgtgcctagcatactgcttacacacagagaatgctgagtgaatgaatgagtgatgaatgaataataggtaggtttttttgtttgttttgttttgaggcagagtctcactctgtcacccaggcaggaatgcagtggtatgatctccgctcactgcaacctccgcctcctgggttcaagccagtctggtgcctcagcctcccaagcagctgggactacaggtgcgtgccaccacacctggctaattatagtagagacaggatttcattgtgttggccag

SEQ ID NO: 40585 - DNA, 659 bp, Homo sapiens
tagaacactttccagagtttcactatgatgtactatgtagttttgaagtgtaatgatatggagatagtcctctctggttctatgaacttttctaaagcaatgcctgagatcagtaccccgactgccactggtgctcagatgattgcaaaataaatatttgctctacaaagaggtcagtgacaattgtatgttatgacatgcagttctgctcctgtatctgcaaggaagcacattatgctttctctgatagggcccagtcacctctgtggctgctcactgacaaatcctatcaacttgtcatgttccctagttgtctgtattacactgtgagcttcaggctgtattttagtgtatcttggttactaatctttgtctggaggtaattctttactttttattttacttcatcatgaatctattgatttttggtattgaccccattatctgatcaacattgcaagaatattttctcactggataaaaaagggatgagaaataataaagacaaattcttttgtaactttatattgtggatcaaacacatatactattttaacttagtggatgtaatgtttctttgcaaaagagatttctaaaaaatacgtaaaatatggtagtttgggaaagggaggaaaagacaaagaataaaggatgaaaca

SEQ ID NO: 40586 - DNA, 2111 bp, Homo sapiens
tgggctatttactgttagctccctgttctgcagcagagtgaaaataaagtaaggtcaagaaccaaataggtagaataaatgattaaaacaagctgggtataaggcaagagggataggaggagattgtggccaggtgcagagaaaagttctgtgaaaagagtaagctcaagagccaaacaggtaacataaatgagtgaaataggctgggtataaggcaagagggataggaggagattgtggtcaggtgtggagaaagctctgtgaatggtggcagctgccggtagacttcagttgaatgttaccatatgggttacagattcaggattgctagatgtttcgatttcaaggagaagctagaaattgcaattattatgagaaatctcctaatttttaaagcaaaaaaggacataatttcaaacttcttaactaggcataaaaggcagactattctgaatctgtttccaacttgtattttgccaaatttttaattaaaaatatgcttaaatgcttatatctgaaattttattaatgacaaagatccataaagggaacttagtgggagagacatgtataaagaattttttatctgccaggataaattcaatgaaaatccatatactgtttttatgaaatcacagaggagaaaatatctgactccccaagggcatcagggaaggctttttatttttcttcattccttctaggagccataaaacctaatcataccaagaaactttccattttccaaaaaagcatgaacttccagtctgtcgacctttttatttactttctcctcgaaatacctttttcccatttctactttatatactcctaataatgtataatagctgaagagaggtttatcttctcagagtttcccaggagttatcattaacttttcttaggacttattcacctggaagtagagaacttcacacattatattaacagtctctctctctctctctttctctctctctctctctccctcctctttctctttctctttctctttctctgtgtgtgtatgtgtgcgtgtgtcttcaacagtaggtatacagctcattgtgggctttgctttattatattttctttatattcctaaattcagttatgattgctgtacatgaaagaaaattgtcaaaagtttgttgaactgtggtaaattttactgttatggatattaatttgagttgatacattttaacattaaaatatgactctctaaaacaaccaggttatcctggttattctttcatcctctgggtagtatatatttattcatatgttgtcctttgttttccttggtaattagtattagaagatgttatagataaataaagaaacctcattacatttattcctttttaatttgagataatcataatcatcaaataaaagcaacactttagtctgctataatccatggtacactagtaaaagctcaaagcttatattcagtattaattttaggtcataagtattgagagatcataaagagagagccattataaatatgggaaactggatctagaaacacattcaaagactagctttcaaatctgcaattttttaacataaagtactgaagattatcagcagatgggtgtagtctgatctaaaattatgaattggttcaaagccagttgtttggcagtcacatcctaaattgcacatgtccagagctatttcaacttaaaacattaagcaggcaaactgcatgtctgcactctctcttccttcttgttccaagcagttgtcccacttggctgtgcaaactcactctggtctgagtccatggagttgagcaatctcattcttcctaagtgaaactgatcagtaccatcatgtcactaaccatataaatacatcctgactcacggaagttaatgtgagtagtcgaaagccttctgccattcattcattcaacaaatattttctgagcacctaacatgtgcatctttacaccgtattttgtagaacaactgcaaggaattgcagtgaaacaatagatgaagttcctgccttcatagagctgatattctagtgagtagaaatggacgctgtataataatatcttacttttaaacacatacttttaaattgcatct

SEQ ID NO: 40587 - DNA, 2376 bp, Homo sapiens
ggccagaatttactttaaggtgacagggaattgcttcatgtgtatatcgtcacttcatttttagccctgggactcttcctatacagtggccacttgaaatggcaagagtgcctcaaaaagatagggaagtgatcattcaggggccttcctcagtaatgaaacaaataagagctgattggaaagcaaatagctgttggaggtattctgtgggcttcgccgaagatccctgctgaaacaaccctctcatagtgaggatcgcaataattatcccttgtacaggctttttcttcttcctcatctcatgttctctcttccccaactcctattttttggaataatctaataaactaatttaacataagaccttgtttcaaattgtgcattcagagaacataagctaagggactattgtggaggctaaagcaactctatctttgatgccaacctgctatgttgacttatgattaactccagttcaggaaatgtttctaagattttcactttcactaacttactgcaaatgctgccttaggtcaaaacaatcttgatattattataaatactcacttgccataagccctaccctaggcaatttctctatagtatgtaaatcctgggtccaggggataatggctggggatctatcatctcatctcaccacaagacatgacttctgttgctaagtctcttgaatgtttctttctgagaaactggatttttgaccctctttcttcgcctcagaatgtttggcctttgggggtaagtttgcatagacctgcttaccacagaataatcattaacaggagtaactctagaaagctgaccctgaggattctagaactgtttactcactgattaaaaagtaataaagattcccctaccagtacggagtgaaattgtgataactcctggcacaaccattaagaccctcatctatagtggactggaacaaagcacaggtaaaaggatatctttggattgtgcttttgaacaattttgtgtttgccttactttaccgttttgataactttgttaactattgctaatttgttaacttctcttattttagaacttataaaaaagaaaaaagtgcacattcagtttaatgaggtgttaattcaaggaatgctgtgagagtcagaagttctaaatgccagtgtttaaaaagatccatgtcacagtgatcttgggtaggctgggacacaccagctcactgacggacctgaaaatggattgctgtgggactacaaccctactcaggatattctgagttataagtggtatgcttggttgttttgtcttacgtacagggaggagtcacctaaggtaaaaaaaaatatatgtataaatgccttggaagggacaaatgactcaatgtttggtcagggttcttggaaggtttgacaaaatgagatcagagaataggaatatggatggatttacaggagcgagcaaaatatgtgtattttttgtgttttatattaatgcccagcaaacattactcactatacaggaagcacttaacaataagccaggtagactagtgtatctttacttgaagggatcattacttctcatacttcctgttacttgtatgatgattccttaaaaagaatctaaattgtaaaagggataaaatctgtacattggttcaagagcttgagctccccttaaccaaagctaacttcactactgataatgctgaatgtacaaacagtcatcagcacagaacaatggatatggcacttgcttttgatataaataaataaatacaaagtatataatgatatggtaggtggagtccaatattacaaagcaaaattaatcagtatgacagagaggtggatgtctttttgaaaaggatgaacagaatttttgaataagaggagactggagcagagacctaaaagaaaagaaggaacaagggatatggatatttggagaaaggatatttcaggaaggttgaaatttaagttcaaagtctctggggcggaagtaggccttgtgtgatgaaataacagccagtatgccagtgtagctcgtgtaactgaaaaagagaatataactatatgaagcccacagtacatttggagggatgattataagactgcaaaagtctaagttcatgggtattattatgagtgaagtgagaagccattggagaatttgagaagaggagccatatgacctaaatgataacttaagagaatctctctgtgaggtgcattttgcccatggaataataataataccagatgcaggaagttactgtaatagtctttttgttttgttttgttttgttttgttttttgagatggaagctcactctgtcacccaggctggagtgcagtggcacgatctcggctcactgcaagc

SEQ ID NO: 40588 - DNA, 1497 bp, Homo sapiens
gacctattccatggtagatggctaattattgagggagcagtgtctagaagtcatgtcccttgtcattcaattacacatttttttgatctataataccatagttaccaattgattagggtgtttgcaaaactagcaaactaatgatgtatttcctaacaatgttaaatttacaggaataattcatagatgaaaacatctacaatttcctattaggaaaaatatccagcacgcagcctacagcatgcttgtacgtttttgaactgcaaacaaaactaatcctctcgatattaacctcaagtttaaattagtaagtcatatgtaattacagttcagtgtttaaataggatttacttgaggagggattgcttcagttttacacagaatctgacagaatgcctaaagtcaatatactcctccaggctaacattgcatctgctaggcaaactttgtctttactcaaacttcagaggtgaggaatgtgaattattgcctaggtggataatgattattcactacaacctatccttttttaaaaaaagatgtttctctgcataagacataaatattaataaaggcttttgttcaggaatcagtgctatgatcagaaaagtatgaagaatccatacttctagagttgagttagcctaaggggagacagaaatacctgacctatattagatgactctagcaatcactgagggagataacaaatctcaggaatcaaataagcaccatttcctaaggacggaaatacttctgaggacaatggtaaagcagaaacatttgctttggaactgccctagaaacgacgcataaaattaaaggggtactccaaacagacattttgtgtaagacaaaaagaaaggtgaaagagtgagatacatgtatgttgaaaagtattcagaactcacacacagcaaagcctctcttgtagccatatgaatttcacacatccagctctctttatttttagtttaaaggaggcacttatttcaaaactttatgcttgaaagataatacaaagtccagaaacaaggacctttagactttatgtgaacacatcatctttttcttccataactgctgaggcattgtccgtatgtcgctttgtgaaacatgttagtctagtacctcactcctgtattcttagaagggcctaatgtttgaaataaatatgctacttaatttctgcataactcatataaggtgactttaaaatatcagaaacaattttattctaagctactccattatactccttttaaattggggtgtggaggggacagacattaacatatgtcataaaataatttaataatccactctgttgagcatatttcaagtatatttgcattcactctatttccttgacaaattgccagtctgaaaactttaatatacaaaattattaaaattattaaagtatgtcttaaatgtcctcaaactatgtagcaaacatatccaacatgtgtatgatgacctaaatggaaaatatgg

SEQ ID NO: 40589 - DNA, 1721 bp, Homo sapiens
ctggctttctcactgacactatgatgctcctttgttcatgctttctgttccaactagccttcccagcaagaatatcccacagcttcacagctgaaattcccactcgttttacactttcaaactctctaatcttcccttcccacggttgaacttattatttctctgaagtatcaataaacatttacttcttaattaaccaaactaattttgtaattgtgtttacatttgattttataaaagacacggtcacctatattattgttttcttactatcatcttctaaattgattaagattatcttcaccacctacttttttgtttttgttctggctgccaaaacaaaaaatgactcaaaatttgaaacactgtaacacattagcacatccccttagaaatacatgacatttcattctaactactcattctacttaaatattttacgccctaggatactccactgtgtcctatctcatatctttatggttttctgacactttattgataacataatattcacataacaaacaggtttagcattctgatatcttccttttgaattaaactctttatcattatgaaattcctctctttagatctagttataagttatgactgggttctattttggtaagactggaaacttctggcttactgctgttcctaaggtgttgccttctttctggggcttttaaataaggatctttgtcacctcatcactgcaagattacaggatatattgaattctgcctgttagaagattttagctcactttttaatatttaaccgcacactgcttcaaattttgacaaatgccttgaggtaaagaatagacatgtttgtaaagactccaatatgtcaccttagccccgcatgagaagcaaaatgcctcatggtttcctgtccctcattagtgtacgtttttttgtttgttttgttttgtttttttaggcacaattcctgaattctcaagctctgactaactctagtcacttgtaaatgataagtgttcacatgtagaaaatagaaaatagctgtatatccccactgtcaatgcaccacttcctttaatgccattgtgtacagcctcttttgttgtttccttaccctagatggatgggtctccgtttctaagtactgtgagctgtgggccacttaacttattcagaattcagaaaacaagccacatattcaaggcccctaagtctccaattttgttactttagcaacctttgccaccactaaaagttctgtgatttagcttttggcccagcaggagctcatggcctggtgtatgcccacatctgcagccacacccaggaccagcaaatgcatacagggaaaaataacagctgccaattgtcatattccctctgaacagttctctgttctctgttctctggaggttctgttagtcctcattacttccacggctcttgtatgctttttaaaatgcaattttcgcaactcatcctgtttctctagcagttgtcagaggaagcattgtcctgacattaccaactacacctaactcaaaagcaagatttttgttttgttttaatcttcaatttctccctcttggccactagttttcttctctgtaagttgaaagttctatccaatcctacttaatacaactttcaacacttatgaaaaaaatactgtctttctggcaaggctcaccttgagtttgtttgtcctaaacatggaatcagttgttccac

SEQ ID NO: 40590 - DNA, 950 bp, Homo sapiens
ggaaaaatatagatggaacagtactagataaatatagatttaaaattatagctttttttcctctcttcagtaattctgttgtttgcagtctacctcctttgttcttttccttctcctttgtctttaaatgttttcaattgtctttacaatatacacatccccctggcaatctatacattcctaaaagttcaatcactacccatctacaccaggagtttgcaaacattttataaagagagccagataggaagtactgtttgctgtgtgggccttatagtctctgtcataacaaaggtatttgtactctgctctgtcatttagaaaatgctcccacagatcatatgtaaacaaatgagtgtggctgtgttccaaaaaagcttatttacataacacttgcaaggatggatttggcctgctggtcatagtttgtcaatatctgagctatactaataactcagaaagttttatctttagtctagagccttctattcttacactttctttctgactcaaagctgtttcttccttgatgtctcactgacccttcaaacctcattcactgtgttccccagcaaatcctgcttccgtgttctatatttcagggtttggcactactttcacttccatctcccaagccagagacttggaaattttcactaaccattttcttccttgtccctctttaaatacttttgtcaaatttgccatctaaatataatcttaactttcctctcacataatgtcttcacacctgatcgtttaacgcagtaaagaaggatcatttctttcagttttgccttccttccagctattacaagtgtgctctttgtaaagtgtaaacatgatcatgttctgcacctgtgcaaatcttttggggctctccaaagcctgatacattgatcctaaaccagattccagggcctaattttagacctccttaatgagaaacc

SEQ ID NO: 40591 - DNA, 2986 bp, Homo sapiens
tgcaccaccatgcctggcctttttttgtgttttgttttgttttgttttgttttgttttgttttgttttgttttttagtagtgacgggggtctcaccatgttgcctaggctggtatcgaactcctgagctcaagcgatccacccgcctcagcctctcaaagtgcagggatgacagacgtcagccaccctacccagccacagttctcatttataaaacgagtgttcttcgtactgttttatataaatactacactttccttggagtcctccaaagtatgtgaaaagaaacatgtatagcaaaggctaagtctgagataaaccgtcatttctggataaatctgtaactaagaacaggataaccttcatttagccacggagaattgtaataccataatactataattgtcgtgctatgcttagctatttttaactgattgttgacttttactgtgtgcctaccatatactcatcactgagctaagtaggctctgagaatacagacttaaccgggcaaatttttgccctatcaaacctggttgcctaattcatgaaagaaaattaaacatttacaaaaaacaatgccagctgtggcatgtttcttatgttatagagcagcggggagggtctttttagttgtgcaagggggctgcataggggaaattgtgagggataaaagacagttccccaggtggccttggactgccccagttctccctcctttctcacttatagttctcaggagtatctgtagaatgtgttgtgaatgtaatatcatgagacagacagggattggcaagccctggttccgttccagtctcccctactagaaacaggatgtccttcaggctttatagctcaatgagccctgcggcccaggacataaaacccagggtgggctgctttcctgggtcccttggctgcggtgcaagtggggcacgtgcagatcagactccatctgcactagacagctttcttgaaccttggggagtggcttttgaatcttagttttctgtcatctttgctgcctatctctaagtaataaacccacttcaagtaacttgtatgtgactgttctgtctcaccagactctgaccgcttggtaaccagtgcacagtgaatgtgcttcacagtaataactggactcgatcttaacttataaataggaatttgtttgttttttaaatattcctttcttacactgaagaggcgtgactgaatctggtagaaatattagaatggagcaaattggtgccacaaaacatatttgagatttaattttgaggttttactcatgatttcatatgctgggcactaaaataagtcacttaaacataacttttaaaagccaggcagtggttgtttattttgaggaaatcgcaatatatacctgtaaatatggacagataccaatggtcctaacattatcagaattgttactgttggcttggaagaaaatatttcagaaaagagtaaacattgaaatgatataatgaataactttttctcccaactaaatataaccacaatgaatcacatagcaattcaaatatttttttacttcagaatatttggacaggtctgaacatgaggcaacttggaaaatcccttgataattcaaaaattgactcgtcatgttgaggggatgagattacaaatgcatgaaaccctgacctagattagaccagtcagattcactctctcaagaattttaaattccaacagattccaagtgctggactctaaataacttgtaaaataggactggaacaaccatggttacctatcagctttgttgttaggcaagcagtgaaagctcaactgcagaagagtcaagtgctgaggaaagtaggattaaaagtcatgtggaaccaagagaggcagggagagatcgcgataatttgattgtgttggtttctgggttgccttgattgccttgtttgggtgctctcaatttcagtccctcacagggcctggctgcccttcttgtccttggattttatgggatccaccaagattgctccgggcactgactagataattgtgaatgagttttgttacatccaagcaaatgataaacacacttgtactaaaaaaaaaaaaagagagagagagaaggcagcctaagaccaagtaagaaaaggctaaatgttgtgcagcacaatatatacatgtttatcacagtgcttacttacttcttgactccattgaatgaaaacaatagaatataaatcaattcatatgctgccttcatattcccctggggtacacagtagtactaaaatcatatctaatttagctgagtgaggtggctccataatttcatctatgatattcagttgagagaaaaagctattcattttatcatttcaatgtttactcttttctgaaatagattaatttaaattgctcagggtgatcttggaatatcatttgacattatgatttttttccagtctgcaaaaaggtttaaaaaaaacagtagctgttagccatttatttccaaatgtccagatatattggatgtcagattgatttttctgataattatccagatgttgaacatatgtagagtaaatgttaaaaatagaataagcgactgccactcaataagtcataggttagggcagcattccgaatagaaaaatctttgaagaggcaaagtgtccttaatgacatcaatgacatttttccattgaatggctgccctcaccatcttattctattatgcagtaactttatagaggctttccttgccagtggccccctctaaattccttttcttattaacttttcagaaattcttctgcacaaaagggattgacagttgctcactgtaaggtctcccaggagaactgtcattttaagcctttaattaaacagagcaatcttttactttaggattttgcaaaacgtagtcaatagaaaagggaacgtttgaggaacaaagaagtttccttgattctcttatatcctaccaggtaggtgac

SEQ ID NO: 40592 - DNA, 3835 bp, Homo sapiens
gataaattagagtgggaatgaagcctgtgttttctgtaattaagcagtaataatgccatttctgacatactttgtctctgtcatcaaggtgatatgatttgcttcttaattacatttctggcgaaagtgaaataacaaagaaccacaccagtgaattcatctccttataatacatgttacagtgagtcttggttaatgctaaagaggtagcaaggaaagaggctcggcaaaccagattagattttcccttcctcttacttgtcctagtataccggatgttattattctgcatttcataaattaaatgtaattacattttagtgtcatctccatttctcataatgttgaaatgttcattgagcttaccaagaagccttaaatgtgggtgcatgggaagtgggatgaagaaaataatgccaatcctgatttctatatgctattatcaaagctccatttaaccactcttctagaggtggggcagtcacacctaaattacaccatcgactaatggagaccaactatagagactccaaaagtcttatgagcagtaatttttagagttattccattatgctttaggcagcaatattcacaatacccatcttagcatttggtgaataattctgaatctgaagcattattttccccctctcacttaatcataacaggtaagttctgtcaccctccaggtctcctctaaaagctaccacgtctttgtactgcttacagctttgtctcaagcaacaagtcccaccaactagaaaaagatcctcttcctcctccacattctcaatttggaagagccagctgagagcaatatggtggagtaggttgacctcagctgacacttcgcaaatatttatttagcactgtgctacatgtgaatagaaataaagataaataaaaagagggcccaagcccttcagaagctgacaaagtatgaattcacttgggaagattctgataagtttattcacactaaacagttattagctgacaagtgttagttccatcaggtgttattacaacaggttccttagcaacccagtttcttcttctgtggttggtaggaagcagggggagaagctgaggtactagggtatttctgtgtgggaacagctttagaagaaatctgtcagagaattataaagttgcccaactgaagctccagagaatcacctgccaacctatttcatcctggggctttcacagaatgggctcccaggaatgtcccttaacagattttctgccaaccaagaaagcaagtatgcagagctgaccttggagccaggagcttcaggagactcattttctcattaagaattgtattccctttaaaagcaccataatgtagcctgaaaaacttccttcctttaagagcttgtttcatagcctgacacactgtggagtaatagccacagaatttaggtttaattggcagtgatcctaaagggcaccactgtatcaaatgtttagaatgttaggaattttaggctagaagtcaagtggcctcctgagtgaatttcacatttcagtaagtgtataaatgacatgtgccctgaagaaagacttgggggtggggacaaattctagacagcctttttacaggaaatatttgtacatacagcatatgtgtgtatacatacataatttcttatatttaatttgtgattatttaacaataaacaattgaaaatcagggaccagcctactcacacaaaaaaattatacaaaattacttttattaattctataatcatcaaacagtaaaaatgaaaacttagggctcagagtacttacagaagtcttcctgcagaaaattatggtgacttctactatcatttagacaggattttagtaagtttgggtttaaaatatgaggtgtgctttgaagatcaaggcctgggccagttggcttagaataaggttcatctgcaaacacagagattcagtaaactgtcactagccaaagatagatcttgtcttcatctgcctcagcaccaggagaaaatttatttaaggagaaagaaaacaagaacaaggagtattctatagcttgtgtgtcttgtaacttgagatgacattttctgcatacttgctactatgtaatatccagtagaagatatgggatgcccacatctcagtggctcaaatcacaagcaaaaggcagtaattggatgtccacactgtccatcatctcaaggacaacagaggcagatgggccacctcaggtgcagaaaccagatatggtgaagggacttgagaggctatgaaccattctttattgtggaggggtgaggtggggtgagcagcaaggatgagattggcagatatttcccattctgcttgcagcctttcccaccatgggattagaaattggcatggaccatatctgaatgctagtaattttatccatcagagcctgatgagaagaaatgagagtcctggaccttaactaagaagttccacggaaaaacaatatatgtaaaaataaataacacatgagataggcactcaagaaatgttttcactgataatatgaataataatagacaacattttggtgggaacttacatgtgtcaaacacttggctaacaatatactcatgtggttcaagctctgaaacttatttttttccataactcatttggcaacaagacctgactctacctgaatttgtgtgatgccagaacttgacctgaactgctgtgcagctatttcttgtgtttatttattcaacttagtggaaatatttctatattttcctgtagaatttttgatgtgtttgactatgagatgtttcccaaactctgttatggggtattgtttaagatataatatatactccatataatctttccttaaaaaataaaaatttcttattccagggtacatctggtctcagagggtttagacaagggttgtagaccctgcgtcttttcaacatcctttgatttagcaatataaattatctttattaattgaagataaattgagattgaagcacagagattttaagtagtttctctaaggtcacacagttgatactgtttgaagctacaacttgattttagtcagtttgccactaaggttatggtcttaagtcactgctctgtactgcttcttatatagataatgatatataatagagaaacaatgaagtttactagtaaggtaacggaaatgcctacaaataacagtaagaaaatacagtattgcgaacaagcaaatatagttcctgtcagatatttgacaaccaatctaatgtgttgactaagagctataggcacaaaaaagcaatgctggatagaaaaggagtggggcgagagtaccttatcagtggcagggcttgggaaattcaggatgtcaaacaagaaacaatgccaaagagatatctttggaatctttgtgttagagcctgggaaaaccccaaagcagccactgggacggggatcatggcagtggaagtaggagagccacagtccttgggggtctcaagagatatttgagaatctctgcttgctctgcccttcacttagaaggggatcttccacttgaaggagcctgtcacattggcagtgtatgggtcacaaccagtttgctactgggggcccttcctcttattttcttctgactggtaaacagagtttgtgttaaggagcgctgtcaatgtagaatgctcctcattccttgcatataaataccataatctgtgaaggctgacacagaggtgactgggagaaacagagagagtaagagcttgcatgttgtctatatttcatagataatataagactatacctagaaaaccccgtagactctgaccaaaggctc

SEQ ID NO: 40593 - DNA, 2182 bp, Homo sapiens
tttttcagccccagaatttctgcttgattttttcaaaagcatttcaatctctctgttaaattcatctgatagaattctaaattccttctctgttaaattgcatttcacgagcttcctcaaaattgctatttcatttttttttttttctgtcagaaaggtcacatatctctgtcactccaggattggttactggtgatttatttagtttgtttggtgaggtcatgatttcctggaaggtcgtgatgtttgtggatgtttgccagtgtctgggcattgaataattaggtatttattgtagccttcatgggtcagccttgtttatactgatccttgggaaggttttctaagtatttgaagacttgggtgttgtgatctaagtctttggtcattgcagtggtatccgtattaaggggctccactcttgttgactcatagaggtactaccttgatggtcttagttaagatctgagataattcactggattatcaggcagaatctcttgttctcttcctttactttcccctaaacaaaggtcatctctcactctatcctgagctgcctggaattggaggaaggggtgatgcaagcaagttcattgccaacaccactgggactgtgctgggtcacacttgaagccagcacactactagtcctcaccgaaagtctctggtgactattgtctgggtaccagtgatgtttattcaaaggccaagggttctttagtcagcaagtggtgcatcctgccaggcctgggtccttccctttagggcagtatgttcccttctggcccagggtaggtctaggaatgccatgctgaagctatggcctggcactaggaactttagaaacctacttcatgccatattttactgtggctgaggtggcacccacattgcaagcaatgtccctttcactcttctctttcctttcctcaagcagaaggagcctctctatccatggccaccaccaccccaaggccatggcacccactgcctggttactgctgatgtttgttcaaagcccaagggctccttagtcagcagttggtgaatcgtgccagaactaggtctctcctttcagggcagtgggttctcttctggctcagggaaggttgagaaatgccagctaggagctaaggcctaaaactggaggctttaggagtctgcttggtgttttcttttactgtggctgagctgatccccaagttgcaagataaagcccttttcactcttccctctcctttcctcaggcaggagtctcttcccatggccaacacatctgggaatgtgccgggtcacatctgaagccaacatggttctgggtctcatcaaaggcctgtggcaattgctacttggctactgttgatgtttactcaaggtccaagtgttcctccgtcattaattaaagaatcctgccaggactgagttcttcccttcagggaagcaagttcccttaaggcatagggtgggtctagaaatgtcttctgagagctggagcctgaaataggggcttcagatctctgcttggtgttttattttactgtggctgagctggtatccgagttataagaaaaagtcctctttactcttccctctcctttcttgtgtaccccatgtccactggctctaagcccagtacaacaccaggacttgcttaggaactgcagtccttgtggtctagactttcaaatttatctggaaccccagggtactttagtgtgcagtgttgggtctagctggaactcaggttccaaatgctgggacagcagaaaatatccctctgcctagggctggtctaatggctctctttgcgggtgctggctgaattctgcccatgttaccttctgctgtgacagggcagcaatgagttccaatgcaaagtcccacagtcactgtgttttccctcccctaagcaaacagattctcttcttccatgtgccatgtggtgctgccaaggggtgggggagggttggtatagggaattcaagactgtctttcttaccctcttctgtgcctctttgcttgaaataatgttaaaatgaggtactatgattgctgacctgatttttggttcttatgaatgtactttcttgtgtggataattgttcaatttggtgttcctgtagggaggacaatggctggagagttctattcaaccatcttgcacgaatttatattttct

SEQ ID NO: 40594 - DNA, 1043 bp, Homo sapiens
taaatttaacaaaatatagctagaaattaattttaatcactgtgccttgtctcttggttgcaagcaaattaataatatattgactttacagtttactgaggtatgattaatggtcaatattaaaatttctagagtcttctggcaaagtgaaaacctgactgcctaacaaacgctcacacatacacacatctgaatgcaataaatcagagttactgaaggtaagccctgtgagatggcccatctggtcaggcctggaagtgtcaagtattgtcccaagcactttaagctgccagcctctttatcagccactctctttccagtcacgctcctgttcaggtctttgctacatgctctgctgattaccttggaaaagggcaatgctgtaactgttcaactgacctttcagtttattttctcttgtgtaatatgaaacatgagctaacacagtcttagtctactgatttctaggaagcattctgacttaatgtttcaccagctcttggctcaaataacactctgctcttctgtattcaggtttctctttttggaaaaattacgtggcaaagaccagaggtatgggctagacagacagaagctttaggtcctctgcaaggtggaccacatctgcacagtagtatgctcctgagaatgtatggtcaactaacttgctgagaagcaatcccaatcttttaagtcatcactaggatattgttcttaatgtgactttcattgtatccatgaatagtttcaaagtgatgatgcttatgtcttttctgtctttcaatatggatgttacagttactcaaacactgtcaaaaatgctatcctcaccacgggaaaaacaaaatggagagggaggttaaagaatcgaaaggtccacactctagacccaactctaagatactagcaatgtgacctttggaaagatgaatatccaaagttttaggttcttcttctacaaaatgaagaagttgaattgaaaggttccatcctataatctatactctaaacttctttgattcttatttgggtgctaaaatttt

SEQ ID NO: 40595 - DNA, 666 bp, Homo sapiens
tgtggctagcagtggataaccagtctagtctagagctgagacctttagtttagccatatattgcaatggattatacaacaaaaatatattctaattactactggaaagagaggaggaggagagaggggagaagagagagtgaaaaaaggacaagaagaaaaggaaaaagaaagaaaaatccctgacaaaagaaaagtacaatgtgaaagatcaatacaatgaaattaaatcaaattctaatcccaaatcaaatcactactgctgccttcttatacacaaagatgtataacagaaaagctaattaaatgtttctcattaaaattcttcagtgttcaaagtctatcaagtatcgtccatctgcccctccaaattcacccccccttttttttttgcacaccactctctgactcaagaagctggtatgtggggactgcattagagtatccatgcttttctctgtagacagctactctctctgaaaagcagtttttagcttactaggtgctagcagagattaacagcctgcccattaaatattaagtgactatttaaactgcctgtttggaactgattattatctgttctatcaaacaaaccctcaaaatgaacttgcaaaatggaattccactataaaatggaaatagtatatacaagaccagaccaaag

SEQ ID NO: 40596 - DNA, 2475 bp, Homo sapiens
atgtattttccagttgaaaaacttcaattaaaaaaatctccattcaaaaatgaagctcaagtcaaaacgctacagagaaatttgtattttagaggtctgatactgtgtaagttgttcaaagcaagtaccttcttttcaaattactatcaagttctttgttttccttatttaattaaacacaagtcatttggggaaaaaaacctatagactcaatagtgttgaatcaatatttgaacacagtattaaattaagttttgcaagattaccaactttaaagcacagagtttatcatccaacatctggcacgtgtgagtcctactaaaccacctacttgctacttcctgatcatcagattcaaaagcatgtttgctttagggtactagtttgagatgttttctacatatctagatggtcaaggtctccatgagccatattatgatgagatcagaagacttttatcaccctgccctaaaacaatgaaggtgttcagttcttctcactagctgaagacaatgtgcctctaatctaactggcacagcaagaaaaaaaagatgccgtatcagttgtggcattccaggtgcaaaggactacaggagtcacccactttctgtagttttagttacctgaggtcaatgtggtacaaaaatattaaatggaaaattccagaagtaaacattcataagttttaaactgtgtgtcattgagaatagtgtgatgaaatctcacactgtcccagctccatctcacctgggatctgaatcatccctttatctgatgtatctacactgtctattttacctgccacttagtcatttagtagctatctcagttatcagatcaaataaatagtatatgtagggttcagtactatctgcagtttcaggcatccacttgggggccttggaacatatcccccatggacatggggtgacaaatgtatactgatactacattttggaaagcaaagcaactaagagtcactctctgattaggattatgttactccatatttgatctccaagatccattcatccaatcagcaaatcaaaaagagatgttatattctccactgagattgaagtctttgaaggtagccctgctctgtgcaatgtttgtagggatgtagcactgcttaaagttttgtcttttgttagtgaagggcagtttcaggggcttccacttagtcttcctaaatagtcctcactccacaaggggtcaatgtgaaaattctgccaatttccaggcttgatgcaatcatgcattcaggaagtgggaaaatcacaggactagtcagccaagccactggacccatggcgatgcggatgcagctggaagtcaattttccaggcgacttccataagccttgactcgaactgatatgccagagtggcactgcggtccccccagggattaatccaggacccatttttattaattttcaaaagtctgggctttttcccagtaaacagcaagtccctttaggaaagccttggaagatttaaagtgtacatttgtggtagtatttcatgtcctttctcaagggaaatcagtctcaccttcaatcaaggggctccaaagggctcctattatcagtagcaaatgtcaagtttctactccacacagctagaatttccccagttatagagatcaagtaaaaatatgttaaatggccaatttattgtatgcttaaggacattataaccaattagccacgaccactaaaggctgcatttcaaaacactgactgccactccacatctaagcctactatgaaaatgatagctaccttatccatgaagccaaagcactgccaaaaaagccctttgccactccagagccccgtgatccccactgaaatcaattctagctcaatggcagcatatcccagtaagatttcccagctgagagataccatacaggtctgctcccctcaccaagacatttctcaattcttaatcatgggtatgtcctctggaatctcagaagggttggagtgaggaggtacaggagaggactgcatataataaatgtattgtgccatttcactttcctcctacctgcacagctagaaacgttaagggatctcaaccacattgaaatgttggccattgctgaacccaagtttgaatcaaataaccaggcaaattgctggagccatttccaggtgctgaagttaacacattaaatccagactcctgttaacaacactcctatacataaatttggctccatctgaattaagtacacacatatttgtatgttgcatcctccttagtctacttagaattcaaccccacaagttacttccagattgctgctaatacaaattagcctgctacctgatatgtcaattatccccgtgaaagactgggatctggctcagttttaaaccggaaggaaatgagaggtaaatgtacagttaaagcactaagagaatagtatccctttggctacagggcttcctaaatatctcca

SEQ ID NO: 40597 - DNA, 3922 bp, Homo sapiens
agagcctctacttaaaatgctatctcctctcaagccaaaaattatacctaattcatattcatttgggatggaaaggaagataacctgtttcattcacttttaaaatagcactttaaaaagagaatttgctacctactaaatgaacttgaacgttataaaaaaatcagcaaatcagtctcttattctagtgtgaatactgctgttcaggaaaatgctatgaacaactttaaaagttcaggtggacaattaaaattctattcattaaaaaaggatggtttatgacataaataactgaaacagatttgaaataaatatgaaaactgggcatgcatgtcttccccttagtaataaaaatgaaataatatttttgtgaaccaaataatatcaaagaaggcataggcgccccatcatttgctatgccataaacacaaaaaggaaaccttcttaggaaatccacatcgaattttaacagtgaaggtgaatgaagccaggaatgatagaaattactactggcctggctggaaaatcatgttgggcctgaggcgaaagaagttttttaaataggagaatgttctgaaatagaaagcatgttaaacagaattgcccgaggactgttaggaaatgaaaaattacactaactgcattgggaacagcaacctgataaaagcacaatgcacaaattacaatcttcttcatgagtagtattagacacgagaaaggttaagcggtatgtgagagaggttttgcccaccacaggccactacatgataaaagaattactcccaactgtttctagggaccctccaacaacgacagtaataaatatttctagattcctaatattacagaacaagctagaccagacccctagtcaatacacatttgcaaaacacccctgagtacaaatctctattctaaattctatagaaaataccaaaagacaataatgtgtcccctaactatattcttctcttcttaaattcaaaacacacagccagcatcccaaagatgctcagtgagtcagcacgtactaaacagcatagtgtggaaaacacaacatggatgagagcaggaaaacaacattccactggaagaatgtgactgattgctcatgaaggcaaatacttctaaaaatggcaatgttttcattatgagtatgaggttaactattatttaaagttatatatgcaaatataaataaaaagtatgaacactgaagaaactaccatctagagaaaacaagaaaagcaagtcatgaagaaaagaatataaaaagacacaaggcacacacacaatcatgaacacacatacacccccacaatattatcactagttttaagttttaacagagaatcaatctttccaacccccctctcttacaggcaaagaccaactcaaaaataatgcaagtcataatgagtcacctcactttagcaagattcatgggacaacgaagttagaaacagctgttaatctgggccgaatccaagtgaaattggaacatccagaaaggtctagggctattaaagcagacagcagtcacctgatctcagtcattttatcaagaaagaccagatttactttgtctggcccatgtttttgttttgtgttgtttgtgtttttgctttataggacggacatgatgcatttagcattaaaaaaagacatgaataagaattacctcaatgaaaaggtcaacgtggactagccatgccaagtaacttagggcaaacatgaccacctacttagccactgttaagtatgtggcatatctccatgtttacacttaacatatcatctacttatttatcttcaaatataaaaaagtcactggtcaataattgcagagtccctatcttaggctaagtcagaatttctttgggtctaattacctctgttatgaacacagggctgactgaaccattctccctccttaatcttccccttgaatctctttgtggagtgataccaactttttccaaaagctgttatttcaaatacccacctgcactgtctaatatggtagccaccagccaaacattattattaagcacttgaaatatgactagtcccaactgagatgtgctataagtgtaaaatacacatcagatttcaaagacttagtacaaacgacaggtaaaatatctcatcagtactcttaagttacatgttgaaatgatactttgaatacattaggttgaatagtgtaaaaattagttttctttctaccttttttaatgtggctactagaaaagtttaaattacctgtgtgatttatattacatttctattggataacattggtctgggcaggacacctaacatggaatcaggaggagcatgagcattcagtactcatttgcttttctggaaacctctccagataacactcataatgtcccttgactcactcaggaatgcagccacttagcttactcaggaattgcctcattcccattaaaaacagcccactatcccttccaaaatgggcttatctgttataaagaaacatgttgctgtgttttcagatatgatttgcaagctattttagaggcttcagtgctcacacaatgtggcaattcttacacaagcacattttccaactgaaccaattttgcaagtaaactttcactgtaaccaaagctgtataaaagttcaaatgataccttcattaaatgttttaatgaagattaatgtcttagctcttacattatttatttccacaaaacccacagacttccacattcttaaagactcattctaattttaatagagaaataattttgagaacttaaagcaattcaaaagaacttctttgtcatatatgtattatccccttccttaatagaagaagatatgctttcatctgtattacactgaactttgtgattaaatatctactctgtgtttatttgcctaactgagctcctgtcaggtaggacgcctatcttactcatatttgttctgctatcatatagaaaagtgcctgtgccaaagagagtgttaggaataaacttcttacaaatctgcaacagtaaaactcatagtacagatgtaagaaaaagcaactttgataatattaacaataaaaccctttttacctataataagagttagaaaacttactgtgaccaccaaaaaattaagtaacttggttaacctcatcagtatatacatgtattacttatttttaaaaatttgaaatacatacttatagcttacatatttacagaacaaaatttagccctttgctaactccattttgaacagaggtatgggactacctactactgaaagtatcctctgggaaacagcagcatcagcatcacctggaaacttcttaggaaggcagactctgaccccaatgcacataaaatgatgtatatgtaaattataacaataataattattgtaatgatggtgatgattattattattatcagtaaacttggtagagatcacttttggatgtttagtgcttcaaattcattataatgagttacaattgtagaataaatatttcctcaaaaacttagcacaaatgacaggtaaaatatctcatcagtaatcttttaagttacatgttgaaatgataatttgaatacattaggttgaatagtggaaaaattactccactttacctttctgtttaaaggcagataaatttttagctatattattcataaattttctaaattttgccaaataaacgtacaaacaacttccatctctcaacaactaatcaatttctatttggaaagtggcatgctatgatttctaatatatttataagataatgaaccctgataaatatcaaagaaaatattaatattggaataaactaaaggctaatttcatttagataaaagaaactaattttgtaaaatactgacattagttaagatttaaccaattcattctt

SEQ ID NO: 40598 - DNA, 6955 bp, Homo sapiens
agtttccctgcacaagctctcttctcttgtctgccaccatgtgagacatgactttcaccttctgccatgattgcgaggcatcctcagccacttggaactgtaagtccaataaacctcttccttttgtaaattgcccagtctcaggtatgtctttatcagcagcatgaaaacggactaatacagaaggggaaaaggccaaggtaaagaagggaaggaacatccaaaacatcctaagggaacatccaaaaaatttcaaatcaaaagatatctgttggggaaggatgagacagtccatcaaagagaaatttccttcttcatcaccttaattatatactgttgtttgtacctcaaattttcttcactccttagtaagcatactttgcacctaagtgtttgactggttatgtatttgtgttaggccaaagacacacagtccaaatggattatcagaaataaatggaaaattggacaaggaactaagaccagattgtatgaaggaaaaatgttttattcttcaagtgttaacaatagaagttaccactaacaaatgccaaattactatttgatatgcctaaatggaacatgtatgctagcaaatggccattactcagaaccaaggacaaaagtaaaatccgggtcagagtgaggcatgagggcccactggacgagacttttcaccaagcacactggattctcttcccttctttatcttggcctttgttcccttcattagttttggcaaaccatgaaagaagattataaatgcttcaatcccagtggagttggaaataaagtacatgaaagaaacacttaataaagaatgttaatctgtttgtgtcatttaaaaaaaaaaggaagggggtgtagataaaacatttccacaactcttctttaataaatatcttaagtgtccttttacaaagcacacaggtaaattaatgtcatggttacaaggacatcaaaaaaaaaatctaaccactacctttaatcactatcttttgttctaaattttttctgactatttctaaatcaaatccaaccttaaacctatgacgattatgcactaagtttctctgaaagcatatactgtaaattctgaaaacaatttcacaaggctgctcctcatatggtttatataagagcataatcatctgattaagtgagggacagctcaaggtgattattttacagaggcctcattcactactatatacaagctcaagaatgaaacttcacatcccttacaatccctagagcagtgttttatttataggagttcctcaataaacacttgctgatttgaatgcatttaatacctgaaaatgctaggacacaaacaatttgctgggcttttttcaaactccaaatcaacccattttcattactctcaacgctccttcatgccagttaactagttggatgttttccatcactcgaaaaattggccatgtatattctgttgccaggatagtttccattctgcagtgtctctcctaaaaggggagaaactattaaatcaaaatggggtaacctcacaagtataactattacaacttgtataatagctcttttacttcaaacaacaacgacaacagaaaaagacctgtacctttttagtggaacttatgaatagaattattagcccagtaactaaagttgtatggtacacaatggtagaagacaagctaaaacgacattggcctgtaaaagttgctttcctgacctttctccctcttcaagatggttaaagtcacacacggacaaatgttgatgtacatttaacttctcaatgttgatccaaggggagaaaaaattgatcaatgtaggtgtaatcttcccctaaatgaggaatattagcaaggaaaaaacaaaaggatatagtgtctgcctgaaggaatcctcttagatataaaatcacaacatttgctatgaaataaactagaaagttttaaatgcgtaattacacgtgccaggagttatgcccacgttactccacaggcccacgctagtgggtgccaaagtcagaaaacctgcagcggcggtgagtcactccccagcagcactctggggaataagtgttggagccacagcacgtaccctatggcgcaagaccgctgattagaacagaggggaaaggggatgaggaaagaagtttcttcagcgcccgctccgggcaccagcgctgtcaaacctgccactacggaagccacagaacccggttacccgagtcaccccgagccccgcccactcaggttcctccccgcctggggcggggttggcgcgcgagggccgaggggcggcccgtgtcccgagacggctcctgggaggcgggctgcctgtctaagtgggggtggtgggattccggcggtacctgcgctggaagtccacggcgtagggcttcaagtacgggtcgatctccaggagtctggccagttcgggcacgtcagccagggcggcattgagcgccgcctcgtagtcctcgggccgagccgcgggagtcatcggagccgccatattccgccgcagtccaagtagccgaggcccgagaggtcgagtggggcctgagcgggcgctggagctctagctgggacgcggcggctagggcggagccggagggcgcctaggcgtgtcgaggcaagccgaggcgagccgcggcggtccggggccctttatagccgggacggaaggcctcctgccctttctccccccgccagcggggaggagcggatcccggggtgatgccgggacgcacgtccggagcgggtaggaggcaccgaggcctctccgcccactcacgcggctggcacctggaggccgcagggacctgccctttcctccccttaacggttttttcctgctggcggaggtcattctaggaggtgggtcccaagctgacctcgctcagccttggccttcctcaccctgacatattcttggcttttctttacccacttaagcacccactgacagcgaccccttcaaattggacataaggggtttttttggaaaggaccgtatttctcaaagttctgagacttttgaggggcagtatttcaaacatatcatgtaaattcacagagaggggaacagtcaagtgtagctagagtactactgctgaaaatgttaatacctcttacaaccaggactctcctaagtttgccaggtcacgtgaatttaaaattaaccaagacacagaatcctggaataccgttggaattctgctgttctggtactcttttctgcattaccaacagctaagaattttagccatgggaagaacttttctcattctccgtaaggccaaaaaggaaaaggcatttgcctgtgtttataattgttaacaagcttttcaacgattaaactacctttgataacacaaatgatatcattgaattggaactccactctgccacttacagtgataaggcaagaaacctctcttcctcttggcttgggaagctcccacttggaattcccttcttttattgccattaactgactagcttctatttcaataattgctttttaggaatacagagttggactccaagagagatggacccaccaaacccaggagggtccaagctgctttacacctagaaactagagaggattgaggatatttttcttgttaaaacccagaactggaggatcctaggggttatggaggagaaacagtattaatcagccgtgggccttgaattttaaaatatttcaaaggaaagtttttataaggggtttcatagacttgaaagataagtggatatgaagacagacctcagtgtgaaaaagtgaaggacttgaacgactttaagacgtgccttgttttccataaagatgacaaaaaactgctgcagacatttgtaaaatataaagcactaaaaaaggaagaaaattaaaaaaaaataaaaacccgaagcaggacaactattaataacagacccacagatctacatctccaagcctaaacttttttcagaaacccaggcttgtatcactgcctgtctactgagatttccatttagctggctaggagacctaaacaaactgtctgcaaaacgtgacctagaatccgtcttctcatccttcctgctgtcactcttatgcaggccactgttttccttcacttggaccagaatgtagctctctaactgacttcccctcttctactctttctcacctctactccattctctgtaccagtgtttctcacactttaatgtgcatatgaatcacctagggatcttaattgagttccgatgtggtgcttcagattgcatttttaacaagctcagaagtgattctgatgctggtggttggggacacagtttggtgagactctacactgagtaaatcagacgatgtcatttagcaacttaaatagcatagtatttcacttagggtaaaatagaaacagcttatcattctctaacaaggcttgtataatctggaccctgactacctttccagccacttttctcatcattttccagttttactatgctctagtcacactgactttcctggaactcagtgaatttgttgtataatagcctctaagattatttgcttgctgttctctctgttggaaattttcagggagctgagctctacttgcttaattttttccaagccttcattccagcctcagcaaaaatgtcacctcatacctgagaaacttctgattatagactcctcagtgtcttctgtataacttcaatctcttctatgcaacagttaacagaatctaggtgtttgtttttctcctatttattgacctttccctttagaacctaagctccccacgagcacgatcctagcgtacatatctgcctacctaggtggttcaccattgagcacatatttattgaagtcccatgtgccggccattttcccacgtactgtggataaatgataagacaagtcccagttgtcatactctattgggggtaggagggagaggagacacaattaccagtgaaatacataaaataatacaaaacaatgtcagatagtggtaagtgcattgtcgagaattaaaactgagcaaatatctgtgttagttccggtcgtcaagaaaggccgttcagaactgacatttaagctgaagtgtgatgacaagaagaaatgagccatgagaggaagagcattccagaatggcagagttcgtgcaatggaggaattgaattggtcttttaaaaaaaaaaaaaaatctagcatacccggtgtgtaatgaggagtggcaggaattgtggtgcaagagctaggcagctgttcgttcatataggccctttaatgtccatttaagggatgctattggagagttttcagcagaacactgatatgatatggtttaattattaaaatattctatgtggcaaatgaattataaggatacaagaatggcaataggggtgccattcttgtgggagacaagggagacaattaggaggtgattaacattgcctaggcatgaaatgatgatggcttggtctggggtagcagataaaatgatgaaataaagatttgggatgcatgatataatgaatgcctaaactattatgaagtcatttagtgtctgtattagttacctagggctgtagtgattaagtaccacacactaggtaatttaagcaacaaaaatttgtcaccttaccctagttctaggggctaaaaatcaaggtgtccacaggtttggttctttctgggggctctgaaggagaattattccatgcctctctcctagcttctggtgatggccagcaatctttggcatttcttggcttatagttgcatcatttggatctctgcctccattgtgacatggcattttcctgtgtctctgtctcttcacatagtgttctttttattaggtcaccagccttattgaatgaaggacacaccctatttcagtatgacctcatcttaactaattatatctgcaattattatatttccaaataaggtcatattctgaggtaatgttaggttaagacttcagtgtatctttttgtggagaaatacaattcaacccataacatttttgacacaccaaaacagagaaaatatttgagaaatagagtttataagatttggtgactgattggatatgaaagtgaaaagggaattaaagattgaacttctgagcctgggggaattctgtctagcaaaaataaagaaggccttgaaagagggagaactaagttcaaggtgtcagctcctggatacccaagtcaatatggcagctggaaatgtaattctggtgcctaatagatcatgtaggaatgaagataacaattagagaatgatccatatgcgtttactagctaacggtggcaaataggagatcctcaataaatattttgaaacctttctttcttggtatttgagtctcatgtcacatgtttgcttttcaatagtttgcattacaaagccaaagagttactgataatgtgctacatcacagttgaaccttaaaaacatagcaagtgaaagaaaccactcacaaaagaccacatattatatgattccatgtatatggaatgttcagaatatgcaaatctacagagaaagaaagcagatttttagcttcctagggctggagggcaggggaaacgaagagtgagtgcaagtggatatgcgatttcttcttggtacacattttctaaaattagttgtggttatggtttcatggctctgtggatatactaaaaactaattgtacactttaaatggatgaattgtatggtatgtgaattatgtctcaaagctatttttaaaaagattctgaaggataaaataatactaaatatgctttttaaaaggcaaatgatttataccaactaaagataaactagactatataaatataccttttaaaattacatatccccctcgttgaaaatcattagcaatgaaaaagaaaatcagagagcagaaagaaaaaagaagtaac

SEQ ID NO: 40599 - DNA, 892 bp, Homo sapiens
aggaaagtggttgaaattttgctttctttatttaccaagagtttcttatgcaaactggtgcacccatgttgggggctctgattaccaagagttaggtgaaacctgctaaatctagtggaagatttgttcacttaggagtgactttatgccttacatttgcataagtgtgtaaccgcacagagtagagaagatcagctccaagacagctttctttctttcttttttttttctttttttaacctctgcttaaacagagaagcagctggtactctgctcagtaaaacaaattaaagccctgcctcaccaggcattccaggctccctgttccactggtattttattatacgcagcctcaaagcagtctttaagtactgagtctttatcaattgaattctatgggaggttttactcttctccattatgctctgccaaatgctggctggagctgtgtgacgctacaattctctgtcattctatccccggaaatctttgtctgtgttctttatgcatgttgtggctatgggagcagtgttttaaagtcgctttggtggaaaaaacccaaactgaaaacagctactcgactgggcagaaacaaggaggccatgacctttcttcttggcacgttaaacagtcattctgggaggcagtggaccaggtgttactgtttaactctttcacacagtctgataccctgtgggttacacaagcacgtgggacttttgagatttttttccagggcctttagtggctaataagtatgagtaggatggggaagttgggtaaaaatggtcctgctatgttatttattctccctactcacccctctctccaagaatgcatggacacctaaattttagatctattattttctatttagatctatctgtgaaca

SEQ ID NO: 40600 - DNA, 1957 bp, Homo sapiens
tttgtttaatttatacagtatttctatgttatgaaataagccttttgctttttccaaaactgcaaccattctttctttaggtcagtttaatttccttgctcttcttctaagtatgaaatgctgttatttgttttcgtctataaactagagtacaccaactggattatctgttactctcaatattattgatttgaaagatcctcctcttggtatttctaatgaaacagccaaaatatcctagtatttctgtttgtgatgattcaaaatcaatgaagcaagctatttcccttgaatgctgttatccatgacaaaggagctaactgcttaattccaggggtctgttattatttgtaaactggttcttaaataaggatacttagagatgcctcttgctccagatggtaccatttaactgcctgtgttactcatgagtgattttctgctttagctttaaacaaatacttaacgcagcaattctgttatcaagaattctctctcaaaattggaacaaaatcctgaagtgctgcatgaagtggcagcacaagcaatttcctcatgggttaaaaataaacggagcatgactgtgctggtaggtaaaaaagggaactgtagccaactagaaagagaaaagacctctggtctgtctgaagacctgagtgcaaatctttgcttgacaactcattaccctgtgacctgggtagatcacagaaaagtagggattaggtcattcttttcatatgatttgtttatgaactaaataaaataatatttttccatcactatttctgatgaatgttaatagatgttaccagaaaaaaaagcttccatggttgtaatcatttgagaaacactaagttaaaccaggaattaagtttttaaatgtgaaacacttctcagtctttacaatgctcatatgttttgtgacttttagaaaagacataggtgatatgttttctaaatatatttggctcacagccagcaatatcctatggaatacactttgggaaatgctatcctaatctcgaaagtgctgttcaaaggtaagctgttaaaaatttagatgttaacaatatttacctggagcctatgttttactcatttgtgttttgaaagatcttattttttaaaaaatgattcctttttttcttgagctgccataggtaagtttaacttcctttttctcttttttctaactacgaaactttgtttcttgcccatatccgtgaacccagagttaaaaaaaatgtaattcctacctgattatcaaaataaacccattatatataatattttaaaataaatttgttagcatttatgataggtagtacatcaagtacttaaaaataaacaaatgaaaaggaaagcaaaacaaaacaaatttgtgtctacagttcggagaaccctagctgtacttctcagctttgtgcttaaaatgtaaccagacattatttttgccttcatggaatttctactctagaattttatcataatgtaagctgaaactctgtataaattttaatgctatttttgcattcctcttggtaatgcattcaaaatgttagaatatttgaaaaacagctcaagtactggataaaaatcttggattcaaattctaaagggtcacttacttgctctatgattgctacaatttactcagcctcagttttctcatatattaaatggttatagtgatacctaccttctagaatagttgtgaagcacaagtaaggaaattattagatgacacttactgacatgcatttgttactcttgagggataatagaagagaaagtaatatatgtacctactaaaataaaaatgacttttggttatttcctgaattaggaaaaaaatacatacatttctgaattaggaaatgaccacaagtgcccagtttctaaaaattagaaacaaatatatttttattaaagtaactctaaatgacagtgcagtgaa

SEQ ID NO: 40601 - DNA, 570 bp, Homo sapiens
ccgtgaattctagatcagtactctaaatgaggcaattaaacctttgtgtaagtacttgtgtctttcttctgaaaaaaatactggtcactaattttctgttttatatttgttaaaaagaaagctttatagtttaattttaccctggttaaccttaacttgtcaacagattattgaagatttgtaagactatttactctactaatccataaaaaatgaggttaccatagtaactagaatgtctttaatactctgcttatgtaacctctgagattcagaatagtttttcatctgaactctgctattagctacactgatttcagatgctctattgaacttcgtactatagagggaagtgctttctttactgattatgcaagcctgagtatttttagacaatttgttcataatatagtccaagtgccttggatgtttgggaaattttaaaggtggaaataatttaaaaccactttcaaaagactttgggaatagcaaagaggtggtgttggaatatttgtttaagaaactgtggacttaagagtttcaattttcagaaatgccttgaagtaaaaa

SEQ ID NO: 40602 - DNA, 1100 bp, Homo sapiens
taagagcccgttgtaataatatcaaacttaaaagataaaatataaaaaaaatcacccatgcctctgttttaatttgtctactttctttaaattcttatgtcctatagtgtctctgaaattggcaaactaatttctcttgcaacatcttgaccattatacattcgtgcattgattatcccttagggtattttccatctgccaattaatgtccaataaaatgttgcttagatttaaaagcttaatcaaattaattcttactatatatttacagtgtatttagagcaacctatatattaaagttattgaaattatttgttttcttcagagagctatctcttttggaggtaaaaaggacataaaatattaagaaataaggaaaaatattgattaaaatacttttagttgttagaattttaattatttagaaaaaattctcgaatcaggtagtattcaagcttgtagtgatgcaaagattaatatggcagtctatcttatttaagaatttacagtctagtgtgaggtcagcaattttttctgtacagggaaaaatagtgaatatttcaaaattgtgaaacaaagagtctctgtggcaactactcattgttgcataacagacaatatgcaaacaaatgagtgtgtctgtgttccaataaaactgtatttacaaaagcagaaggccacccatgtgccaatgtccaaagtttctcaaccaacccctggtctagtaggtaataaaggcatacaaagaaattattaaatttaattgtgatagtaataaagtaaagacgtccaaaggatgcagagtttaactccgagagaatgctttaacagaagtcaccattttaaatagatactaaaaataatgtgtagtgattagttagcttgagaaacgcaaatgaagagttctgaacacaaacacaaaaaataccacaatgcgtttactgtggcttttgaatctgagattgaatcatagtttgtgtgcctgtagaggaggctggcaattctgttattgcctcatacagattcttaatgaatttggtaattattgagtagccattagtgatgttaatttcgagggagtgagatgacaaatctgtgtt

SEQ ID NO: 40603 - DNA, 1485 bp, Homo sapiens
aatacaaatcttttttgaaaataaacagaggtataacaatataactaagaacataaatttaattttgtacttctataccattcacctctaatgccagatatgagtatgtggaacaagaatatgcctcataacagtggtaatgtgatcagtccaaaagccaaagtcaaaatgcacatacattttctatttaataggtttgaaggcaaaaatctttttcttcccaaatggcttgtatttgaatttagtcttttttttttaattcccttaatataattgccttcgcacacagcacaatggctaatgccatcacttattttacatttgttttgcttcctgtgttgaatggacaatcagtgtttacggattagcagcagttgtagtcttctgacttttattctttcaaactctttcaaactggcgaatgagcagcactttatgtttgttgctctggcattcctggagtagctaggacattcacagtgtaaaccactgttattcatactataataattcctttgcagttaagtcattactagtgatcatagcaggcttgtagtacaatgccttatttgggaatgtcatgtgagatgcccacagcaatacaaaaaataaaggccaacttgtctggctgaggagggatttatcactagccctctggcagaggagtcttttgggaagtattatgtgctcctgtggggtggattatatgatctgaaatggagcaggtgctctgagcctcaaagtaaaggtgctatgaaaacccagccacatgccatttcttttataatttatcaaaattccaattgtattttctctatgcacaaagctttagcagaaattatttttctaattaaaatattgaccaatgtgagcataaataagcaaaaaacacaaagaaactgtggaaatttctctagacccctctccctacttaccttcctgcttaaaagcaaactcaaaaggcaaattcactttttcaactacaaatcttgttctcagtgtctgtaacttgctgtgagagcattccttttcaaacagctgtttcaaaggagacgtaggatgagggcttttcattgtcaatcccaagggcctcaagactttaatataggctgccctagtgatgaatttaacaccttttctactccaggcctaagccccatcttaagagagaatttggaatttttaaagaagtggctccaaataaagaaaagcagcagagggaaagagagcaaaagtgaaagttccagaactatctcatgaacgacctcaagtcacttttccctgtgtgtttatgtgtgcatgcctttactattttaattaaaaggaaataataataccctatccagtgagtgctaagagaagaaattattattcagaaccaaaatttgtatagcattgtactgcttacaaatctaacatctgtatatttgaccctcacacacacatgatgagatgtggtaagaatggacgtaagtgagaaaacaa

SEQ ID NO: 40604 - DNA, 1495 bp, Homo sapiens
aagattctgcattgtggggagattgcgagacaaatgaacttttaaaagatatttgggaacagacgaaatggcctgctctgctgagaaactgaaagggcttgagacccagagtgaagcgaaaggaaaataaaatagcactttgggatggaaaggggacgccagcacaccccaggtctgtacccctggcctcgcagtcttcggggtccctgacaggcagtagggctcaaaaggaagccaagtgcagctgcagggggcttctctccgagggtcgccccgcagtctctgggttatgatccccacgcgagtacctgggagttcccagccattcggcccctacagaaggaccaggcagaggaatttctgattcatgtgtttttccgtgggatgccagaaagggagttttgagagctcctacaccagcttagcttgggagcccctacgcaacaaccatccaggtcccggaagatgccagctctgcctggcgcccgcagcccagatctcctgcccggagtacgggggcgcgggcgcagccaccaaagctgaaatgtgaccgcgtcccggtcccttcctgctctggggcgcgaagctgccaagaaaccggctgcggtctccaggaggggccaggaggcaaaatggaaggaagcgctggatctccgcggcggaagtcattcttatgccctgccaaagggtagagggcagcaaccgacttgtgcgaaaggagggaacgtgtgggtctgccagggtcctgcaggggggatgagaccctcgctccgctccggcgatcccttcgctctccaccctcggccagcccctcctgtcctccatcaggcctcgctgaggatacctcctgggttccaaagcgcgagttgaacctgagcttgacattcattccgtctcgtacaaaagccatgcctgcggggagagggagaaaatttcctacaggagcctcaagactgcgtttcaggaagccctaggacccactgatcctgcagctgcgcctctcactcgcctcaggtttggattaattgtcactttctgttaagctgacatttatggagggcctagtgcgtcctgggtgctgcgctatttaggctgttgcacagaggagtggccaactccagcaaggctcttgctttgctgcttccccattcttcctccgcctgtaatccagacaaaagcccacattgtaaccaatccaggggcagcttagcagtgccaagcaggcagctcagaggccactggtaggacagggcatgatcaacaggcctcctgatattttctaacatacgtattaacaagaaagaggaaattaaaaaacgaagatggacaacagaacttcactctgacttgagtgacttttatcctcatttggataatagttttcaaaaattatttgtgagtgtatatgtgctattcacaaagcaatggctactgacccaacacgtatttacatctcttcttcattattgcatttcactccgtaaatgtcttagcc

SEQ ID NO: 40605 - DNA, 1504 bp, Homo sapiens
ttaaatttctagcttagaaattgcatgttggttgagacaagaagtaaaatatctgttcctatattcctggaagaataagataaataattgtcaattactttttagtgtatcacatatcttcgttgtgtgttcagattacataagcattattaacactactggacatttttattgattaattttaaattatgctaggtcttccacttatgagtttgtgttttatttacatttatataaaataaaaagaaaaagaaagaaataaaaaaactacccaaaatatataggatccaaaaactatgtaaaatagtatttttactatttactaaaacactagtctcggtactgaaagtctgaatgtgattactctgacacacagggaaggaagagtgactgaggagttgagcaggtgggtctgaggggatgctcagagtgacagagtgattctgagcagccatttcatggcaaagttgaatacacgttgtgactcatccagttgtacactgataatttgtatatttttctttatatactttacaacataaaaaaaatttaagaaatgttatgaatcacacatttatgaatcacacatttactgcttttgcaggaaagataaagaagacagcctcaaccctcaagcaagtcaaagtctaaagaaagattcagacctgcaaacagattgcacaacacaatgtggtaaatgataaatgacatatatgagcagagttctttactaacacagacgaggaaataattaactatgcctggggaaatcagaaaagattttatgataagtagcatttgaactgggtcaggaagcattgtaagggctcatattgctacaagttagttacaaaaatgtaatttagttttgaagaacaattataaatataggttacctgatcgtcaatcaccttcaggtagctcaatatttattgattaacactaaaaaaaatgtgaaccagatgcaaccaagtaaaaaaatccttgccttattacccagagttttatctaaaatagtaatagtaagcctggacatgtgtttatgctccaactgtggatgtctttgtcattgaaatgagcttttcttttttttaaccatgtgacaatgaaaggcagagggcaacgagacaatagaagagatgaaacagtaaaatgtcacataaatgctgatggagtacattatgcaaattgatactatgcaaatacttaaatgtagtcttagtaatgaagagatatgaaaacatgaaaaaaattcttcaaaaatggttgccaatcatcagtggctgattatgaatacaaaaaactaacccttgaggaaaagagcaatggccacattctcattgatccaaaatttaactggaaggagatgcaggctctgagatacagagtcgcagcagcatccatgttaacaagaactggagttcaaagaggaattactctcaaccttgtatactggtaagagggtctgtttcagggagtggtgagaaaacacattaattttaat

SEQ ID NO: 40606 - DNA, 2605 bp, Homo sapiens
tgttgctttaaacagtagagactatatacaggtacgcacgcataggttgtattttccattttatacatgcaaggattctttaaataattcattacattttttctttaacatgatatgcagtttttcacaaaaagcccaaataaacggctgtgaggaattctaataggatcaccgtatagccatgacactttatgattcatgatttacaagaaattaagaaatagagctggagacatttagaccagcctacaaatttgtgtgtgtgtgtgtgtgtgtgtgtgtgtgtgtgtgttttaatgtttccaggcaagaaccttaaacaaaaagtgtagcattaaaaaacttcccttcgtcctcgagacccccccaactctagacactggatccccggagacccacgctgggtcgtcggagtctggagccgggggcggcaggtgagcggctagggtcctgcaggggtctgcgcggtgcgggggaggtcgccgagtcagtcagtgccgaaaggaccgcgaactccaggggccaacaatcaccgggtacggaactcaacgtttccgccagttcctggattactcgagtaaaaacaaacaaacaacaacaacaacaacaacaaaaatactaacagcaatgggaccgtaataaatcaactcggagtgggtacaggcggttccgggacaacccacacttagtctaggagcccggagatccctcatccagctttccccggggcaaggggtgaagcgctaagcaaggctgatcactgtcctcaatcatcacccaacccgcgcacagaagccgtggccccacgctctcctatccccgccagctccagactcgccccgctgccaactcccggtgcaggaggaactggcagccgcagacgtgaggaaagcggccgcggcttcaaactccgtagtgcgcaggcgccacacaacgcgcaggcgccgcctagaagtgacttctccaaaaagtgtgttagttcccggtcacctgagctccgggtgacgcggctgcggtagctgcggatacaagccttccgcgggtcctgcctggcgaccccgacctcctcctgctgtctctccgctccgccaccccgaacccgccaaggtcctgtccttttcctcctgtcctttgccagcgttgggccggaccgggccgagccgggccgcccgggcgcagtctttaaccatggcgtccctcttcaagaagaaaaccgtggatggtgagttccaggccgggctgaaggggcccagctctgcgttttctcggcgtctttcgaggcctgctggccgcgattctgcctactgtccctggaggcggggctggatcaagtggtcccacaggtgaccgccctcgcggcaccacttctctgcctccctcttgcttctgactcacctcaccttaggctcacctaggcagtctggttgcttccctatcctcacgattcccccaccctcgggttttcctcagcaggatcctgagcgtttcgaggaggctagctggcccttgagtgtcaataaacttggaaatctgatggatttcttgttggtttcctctgcttcgattgttgctcttcagttgggcgatatactacttgtaggcatccatacaggaaactggcagtctcggaatggggagggaggggataacaggctccagttaggaaatgaagttgggtctgggtcagttgcttctttaagaacaccccatcagtaaagagatgtgaaacaaatgcttttttgattaaccccagtagaaaaataaacccaagggaagtgcccagatttagttttcataatggatttttctcccttatgattattttttgccaactaaagaaagagatggggtatatattgtcttcatagaagtttaacatgtaaagataattgtgttgtttcccgcatttagcttaatatcatcttaagcggggaaaaaagtgaatgtaaaggaatgtacaagttttatggtgctcatatgcgatgcctataatgtgtttatataacacttgatgttttcattgattgctaccaggaattaaattcattcaagttatttaaaaattgtgttccccattatatgtttagtctaggttgttgctggttcaaccaaagaatcacttctttgtaagggtctaattctgccacaaaaggagcagtggtagctagacagtgattggtacaaatagggtgctcagtccagacctggacgtaactccttcattcctttgtgttgactattccaatgccagcaaaattattttggggaggataacaaagaagtcatctctgctctgctgctgtacacttcatttcaacacataatctactttacctctaatttatcagatgacataatacatttttccttactctgggtgactgaacatttttttgatttattgactttttattaagtaccatttgcaatacctggaataactaccaacttcgtatattaggtgatacagtgatgtgaaatggattttatgtgtgcttttcatgagaatgctgcttaatctttaatatggcactttattttttcagtgttttagctgccactgttgtgagcttcacttattttacagtactccagggagtggggg

SEQ ID NO: 40607 - DNA, 589 bp, Homo sapiens
ttgacacagcgtctcgctcttgttccctaggctggagtgctctcggctcactgaaacctatgcctcctagcttcaagcaattctcctgcctcagcctccctagtagctgggactacaggtgcctgccaccacacccggctaatttttatattttttaatttattttttatttataattttttatttagagacagggtttcaccacattggccaggctattctcggactcctgacctcaggtgatctgcctgcctcggcctcctaaagtgctgggattacagttgtgagccactgcacctggttcactttcatttttcattgcatgaaagtatctacaattatctgcaaggtcacagatttcctggaactaacttcacacagaatttcatcacaacaatttaaaagaacagccaaacgaacctctgtttctagcatctgagcctgcatttgggggagtgtggagagtgattgggatgatatgtatagcaatatgtttttcaaatctttttaaaacccagattactgcaaaaagtaggaataagataaaagatgttgtgagtcatgtgtgacagaggtctcatcaacattt

SEQ ID NO: 40608 - DNA, 556 bp, Homo sapiens
taaaatatttattgcctccatcagatttacttaaaaaatgcagtttgaaggaataaatgtttacagatgaaggatgattaagcagatagactagtatcgtcatgttttggtgatctcaactctggaatatcaacaaaccaactccttggtaattgttagttgcaaatgggccatctttgaaatcagtcactctaactataaagaggtctgcttccccctgctggaagcatccaatagctgcacttaatccagcaatctttttaatgacgtcaccattgataggaactgctcgctcacatttattaagtgcttactcaataaatgggtttggtataaaaaatgataataaaatgtcccttttctcttgtgcatgacaaaatctttcttatgactcccggagatgtgactataattctgtctaggcttctccttgaccacgccatgtgtgctaatacacaagcctaagaaacaatacggtttgatgctctaagacttgaaaagtgctttgttggcttctgggcaatcgtcccacatctttcccttcttgcaaaacccg

SEQ ID NO: 40609 - DNA, 2180 bp, Homo sapiens
ataggttaaatgtgatgatgcatgttgcagaatgttatgaagtagtcaaaaataatgaattagacgtaatcaaagccaatgggtagatcttgaaaacatgctgttaagtaaaaacaaacaaacaaaacaaacaagaaaaccctagtggaatatcatttgtgtaaattaaaaacaagtgaatacaaaagaaatattatgagttttttaaagatacaaaaaatctcctagaatatatcctggggagaagggactagatatgaaagggaatagaatctgaagaggaaatataataaagttaaatgagacaaaaatcgaacgagagggctgtacaaataatcacagcacaacatgatccaaaagtgaaactaaaaactacttttgccagaggttaaaaaaatagtgttatgttactatttactattaatcacgtgaaatggaaattgtatttcacataataaaaagatcacactctttcatagagcccagttaatggacatctctcttggaaagattttgggatttgctttctgaatcaggtttccccttgggtttcattttgctttatctctgagcaaactttagccataacattctgaatctcctatttgataatccaatattatcaatttaaattgaataaatgttaatccaatttaaacctttagattattatcattccaaatgagtcaattaaaataataacatgcaatgaaaaaagtctctagtataatttgtaaatagaaaatacagaaagcgtcttgtacttaaagttatctaaacaaaatgtatttattcttatgtgtcaagtgtattaggccaatagttctagattttgaaattctcataatccaataagaaatgtttttctagtaaacagcaaaataaaattctaaaaacaggtattcagcaaaataaaaaattttattgcatcataatcaattttataattataaaaattttttttaattttatatttaaataggaaagctaggaatcatggaaaaatgtagttagccaaacattaaactattctaaaaataacttattatattatctaatcctaaagtcttagcttttatcacattttaatgttttaattctcttttttactttaaaatattttaatgatctttaaagtagctgtaccttaaggcatttttagattagtatctaaatgcttatttacttatgctccaacaactgactatccttaatggagatattgtttatctctgttttagatacttacagaacataacaaccaaattatctattcatgcattttccattgtattgaaactggtgatagctttgtcttaagccaaacatagttttgtacagaaacagacatacttaaatttggtgatcaattttggaatccagagagaatagaactctcctttatgcaaaaataattgtcccaaagaaatcttggcttcagaacctcaagttatcaaggctgtcagaggtcttatgatagtccataaaaaccatttgctaaataaatcatttgtgttgaaactataatttacatgatttggtatactgggaatatagctggtactcaagtaatacttttgaaggaatgaagagcccacatatacaattatagcataccatttttatttaaatagccttcattgaactcttctgtctggaatagtaatgggaaagttcaggagacaggagatagggcctggaaggtagtgcagatggggctgagtgtgagttttgtctataaaaggcctctggctgagtatgggtggggaggttttatatgtccttgaacatgagactaggtgacttttagaacagttgtagatcagatgtaaacatgcatatgcatgcattcatgttatttcataggctattgagattttattgcaattagtttcactttcagtttctcagagtgaaagggtctagtttggcagtgttgccttaacgggcactgcagccttactggcatcagctgttcaatttagctccctttaaacctatttaacaaaggactagcatcctataccaaacttttacaaccttttaccaaacctttttctgatctgtgccgatcagaagcttttgctaattctgcatgtttaattcacctggggtttttttgcccagggtttatttgacaataattttcttgttctcagtatctcctctcactgtgattt

SEQ ID NO: 40610 - DNA, 2518 bp, Homo sapiens
atttccacccagtagaggatgctcgagtttacatacccgaagaacaaaagtgttttcaatagaagaaaacattttcaacaaatgaagaaattaaaaagtgcaggaattagccaacaaaagagaaaaagcatatcgtttgctagatcaaaagaaaactcatcataagttttcaagtttaaatgtttaccggattagtttccagtttttttcgtcttgatacttagcagggaatggtctccagagcgaaaccagagacgcatcaaatcctggcactttccgtttgttcaaccccggagatgccttcaaatcagtttttcaacaagtggtggtggggaaatagtttctgggcttgcacccgattttccctgtggtgccaggaagtcatgcctttactgtaaaacacgaaaaacaaatggaaggaaaaaatgggggacggaaggagggtgactgaaaagatgaacaagaacgtcaacaactgccaccacgcaggtgtttctaaaatcactttataggtaactacaaacccgatcccaacgtttaccctaacacttcccctcccaggtcctcctcggtggtccgcccgcttggcacctcctccagctccccaggcccgggggttcgggcgggggcgggggagaggcggggcccgggacgttcccggcgtctgggctctctcctccggcgccaagcccagcacgccggcgcccagccgtcccgaccccgctagctgggcaaggccgagtcccaggtgccagctgtgggcccgggaactcgacagccgacttggcggcagtctcaagggaggcggcggcaggcgcctggcggaggcggccgctgtcaagcttcccgtctcctccctcttcctccctccgacaactgtgccccagccccgcccccggttccagcttctggacggaaggccccgggcccagagcccgcaccaacggtcgggcccaccctcggcctccctagctccttggtaccgtaggatcgaggccgccgttagggaaagtggacgaggcccggccggaaaggaaaagaaaaggaagaaagaggagcaagggaataagggaggaggaggatccgtcgctgccgccgtcgccgccgttgcccgatcgagccccgcggcggccgccgtgtcccccgccgcgccccgtccgcctgcaccgcctatggcagagcccgtaggcggtccccagcaaccgccgagcagcattgaccaacagacggccggtttatcaaacagactgtcgatttcaccaatagtagtggaaaggcgggcatgaacatgattggcagcttgcgtcttccaataaaaactgggggcgtgggtgggcggagccggaagtagagcccagccgagaggcccctgtccggctagggaggagggaagggggagggaactagagaggaggaggaggttagcctaggcatctacggcggcggcggcggcgcaggggctggtacgcgctgggcggcgagagcctcatggcggaggaagagagcgaccaagaggccgaacgcctcggagaagagcttgtggccattgtggagtccccgctgggccctgtggggcttagagctgcgggcgacggcagaggcggcgctggcagcggcaactgcggcggcggcgtcggaatcagcagtcgggattactgccgacgcttctgtcaggtgaggcgtccgttggccgccccgacttgtcacccgggtcctgggcctctctgcgtctcctggtcttctcgtccatgaatctggtctatgtccagtgcccgctcctccccaacaaggagggtgaggctgaagctccctcctccacttatccggcttggggtggggggcggggagcaaggcgagggtgacccacgggcttagggttgctgagaaagtgagtttgtcggggatggaggggctggaaagaaggaaggtcggctgtccggaaagctctgtcctgacatgccttccctaccccaaacagaccttcctgcccgagagtcccgcctttcttatgtttcctaccctggtctttctcacctcatttggcacctctggtaacattttctgccttcccctctccgccgattgccccccgtgttctcccctttttttccgggatgggagacatgccatctttcctgtcactgccactgttccccctcttctagggtctcctgtcatcccctcacaagatcccgctgggccggttctccagttggcgtagacgctgacccacggtgatttagttacttttttcggacagagagtgcgttaaggcaatgtgattgtctttttttttaacctccttcggttgacacacgcactcttttctaattaactgctcataatgaaagtaattttccttaaactcttgctccggttaacatcaccaacccccctcatccttcaatatataatgtattttatttagcctgtaaaatacagtgtctgaacggtgacattaaattatttactcagtcgaccgtcacaggggtttgatgttgttcaaagtgtttgtaat

SEQ ID NO: 40611 - DNA, 1835 bp, Homo sapiens
aatgtgtgttgctaccatgccaatagtaataacagctaaagtttagtaagagctctttagtaagagccccatgcactgttcaccccgcccccacagccccaagaggtaggcatctccactagatccacttccattggaaactgaaggggaaaaggctaaggagcttgcttacagtcagggtaaatggcggagtaaaaccctggcaatctggcgtccagaacccccaaccttaaattgcgcgcgacatcgcctcttctaaggccgagccggcaacgagggaaatggaggcaagagacggtcccggcgtgtttgagaggaaagtccgctggaaggcggccaggcacagtggattatctatttttaacttttcatactataatgttaaacaaaactaaattattttaatttacttaatttaaggaaccaaactaccggctcacccaactcagaagtggccgcagaagacattcaagcgctcccgggggcccggccagcgggcggggaggagccgcctccattggccggccccgcggcatcacgggagctcgcggtgcgcccgggtggcgggctgctttccacgcacctgcacctgcgcagccctccaaggcgctcttttggaggagggacttctctttcggtaaccagctcccttgcggatagtctatgttctccatataaacccagcacttcccttaattgagatacgtgggacttcactccgtccccagcccggaaccacaagtgagggcactgcgtttcctgattgacctctttggcgattacttccgcccaggggcctggaatactggaggcccttcgacggagaacaacaagaaaggcacttccggtgtctgttgccaggcgcgggcccagtgggccgtaggggcgacattgttgccgttgtctttcccccccagtcccggggatggagatgtcgggactcagcttttcagagatggagggctgccgtaacctacttggcctactggacaacgacgagatcatggccctatgcgacactgtcaccaaccgcctggtgcagcctcaggaccgccaaggtaagggcggacccttcacctagaaggctgccgccccttccccggcctcacgcctaccccgcttaggcagaatcctcgggaatgttggccgcagccgcagatccacagctctggaaccactacgccgacttgggctgccgggtcaaggcggggaggtggtggcggtgataatggcacggcttccaggttttatccattgaatattatgggcagcgcttgttgattcaaggattcggaataagtcatttaaatttttaaaaattttaaaaaattttctggggagccagaatgttttgcattttcagtttcgatcagctgaagagtcagctgctgctcgggcttttttcttcaagtttgagtgggaggaggatggcaaacattttgtatgtctctggtaaaaagcaactactgtaattaaatggcaggcaccttgaatccatgtctccttttggaggcaaaatttttctgagatgattttcgtactaggaatacacacaagcgagctaaatacatataccggtggatttttaaggggtattagtgctaagtctgattgtgactagtccatataaaaatgtaaagcgtttgttcattttgtgtgtcgggtagctagttttattttaaatttgctgaattttacttcaaaacgtgaaaaattccagattcccatattagtatatgattatctttaaaagattctgcccttataaaactgggtttttctgcttaagtcggatttcatttttggcattgaagaaagtcatttgtcactccgaa

SEQ ID NO: 40612 - DNA, 2715 bp, Homo sapiens
ctcaaaactctcacctttgaaacctagccgcctcatggaacttgtagacgttcagctgatatcctccactaacattatagatgactgtcagcatcagctgctagacctatgagtaaatgacacccttccagctgcccctgttgacactgagtggagcagggacaagctgaactgagtcctacccaaattgaaaatttatgagctaaatcaaagctgttattgtttttaagccactaagcattggtagtttgttgttgtttggacaaaattttgttccctcacactcacatgttgcacccctaagccccagtgtgactgtatttgtatacaggccctttaaagaggtaactaagataaaacaaggtcatcagagtgatgacctaatccaatagtactggtgttcttacaagaagagaaaaagttagcagagcatgttctctctctctctctctctctctctcacacacacacacacacacacacacacacacagggagagagagagagagaaacagagagacagagaaagagagaataaaggccagataaggacacagtgagaaggcagccctttacaaccttctattgtcttacagaatacatatatcatcacgaacagaatgtttttagaaaagtgaacattaaaaatgcttcaggatagacctcagatgaaaatgaggaacatgttattagaagcttaagaaaatgcaatcattagtatcaacctgaaaaaacaaataaagaaaattattgccaaatatgttaagtttattcaggaatgagaataaggattagatttcagaatgcatagaatgtcaagccagcagataaaccttgtcaaagcagaagaggtgtgaaggatgtaaaagggcttcctgtgggatttttagaaagtctttggtaaaaattcttatttcagacaagtaagcatgagcctcctctcctttgtgccttcccagccctactttgtctgggcctgacaaaagtcaggccagaaatcattctgctatcggcaactttcacattataaagtggcaaggaacttggcaaaattgttttctcatattttctcgaagatagaaccatgagtgataaccttggatactttgtggaggacatttctaagtgaagtattaaaggtgcagcctggcatatcttcactgtttatagtaaaatgagagaggaaaaagataaatgagaggaattgttaaaaagaaccagaacttgaagatttgaaaatttctcaacctatccatattgcaaaaaaattagaaagcatgctctggagggaacaccaggggtttaactgtcaattgcttcataaaaagatatgtgcatatctttatttctggcttcaactgagtgggctgattaaatccataggtaatctatcagttgagactaaaggggacagagaaaatgggaaagaataaaagaaggctgtcagacttctgaaatgctacgggatgtgacaataaagctatccagcttcaaatacacttgaaataaaaggaagaatgaccctgaaagtgattcaaaaatcagggctgcacctcccaccacagggtaggctgtctcctcctgagtttcagagattagggcgaggatgccactgcccagtgtctcattgcaaggccattctgtagagccacaggggtaaggctgcctcctaaggctgtggggatgacctgatgcccagtgggaccagaatgtagagtattgagcaaaagaagatggtttttgagccttggcttgctagttttggacttaattgggaccatcacttctttcttctttcttacttccactttttgggatggaaatgtctttcctaccattatatattgaaagcacagaacttgtctggtttcacagtttcactgctggagaggaattttgccccagtatgactcatatcttgaattttaccattacctgatttagataatatttagatgagactttggacttgaaatgtgtgctggaatgagttaagagaattttgccccagtatgactcatatcttgaattttaccattacctgatttagataatatttagatgagactttggacttgaaatgtgtgctggaatgagttaagacttttggggatattgggatgggttgtatattagtcaaggttctccagagaaacagaaccaataaaatatgtatagatatgtataagaggagatttattatgaaaactggctcatgcaattatgtagcctgagaagtcccataagatgccatctgcaaactggagaaacaggaaagccagtggcataattcagcctaagtccaaagtcctgagaaacagggaagtcagtgttgtaactcccactccaagcctgaaggcctgagaaactggaggtttgctggtattggtcccacagtctgagggttggagaactaggagctccaatattcaagagcaaaaaaaaaaaaaaaaaaaaaaaaagagagagagatggatatccaagctcaagaaaagagagaattcactttttatctgcttttatttctacttggaccctcaaaaattggatgatcaccccccacattggtgaggataaatcttctttactcagtccactgattcaaatgctagtctcttccaaaacactctcacagacacagccagaaatagtgttttaccagctatttcggcattccttagcctagtcaaattagcacataaaattaaccttcac

SEQ ID NO: 40613 - DNA, 1296 bp, Homo sapiens
cccaaatctcattttgaattgtaataatccccatgtgtcaagggcagggccaggtggagataattgaatcatgggggcaatttccccgatactgtgctcatggtagtgagtaaatctcacaagatctgatggttttataaatgggaggtcccctgcacaagctctcttgcctgccaccaggtaagaagtaactttgctccccattcaccttctgccttgactatgaggcctttccagccatgtggaactgtgagtcaattaaacctcttttacattataaattacccagtctcaggtatgtctttattagcaacatgaaaatgaactaatacgctttccctttgccttccgccatgattctaagtttcccaaggcctcctcagccatgctgaactataagtcaattaaacctcttttctttataaattatccagtcttgggtatgtctttataatagagtgaaaacagactaatataagccccaatgtattaactcatactagcaccaactcaaaagtccaaagtccaaagtctcatctaaatcagatatgggtgagactcaaggcatgattcaccctaaggcaattcccaccagctatgagtttccaaaatgcaatgagataagcatgatagacgtttccattacaaaaaggaaaaacaggtaagaacagtaactggtcctaaggaagtccaaaacccattaagaaaaacaacataaaatgttaaagctctaatatagttttccttgactctatgtcctgacttctgagcacacaggggtaggggctgagccctcaaggtcttggccagcccatccctatggctttgctgggcgtaggccatgctgcggctctcacaggttggagtcttgtgccagcagctctcccagacagaagttgcatactggtagccctatagttctgggctctcggggcttcccaactcccatggctccactaggcattgccctggtgggggctcactatagtggctctgctgctgtaacaagtctttgcctggacacccccaggctgcccataataacctttgaaatctaggtggaggccaccttgaccccacagctcttgcattctgtgcacctgcaaaatttacaccacatgaatgccaccaaggcttatgaggtatgtacattccagagtggtgggttgagatgcacctaggcccacttgagccatggatgggatggccaagggacactgtgctgaaattcaagcagcagagtccctaggtcgtgcagagcagtggtggtcctgcaggtgcccctctggaaactgc

SEQ ID NO: 40614 - DNA, 969 bp, Homo sapiens
gggaggatgacaaagaggaattgtctttcaaacagaaggaccagcatgtgaaaaggccataggggagaagggacagagaatggtccattttgagaggagaagcagggaaaggtcagttgtaggaagagataaggctggaatcccctagattttgagctttgcatgccaaattcagattgcagaaacagtgataggagacaaaaagcagcagctgatgcttttaaaattgattttatagaagcaaattgccatgttatggtgagggccacatggcgggaatggtgagaggtctcaggagctgagggcctcaatcctacacttgtgaggaactgaattctcccaacaatcaggaagcctggaagtggacttcaagcttcaaatgagatctcaaccatgaccaacccattgattttagccttgtgagattctgagcaacttaactggatttgtgcctggacttttgacctatgcaactgtgagataataaattgtgttttcctaagctgttaaatttttggtaatgtgttacaaagcaatagaaaatgaatacaaaaagagatagcataatttttaatcaggctgaatgtggtaatattgctgctttcattccatttgctagctagggctgccagcttccgttctaacagttggcttggttggctaatgccatcctagaccaatcttggcacacaccaaataacattgaaaagccagacattccttggcataatgtaacagaaagaattcaaaaagactaggagacagaaattctggcttgaattttttacgtcacccctacctattctctcctcctcaatcatccccactctcccccaatatagaagagaagactacattttcactgatcctgtgaaaaacgattattggagaaaccactggaatttttaataagcattttactggcagttctccctagatcaaacatgctggtgggagggacagcaatgg

SEQ ID NO: 40615 - DNA, 1019 bp, Homo sapiens
attatatcagataaatattttcaaatggtgtgtatggaaagaagggcaagtgtatttgttagacagccaataattagaatatgtagacttttcttatttctgtgtccttcccagcatccattcttttgtgggaactgttcttccggcactctgtgcaattctagtgagctgtcgatcacaggactccagtgccaggctaagccaaaatgatcagggcctcctaggaatttgagctgttcacagagacacataggactggaagacagaattgagtcatctgattggcagctcctcaagtactgtcacatgagttcccactgtataggtcacctaaatgttcgcattccttctgtaggcctggcttctgtaggcctggctgttcagctagccattcagtagccttccaataaattatttaactgctccttccttccttcctctcttttttcttttccttttttctttcctttagttagcaatagttcattactgttgcttataggcaaagaatactgtattatcaggcataatattttgaaggtttaagtatgtatatagatcgctcaagctgcaaaaatataaacttgatgaacagaaaaggtctattgtttcttagcacagaattaatagtaagagaatgtggcatagggtttgatgttgtattactgtatattagaaattgtttctaactcttccagcacaaactccaactgtaacctaaccttgataaaatctctccatcagtgcaacattttggactttttagtaaagataatttaagaaaagataagccttcataactagtaaaaggaatagttagagaaagaaagaagagggtacaaaagaggaggaaaatatgagtcagtagtgtctagagtagcctgcactggcccagggtggcagtctagataaggccaaattagcacagccaaagggacatcctctttctcctatttcctcaccacatgccttaagtgggaaatgattaaaatatgtagacagtatctattttattttta

SEQ ID NO: 40616 - DNA, 2009 bp, Homo sapiens
gaaaataaaacatagaacaagaagtcatttttggccaggtgcggtggctcacgcctgtaatcccagcactttgggaggccaaggcggatggatcaccggaggtcaggagctcgagaccagcctggccaacatggtgaaaccccgtctctagtaaaaatacaaaaaaaaaaaaaaaatagccgggtgtcgaagcaggcacctgtaatcccagctgctcgggaggctgaggcatgagtatcacttgaagccggggggcggaggttgcattgagcggagatccagccactgcagtccagcctgggcagcagagcgagactcaccctcaaacaaacaaacaaaaaggcgtttttattcaataaacacacttacaactttagaaaacaaattaactgaccactaaaatgtactaattgccttggtattccttatatatttttcagagaaaactcaatatcctgtcttgaatccgggcataaggacataaagaacctgaaacacaaagataaagaattcatgccaccacctcagatcagtggcatgcagtgttaaaaaatcctcagtacaaacgatctgagaaatagaatacagtatttaacagtccttttgatttcagggttagaaagtgacatatatctactgctatacaaaccctcagtcatcctaaaacatttcgttaatgtgagacaagcaaaccaagctcaaagtccagaaattgcaaaagggaggcaggtttcaggagacgggtgcaggttgggggcaggcgcttggacaaagggaagacacagtgtgttaccttttcttccctactcataagctagaatctgctcatcctagttctctgactgggaacttcagctttgaagggaaatgggcaggtgttctcatccctccattgatacttagtgtcatctaggttcttagatctgtcctgtaggcaatacattctcgcaactgtgcaaatagtgatcctgccccaccattgcactgcctgctctatccacggctgtttccatccgctgggtgtctgtcggtacttactggaaactttctaggaggctgcagctctagagaagaaaatcctaccaaccagggcacgcagttcagtcgacaatgctggggaagggagaagagacgctattgattactcacagtttgcctctgagacgggaagcactaggaggagacacgccagcagcgccccgcagcgcccacccaggaccctcatttcgaagcgcgcggaggcgccggcagggacggtggcgcgtcgcggcggggaccggagcgctaggcgccgcggagctgcgagcctgtgcgcctcggtctgagccgtgctgcgcggcggcgccagcgacccagcgagcctcggcggaacagccgggggcggaggagaccgcccgctcccagcgcccagcccgagaggggaagtgataacaaggacatttccaggaagcttttcggagctgggggatgggctctagtgttggaggcctagtaaacactgctgagacatccttcttcaccagctccctagttgctgcttttcctccacagtgtgacgtttccaaaggggaaggggtggggaacgcagttctctgactggtcaagacaacttccagggttcaagaggacaggatccctaggttcagaagcagaaacagtgagacactgagttgtccctgaagatattaaccaaaacctggaagtcaatgaggactttaggaagaactatggtgatagtaaaagcaaatggggtcattttgatcatccacatgttttttcggtcttgtatgccatacaggcataaaaataatgtaaagaacatgaagaaaagaagggaatattagaataatctaccttaaaaaaaatcttgctccgataaagacttcagttgaaagtgaatatctatctatacatctacctatttattaatttaaaaaaattttttttttttttgagacagagtctcactctgtcgcccaggctggagaacagtggcgcaatttcggctc

SEQ ID NO: 40617 - DNA, 778 bp, Homo sapiens
cctccagcttatctccggacgctccggttgcctagttacgagaacgagctacctcgagctccgcctccttcttatagagtactcccctttctcttttcctagtctcgcgcaggggcgggtagccaggactcttcagccactcagaggcctctacctcaggacctcaaccgatgattgggcgagcgcagtacgggcgttgcctggggaacgccttccgcgcctcgaagtaacgtcagcacgtcgacgcggggcttttctttagccgggtcccgctaactcggctacggtgtatctgcgtctttggtcaggttgttccttggctaagagggcagtcgtcgcggacccacgcggttagcaaggcttagtgctcgggccggccgccttcacttccctcccggcttttcctcccgacttatccactttaggggcgtctcggagtgccggaggcccccggggaagagcggggtgccggtgtccgctccgggctcggatgggaagtggtgggaggagcgacccgggatgttcagtctgatggccagttgctgcggctggttcaagcggtggcgggagcctgtcaggtaggctggagccagctgtcctggccgtcctaggggttggagatggctgcgccccaggggcgaggcgccgccttttccccgcgcctggacgagtctatcccaggccgcaagggatgctttcattcccagggtgtcccgggagggagagattggaggatgtagccttgttgtctggtcgactttctgttgcgattgacaat

SEQ ID NO: 40618 - DNA, 1796 bp, Homo sapiens
tcaaaataggtgtaataaacatcttccttggagaaccattaaacattgctcccttgtaaaggtgaattggggaggctagagtggagggtccttttggtcttcacgcatttggtatcaacgcgacaaaaatcacaatgatcacaatagtgaaaataatagcagctaacatttgggcatttactgtttcctaatcactgttgtaaccgctttacatgcctacttcagtttaacactctccattaaaaggagagattatccccatgggccaggtctggggaaaagcatgacttaatttctttttcattatattccacccttttatccttgggtactgaatgtctaggttaacaggggtcactagatttggtagattaagtcagtaactagcttcgctttgagaatattttaaatcagtcatcatacaacataaccccaaaactcattcctttattgagccccatgcatatacacactgttcagcacaatatgcgactttttatttatttttgagacaaagcctcgctctgtcgcccacgctgcagtgcagtggcgcgatcacgggtcactgcaacctcaaacttctgcccaagcgatcctcccacctcagcatccgcagaagcaggggccgcacaggcgcgcagatgtgtgactttctaaggtccggccgcccaaagctacgccgaccaatccaagtagcgaaagtcgctttggccctggcccgttacctccgcgtcctgggaagtatcagcctttaccagctaccggaagtaactgcgcacgaaatctcccgcgggagctaagcctcttcgacaagaattctatagcgcgagcaaatcagtatctcgcgagaaattgaagaggaaacgtgagaatgaaagtggatgcccgcgaatcccggaagtcagactgtttttttcagttccctggaggctttttgatactgattcgcgtacacctgttgtttgaaagctctcagcgggacaatgctgacccaggtgagacctggggcccggctgggtacctctatctgaatgagacgcttctggacgcggccgaggtggcgagggagggtgctgggatgggggaacatcacctttgttcgtcccctcgcgagatcagcgtttctttggctttactgtcaagccctgaaataatgctgagtgctgtaatgctgagtcccttccgtccagctcgcagacttctagtacccactccctccagctcttggagggctgagatttgttttctgtgtcacagcggtatcccgggagcttagaacagtgtctgttacatagtaggcattgaatacacgtttcttggatgaataaatgaaacaattgcaaggaagttcacgatgaaattggagtgacttttctccctaaattaacttttcactttaaaataacgttgcaaagatagtacagagttctcaaatacctttcaccaatttttcttgatgtcagcatccccggtgactttttagttttgtttagatacaagttcttgctctgtcacccaatctggaatgcagctgctccatcatagctcactgtaaccttgaactcctgggttcaagcgatcctccagcctcagcctccctagtagctaggactacaggagcaggccactacgcctggctaattttttttttttttttactttttgtagagacacgtccttgatatgttttccagtctggtcttgaactgggaaatgatcctctcgcctcgtccctgcaaagcatgagccagctggagtacagtggcgcgatctcggctcactgcaacctccacctc

SEQ ID NO: 40619 - DNA, 625 bp, Homo sapiens
catttacttcttttagagattgttagcaatggtatcttggggatttatgcttcctttaccatgtttcgtgaactgtgaggtgggtctttgctatcatttatcctagtcctggaaaagcaacagcaagaataagagaaaaatagtaagggaggcaatgtttgtatttattgtttgtacactgagcattggcaaaacagtattctgcattcaaatgataaatattcagcaagggatgtatcaggcatagaattaccaagtgaaatgaataggttttatctgtattcacattgattccaggttagtcatacatcatctttatttaaaatagcacatggcttgctatgaaagcaatgtgttcctgcattctttttgtataactcactgcactttgactccatgtattgtaaagttttctctctcactttcatagccaaacattaaatgtaagtcgttgtggggattggaactagctgaaattagctatcctattttaaaaatgtaatttattctttcctttgctgttttttcctactagactgtaaagtcctctgtaatatcacaaattacttcctctccgtatgctaatttcttacccagttcccaaccatagtagttatttgatctg

SEQ ID NO: 40620 - DNA, 1231 bp, Homo sapiens
ccataccttgcaatcaccaatcaccaccccctccctctccagtccctcttattcccagtgagcgctgggcaaacattctaatcacacattaccaaagaagaaaccaaggaaacagctttgtgaagtgtgctctgtcaggatatgtttcccttaaaggctgctgcggcttgacaagcttatcttttttgcagccttgcagccctacgagatggttttgctcagtcggttttgcttttagtcttttaaaatggatcagtcaggtcaacggaaggtcatatttgcagtctttgttgtttaaaggtgaaagtaaacacacagagagctgcagaaagaacattttaagctgtgttttgaactatgcaatgacttgaaagaacttggaaaattaaggtaattaggcagagcagaatgaaggcctctagtaaaaagcccacagatttgattctgtcatccttctgacctctgttagtgacagaatttaaaatatttgttatttttttttgcctgggtaatgaagtaccgtgacccagatatgtactgtggctccttgtttattttctgacagagatggggtttgaggtgagagaggaaaaaaaaaaaagcatgactgaatgtgagactcgggtatattaaaagagatcaaactggttcaacaaatgactgttgtggctatttcctaaaaaggttgatggccctttacctgtaaccaagctgaatgtcagaaacttatgttaaacatatgacattaattagaaagatatccagctgccagtctattaaaaatgaaatggtgctgacttactgtgttttcaataactgatactagaagatacattggaagttctgtaccaacatgatgagaaaaaatgtctgaactgaggcgctgtgtctgtattctttcccatagctcctagaagtgttgtatttgtattcagccaagtggctgcctgctttgtaaaatcatagacacactggtttccgcagatgtaccacacagcactgagttgtttcatgtgctgttgtctgtggccacaagaggcgtaatctgtccaggaatgccacagggggattcagcgtgaaattcactgtgtaggaggagttgcaaagcctctgtgttttaatactccagacaagttgagtcaggaaaatgaaaatccccgcggaaacccttaaccagacttctctttctctgatgtgatattcagacctgacagatggaaaaatatcaatt

SEQ ID NO: 40621 - DNA, 1074 bp, Homo sapiens
aaccatgagttactaccaaatacccaacagaatagcaaaaattgaaaatgtttaaaacagtaagaacatcgagtgcttttaagaatggtgagcaccggaaccttcacacattgctagtgggaatacagattcatacaatctctttgggaaagagttttgcagtttcttataacatcaaatacatactcatcagagttttgtccttctacctgttgctgtatcatgttcaggttgaagccaggaagaagaagaagaagaggtatgggatcaattaggattttcattttttttttaactaggaagaaatgtcatgtaaaaagaaagtttctgcttatcatacctgtttattcagaattgtgcaatgaggtctgcccttatcaagtagagaagcttggaaagtcaatattctgctactatagtggaggagaaaatggtttgggcattggtcatcaaaagccaaagcagtgagatcatgggaaaatagtttttgcattcaaaagcataaagaaacttacttaaaacttgtttccataacattaactggaagtatcatgatttctaagggaaatccatctggctggaagaaatttctatttatgtatatgttacgaattgtttgctgtgggtggtttctttttcattattttgcagaaaaaaaatcaagctagtttctactcatcgttttgttaacaagtttttaataatcattttattttaaactggccgtaaatataatagttctatgaatatatttcaacttcaattatgttaaaatgtactgttttacattcttagagcttacagcagtgttgaactacataagagacgaaatgaattgtatgtatataacaaaaacacagctaatgttcttatcagctaccattctgaccttttcatggagtatgcaattttaaaattattgaaaaaatgctgtaataagtctataaatggatgaattgatatagtttgcatataaagaaaagcagactattaccatgaaagtaaaaattaattaatttaattatgcagtttccagtcattcttctaatagagcagttgctctcatactcatca

SEQ ID NO: 40622 - DNA, 966 bp, Homo sapiens
taaaaacaagcattttaatcaataaacctgacagtgattataatgaaaaagatgtctaaatcaggatacatactaataaaagaaaaaagggagtgctcccaagtgcttgatcttaaagtcagcattccaaaagagaaaaatattttcagtataccagaaatggtgactggatgcagtagaatcaaagacaggataagaatccagattttgagagcagattagaatgactcctccagaggagacaatgaattaggaaatgatacattttaggtagagtccagaataaagcaatgagggaaaacctcacacacccccaggatgtttttaccaaatttgcaaaggcttataaggggaaaacttttaaaaatcaatgtaaaatatgtaattgctaggtgtagtcataaattaggtagatactttaggtgaaatatcatactagattaatatatgtaaggctgtaagaagagataaaaataaagaagagtaaattaatttcctattcatgtatcacatattactacaatcttaatggcctaaaataacacccatatattacaccacagtttcagtcagtctggatcaaagttcattgcagttgaatcatttgtttgggtctcctgaggctgcaatgaatgtgtcatgcagactggagttcttatctgagtctttttctaatattagtcaggtgttggcacaatgcaatgcctgtggttgtactaaggctatctgatgttagattctgtcgttctccacaagcagttcactacgtgctacttggatctttcttcaactcagtcgtcaactgactagggagcttaattacatctgcaaaatgccttttgccacttaacataagctaatcatagatgtgatattggattatatacacaaatctcatccacatttaaagagaggtgattatacagggcatgtacacttggggacaggaatcctgagagtcacttt

SEQ ID NO: 40623 - DNA, 1132 bp, Homo sapiens
cacctgccgatttgattctggagactgtaatctactcacaggagattatgcctggtagaaatctcttcgggagaccacacaactaagaagcaggggtacaggcatactttattagccgaataacaccttttgactttttacaccagttctcccctctaccttcctgtattaacagttttacctctacagggactcagggtgggaggcctatcagaacccagagaagagtcggtgcgatgggcaactggggaactccggcgcacatcttgccccaggggggacagtatcgtcttgcagtcgttgccacaacgctacgctggtgcccggtaacgacactctccgcgccacacccagcgccagcctcttggatccccaggaagaccagggccgagcgacaaacacgcagcacacgcgaacgccaaacgcttcccagaaagctgtgcgcgagcctacaactcccatgatgctacgccgggaactgcccggctcctcgcaggaaataggcagctcaccctgccacctgtgcacacatttttcttcaatgtatagttcctcggcgcgcctctgaccttttcccggagctcttcaatcccagaagctatagcacaacggctgaatcgccaggacccccggggaggcgtggcttcaggaccggaagaagctcctgttgccaagggaacggtgcctgccaaggcgcctgctcagcgactgatgcacagactgctgcagaggctgccggttttcccaacttctagagacggctttgctcattaccaggcatccttcccatgtaggcatcgagaagaaggctgagggaccctcgcaccagatttccatcccggagaccgatacgagtgcgtccattcctgttgccagctcctgcgccctccggactaacctcaaaaaccaggtatctcctcaacgccggtttttaaagccagcgccaccctctgtccccgtcagttttagaattcctctttggtctttcccatgtttttcactccacgcgtgtagttgttgctaatgtatgagaagtagaaaagaaggtgagttatagaggccctagaaaacttactaaactggtttggacgtatgtttggttgatgggttttaacaatgctcaacttagacc

SEQ ID NO: 40624 - DNA, 1836 bp, Homo sapiens
ttggttcccagatttcagtggcatctgtgtaacgactgcaaaatatgttgcagcattgacaagcttgaaatcatactttttgatcagtgccgtttttgaaagagttcgcagggaagtatggcgtgtgaaaagtctgaagcacagcgcggttaggaaaagtcacaccacagaaagccagcagaacgcgccgggaggtggtgaccgcctgacaggtacccccttctccctcccgccgcccggttctgtgctaacgcgactttcgccctcagggttggagctgtatttgcggtagctgtttcttagctcccagcaagtccggggcgccccggtactgcagtttgccaagtgttttcacaaaccttagttcataaacctctttcaaaagcccgaagaaaaccgtttctgtgctctgactgtagaatagaaaacacaacggtcacagaaagtaattgaaggcaaagcccaacaggctgcagcctgaacttgtttgagccgtaagcccgagcctagcgtcgcacgctgggcgactcccctcaggctctcaggccggcgccttcgggggaccacgtagcgccccagcggtggcggctgcgcccggctcagggcggtgccgcggccactggctcctcctcggggtggggcgggccgcgccgggcgagggcgggaggaggagcagccgcagcggcgtgaggagctgccgcgcgaggagcgcgtcgcgtccgcacttctcctgcccgagagagactgagccgcgctggcagctcgcgtcgagtcggtctgccctagccgcatcccgcggcgcccggtcgggctccgggcaccaggcaacacctaggccgttcccttcagacagccccgggccagcggccccctcgggaaatgtccagcggccgcagaaggggcagcgccccctggcacagcttctcccggttcttcgctccccgaagtccttcccgggacaaggaagaggaagaggaggagaggccggggacgagcccgcctccagctccaggccggtccgctgccaggtgggagtcgaggagggggtcgcgggggggccctgcacatattcgcgggatgaaggctcccggcctgaccgccggcagcgggccgctcttgggccaggctgcagttcgctcgccactttctgttctccttcctccattgctaaagtttcctcctccttgccccgttcccgtgccgcactactcgcctctcctctgcaggttaaatcggggtgaagttcttgcccggcagccggacgcatatcccccgatccccgcctggctccgcgctcttcctttcccactttcccctgcccggacgtgattgggttcccgttccacacacgctctactctccaagttctgtggcaaaagcgatttccccggcgtcccgcctgcagtaatgggaaacacttgtgagccgagcggagccgtcggccaggggaattgggggcgcgatcccagcaccacttgtgtgggaggagatcggggcaaaagtggaaaaggtaaagctttggggcgtcaccccctcagctggtatttttgccatcttatttaaattttctcaaaatgatttttaaaaggaattgtgataatgcgttcccaagactttcaccaaaatggactggacatgtaaatgacgccacccttctttatttctcatctctcctagaaacatctgcctcaagttcccaaacagattctggaaatcaggtttccagctgtcttggtttcagtaatcaaaatgtaccctttctctgtaatatttttatctttccttcactttcccatgttcaaaaatcaaaaaattttagacatgcctcatttaaat

SEQ ID NO: 40625 - DNA, 938 bp, Homo sapiens
tctgaatgtgtatgtttttcatattcatgtcagtgtttatttcagaccagcttagttttaccaggtttgcattcacaatgctttcgggttttattattttctgattagctcaggcctattgggaacatttcctttctgaatataattgagttgttgtatttagagacacttcctgccagatttttatgttgaaattttgaaaactcccaactgtggatttttaaagtattttttcacatgaatcaaaataacatgagtagatagaagaaagagaagttatttcaaactgcacattttttgagttctaagtacagataaaaagcctcattttttaaatctctgtttctcctgctcctacctccttgttctttttttatggacttccttgtttggggcagattgctgggaggattttcttgatagtatttccagtctaacttgaagagaggaagcagcagaaaacgcccagtgaaatcagctccacttcatttttctgggtatggctaagttattgccttgtgaaataagcatttctgacaggtatatgatagctggatatttggtaacacatgaacaaaacattcttgctttacccagtatcaaaggtcttgttattttcagtggaccaattttcagacattcttcttgtttatgcttacttaaacaaacagatcttggctgacacgctggttccgttcaataactagaaagtattttcaacaggcagtagttacaaaagtcagattggcaatacagatgctgtgttcagatggggtactaattttccctgaggaataaggaggaagtttcatttcagagctcaagtcagagagggaatttttttatgctggtgattttaaagggaacctcaagcaacctaagaggggaaaagccagaaaatgtatgtgtgtagggattaatatacattatgagtgtta

SEQ ID NO: 40626 - DNA, 670 bp, Homo sapiens
agtcatcaggaggttatttgttgagcataagatttgggtaaaataaggtagataccttgagattagcctgtaggctaatgttcctcctaaaagagagtccttttactctctaggtcccagttgctcacaccctccagattctgtctcatttccctggacagtgctagatacactacctattctgcttctctgattcattctgattctttctgtgattctccccactatcttcgtagttaggaattgatatgccttttttcgtagatttcctaatactgctgcctatgccacaatccagtgtaattctggattcattccaggaaatgtttctgtgtaattaagttgacattatgtaagtatgaggtaatcctttgcttttgcttttgttagttaaaactgcagaattctagggatgttgcctgcagttggtattcccagacatgctatggcttggtgcttaagtgtcacaatggtataatattgagaagtcttaagatttcatcttcatagaagataagtatattttgaaaatgacagtgtgctccaggctaacttctgttggtacaggtgaaggttacattctagaggggcattgacacatagtttgcagtgttgcagtcattttatagtgaatggagctaggagtgtagttcatagttctgcttctaac

SEQ ID NO: 40627 - DNA, 515 bp, Homo sapiens
aagtcacatcttctcattctagctccagcatcactgtccaagacacaggtcaaaatccagcctggacacattgatcatggtacccacccacaatcctaagcaggcaacttctgtaacttaggaagctcttcccagccccagctgaaaagagaagaaatgaataggacccaggggcagccggccagttcctcactcttgggattgggaaacagagagtgagtcaggtccttagcagaagcaaaagctaacagggtcaatgagatggaggtcagagtagcaactggtgatggcctaatgttatgagtaaacagaagctgaagaaggaacagaagggagaaaacaccagtcactagaaaaccagttggtagcagcaagagaaatggaaaagagaattacagaaagggagtacctgagaaacattaacgatgggacacccacagatgcacggatattcaaagggccaaactatgtggtccagaactgctctgaatccagaatggacttctaattccagc

SEQ ID NO: 40628 - DNA, 687 bp, Homo sapiens
acatgcacatacacatacacacttgaacaatactgtacaacatggtctttctctgtccaggagactcagtgcatctcctaatggactctgtgttgactgtttaatgggcatgggcatggcaacaatacaaagaatccacaccctttacacttaaaggccactatgaagcctgaccttctcgggcagagcaagtagccaggtcaccggcctgagtaactcagccctgacttccgagagtacagatggcttagtctttaaagataaccaaccgtgaatctatgtaaacatgatgcaacaaagctggcaacctctgtgaagagccaaatggaaagacagtacgtatttttggtttgcgggccatgtgatctctgtggcaactagtccgctctgctggtgtagtatgaacacaggacattaaggaatgggtgtggctgtgttccaataaactacttacaaaaacaggcagcaggccagattttctggtccatgggccacagtttgatgaccactgactaaaagcataaaaaaaaccagtaaggttacctttactgttgtttattgatttaagtctcctgtaatataggcacccatcctaaacagcaagattgtttcccttagttactgggaggtaggtaaggattttgaaatcaagaaacacacaaggcattgagtaagaaacaggctaat

SEQ ID NO: 40629 - DNA, 1784 bp, Homo sapiens
ggaaaaaacagatggcctgtgcagaggggattatttttctgattgcagctgtcacttcaggattcaagagtatcgtaaaagctaaaaggcactttagacatcagtagttattactaaatcggggagggaagtatgaatttctacatcccctgggcagttttacagaatgtagttcagagttaccagcaaggttgttagcatgcaaatttctgggccctcatcaagcccactggattgccacttctgatggctgaggcccataatctgcattaacgtaatacgctctctagatgaattttaggtccactaatggaggacaacagtcaaacgcagctcagttaaacacacggctgtcagaaattatatattgcttgtaacaaggttgcccagactgatctaaaacatttctttttggctcagagatatgttaatcaatccagagggaaaactggttctcctattgacctaaaggagtgatcagcagttatctttttagtctgattttagagaggaaacggactatacctcaatgtattttcgtgaccatgaggttacaaagcttgatgtccaggaggcaaaaaccagtaccagcagaagaagctgagtaaatcaggttcctctgctcaaagatgagcccagtgacatgaaacccgaggcaccagatttacagctaatgagtggcgaaatcagatcctcttcctcccagtctatccttcctgaaaacagtgaataacctggtctcagtaacctgttggacaacccagctgtcggccaatcgttgcggaattatttgctggtaaatgaattggaagcatatgatgtaatgcagctgcccttctccccacacacctgaacttcagatttcacagctgtagagcgtgtctcttaggcccgacatgacgcccggcggcgcagcccacgtggaagccgtgctcgcacaggcagttctgccaccaccgggcggaggccggcaccaccctccttgctaagcctccaaactttccgtgcgctcgtcaccggtgtcgcgaccattagcaggccacgtgtgcgactctctgtaaccaaggcttccgcgaccctacccctagatccgggccccacccaccctgccccagtctccggggaggtgggacgcctgggagcgcgtcccaggtcccgcaaccacagcgccggccaccgaggcttctcgccgaccgacaggtctcccagacccgcacccgagcccgggtgcctaaagcagcagcgcgcgccccgcgggatcgggcactacccggcctgccccggcgctgggatgcccacgagagcgccccactcacccggcacggcctgttgctcgcggccgcgagcccactgcgttgcggcgcagcggctggaggcggggcagcgtgggcacgctccgggccgtgctccagcccccgccccgccccgccacgccggcccgcaagtggtggcagcccggaggcctggctacccggcggtgttccgcgttcacgcccgggcgtttctttagtccatatggaaggaaataaatggccttttttttcctctttttttttttttttttttttttttttttttttttatggtatgtgagacaaggtctcactctcgcccaggctggagtgcagtggtagcgatcttggctcactgcaacctttacctcccgggctcaagcgatcctcctgcctcggcctcccaaagtgctggattataggtgtgagccacccacccggctctccttttttttcttttaacttggggcggcaggagaggatttgagagag

SEQ ID NO: 40630 - DNA, 971 bp, Homo sapiens
agtttctataatcaactgtactgatcctagaactgagagtaacagcaaatccttcaaataatctaaccaataataaaatgtagctcggtctttcctacaacaaactaaatatcaatatattaaaaagaaaactgttataattttttctcagtgactttgtgaaatctcttttctacacttggccccatcattgaccaaaaatagcgttatgattcagcaggggattgaaaggaaggaacaactgacaatgttgttttgacaatgctgaacttcatctgatcctgtgtgttcctggaaagtatcaaaggtctggaaatccccgccacattttgtattctgagaaatgaccactccactctcacatattccaagatcagacccacctctatccttccccagtgaatgtgactcgcttgcatacctgactctttgaagcccttgacctccttccttttctttgagatgtttatcattaataaatgccctttctattgcaataaactgaaaaaaaatcatcttcttaaatgtccagtgcatttgtttttcatggtttctttaaaagagaaaaaaattatgtttaagttatttgttaaatccaggaaagaaaaaatttgcagttggaaaagcaagacactatagtgtgatagagtgttttaaagcagtgtttacagagaaagactaggtggctccattccataaatgaggtagttggaatataacattgactgctatgcctaaggccttgccaagaaataacagcagcaccagtacagaattgatgttgaaatagcagttttcatgtcacttctttctcttgcttctttgagggtgttgtttattctcattgaaatgttgatcataataatggttacagaaatagatataaatagacgtaattctttctctcattcatctccatgttaaaaaaattgtatgtacagggaggtgtgtgtgtgtgtgtgtgtgtgtgt

SEQ ID NO: 40631 - DNA, 1101 bp, Homo sapiens
ccattcaatgtctacactaatttctcagagggatattgccagagtaccacctggagagaaagtatacaattgtaaatatttgaaatgtacactggctggtatggttttatttcttaatttcccaccagggaggtgcaaatggaatcgctaatgatttttataagttgtgaggacattgtaatgtcaacagacagagtctcaaacagcaggaagagcactgtgatttactcctaaatgtacagccacagcatgtggactgctttcaccaacacctttctatcctttctgtaataattctgttaggctctcatctgagagagccccatatcaaacacaatgacaattctatagagccattctatttcaaataaagtttttagtttgtatgatcaagatcaacacaacttggcaatttgacagtaccataggaggacttggaatctcaccttcacactgatttgaactccagaataagaaacctaaatgctattccagctcttaacattgaacacagaccactgtctcatcaagtcccaggtttcccccaacaatggtactatcaacgatctgcatatcagagggtgctgtctgtattccctggctctaaaacatacttgctacgtaaacatgaagcaaagagtgaacatgaagcatggaattttattaagcatggaatttttattaacattacaggtatagctgaagccaagattattaaataaaacctgcttgcttttatcaaatatttacctaccacatatctaggtaaataattagccacacataacagaaaacaaatagaagctcagagtggctaagggattcccccatattttgtcagagcagagtgcaaattctgttcagagtgcagaattatgccaagaggcacaaagaagacactgtggctttcctgtgccatactgacattttcagtatgccaatgtcttactctgttcaagatttcactggcaggaagtgaaggaatcatgaactaatattcccacttaggtgctaacctcattaatttgaatttttttttttttgagatggagttttgctcttgtcccccaggctggagtgcagtggcacgatctcggctca

SEQ ID NO: 40632 - DNA, 1756 bp, Homo sapiens
gaaagcaagcatgtttttaattaagcttaaaacaaaactcattctcataaaagtacttattgaatgctcacatacccaggatgctacggagacagaggtcttgttctctagtctatcacctgcatactaaaacagacaacactgaaatggacatacacattacagatacaaacaatagacatgcccatggtcagcagtgtaccgtgcacacattttaaattacagactgaatttttgcacgagctgcagaggattaagtgttctgggtttgagtgttaaaaaggcacaggaaaaagaagcagtggaaattggcttctcccagtttcctctgaagagggaagcctcctaaaacaaaggtaagagtcaggagccatacagaaaacagagttgaagatgtttgttaaccccgagggaaaggttgttctaggtgtataaaatagcaaagagaacaataacatgtaataatgctagatagcaatctctccctaatccattaaagctaagccaagcttctttacgctgccaaatgcttcactcctatctactctcccgattccttatacttctgaacctcctcaacagaaatcttgctctctccctaaatcctcagtgcaacatacgtccgcaaaaactaaatgatccctcctcagccagacagaaaactctcaacatatcaacactcccaaggcgtggacagggctcaacggcagtagtaaatggccgcggtaaaatgactcaaggcagatcgcgctgagtcaaatactacacggcaagtatacaccgtgaccgcaccaaacaccttacaaaggttcatgaaaacagactcgcaaactggggttgctgagtttggaaaatgggaagtgactcaggaaagataagagcaatgacaacgaaaactcaaaaagttggatttgtattttgattttttaaaaatccccccttcatcctggtgctctcaaatgaccttaaagggtcccagcactgggaacggcggttcgtccaagccggacgcctgcagcagccacctcctgggcctcacggcggggccggagaaggccagggctggggcggggcagccgtgctcggccccgggccagggtcccccggtacccgaccaggccccgccctagagggctcggccctgggacaaatccgccgctcggaacccgcccagcccgaccacgcccgggaagggggcccctcttcaaaccgccgggaacatggaaccgcgacgcgacccctgcccggcgacgcaggtcccgctcactcaccgcccatcctcctgctccgccagcttcaccctctagctcagaccacagcaccctactctccccgcgcctcctctgacgcacttccctgcagagcccgccccctccataactcccgcgcctccgcccgcccccactccgggccgggccgcggcccggggccgaggggccttgtgggagttgtaggagggacagactgaaagctgtctgaggcggcgataggcattcctggcgccgcgcgcggcgcattgtgggagatgtagttcagctcctcagggcaagccggtacgcagaagggaagtctaggctgttggattcttgcattttagggaggaagggagaatggtccagaaagtaaagcgggcctgtttccggtcatctcgagtcaatgaccgtgacttgtataacttagatctgacttttaggcctgtgctttccctatcacaccaccctgcctctagatctaagtataaatgaacaaaaatggg

SEQ ID NO: 40633 - DNA, 570 bp, Homo sapiens
ttaataaactacagtttgaactacaagaaattgtggatttgtatattatactaatggttagaagaatgtcaagcagcaggtgtggaacagattctaaaagcctgtctccctcatcaagtcagaaaatggaagcaatcttgaaccgatctgagcatagataaattgctataaagacttttatttatgaaagcattattcacttgctattacataagaggcattcagccagtacagctttgtgaactttgatacctctcaaccatctcataagaaaacacatccatgacagagtcagtgttgcaactctaaatgactgcaaagtcaatttactttcctaagtggctgtatttgcatcaacctattgaaaccatgatggcttggattatgacaagttttatgttcaaacgcattttgaaatatgaagggattaacagtaaaagaattattgaaaatactgtttgaatgagcttaagatctagaatagagctggctacactgatcggaagaggaaatgcagttcaactaccttgctctgctggtatatgttagtgaatatccagtataaaacca

SEQ ID NO: 40634 - DNA, 1478 bp, Homo sapiens
tctaagcttgttagctgcaaataccccttaagagttctacaaaaaaatgctgctacggaattgcaaagattttgaaatgcagtactacagtgacagctgatccgggtccatacctgcaagcagagggctagtgaccctttcgtgtccatctttttatcagcggcctctaaccaagcggcctctctgtgggtaccccctacctaccccatcccatattgtgaactattatattttctgtctgcaacctggaacctgaccctttttccctgtctccaactcccgccaggggccggcctccttaccttccttcctctcccaccggtccacagaaaagttggcgcccccgtctacctgtgccagagcctggcacacctgggcctgggtctccagaatcagcagctccatcttggtcttcatgtcgcccggcctccttcgcagctcgcccaggtcggtcacaggcggggccatgaagctgctgcagcggtgggccagctcatcctcctcctcctccggcctccccagcgaagtggcccgcgtccccgaggtcttaggcaacatctccgcccgctgcacatgcccgaaggcggcggtggccagccccaccaaccccgccagcgccgcggccagccctgtccccacccaggggccgcctctcgacgtcgagccgtgccccagcccgcggctctgctccgtgccagccgggccagggggccggcagacgcgtccggctgcgctgcgctgggaccaggctcggagccctccgccgccgcactgggaccaggcgcggggccctccgcagccgccccgcgccacgagccagcaggggcccgagctcagcctgcccagctgcaaggccatgttcccgcactatcacctggagcagtgcctgcgtcccagagccctgcgtttgagccccccacccagacccccggagtattgagccggcgagctgcacaggcggaaagaacctttcgagaagagccgctgcagcgtcgggctccggaggcgggggcgggaactggggcgcgctgggagctgtagtccggatcctatcgccgcctgcggcgtccctgcgcggggcgggagataagaatccgacgcgcccagaagggctggtccgaagggaagagagtggggcggggacggtgctgtggaagggacgggagagataaaagaggctttcttgtcacgtacaacctcgggtcggctgtttactcagccaaggagagaagatagagtagggctgggaggctgagggcggactggggcggaaatgtggcagagatcccagtcccgcttacattttcaaacaggatttgcgaatacagagcctggctcaggatctgtatagacccgcccttcgccctgggtcctggtcctctagagtttttagaggggatgggcaggctgggaaactctttgctgaaggatggttttctaaagagagtgggagaagctagtaatggactcggaagaga

SEQ ID NO: 40635 - DNA, 1230 bp, Homo sapiens
tgtctcaaaacaaacaaacaaaaaagctatacagtgtctataggtgttagcagttaaatggaatacatggataaaaaaggaaaaataaggagggaagcagtgaaagaaggaagaaagaactgtatacatagggcaagggaaggggacagacagtgctgtcactattgtcaattttgctgtgacagaataaattctagaacagactgggaaacagcacagggcaaatgtttctgtcctgccaacaggactagcagagactaagccaaactgctgtcactgattgcaccactgcaggttgtcacggattacatcactatggtttctcttctctgaggacacatttttctctgctctccacccagggacttggacacttgatttcaaattctcctaacaaacagtttcaggctctttaggcccagtctcacttatttgcctacccgcttccaggacatgctccaaagggctttaccaatatacccctcatgtcgaagaccagccccatctctggcttcctcttctccccatgtcattcctgactatggcatgggtggttctgggagaaaggtgacataaacaggttccctctggactcaacacagcagagccaaatgggaagtgatgttgggagctttccttgtgaggccagtcagtgaaaagtgccgacagtctggcagatgggaaatcagtgtttcctgagagaacaggaaacactcaccaagcttctcagcctcctttttttgccctctgctatagctatctgaagctgtcctagggtcagtgaacaagaaagttctccccagtctgtctggccagaccaaagtaatattttggattaagcttcatgacatttctttgtcccatcctgaaacaaccctctgggaaggagaggggaattcataaatttactttagtttgatttttgtgactaagaaagtggtgttttaccttttcttcattctaggttgctaatgtgctcactcttggcaccttgttaataatatataagatttatttaccccatcttcatttacttatcatctttctcctgtcttaaaccccacacttggagcatataaatttacacagtttattttaaaagaacagactttgaagacctacagatctggttttcatactggctcccacgtgtcttagcagagtgacattggacaagctggtcaacttctttcaatatcactcagttgcttcatcaccaaaatgaaggtt

SEQ ID NO: 40636 - DNA, 3152 bp, Homo sapiens
caggtggaggcgagcggatcatttgaggtcaggagttcgaaaccagcctggccaacataatgaaacctcatctctactaaaaatacaaaaattagctgggagtggtaatcccagcctgtaatcccagctactcgggaggctgaggcaggagagtcgcttgagcctgggaggcagaggttgcagtgagccaagatcatgcccctgtaccccagcctgggtgacaaagcaagattctgtctcaaaaaaaaaaaaaaaaaaaaggacaaataccagaaagcccatcacagatgaaggactttgttccagttcgtgacacattgccaactttgaattacatccaagtccgtgggtcttctctctggggtcaattgatggcacgtgattacactgctcagggcccaaaggttggagctatgacttgaatgtttctagacaaggaattatttgacaaacacactttaaaaagtattcagagccatccaagtaagaggacattaataacgtagggttttgcctatggagagaaaagaaaacgcaaacagcacgttccaccttcgttctccctaaagtaatttatctccttcaaaagataaaaagtacgaacacatttgcccttgaagggcagagccccggaattcaggagctctctgaacactcctccccttctgatagggaccaaaccttctgctgagccttgtgtcacagtcagtccgcggcgccacaagcctcagtgtttacttctgccgcctgccagccgggcggggaaggggagtacccggccacccctcactttagctcctgcagctttccaaacaaaccagggcgggatgggagtgtcttcttggctgtggaaatcgatcctcctaccttgtcctgaagccacccgccgcctttcctcgtccctcccttcgcggtgattttccggtcccggcgcccggcgagggcgcgcggctggtgtccgccccgcccgaaaggtaggggttcggctgtgctcccgcctggtccccaacgcctcaccctccgggagacccgcagcctcccaccactttgcaccttcctcctcgaatttgggggcggccaccgtgcaactggcgccagccgcggagcaggaggagcttcccgcgactccggaggcgctcggcgcagtcgcccgggattggggctggcgggagcctgagactccgggcagggctgctccctcctctgctcccccgccagatccgcggggaaggaatcgtgcccgcgccgcccctggcccgcgccaccttcctttggtttctgccggcctcgggcttctgcggcccgatgtggcaggcgccgcgagagaggcagcagccggctggagcagcggcccctcaggtctcggagcccggtgcgcctctgcggtcgtcgctcctgggcctcggcgggtcactcttgccggccggcttcgctgcgggtttgcactgcccgggtgagggaaattgggggtgcgggaagaccggtctgggccggggtccgggcggcctggggtctgtgctgccccgaccctccggctttgcagcctctgaggctcagggttgggggtggggacacggagcgctgtttgcccctccacatatcctgccagcaccaaggaggtggcgtgcggaggcgtaaagggaccatgggcgctgggacccgcgagccagccggcgtgcgccgcagccaccgccgagagggcacccggggatcctggagccccagtgaagggcgggagggacgcgcagcctcgcgggtaagcccaggagccgtgggggccgagagaatctgctctgggaccctcttttgtcgaatcgccggcgaggttgtgcaattgggaagccaagaggagtgtccagctcctcgttcactattgttttcttgtaaaagggtctgtacgcgaggagggttgaggggtctggaaggttctggtctcttaccgtataaagtttttcgagaaaccctttttccctccacaatggaactagacctaacaaaacaagctccgaggcagtttaggagaaaggaggacggtgagtaaattgcagtgtttgggctgctgttaattttcaagataagggagaagcaacttgtcattttgaggccgccggctccggagatcccggcaatctcaagcctctttcttgtgtgctgttattttggcttaaaagaaaacctataaaaagcgacgcccagaaaccaaaaacaaacccaaagcaccttcttttaggatttttcagtagcgagggttggcggggacagtggggaggagcaggagggggagaagaggttgctgttgaaaggtaatgtttaaaaacagtgtgtgggggtagggatgaaaataacgtggtgactgctagtgtatcagaaatcacaccgagtctaaagtcgtaagtcccatttgccttacgaggaccagctgggtgctgtgagtaggtggatagttaaggaaactgtagatctgctgaaagctcctcgtggtctgtggtctcgtgtccacgctgacctttgaacctcgtaactcttcgggtctccagcggccacctcttttaggctagcccgaatgtttgactttccggtcctcaatcttcctcacctagctgcagaccataaaactgtctttttatttacagggagatgttaaatatttgggaacatctgctcaggctgccaggttattttccgtttgaaagcatgccgatttgacatttgcaagttggtttatgttgcttcctttttgtttcactaagaacgcttttcataccaagatctgcgaaaaacgatgcccttagactgttatttagtttattgtctctgagtaaggccaaattccacagagggtctttggataatggcaactttgcttataagaagataatttttctagaaagtgttgcattggtctggtttcctaagctgttcttgtggtcatgtagactgggaggggagatcttcattccttgtgatgtcgctttccttgaattgtatttttactatagttccacaatgtctcagtcccagattgcaccatatgttgtttacatggtgcagtaaaatgggactgcaattttgactacatttcagtagatttgttggagatagtttgttcttatgccctatatcaataataataataaaaaacctttgaggct

SEQ ID NO: 40637 - DNA, 976 bp, Homo sapiens
gagatagaaagggaagtcctccttgaagaacagaatcctaacagattattccaatttatattggggagtgggaatgttgtgggaggggaattggggggcagggtgagaggagagggagaacattccgggcagcaggaacagtatgaccaaaggcgctgagacatgaaactgccaagaaggattgagaagtgcacaaagtttggtgttactagagtcaagcatttcaggagatgagtcaagagtcaagcatttcaggagataaggcaggacaggccgtaggagccagctggatcagacttagaggcctatggcttatatatttatatctctctataaggcacttagggaggtaggtctatataaacaatttataacaggtaaattctacatgttgcttctaaatttggacttggggcttacaatatggcatgtaatacattccttccaattgctgttgtcaccagaatatgatgaaaacattagttaagttaatatataattgatatttagcactctcacttttaataacttgagtgaaggatagaaatgtgaagtgtcatttgtgacttttgaggtgggggattctgtatgaagtttgatagtagagatgggatttgacgggattgagacatccaatgagaagagtcaagaggatcactacaaatgtgtggcctcgaacctttcagtaccttcttcatatattttacacagtagaaagccaagtgctttctattcacagcttcattttacacaattatgtgtatgacaatgtacaaatacattttcatcaatatttggtttgtatttctttgttggcattgcaattaagttttgacttccttcccctctccactcctttgatttgatatatcaatgtgttattcatagcttatgcaatacctgatgttaatatttagctctaaaaaattttacatttttactccaaaaatatgttttctaagtttgagtgttgtcc

SEQ ID NO: 40638 - DNA, 2144 bp, Homo sapiens
ttcatttgctgtggagagcaggacagtttcaacacgggaattttaaggtttggtatatgctcatctgattgttcacccttaagctaactcatttctttcttttaaaaatagcagaaaaggtaagggaaaaaaatcagattggagaggatatttcctaagggccagaataatccaggcttattcagaataaattggcataataagtatttgaaaacagaactttcaaatatcagatgaaatgttatttataacttttaagcaaactaaaacagtaaactctttggaagggggacttttagaatcaggaaagacagaaacttgttcccccttagttgtagttttatttaccctgggagaaaaacataagaatgctttcaagtgtaaggaagggctgtgtattcagatatcagcatactgctccaagaaagacatcagagagttttgaactgattgaaagcccaaatctattggatcagttgaggagcagagcaaaatatgaccaagcaataaacgagtaccttcaaagcttttaagaaattcttatagtttgtataggtggttgggaggtgaaattccagggctaggaatataatgtaaagccctacaatgaaaaagaagactgcaaattgtggccttaggggactttccctgccccgttcagagacacatgatttttttttaacagaaatccctggaaaaattactttagagccatgttttcttgcattctgcattttcattaatggtagtatactgaaatcacaaattcattcattcttttcttcatcagagcacatttacttagttttaagtactttccaagctcagaataaggtcaccattcttctatggaagtgaaacatctcttctttagaattgtgcaaaattaattactggttggggtatgaccttgggggtataggatataacatgtttttggacatttgaatgtgtggactcacaaaactctgctaataaccacttaacctatttattaatcatctgcctcaaaatcagggctgaagacttttgaaataatgtagttagaagactctgtacagtgaccatactttgggaaaccctggtttaagtaacattcgaatgttcctgttcaccctaaattcttgccactcaaagcaggggcttcagactagcagcactggcattcttttttttttttttgcatgatttgggagcttgctggaaatgcagataaccaggccctgccctagacatgctgaatcagaatgagcaacttaacaggatgctcaggtgatgccaatggctattaaagtttgttaagcactgctctgcccactcctgccaaatggactttagaacatactagtaatgtgtgacccactttccaagaatgcatcctgtattaggcagtccaaatattagcaaggtcttcctagtactgagctcaaacttaactccttgaattttgcattcactggccttggcataactgcttggtagccatcagaaccaagtaaaatcctcttcatgaaggaccttcaagcctgtgactaggctgtcttgtttccttccttgatttaagcttccccaggtgtaactaaatccctgtttcccccagtatgacagtgcttgaggtttctttaccaacttatccagactaaataatctttttttttttttttgagatggagtctcgctctgttgcccaggctgaaattcagtgacatgatcttggctcactggagcctctgcctcccaggttcaaggaattctccctgcctcagcctcccgagtagttgggattacaggtgtgagccactgcgctcgtcccagactgaataatcttaaaggacccttccaactttaaaattgtgatggattctttagtaataagtaatagtggatagaagatgatggaaactcaggaactatactttctatacatttaaggagagaataatcctgaggcacaaatatatcatgatccataatttctttaggttcaaaattctgtctcatggtgaagacttctctaatagtaggcattaaacagcactcctttgcttttctcttgatttctaaatgggtttgctacttaacacttcaaaagtgaaatgtatatagagatatatgaaaataagcactttcagtttctttgaaaa

SEQ ID NO: 40639 - DNA, 588 bp, Homo sapiens
tttaagacatgccttcttcttaagggcatctcccagaaatcccatataacacttccttacctccaatgatgtgctggaaccagttggtaccaacttgtgagagctgtatctctttgtattcagctccatatttagtgccatcaaggtgaaagcttgaaatggccaaggtgagagtattcgtaccatgggaattggcaaacattacaaatcagggctttgcccattcatactcctccccctcccccagaactgattgttaaacattgactagcaaccactgtttgcatcccattggataggactccatcacaaggccacccctagctggaatgtggaccggaaaatgtagtttgtattccaggtgactgtgtgctcacctttaaaagcaaacatgattttaacagatgaaggaaacaagattattggggaacaaatagctgtctttaccaatattctgcatcatttccctggtccccatctgtttttatgcctggtcactttcaggattctgaagtcaaatatctgactctgctctctaacaactgagttcagtgcatcttttttatctgctgctgctactgatttctc

SEQ ID NO: 40640 - DNA, 3328 bp, Homo sapiens
tccaattaaaatatgttaaaagtattttttaaattttaaaccttacaatcagatgaactgtactactcaaaaaaggtaaatttaatgaatataggagtgtgtacatcatctcctgtttacctgacaaagccaatgcttggctcttttaaacagtttccgaattctcacattctccatgtttctgggttctacagtgtttgtacagttttgctactcattgatttcctaaaatccttaaggtcttgagttcatctggtctgctgatttcacgggtcttagggaaacagtgttctctttagactttccatgccatgagggccctggaaggatagcctcaacaactttcccttctgtggttttgttccctagcgggcaaggacacagtctattttgtcatttctccaggcctgcctgggtgagggtaagagctgggagagagatggaccagcaacacgaagttcccctttgtgttctactttaaagctgtttgccaggaacaccgcgtgaacttttagtttgtattggttaagctccaaggaccagtccatgtttgagaaattgaagtgagcatgggcagggtacagaaaactgcacttttctcaccagattccaaactgtccatctccacacttgtgcagcagagagccagaggtagaatcttcgaggagtgggtaatgctggcaaagaatgtagacctgcataatgtaaaacacaaatgcagagtcctatatggaggtgtgtttcacagtctcaagttctggatccacatgctagttccactttggagtatgactttaaaatgttacataatagatttctgaacctctttcttcatttgtatactgggaatatcaggcttacttatctcaataggtgggtatgagaatcaaatgagagaacatgtatgggctgataatagttgctgacaatgatatgctcttcctatagaatgttactcattgaatcttgtatctttttaatacagctctagacttgtaagtcgcagttggttctttttctacttgcgcaacaagtggaatttggcactgggtttctgacagtatgcatggattcttggaatcagttttgtaaaagatggctcaatctctcacttgtccatctgtccaacagcataccctgtaaaaagtgtgtggtggttggtaatggaggagttttgaagaataagacattaggagaaaaaatcgactcctatgatgtaataataaggtaaatatattttctatttgctaccctagaattgtttcaaaagaatatggtttcttgccttaatacagctgtgttttgacaggaaggggagatgtttccatttggttttttttttattgcacaaccttctctcttggttgttggctagagttagacctagatttcaggttactcatttagcaagtatttgttaagtctccttagtgtgctagcatgcttctagccacaggagagatagcaatggataagaacaatgtttgtgctccctgtggagggaagaaaatgagtaattaaatatataaaaataataaatgccatacataatttaaaaaggatataacagagaatctttgaatggctcctttgtaatgattgaccactttgagaaagagacatctaagcagggcccaagtgaccacacagcaacagccatatgaagattatggtagagcagtccaggcagaaaggatgtttgctgcagggcctcaggaggagatgatcctgagtttgagaggagtagcaaagaaacccagtgaagctggaaagtagcaggcagggggagagtggtggaattggaagctgaagcggtgagcaaagatcaggctgcataggactttgtaagctaggattagaaacttggattttaagtgcaacaggaagctttttaagggttttaagcaagagaacaaagcagtctggttatgtcttaaatattctggctgtggcatggacaatggaatgtgggggacaagggtggaaatgaagaggccaattaggttgctgtattcgggtataatatgatggtggcttgggacaggattgttgtaggagaggaagagatatgtggactgactgaagatgtgttttagacatagagttatcgggatttgttgccgtattagatgtgaagagtaatgagaataaagaaatcaaggatgcctcctactctgttttcagcttaggagattggctggagagtggtatcatttattaagttggggaagactggtataggagcaggtttagaggaaaaccatgatatgaacatgttagatttgagatgcttgttagatttgcagtgggtttgtcgagtaggcagttggataaacaggttaaaatcttgatggtgtgtggcctataagctgtatttaaaccatggactgggtgagatttcccaaggagagactgagagagagagaagagagtgaggactgagcctcagagaactcaaaatttagaggttgagcaaagaaaaaggaatgtgtaaaagagatgaagaggatccaccagtgaggtaagaagaaaatcgggagaaggtgatcacagaagccaagagagcaaagtgttccaggacagaaggagtgaccaactgtatcccagtgctggtgagaggtcatgcaagataaggacagagtggtgaccattggactggtgacctgaggctcattgacactcccaataaaagcaggcttagaggcgtgatgtggcaagaagcccggctggactaggtcgaagagggaatgcagagaatgtacacctgaatgtacagatgaagatgtagagaaaccaatgtagtccagggattttgcttcaaagaggagttgagaaatcagatggcagttagagatggttatgcaatcagggttttttttttgtttgttttcttcttttgaaaagattggaggcactatagtacattggttaactggtggaaatgagaaagagattggggtggtaaaagagaggggaagggggttcagaacacaagtgtggttaatgtttcataatggaaaggagagccaggattgtggttacaactaccaagagtccctctgatgtagtgaggggaaaatacggacctttctatctctatttttttagtgaaaggtcaagataaggtcatcatctgggataagtgtgtgtgtgtgtgtgtgtgtgtgtgtgttaggagtagctatgaatagtttaaagaatggcaaagttagcatactgaggcaatacattaggatggtttggcagctttgggggttttgtggggttacaagctgcctagggtttctgcatggtgaggtcaccttattttctgtttactatccatttt

SEQ ID NO: 40641 - DNA, 716 bp, Homo sapiens
ttatttctagaaaatattgtatttctaagcctgagagtcaacatgtttagctgtaaggaacaataaatcacaagaggaggcctgcaacacagtggccttctctaaatatttaaagagcaattctacatggcagcagagactacaacttagatcaatgcagtcttttcctatgaaagaaaataaatttttttttttgctatacttaaaaactatagttggaagaaaataaactgaaggtttaaaaatgcccgtgaaaacttcagttaagaacaaaacaatactatgtactaggcgttcatttccatgtttgcatacctttggttacatttggagttacggtagtatttctgatatcaggactggcagttgtttgttctgtctgtgcaggaaattcattgctactgcgaggttgtagtggttgcgtaaattttggggcacgacctttaaaaaagtttcaaaagctctttactttttaatctgtaccaacttgattaacataaacttatttgataatgcttttaatatatttttggaaagttgcaccataaatccaaggaatatcaaattctcacattaaaaacaggcatacctttggctatttttggaggggctgtagtgtttttgaggtcattgctgttccgaggaggtggaggttgagtaagttttggaggacgaccttgaaaaatggtttagaaaaatttaaacattttgttttt

SEQ ID NO: 40642 - DNA, 1033 bp, Homo sapiens
ttagaaagtacataggctttggagtccaacagacttagattcaaattctagacatgccagttttcaagatcctggacacttaactgccacaagcttacataccctaaccagtatactggtgaggatgcaactacctcacggatgaggataccaccacccatctcccaagataaatgtaaaggttcagtaagaacttctttaaaatacagtggtctctttataaatgtaacactctttctcctagaagaggatgcctctgtttatctagtaccctgccttatccttctctggaaggtgctctgcagtttcccaacagttttaatatgacctcatgccccctggttatttgactggtccaagggtgggtactgaatcacactgggtcaatgtgagggccaactcaccctttcctggaccttgtacaatagggaaaatacagaatttctccgtgttaaaaccgtaagccttcgggattgccagcagccatgattccttccacaaagagaaagccagactgaaacaagagggaagaactaagctgagtccttggttcctgaagtctagctgcattcctgccttcccctctcaatcctcccaatagtttctccttctaccttaatcagatatggatttctgttctctataacctcaaaagtcctaactaaaacactcttcctccatgcatgcaaaagaatgtccacctcacatccagacctataaagctggcttttaggatgccaagagtagacagaaacaaaggtatatcaggaaagaagagataaaatgatctgagatggtggggatcaaaaaacactgaagcacaccaacaggcagaaggctgaagaggcagagcaaaggtcaaaaaggagagcacagaactcacattaagatttgggtgggctggagacagtcatgcctttctgccacattcctctattgcatgctctgactcctctcactgagctgggggtggaacaataattggggataaagggaagagggatggaaaagtgagtcttagtggaacggaaac

SEQ ID NO: 40643 - DNA, 1738 bp, Homo sapiens
ccttgccaaaaagtaaagccgcgccaacttgggggacagacgggcaagaccttgcctttgcaactcaaccccgtgagtacccagccaggtccggccacgcacgaaagcgcaccgcgcctccctgcagcgtctgcagatttgttcaggggccaagagacccgcagccccgacggaggttcccccgccgctcactcccctgggaccactcaccttgctgggctccagcgtcctcgagcagcaggagcaggacaagtaagagcaggaggaacagaggcatggagaaggaggaggagttggagcagggagggagggagcgggagagggggagcgcggcccaggcgggggcggcggccgcggcccggacttggggacactgcgggcagcgcctggctctcaccaccgcccggctcgccatcgcggcggccggcagtctgcctgcatagtgcgggtgcctcggcagccccgcgcgcctctggccgcggcacccgaccaggagacggcggcagcggcgggagaacaagaggcagccctcgcctcaccccgcgccgggacccttccgcccctcaccccgctttcacctactcctccttcgtcccttccctccgctccccgcgccgagaccccaggccggagcgcaggggaggggagggaaggaagcggagtcctcgagccgcggaggacggccgcggcggagctaaggaacgtgcctcccgcgccgcgctcctcaccagggtcgccgctcgccgcgctcacccgcggctccggctagctggcaggcaggcccgcagccagctccctcgcgctccctctcgcgcgcgccggccacgccccctaggcaccgcggccaatcctcggccagctctggtccgtctccttccgcgaaacccaatcagcatgctcgctcctcgctcgacccgctagttctccggcccattcctcgagctccaccgccccttacctccctcttccaatccccttcggcctttggaggcgtcccacccgcctcctccaatccaggtcccgccctccagcttcggatccccgcggcccccgcccggcccgggcgcctgttattgttgggccctcagcccaaactgatcccgcagaggcggcagccagctcgtcagtgacttccgggacgtcccccatcccgcgctccctgctcctcaggcccagcttgctccttgctcctttctcctcgctcctccgacgcacatcagaccactggaagggggtgggaaacctggatcctgggttgttttagctgggagctgagtctaagggactttttttttttttttaatggcagagcgtggcttgttttgttaaaactgccgccagttgttgcaacagctccgagttagaataatagatgcagtgttcagtttttaatatatgtgttccctgttttctctgctctttttatggcggggggtgggggacaaaaaagtgtaaaacaagatccgtgccgcaaaggcaatttaaacctaacatcccaaccttcatgcagccattctacaaggagttgttgagcacctgctgtctatctacagaaatcttgaaatgtggaacagagatggaaatatagcatgcaagtcagaatgaagtaagtgctaattagagtcacaagcagtttgatggagactgtaagcctatggaacgacaaaaagaattttaggaaagaggaatgcagaggtctacgcagtgatttattttagaagagagtggccatgtagga

SEQ ID NO: 40644 - DNA, 1569 bp, Homo sapiens
attctgttatgtaaaataaaccccacctttatttttccaacccaaatgataccagaggtagctaatattaatgaaaggtagagtgagtagccgctaaatatcttcttttaaaaattgcctttatggacttgatgtagttaataaatgataagaaactattttggagaatataatatgaattgtcactatggatatattgagaatgtaaaatgtctttggaaaaaaaagcaaagcagctgaaaattctacatcctgaacaatgaatgttaattttaaaaatcaggtttccaaattgattaaaaacaagctgcattaaaattattatggtaaagtttttggcctatagagtaaaatgagctgctctactgagatggtaagtaccaacagaatcacctgatggggattttaaaagtcctgatagcccctaatagcacctgtggcctccttgaatagtggtgagaaaaatattgagaaccaattggttggaagacttaattatggcaaccatgttgtgtaaattcatcagggactttggctttgtcagatttacattaaaaaattctatatgtctgtttctgccaactaagcttttgtccatcccaggctacatatcatccatattccttctcctttgctgtaggaatctaaatgaaacactttgatccattaatggaatgtagctgacccagtgccctctctgtcacaatgttgattcacggccacaacgtgcaatgggcagcaagccaggctgcagatggtgtctaaaccccggtaacaggtcatacgtgatgcttgcttaatgggctcctctgtcttgagcaaacagatcacccatcacagtgggtacgggattctcgttgtaggaattagttgcacacaatttcctcagcattcgtcagaaagctgttggtgacccagatgaggtgttctcttgtagcaaatgaagaatcatatactctaatactgggtcacctccaatgctcagcaaccctggccagaagagaaggagatggggcttcatgattagtgagtatcaacctctgctggacatttccccgacatgtattattgatgtctcatggcatctcagtgaggcgagtataattactcacaactatgggcacactgattcagtgattaggctaggtctcactgggttgagactccaagtctgtctaatgtgagcacatgtgattttttccacttgaccacactgcctccatgttgttttggaaattttgcttgcatcaatcaaagttctttccaaagcttattaccaacaggcaacaaggtaaatacctaataaaagtgcatttttttgtcataaaattgtgatttggtacaaatggctgttttgaaaacgatgttagtgaatactcattttatctcttgtattatctaacatttcatttaaaaattaaagtcttgtatattttgaaagacatacaagcccaggtcctggaggttagccggggttgaattttgtatttagagaatgtatcagcattcctcaactttacctaatgtagtctcccaagcctcaaagaatctgagacattaatttctaga

SEQ ID NO: 40645 - DNA, 566 bp, Homo sapiens
gatgaatgttttcctgccactttactgtttttgagtgctgtctttggggaaatattgcaataaataaaagtgggaaagttaagtggctgagcaccctgtcaagatgccctgtacagcaagtgcacttgtgataagtgcagaagggagaaaaggttaatgtaatcagagaaatgcgttctgggtcaccctaaagaacatgtcttgtgagtcatctgtgttcacatttctttgaactttgtctatcctaacggagatgaagcaattacatagacataatgtcttacccttttagtacaatgcattccgcattcctcaatccattcatcatcatcagtgatatttgtattcaatgctgtcatgcagagctagctgccaacaattattaaaaagaaagccataaggtcatacatttaggagataaagcaaaaccaattattacaatgtgtactatgaagacatcaatccattaaggggaaaaatcactaagctcctcaaagatacttttgcatcaaggattatcttgtattcagagacctaaagtaaatgaagtgattatctgtcacttg

SEQ ID NO: 40646 - DNA, 2007 bp, Homo sapiens
tgagttgggtgcacacggggtaattttccacatatggctaatcctagcctcatcagattaagtttccctgtcttgtcatttccgaggatgtatcctattagaagtctagccctttattcctacaaattgaatttccactactgtaggctaacatctgaatggactcatcttactattccatgcatagtaccaggcacgttgcgtgcttttactacattttgtataatttttacgtctgtgtttgatgtcctgaaaaataccgtccacaattacttcacagctagccccagcacttggcgcccagcgggttttcctagtccctccctgccaaatcacgttgggactgagacaagaggcactgcgggtctcttacctatagttacgaagcaatggactcccttattacttcgtttcccaaatagggggtgggacacacaaccgagggagtatgaggaaaacaacttgcgggtcttcgagccacttgcgtctttctgtgggcgagcctttccaggccaattacattttctttactcatattgcataaatagcagaactacatttaccacaaaggcccgacattcatggtcatggatccttgcgcatgttttctaagagcaaactgtacaaacacataaactctgaaacactgacgcacaagcgaaaacacacgcacatgtttgggtcttctcccgctgcgcaagttctttgaaactgagcggagaaaaatcgtcttcacatggtgtctcacactttcgacacaatcttatcgggaaacgtaacacgtaaacaaaattttttaaaatgcattatcaaaaacgatgacaatccctttcgtcttatgttcctttttgtctttaagctttggggggatttatgttgcgtttccaaactgcttctgcctgtcggcgcctgtgtggaaactgcgacgagtctgggagcggctgccggagaggcggggcagaggtgtgacgtcatcgccgcggggcggaggcgacagtgtctagcgggagctccgcgtgtagctacgccggccgcctggctttgagacaacgtgattctccgcagctggtcgcctacccgtgatgttctgcccacgtcgagacctgagctgaaatggcagacgatctcggagacgagtggtgggagaaccagccgactggagcaggcagcagcccaggtacccactctgtgcccgcgctcctacggggcctctcccggagcccttccgtgcgcctcagccctggtcgcttctggcgatcgcggtgtttgcccagcaggggtgtgcaccgccttgggagcgcgcaagcatctcggggaaaatggtgcaagagattctttaacacgtgaaacagacagctgtgacattaactcagatctgtctgccagccaggaaggatcctttccacaagctttctcttttccttatttcttgagaatggataagacagtttttgtgaagagaggcaactttgtatgatggttaagggtgacccatgaactgctttcaattcagactgaggtcagaagcaggggttgctgcttcagactccctccattcaaatcacgactccagtattctgatactgtttagcctccttttcctcatctgtaaaataatgataacaataatgtccatttcgtaaagttgtgaagattaagtgaagttagtacagtaatgcactttagcatagtgcttgacatataatgtgtggtaaatataagttactgtatttcttgtggtcatcatcattatcatggaatttggaatagtagaactggaaggaggcttaaatagagatcatcctttgaactcacttattttacagatgagaaacataacctaaagatgtcaagtaacttgacaagttcacaaagctagctcctttcagaaacaatactagaattcagttaacacaatttgaatagtttctactatgctctgctgtgtttaccaactcctgatgcagtgggcatttcatccccaagtagagtagcgttaagtgaccc

SEQ ID NO: 40647 - DNA, 741 bp, Homo sapiens
gatcagttgatcgatgccttccaaaatattacatgtacccactctcagtaactagaaaaagatctcatgaagcagcagcattatcattgtctgttttgaaagagctaaaattaagtttgccattccttctagagttctggcccaaggtgacttaaaaacagttttaataaacatttagaccatcatgtattttgtaatacagttgggtcactgttgattcctaagataaatgtgtttaaacagaagctttctcattcatcagcagcctcagctttcatccaaatttatttaatgatgatgcaagcccatagcgttggtgttgcagttcgtcaccatggaagtgtttctgtcaacaaatcctcgctttactatcatgaaattgattttgtaggggaaaggaggataattgtgaaagcttccttttattcttaaagatcttcacagtttgcctggatgtctaaatgaattgtatttaaaatcaataactggcaataaaattaaccacactaaattaacaattatgaggttagaaaaagggaaatggcaataagctactttgtctgaaatcgtcgttttggaatgtgacttggggaccatacttgtaatttaaatgttccctgaaagctgttgttctctgctcagaagtatggattatccccagggactcccatgaggcagatatcagaatttctaggaggattcggctgagttattctcatctatattgtaaatggcataata

SEQ ID NO: 40648 - DNA, 3905 bp, Homo sapiens
ccacagtgacatgggtgttggccccgctcttctcattatggtgggcttccctaggtttgaaataatagtttgtggaaaatcctacttctcagtactaacctgcagtttatatagcctatcctcaggccaaataacatataatttttcttttaaaatatgaaaaccaaagtcgtgcattgctccaaacaaaattagcaaaaacaaaaaaactgctatgaggcaaaaatgataggcaccaatgtcatatacttttaaaaaccatccaacagaaattattagaaatatacagatataacccacattttgagtattttttaaatgctgtgtttcaatgataaaatctgggatctgacattttcttctgacaattaaatataaaaacatgagtttgtaacacacacatacacctcagtggttatagtgctctgctcctctgttaaacttttactgtacctccaaacagttatcttatatggtcattttagtgccaactaaaatgccagcattttaaaatctcagagtaaatataaatggcagcctatgaattctgagtttgaattgtatatacttataaaacatagagactgttttaaaagggacaattctgtcacatagttgttaaagttttattttacaatatatgtttagaccagataaggattgaatgatgaatcaatttttcatctcctattccagtgttctaaagttgacataacctttttatttttaattcctacgttgacttttagttggaaaaaatgaagtaaaatattatggagatttttctgccaagtgttcagttatcatactgtaagagttcattggtagcaatagcctcttcaggatttagatgtaactaattatggtttaaaatgttactgattaatacagttactctataagttttaccttttaaattggcattttttacataatatactactatccaaaatattactctagaaatgatagctgtaagtgaggtttgtcatttttccaatgcctggacttgaagcagaaagttagaactcaaaactatgatagttacttccttgtacaaattgacatatgcttttacgacaaaatagcgtttgtacgattttttgaagcttaaaaagattttactttttaagttagattcgtcttaattccaagatgtattcctaacagtgtttttctagtcgtttatattaacatttacaaaaagaggggaaaacctggcactaacaaattttcgcattctgctcatgtaagacaagcgagtttgagtccggaggagagatagggttgctgcagtacaatatagtctcccccaccctttccccaaagatttctcaatatgggcaggattcaatgtgtagctcacttggaaagcgtatgtaatacagtcacctcccacctctcaacatttaaaattaaatctctaatctgttttctcctccagagaaaacttctactttcaagttttgtgtgagttggaaacggttttgaacctagaattcattggatgcgctttgcgaaacctgtctgcagtttgtgatgctgagacagctttaacagccacccacagacttgctacctggctgtctgacagcagtgccccttggtggagcgaagttgctctcccgggcttacctgaactgcctgcgccggggccgggcgggggccgggccggggccgctgtagtgccgcgctgcgagccgactgtgcgcgctccgagagtcgcccgaacaatgcgagcggggcgctgagcgcgcccggcctatgggcgttacgtcactgttctgccttataaggcgctccgcgtgtgcggcgctgtcggcgggggcgccggtgaccgcgggaccctcggccgcggcggcggcgcagccacacaccccagctcccgcggatgttccggccgtgtgaacggaccgtggttcccggctcccagcggagggaatgagtggtgggccggtgggccggggcgccggcgccctcctgtcgggctaacaaagtcattgggaggcagggtcgatccgcttgtaacttttttccctctgggtccctaaagctgttgttgcttcagggacttcaatacacatcctgttattcttatgtaaacttttgtaaattcattatactttttatttttggttgctgggggtaggcgggagagggaaaggagaagtctggggttttgtggagacatctctgggggtgatttagacttcaaaccttctctttcctctttgtaatgagtaggggtcctcagaggatggtgttttatttcctgatgatgtaactaccaaacaattcttcaagtgatgatggaaaggccagatgaaatcttatttttttcagtgtttttcctgaaagaacttcctctttccccatttctgcatgcctgtgttttaacgaaagcagttaaaactatcattttttggcagggaaaaaatttttaaagaaattaaatgttttgtgctgtactttcaagacaatgtataaaattagaactttagagccagttttaatgtttgttctcttctaccggcaaacaaaataaagccaaaaataaccacgtgaagaaaaaagaaattagccaaatgtgattgaattaagaatattatcctctagtatggggtagatttacttgtacaaatcctacttcttgtgaatgagaattcacctccgaattataagagaagtcatacctaaagttctagcccaactatatgaatctgctaaataaattagggacgtggcattcttatttgcaagcttcagatgagtaattttagtagcttgagtccttttaaaacctcttttaaaattacattaaaataggattgcttcctattatgatgtacatatgtctgtagaattattgtttccatatgttttgtcaaacaagaatgacgaaaatagtctgctcgcttcattttcttagtgtggagtggagaaaggatgtttgcagagttgttagtggaaatggtgtggaataaagatgcagggcacaacattaaatgtatgtcctcttcactaaattgggagttcactttatcattattctagatcactctaagtacctactgagaaacctaaagtaaactcactcttgcttttcatatacagtatactaagagatgtgaattacacatactcttcagccgaacttaaaatttaatatttgatttgcaattgtgtactaacattttggatgttgagtttgtagttttgttggttttaactcttctgccctatacttgtgaattgcattgtaatctttttagtctcctgtgcttacctcatacttattaaatatcctttttgagacttttatgctgcattttttattacaaatgagattaaatgacttttatgaaagttgtatgatgcataaacacctgaatctcagccccaaactgatagcatacttttaccccaaagctaacagttttgtagcttgttttgcatctttttccctctgataggcaaatatgtttcctaacatttaacactaccatttgtttctttctcacatatccatactcaagttttgcatttattttcattcttttgacttgctggttcccatgaaatatgttagtattatttcctccttttctttagctatattctgaagaatagaggaaagaggattagggcttctactccttgtatgcccttgcctggtacactacttgcctggttacattactaatgtgttactcctgaaacatcagtctcttgacccagctatgactcagctttccaagtgaggtcatagttatgtgaccactgtcttcaggaaccaatattaatagccctcatttgttgagcttttagatcatacctaccaccatacttagtgctctacaagcatttcatcatttaatcttcacaacacattttgatgtgatatg

SEQ ID NO: 40649 - DNA, 1477 bp, Homo sapiens
aatgggctgatcattgtgtaatcttccctctttcttcttttccacgcaagtcttaagtgctgatactcaaactgagctgcacgttggaactacctggtgtgagcttttagcacagttgctgtttcagcctcagagattctgacctaattgatgtgccccggttatcaggttttttaaaagcttctctggtgattcttacatgtagcaaagtgttagaagcactgatctaaaggaaaatgaaattggcctaggccctagagtatgcctgaggggaaggggcatgatggtagtaggatctggaccctggagaatccaggagttgaaactcaagccagtttgctttgcttcttattgataattatgaaggcaggcagggaatactgggtggaaatactggataacatttggtgtggaatttaccaaaggattaaactgtatacaacattcttttaacttgttatttaatacaaatcaagtaagctttagtattgctttaaggattgggtcttagatggtcattacaaatcttcaggaaagtgttgtttagaaaaacaaaatggctacacgttgaaataggatagtaccttcctttagagatgccaacttaattgctccaatgagaagagtagtctccctttactaaactgtttaggaaaattgatatttatttctaatgtttatggtttgttgtctcagaagattaatgccaaatcctcaaaaatgtagtgacaagcgatgactcattttagctcatgtcaaaacaatgcacttttgtaattttcctgtccctggagaagctattaaacactgaacaaaatgcctcagaatgaaactgattgagtgtttcaaattatgtacttttgcttggctattagccagatgttcgtcgggaaagctcactgtacatcaaggcctatgatttgtgctgacaataatattacatagtttacactgcttaaatatcagcgatgtgtattctaaagctaaatagtcaaagttcagtctctttgcataatcaagttgtgtaactctactctcagccaagtgatttttcctttattaactctggacgggatgtaagtaatgggtaaggtatttttctctgcattatcttgttgataaatagcacagattccagctaggttaggaagagtctcaacacacacacatacacacacatttttaagatttatacatttgatttttttgtgagtggtaccacctgccttgtccctagtagagctcagcataatgttttttgtgtagtaggtacacaaaatatgtgttgctgataatgatgccaataaacaaaacaaaacacagagtgtttttttcattaatttcctataatctgccagtaatatatgaggtcttacaagaatcagtgttaagccaactatgttttattttttagagacaaaatatttaaatgattggcttgctttcactgacctcctaagtaatagaaatattcatg

SEQ ID NO: 40650 - DNA, 2818 bp, Homo sapiens
ttctattataaagtgagaagaggtatatgtggaaaaagagatgctattttctattgaaggcagatgatttgacttagacaactatgtgacaactggcttcactcgtgttctcttggcatcttaaaagaacatttgaaccatatttgaaataccattatgttcctatctgcaagttccactgttggagattctcattcagtatgtttggggttgggcccaggaatctatacttttaagtgtctccccaggcaataatgatgatcacttaggtttgggaaccactggcaaagaagtgttaagagctcagatatgagagtccttgaggcctaattctcctctccagttactagcagtgtgatcttgggaaagttactgtctttgagcttcttcagggtgattatctgaatattatgtggacaataatattacctcctttaaaaggttgttaggaggattaaatgagataatctactgtgcttagcacagtgtttgacagtaaatatttaattaaatgtaattgttattatcactaattatcaagttatttacaagagacctttctttgtattttttgtatagaatatacaaaatagaatctaccatctacaaaaaaaaattcctattgtgtgtgtgtgtgtgttctttcttttaatgggaatcttaattagcttcagggatttagttaaaattctgtgtgagattactctgaccccatttactctttgtgaataatttaccagttaacaactctatacttaaaaaaattattggagaacctttgtgtgtgcatgtgtgtgtgcacaggccatcaaaggaatgcttacctggaaaatgtaagaaccaaatgttctagtgcagcatttcttgaacaagtagatggctaaagtgtcataatttaggagcttcaagttgaggctatgggtgaaagacatgcagggagacacctgtttcaagttctggcctcttctcataaaattaattttctgtctgatccaataccaaacagaaaatggagcagaggtactctgagctagggtttggtggtgctacctgcaaaataaattgaattttgattgtgtgtatacactgtaccatgtgcttgtgtatgtttcatatatatccatgtaggaatgatgtggaagccttgggtcaggtgagggggtctggggtgtgggtggagtcatggtatcaaaaggagttagagccaccccttgtacaatagttacttgttaacaaatttgtgaataatgaaaagtcaaattttcctgcagacataatcattcatggcaagggcaagatttcttttaggtgaagcagaaactctctagagtaagagaatgagtagatttacttgaaaaatctttgcataaagaaataataatactgctaataatagggtatcaagtgtgtcatgtttttcatcatacagatgaaaaaagtccatcacactgctaattttatttaactcataataacttaaagttgctatcagttatagttaatttagataacctcagtgtatattttgccacatttttattccatttccattcaactgcctattgaattctgaaattgcatggagagtaggtgatgaaagtcacagtctgcaacccctttcctgttctttcacttgagtgaacccttcatattcagagttcatttatcattgtcaacaagagctgttgtcatctgaccaaaatgagtgagaaatttcagttctcggggcaaaatgtgtattcagagctgaaattttgtttaagaataaggctgattacttaacagtgaagggcttcagtgtggggtcagctcaccctcattgcactttcaagtataatattaggtattcttagatgtccagaacctgtgaaattcttaatagagttggtttatacgtaatttctattctttgacttacaagaacttaaatcttgtctaaaaacctgtatggatttcaaaggcttagagaggattaaaaggctataaaaatttaaataacttcatccagtgagtatgtttacctaaatgtgtcatcaaacttctcagctttctggttagaaaactggtttgggacacactgactcacactgtcgactgatagaatgcaaacacattcagaattctcctggcaagactaatgtaacaaaaacagggttctgtgagcttttagaggtgaaatgtttcatttctttaataaatcttcctatcactgagagcttttaaagtaaacaaacacatgtcttcacagttgttaggtgctaggtgaagtggcagatgcatgttgttatatccagtaccccttaccactttccaaggaaacaatttttgtaggtaacctggggagtattatgttttagcccttaggctgaaaaaaagtaatacgctataattctaactattatctccatatgtaaataaacattttatggggtttatattttccctttggcctatagatctcaaattctttgcccaaatagttacccatactcttctcagaaccctcatgcaagaaagtagataactagaatatttatgcccattttatagatggaagcatcaacacataactagtgttattttttttaatgttgcccaagaaacttgggcccaaactcaaacaatggccaaaggcagttatattctctaagtaaggttagctgagcaacccttttcaaggatgaagagatggagactggcctgtcttcttggcagagctcaggttacagttgaaataaatagacgctcctgtttctttctcttttccagttggttatatctcattgccgtttgttcattcacatgttgctgtaattag

SEQ ID NO: 40651 - DNA, 2563 bp, Homo sapiens
ttgtttcagttaatgaatggcaagtagcactagctccaaactaatgagtttaacctaaaaattagataaattaactcattcatgtatgtatttcaaggaggtttccaaatcctctagaaagaaaatttgatgtttttgagagaagcctttaaaagtggtctgatttactcagttaacagtagggtcaaatatggctcaagcagtgttttagtcaccttgtctgatgcagtctggaaaaataggcctgtcataatagaaaaggattgatggtgaaaatacttgtttataaagttgtttcagccaaagggagaggtggaagtgctttgttcttcattgaaacttaacagcaaagaacttcccagggtgtggtcaaggcaacaacacttgaagctggacacctggtgactttcctccaaagggccctaaggcctctgcaccactgttctatctagtcaaacttggacagaaaaggaacaagagattaattctaccttgactcctttctttgtggtgtttgagaagctaccatttgaacttctgatttacaaaactgaactatcagtgctaacctactaggccaagattttatgaaaagtaatttaaggctttaacacaatccatggttgaagccacagttttatacagagctgccataacaatatttctttcctgctttagttgttgtttcaagaccagaaatgcagtaacatatatggatagcatacatagtttgttttagaattctaagaaagaatgcatggtttcaaaaaaaagcaactcttttttttcttcagagccttttgccccattgaaactgaaaaagaaaaaaaaatatgcaagcttttttgaaagtacagacaaaattggcatttcacttatgggaaaattttgcaaaattacattgactaaaagtactgtgaagccacacagaaaggccaaaaattattggcattgcttttgtgtaaaaaaccttttacatagactccacctgtaattcagccaagtacataattcaggtcattggtgacacacgtatccacatgttggagctggtcagtgaacgttgtcatgaaacatggatagaatattaccatatggacagaccaaaccgcacagattacagctaaggaaactttgcattaacatgcctgggaacaggctttcctgagctgatccctgcccccacccaccctcagtgggaaagccaattgcttactgattacgacagcgacatcacttggcaaacattttggcctgagctcaatgtgtgacatcagtctcctttagggttttccacataaaacaaattctccaaagaaaacacagaaattgagccttaatttgaaatccattattacatcctctgaggtctcattaactacctcaatcacgtagttcttaatttttgttttatttccaggtagatacaaaccaacacttagaatgtgagcagtaaacctttaccgtgtttatttcagagtttcaaccagatacccctttgtatctattttcaaccaacctcccttttactggggttatgatatctttgtttcactgctgggagggttgctagtttgggagtggtttacaacactttgtttgaggaaggaagtaaacattgttctttgacccttcaggataagttagtctcacttttgtgggaggcagctgtgtccttgagagaaagcactcagtgaagttggaaggactcagtcatggtgtgttttgccatgtcacttgaaagcaaggcacactacgggtatttcacactcttgtgtgtaagcacctcctctgagcgtttatttacctgaagtcattagtttcccccacttcctgtttcgttagatggtattcatttaatactactttgatgcacatggccttaaagcagatagaagtcagttatgcctcatgaggcctgcagtctcccagcagaaggcaggaaagcatgaagggtggacgtgaatgggcccacactaccaagatactggaattgtgatgttcaggcaaagcaagggaagtcacatatgcatcaagggagttgagaataggtttaatattgtcacattcaaagaattccatctggaaggtgttccttggcatatagaaatagatgaatattctcatatcttctggaatggctaaacagagtgatagacactttttcctacttcttgttaatggcatgttcactttaattattcttcaaggtaaagaatcctataaaggaaactttatatcctataaagctaaaagtaatctcttaagttctttctcttaaattcattttatatatttcaaaatactattcttcatatattgatttagtagtatacactttacatttttcccacaatttttcttttcctccagcccatggcctttatccccactgatcttttgttcccatttctcagtgttgttccttcttgctctcttggtttaaataatctttgccatctgcctcccaacattccagtataacttcaggatagccctctccagccttcctccagaagatagtagagatacacagtgaatatcagaactctcctccaatagc

SEQ ID NO: 40652 - DNA, 515 bp, Homo sapiens
ttaacacagcctaatgtgttgttatctgtgactgtcataaccctagaacgataaccttcaggagtgtaggctgggaatcaggaaacccagcctctgatcccagctctgcctttaattagccagggtctgtgttgttgcttataaaatgagaatactgggataggttgtcccatgagatcactcaggctggaacaaggaccaaggattgtttcctttgacctctaccctgttcctcaccccctgatggatcccgtgatagcagggttaggacctgagactggatgatctttgaagtcccgggatttcccgctttagaattctgggactctctgttgtcttgtatctatggatacaaatacagtgcagttggcagtgagaagtagatcctgctttgttttcctatgtagttcctttagtcagttttacttgggcttaagttagttgaaatcatggtgtatcttggtaaggatgtgtccatgcaagaggactagaagagagtttgtaattatttactt

SEQ ID NO: 40653 - DNA, 2684 bp, Homo sapiens
tcttctttcctctcccaaaagaaacagtacacattgcagatgtggccaaggttttcaaaatacctgtaggttggatcctttgaatttaaaccagtctgccaagtctttgctgccaagcctcataaatcatttggctgaataattaaagggatgggtgtcttgttgaatgctgcaccaggtgtggtggggcaacttaccctcccctaagctgctcagcatagaaggtcggggacccaacacggtgtcgcctatgagggaagcacaatgagacatctggttttcatctccagtgggcttgtccatatcccccccaattctgaagctttgttggaaatgcccctctctggagattccatcacaaatctgctggtgatgcgtgtgtgactgtttgcagctctggaaaagcgcggtgccactgcaagtggaaaacatgcccaaagctcactgggactgaccacctcctgtacagacctgtgtctctaatgaattcttctttatttggagctgatggtgttgtacttaaaagctgctgggtaaatcacgcacagactgatcatgattttggtttagagttaggttagagcatctcttttaagttatgaattattatgaattttttgtaccttcaaaacttcttgttgttcaaaacattctccatacagaagataggtcttaatacattatatcccctgatacacatttgctttcaagcttctgtggcttagactggagtatctctataatctcaggagtgaatattcacattttctagaaccaccagtttctgcctgccactgcttacttgcttttacaagatttgcacacaggtacacactcttctagtaattccgagtaggatggaagtagcctaaaatttgagtgacctagatagctgataaaaagtaaagctgattttatgcctagcttttaaaaccaaatgcatatctgtccatcatatgggtgtgattgacctcaatttttaatgatgaaattacatagctaaaaaagaccttgaagctcatctaattgtacatgtggaaacggggcctgtggacctggagtgacttgtccaaaatgatgaagcctagtcccttaggccttagaccaggtggcttgatctctagttatacatcccacccctatgacttcccctctaaagcatgatttaaacaaaaggaagtaccagaaacttcagtttgggttcatattgccttctctgatgagtatgtgtatgttctgaagctctctctgctgtctgcaaatcagacattcttgctgggttgcatcagagtccaggcgacaagattgatgaagaaagggcagaggagggatgacgtaatggattgtgcagcatttacctgcgaattatctctagctgtgtactgcttgatgtctgtgtgactcacatactgaggtactgccatccctattattcagcactgtagcctcacacttacctcaccctgtgtttctctccttttcctgccaaatctgattagaagcacttttgttgtaagcccatgtttatgaagccataagtggacttcataccaatgaccatgtggagaaaataaaagaatgttagaactggcaagttacacattgactcagtcaaaccagcttgatttctgtctcagtgtagtgcagtaaatacttacatagcacctgccatatgcccagcactgtcagggttttcttcccttacgtggttgttttgtcttcttagcttcagtttaaccaatgcacctagaataaacctgtagcaagtgcctaccatgtgcaagtgactatgatagatgcgttcacatgcattttttcttttgaatctcaaaacaaccctgtgaagtatccattttgtagatggcccaggtgacttagctaatgtgtgtcagaattggaattagaatctcagtcccttgacactaagtacagtgttttttccagtgcatcacaagtatatttgatttgtgtactcgagaagtttttgcaagaaaactctccagttttcttaaggtcatcttcatacttgatctatgatcttcatacttgatctagtgtctgcctctgttgtttgtttacccttgagatgctaaaagtcaagagcatagacatatgtatatttattgagcaataaccattaagttctatgttgaagttgtatcatacaaacactaactttgcatgagttcaactacacctgctcagcaaatgaatataaagagagaaggcataaaaatttacattgtgcaaacaagtcttctcaggttgtattcaatgagtctatgcctgggaatgaacctgaaatggacggtgtatattgatttttctgtacatgtctgttcccacctgcctctctcagggtaagcatcttgccttactcagatggttaccaaaactggaggcaaaatccaccttgattcggcctactgagagacagtattggcttcctgcatgatgccttcctaggggatttgcaaggtaattttgacataaattgagggttttttcccccttacatattctccaagaaacctaaactccaagtaaaatgcagcttccgtaggatgatagtgggttgcatataatcaaggaggggatttttctttagagtgaactgaaactgtcttgggctcaagaacattgtgtataatggtagctgaacatatcttctattctctgtgtat

SEQ ID NO: 40654 - DNA, 3021 bp, Homo sapiens
taattctcatctaactccctcttttaaaaaaagtattaattattcaaataaatactatttatccaggccataaacagtatattaaagttctctccccgagaatcatttgtatagttccagataatagcattccattttaatatagatgagtacacagatgtgaccgtggttttagaaacagtttaggtagcatcaagaaacatctgcacattttcccagcagcctgagtaactagtagtgatttgtacagacttctctgcatctgctttttccccccttccttttttcagcacatctagatgattaatagactgaacaggcccttatatatgcattctgacagcctttaggacggtcttggttgacaatacacacataagccagtgttgttatcatgaaacacttcatttgaatgactattacaggctgaacaggatgtcctatgccaagaggttgtgacattttgagagggtggtgctgggagccatgtgggactcttttcccatcacagccaagttgacattttctcaggttgtaggatcattagggctgcaaagggagaaactttgtcagtggctgggtagatgtcccttgagcctggattatgcatttgaaaaaatggtttctttgccttagggaagagagtctcattttaaaaagaaaaaggtttttataacgagttcatgtattccactatgaattttgctgaaaaatctgtcctgaagtatgtctttgctgccaaatcccacgctttacagttaaccaaagttgactctgtatgacctgttacattttccttagacagttggatgtgatcacagaagggtgactgccaaagttttatttcagctcagatatagctaaatgcaagaaatcacttcctgacacctttcttctgcctgccccaccctaaatcaccatttttcaaacaagctatggaatctacaaaatggcctacctgtgttccaagttaattttgagaatggctttttatggctggtttgtaatctctttagaaaagcaaaattatgatggaaactctatgacatcctaagctgtaagcacttgaagatgaatgtaacttcaggtctgtgaagctaaatatttaccttccacatgatttactgcgtctttgttcctttccacactgagctttttctttatgtgcatcccttcatctccaagctactttttagtagccctgttatatcagtgttttgtgatgttacaaaaaagcaaagaatgtgaggtcaaattttccattacacacttcaacaggaatgccagggaacttagccaaactaaggctacaaaaaaaataaaaataaaaattacaggaaagatgattcattaatcaacaattgccttaccaagaaaatagaattacttgtatgtatttggtttggggaagggggataagtgcagatatcctggctatgagtgaaatggaggtattttatgtctatgtagcatggttttagacctaccagagatcttttaaacagtaaaattcaggagaaaggataactcatgttgtgccttgatttatctcacctttttcttctttcaacatgaaagtatatcacatgctgaccccaactacaatttgatttaaaaaaataatgacagctgaaaactaggatagaaaggcacaggctgcacctcaggaacagtgagaacagggaccattgccattccttcctctttcttcagctatatgatctgagtccctttttatttcatatatgcccccttctgctcccctttctctttattttgccataagctctggatcgtaatccatccctaaaacattgtcatattaatagaaattctggaatttgacctttaaatgtagtcattattacatattaaaggatctacaaagggcaaaaattgtggcagtagatgaaaacaatagccactgaaattttttaaagcccacaagcttgtaagattcctcttaaacaaacagaatgatccagtcacagagcttagtgctgtaaatgtcaatataaacttgatttttttttgtattctaataagaagaccagccagtaacaaaaaaacattggctctgtgaccagccaataccagatacagtgaaatctgttatctgatgtttcgtcagctagcctgtgagcaccatcatgtaataaaattctctaaactgtgattcacggtgctacaagatctttgtgcaccttttgactaatcagagacaaatcatatcaggctcttgtattattttattaccaagtgtattttattttaattctttggaaattggtaatccatgtatggttcagacattgttaaccagagtacataattagaacaattccaaccatgccagatgatactgtatttactgaagaattttattgccttttatggagaacatgagggaggaatagagaacaggttttttttcttttcttttgccacatagctgataacccagttgctataaccatttcttccacacaaagggacaacaacatgagaaatacacgttttaaagttcctaacaatcgagtacttcttacgggaagctgggacagttcaagaaaaaaatggattgaaggagaggaatagagccaaagttcccagaccttgacaactagggcaaatgtaacaagtccacattcatcatggaaaaatgtaaagtcctacatgtttgtggaagaaaatgactgcattcgcagaacaagagggataaagggctaacatagcctgtgctggtcacagccttctttgctcatctctctttacctcaatgtgaagatcagtgacagaccccctgagcagggaatgttttttgaattataatgatggagacaagtatcctgtgtctcaaattgacaagaagtactccccagtcctcaaagctcagagaggctttcttcaggcatatccagtatttcattctttactgtgttgtgccttatctgctctctgtacatacaagtaaggaaaagagaaaatatatgcagaaaatcatgtccagtaagttttatt

SEQ ID NO: 40655 - DNA, 880 bp, Homo sapiens
tgtgttatatttttactcagtagaaactcttatcatttattttgttggttttttaaaatttcatcaacggtagcatatctgacaaggtaatagtgatttttaatgtttagctaggcatagtaatggtacgtgccacattgctatttgaaaaatctagtaaaacaagaatagcaacaagatcataggtcagggactactttgactcttggctgtgctgtaatttgttattgccaacccactggagtctgtactgcttgcagcacagccagctgaaagcctccctgtgattccctcaccagttagcagattcacattttatgacaggtaaaaaaacaaactacacggtacctgtattggtgatgataagcttcagtagaaggaggtaacgagaagtaaagaaacaagcactgtgttttagagtgaaaaaccctatatttgaatgccatttccaccatttaaactgctctttgaccttaggccagttactgaacttctctcaggctaaactttctcatctgtaacatgatgactagaatggctacctcacaggattcttgaaattaaataagttagtgtattaaagtattcagcatggtaccaggcagatagcaagcactcaagaattgttagctataattgactgactctataagttttatttgtattattcataattgaacttcggctcttgctgctaatcaataccagtacatgcaaggaagttatttttgtgcatatatttcttccctactggagtataagtacctacagccctgaaaactttacatgcctcactgtgtagcatagcagtgccttctgaagaatgttgaatgtcattgccgtatacagaggtggaaactcaccatgaaaacaaaccatt

SEQ ID NO: 40656 - DNA, 909 bp, Homo sapiens
gtgtgggcagttaagagccaaagttgagatggaggagagaatattggttgccagcattgcactgtattagaagccatggaatggtctcttccagcagctattacaaactgccccctgggaaattcaaacaagaaaacctttgggtttcacttcactggccttgcaataaacatgtttgttcaaataacaaattgttgcattaagataaatctgtctgtgttatcctaaagaaaagagtctatgccctgtgtgttggcagcattatcaatgaacagctgatatttatgtaaatatcaaccttattaataagaatcatgagcacgggtctgccaaggttcctgacagcttgtttaatcaggcgcattaactcagaggttttcagttagtagaagcgtcctcttaccttatttgcttaaaggcccagaggccatgtcaccaaattggggcttctagccatccactgaggagaggtgacttttcatttctctgaaatgaagccaactgctctctgtgtgtgtttggattggagagcacaggttacaatgagagtggccctctctcacccccacccccattgccagtcatgccaagttacagggtagggactgcaaagaagcttgctcaggcaaagcatctagatggactgactggtaggaggcccctttgtgggatggctcaccctgacctctgcctgaaactggaatcaagaccaagatgacatagctgtggtcacacaaagcccgttaactacatcagttgtctttgtttattcaataactctgagctacacttttttttacacaagaaatgtgacccacactttgtttgagatactccagaaagatgtagcaatgtggttaccattttataaacttttaaataaaactgttagcagttcacaactttgtt

SEQ ID NO: 40657 - DNA, 528 bp, Homo sapiens
tattcaattcaaacagtcctcactgtattctagtggttgggcattgccctgtatctagatgctactgtgttacaattccgagatcaacattggattacaggacccaagacagtgtctggcactcgtttgtttgttagataactaagtaagcaaatgaacaaatgtatgccccttccaaacatggcttgggtcttcttttgtggtacacctcatgctcagcacagcgtgtggttgtggtggctgttgtttttgacaaacagtaggcttgctatgtctatctgaatactaaaatcagatcatattcccttgtaactgtgtatctgtcagaagccagcagcttctggccagtttcgcaacatggcatttggaaggcaggtacttagagtttattgcgtagtttttggtcccatggctttttcaatgcagtttgacagtcggtattatacaagaacagagttgagttttctgggttctacaggatgatcgtttttaactgtctcttaaaaaaaaaaaaaagcatatttctct

SEQ ID NO: 40658 - DNA, 2493 bp, Homo sapiens
tagactctataaagaacactggccacctatgtggccaccttggggcccttaataaatatttaaaaattcatggaaactcctccctttccctgaatgtaactgccattccgagttttctatatatcattctcctgcattttaaactcatatggatctattttaaatatattgtcttttaaacaccaactataaatgataccatactttacctatccgtctgcaatctgttttgctcatttaacagcgtatttttcagatgtatccatattgttacatgcagttctacttcatcactgttgttttcagggcttgcaaaagcgtttctttaggtccatcctcctgagcgtgtgctcaccccaaggccccggcggtggccaagtgtccgcccatgcggtgtaaaggggaagtggaacgcgtagagaaggattttggcagctctgcttgcctggaattccagtcctagaattctaaattcggacttgatcttccagactgttaggaagatatatttaaggtaggaggctagaacgtatctcctttagtatatagcttcatttacaacttttaaatattcagtcaaaaagtatgtgggccttcatttacacttttgacggggcctcacaaataggggtggtctgcccctttccttacgtcccactctttcttcaaattaaattgctacagcaggaaattactgaactgtggctcttctcctacgtccgccttccctatgtcaattcccatttcccttgctttctccaatagttaggactgtaaattctaactttgttaatttcgacgccaagctggaatgaagacgctaagtggacgctaaaaagacacgctgtttgtcacacaaggcctccaactgggacggcgtccaccgcgccccgccccgcccgcggcaccgtggcatcttgggacatgtagtctttggaggggcagctgcctccaccaagtctcctcccccaagacgctgcctttcggcctcgggacgccgtgacgttgcgttcctccagtcccttgccacctccctctttcttcccctctggggaagctcagtgctggacttccgaagaccttttacgacattgagtctcggagttggtctcagcgccggatccacttttcggcaaagtgacgtggacgtcaacagcaatggcggaaggagaagatgtgccgccgctgccaacgtcgagcggcgacggctggtgagtgaaagccggggctaatttccaatgcccctttattcttccttctcaccatcttgccggtccccgaggagccgtctggcgtcggcatggaacggagaggccggtcctaggcgaagtccggtgccctgccctacccctctgccagctgggtgccccctgcctgcctggttctgcccaagggactggggcgggactcccaaggagaggggtgtcatccaggtgctgggcctcagaacggtcctcctgtgtcgtctgtcagtctccaaagtgtgctggagtgggtggcttcagggctgggtttggccggagtcctggctgtgggagttggagtaggctgaagaaggaagtttgttggatgcagatctgagtcactaaaatacaatgtgaagaaaagacgttttgaaatgaccactgcgaccttcgcctgagggttcagaggttgacccgaggagaatccctcccacttagttggtatacttttttttattctggctgttatctcgttttgcattccaacagttttcatcgttcgtctccttcacgcaagtcatcttttcccctactaccacatttctcacagctcgatttctgagctttggatgcagtgtgggactttgctcttactgcacccaagctgttgcatgcttacctgatttatactcgggattgtgggggaagaccgccaataattttttggtaaactgctcacccagtgttaatctttgggaaaggcttctacttttgaaatagttgatctcacgatacactgttaggttgtacaacatcattttttaaaaagggacctttagaggcttgtctaaattttacagttgatctaagtgtattgaccacatgtattagttttggatttgcttgttcgttatattgtatgtgtacagctcatgggcactttaaaaataatacaggacattgatagacatcgactttaatcccagaggaaaaaaatggaaatcgttgaaagggatagataattagtaattaagaaattcagctctccattagcagacatcaaacattaccgtagcgctgggctctccaaggtgtcagaggaaaacttcatggtgatctagatatagtttttttttcttcaacttgcttatgttggagttgggaaggtgtaacaaggtaaaattaatcttattctttgtgagtgtgattcaaagtgttacgagaggttggcggtgggggctggggcagttggagtcactgggggaaagcttcatgaaagcagcagtgtttcaactaggctttgaagaat

SEQ ID NO: 40659 - DNA, 882 bp, Homo sapiens
aaggaatccaagcagaaatgttgagtagaggcagttgattataggtgtcttcagctaaggagagaggtttaaactgatgataatttggaggctatcagtgtggaaatagtatttaaatccaagtgatgggattgaaatccctttgatcagattgaaattcctttgatcagccacctaggagattgagagttgtgggactaaagcactgaaaattacaaaattgagacatctgaagtcttgaaactggaggcaatatcctaaagggccacaagatggtgatactgtgtcagggaagtttatcttctctgtggttatgttttaaaaaaaataatttaggccgggcgcggtggttcacgctgtaatcccagcactttgggaggctgaggcgggcggatcacttgaggtcaggagttcaagaccaacatgatgaaactgtgtctctactaaaagtacaaaaattagctgggcatgggagtgcatgcccataatcccagctaattgggaagctgaggcaagagaatcgctttaacccaggaggcggaggtgcagtgagccaagatcatgctactacattccagcctaggtgacacagcaagactctgtctcaaaaaaaaaaaaaaaaatttagtctttggtttataattctactgtccagcttatcctaattaagcaatcataactaatattggttaatatgtgtattgagttaggtaagcagtcataactaatattggttaatatgtgtactgagttagggaaaaaatatataaatgtacagaatgagaaaaaaagactcccaaatctcaccttgctttttccagttagtaataaatacatgttgcatattttccatttcagctcatgtatctcctcattctcctt

SEQ ID NO: 40660 - DNA, 2107 bp, Homo sapiens
aaaagaaaaaaggaaaagaaatagctaggtgtggtggtgtgtgcctgtagtcccagctacttgggaggctgaggacggaggatcgcttgagccgggaggttgaggctgcaatgggctgagactgctgcactgcactcctgactggatgacagagtgagaccctgtctaaaacaaacaaacaaaaaaggatattagcaaagagatgacaatgtattcgaggactgacttgttgagggcatggcgttgaaccctcagcatctttcccgttggcctagcagccttgtagtcagattttacagacgtctcgcgtgcctaaaccaaccagggtcattccgtccccgtcacagagacttgttcaaatagctcaagcccatcagcatacggtgttaacctggccacagaggtgattcaaccagctagaagttcagtccttttgcggagaatcagcaaacgctacaaatcagggctttcctccctgaaaagtctggttgttaagacattcaccagcacaccacctcgacttaggccgttcccttttgccctttgcctttcgaggcatgctttttccggactgtgttgcaattaaccatttctcgttggtccgtcctggtgttacaggcgcactggaatgaacgcagacccttctctcctcccggccggggccaggaggaggggtggggcggggcctctgacgcggtccccgccccaccgtagcgacgccgcggtccgccggatctccagcgctcagtccgcgccgcaggtggtgcttgtctgcagagtcatgacctgtaagtggcgcggccgcgcgctgcagctcgagttcgggccgcgggggaggctttggagcggcgccggcggtggctcggccggctcagcccctccgccccgcgtccccgccgtgcgcggccttccctgaggcgggcgtccgcgtgggtccgggatcgcgtggccgggcggccgggcgcactcccgggattccaggcttccggggtggcgggcgaggcccagaaagcaccaggccacccggccgcgccggcacccgccgcgtcctgcttgacagaggctgatggacgtgtatttctccacggtgtgggccgcggtggtaggatccaactcccttgggtgttttcaagttgcgtgacctcctccagccccgccctgcacaaaggtgcccaggcggttcttcgtctccccactcactttccagctccagattttgacttggattcttgctgtgtcacttactttgttcagtgactttgtgcagctttccccctgcaagtcccctgtttctttatttgtaaaatgatgttaatgatacctcacacaatgatgttaatgtgtgaaggacctggcacattgctttaaatgttattcctttgttgtttccttcgctcacagtattttattctttttttccgccccttggtaaggtcttcgttgttagattatgatgaatattagggcagccttaaaagtcttcactttacagatgagatggagtgacgggcgtctcctcctcagcatgaggaactgcccagtggcggggtttccctgctgcagcatgtctgtagagtgggtcatttgcagaatgataggcagtcctaagcttagttgaggaccccgcccttgtgggtgagatgtgtaggagaggaagccatcagcgtagccatggtgagctttatctttcccaccctcggaagcacagacatggcccggcacgtggctcacgcctgtaatcccaacagtttgggaagctgaggcacgaggatcgcttgagttcacgagtcaagagttggagaccagcctgggcaacatggcgacaccttgtctgtactaaaaaatacaaaattagcccggtgtggtggcacgcccctttagtcccaaactacttgggaagctgaggagggagaatggcttaacgctgggaaatggaggggagacgtttagtggatttatctgctgttctgataacagctcaaaatatctgtttgccccagaataatcccagcttttatttcctgttttagtttcccttcagattctataactatttagcaggctgccttcagggttaaatttagtgcttctcactatatttaggata

SEQ ID NO: 40661 - DNA, 2616 bp, Homo sapiens
ggaaacagcaggtgctggaaaggatgtggagaaataggaacacttttacactgttggtgggactgtaaactagttcaacccttgtggaagtcagtgtggtgattcctcagggatctagaactagaaataccatttgagtaaggtaactttttaaagagaaggttccatggctctggcttccttctacatctgagttagcctgaactatcctattttttaaaagaaggatctatctacttgggttagaaaaatgtcagatttataatgtacgatttacctctttcctgtctattgactacagggctgttgataatcaggtgtatgtggccacagcctctcctgcccgggatgacaaagcctcctatgttgcctggggacacagcaccgtggtgaacccttggtgagtaaggctaagtgagaataggctcagtcggagcttgagcttgagtggtggctcgttggcagatgggttttctggttcctgagcagccaggcgctcacttctcactcccatttccccacatatcctgccagctttctgcctgtctctgtgagaggagcttccatttgaaaaccatgtgagaagcaaatcaccctgctctcatgatcaagcacttggccttagccctcttctgagtttctggtgaccttcactgtcagtcatacttggatcacatggggaaacaaggcagcagtgacaggcaggttgtagtaagagactctgaaatttttggttaaaatttaagttggctgactagtcccagggtaggaatgagttacagggtgaggactttgcttccagcataatgatcagaggagcagtcaggatggttcaataagtgaaactatgaccctctccccaacaaaagggtgaagcattttattactcagtggagccagcacataagcctgcccagacagaattacagtcatacgctcatacgcattccttacagtctacatttgtacagtttacatcctactttcacaacatggtctcaacttgaactctcaggaaattgttcttattaagcccagtttatagatggtagaattacagaggaagcgactggaattccagatgtagcggctagacccagtgtttgaatccaggatatttgccttcagaacttggatgtattccacactagttctctgtatgaaagcacacacacacactggtatgtatgtctacatttcaggatgagtataccagtaacaagactgagaagagttaaatgttactgtggggttcctgagggttctgtcttctgcctttataggtagggctcagagctcaatgtgtgtggtggggaggccttggaagatatgactagtgtgagattccagttggcctcctgcacattaggcttggggacattgaaggactaagttgacttgaaaattttcttgaacttgcatcaggttccactgtccagaaatctttgaatgccagggcaaatggggaagaatcagaaaagaattcagttacgtgtcataaatggtggtgcttgtatttgtaactcatttgtgccaaaagtctgtctgtggctatctggtaaacagaatcagttgttatgtcagattattttggagaaggttcatttctctaggtaagggtttgaacccttgctctgggccaagagactagacactggagatagtttcttttttcttttttttttttttgagatggagtttcactctgtcgcccaggctggagtgcagtggtgcaatctcagctcactgctgcaacctctgcctcccgggttcgagccattctcctgcctcagcctccgagtagctgagattacaggtgcacaccaccacgcccagataatttttgcatttttagtactgatggggtttcgctttgttagccaggctggtctcgatctcctgacctcaagcgatccacccaccttggcctcccaaagtgctggggttacaggcgtgagctaccgcacccttcctggagatggttttacaggtcagccttaccctggattgatgaaggagtgtggctgttccctagtgcagggctcctgccagtgtgaggttaccctccatccccccatgccacttctacccagtcgccagaggttgaactctttccctcaaatctgaaactgaagcccattaacacaggggttcaggtatcacagccaccagggcagagaccccagcagatctggggccctgcctaggcccagcttcaccactctcagggagggtagcagcccaggcaggtatgaagagtgggtctggactgccattgtaaagggggggtccactgaaatgcactcatgagggcatgagatggagcttcctgttggtggtaggtagctctattgccagatctttataatcatcagataaccaccgtctcctagtgatttgcaatttatgaaacatgatccataattttatcactaagccctcacagagctcttatttccactttatagattaggaaatggagatttaaaatgccttcccataaggtcacagagctatttaaatgatagaacataaatctgtacgactaccttcttgttttcaatctcatactttcccctttggcctgtgagcttgggaggaaaaaacagagacctt

SEQ ID NO: 40662 - DNA, 1218 bp, Homo sapiens
ttgcaaagtgatatccgaataaaatgaacactagattcccacttggagtggaagaacattgcagttgaggccttgggtaagttttaactgccatacccctgtactccccgactttctaatgaattagacaatgatgttttatttttgttttttgtttttgcataatactttgaagtctgctatcacaagttgtgaacctctatctcttgcagtttaggtaaggcaacacatttaatgaattcacatttaagtgaattcctcacagggatgacgacctctgttgaaataggtcaggatgtgcagtttgtggtgaaagttctacttgactttgacctagctgtttgaagctgagagctaacagataataagtgttgcactggttgcaaatgaataaataagtaacattatggggttttaaatgaccaaggagtagattgtgacatcgactgggtatttagggaaggactccttcctgataccaaaagttaggtctgtgcaaagtacaccaagtggaaaaaagtttagacaagagtttaggtttcaagataaatgttctgctctattggcactggttttaagtcttttgtgctactttttaggcattgctgtgtaagttttggtggtgcgtgggtacaatgaagccaggagggatagaaagggaaatgatgtgtgtgctgcaggctaaacaggggctcttccttatgcctcataaccacctgtgtgtgacagtttcacatttcctatcaaattattatcttcattcatttctacttgtgaatgaagttcggagactaagaaaaagccagctgttggaatagaaagcactttaggataaaatggtcttgttaaaatcaccaattaaaaagttaagcccctgatgtacaaataactaaaacacatacatacaaagacagtgcttcttgttcaatgatttacttcacagctgattcataatcaaatgaacaagaatctgcaagaacagaacatggtgggcagggtccagtaattccaaatgttgtcatcctagctcttcctgaagcatattgaatcctccaagtatatcccgttgtgctaactaggctttaagtcttttgtctgtagattcattctcaaagtttctccctcagaacaaagagcacgccatcctgtaaagtactcttcctgattttttttcacccaatttcttagtttctttcaattgcttttcagaccccggca

SEQ ID NO: 40663 - DNA, 2092 bp, Homo sapiens
ttgtttttgttttgcttttgtcaactaaccgtcactgtagttgcccacttacccccagcaaaaacacactccaaaagggggagtggctcattattaaaaggctcttagcgattaggttgtaggctttggaaatcacagaaacagttcgtatcacgatgtaccaattgttaatcgaatttagcttccttcacttattaaatacaatcatcacatttgcaaatgccccactcccatctacaacactagggataaatgctgtgtcactgagaagaaaagcaaaggatttttctgaaaccaaaagcaaactgtcaaagaatgccagtaacctgtcatcgagctactctatgccctccactggcagccagaaatgagtctccctaaacccaagtgttgtgctgccgcttggcagcttccgtctgatgggaagccccctcactgacacaacccgccaaggaaaagctgcacgagccagtttcctcctctacggcctggggctgcttctcaccatgtccaagtgagcaccgggaccttcagggtgtccgctgcccggggccggactggccctgccctccggggtcttccgttcgctgttgcgcttcaggccgctggcgtcgccccggcctctggcctcccggcgccgttgctgccgactccacaggtatatggcacccgcgcccagcagcaggggtgccccgaccgccagagccagctgccatcgcggcagcccccccgtgcccgggcccgcagtcccgccgccgcccaccccactcccggagctcggtacagcggctgcgaccaccgctgcctccacaggtttagaggcggccatgacaagtgtcctctgccaccgcctccctgtctgtcgcgagcgccacaatcaccaaacagcgtgcgaaggaagaccgagggagggaaggaaagcaatgagcgagcgagcacgctaggcagagagagcggacgacagaaaagggccagaggtcaccggaagcccagggcatgccgggccagacctggccgtccttctcctccagtatcaaccgaagagggagaggaggggcggaaatcacttccgggttaagggaaagcgtgggtgtgagtaggagtcttcggaaaccctttttctttcttttcgccccgctgctgttcgggagatggacttctggagtccccgtcgtagctggtgttgtcccctctaccttcaggaaagaagggcagatggccctcttgcctactgaagccgaggaggggcgcgtatacagcgggctaagggcgctcaagagatccgagtggaagaaaaagcagcggcacagcactggaatgggcgggagtggcagaagagttgtgaaggctattggctagcaagggtggtgggcggggcgtagaccgagctacccagtttactggtcgatttcggatccagttttccagttatagccacgttggcacctcttgaacctctgtggccgttagcacggttttctgcccgcgtgcccgagaaaccaacggattagaaggacttttaaagatgtgtgaggaaagagctcaccgctgaagaaggctgctgcatcactgaacttcttatcactaacatagcgagattttagtttggacgaatttgaggttataggggagatagcgatggcagaagactaggtggaaatggcacatctaggttggctgcagtcgaaacggtttgagcgtggtcgctgtggctcatcgtcggcaccaattaacgaagcgatgacatctgcgttgttaggggtttcttaaactgagttggtagaaatgcgaagcgtcagggttcccgccggcttcgagcctttcttggcgtatttgtatcttgagctgatttctgcgtcagcccacatctcgctctgatccgcacgccccccgggttgttttgcagtagcagtctcagccctcttctcgtctcattcccaaatcgtaatttcagttcacagctttttatctataatagctttatcaactctttttccgatgctctgcaccagatctcttaaaatataaaattaccttgcaaggtattgtttggaatacacggtattttcatgaagacaactattaatagaaa

SEQ ID NO: 40664 - DNA, 806 bp, Homo sapiens
tgtgtcctgatcatgaccaacaatgttaaattctttcattttgatatttaaaaattcagtgggcttcttttgataattttcacatttagcatctaagagatgtgataaaatgtatttcagggcattatttacaagcatttctcagatagtctttaatcatcactctattttctctttcttataccattttgataagagaccttcatgactgcgttaacattgtagagcggctgacaccactgtgttaaacagatgcctcaataactctcaactaacacggctgagcaagcatgaccttgctcatgtgaccaccactcaccactgcttaacttcacctgataagcactcaggggtttcccaacatttctagttcaaacaggagaggagtaatgattttgcttgtttattttttaaaacagaaggataaatagatacggtggccacatttatccatgccattgttttgataattcctttgaaaggcaccctctggccatataactaaagaagcaacccccccaccctccagtaggtccctatcactctgtttacagttatcattgcacttatcactattgattattttttcatttccttttaggtttattgatgactgtctgtatccctccacctaggtgtaatatctaggaagtaggtctatttagtgttatatctcctgatcctacaacaacagtttatgttcaattaatcagtgaataatgtggaatcctggggacacatgtcggggggtgttaatctggttgggcgtcattccttaacagttcattcttcccacagtcctcaca

SEQ ID NO: 40665 - DNA, 2245 bp, Homo sapiens
attttaatatctattttataaggtagttgtaagaattaaatgtgataatgcaggtaaaaactgtttaatgcggggtctggtgccttccctggcgtgcagcccagtgagtgtggctcttgcccacttaatatttcaatgagggaacggttctgtcaatatgcacaaattataatggcaattgatttgcagatctcttctttcctcctctccttctaactcactaatcaaaaaactggttaaccctccaactgctttcccaagttcaaagcaacgtttggcgcagtcctttctcaattctcacacaacaaagcagtatttctcggttccctacaacgaccatcactcaatacaaaaaaccaagcaggtctgccaaaccactctcatacccagtcctggtcatctccgcaggaacaacttcaattctggttaataaggacttcaacgaagggttcattaaggttttccctccaccgaaagaaagaataccgtccccagggagcaggctcttgggccctattatttgctccctggagaaagtgaagagagaggaatcccaaggcgtggcctgaacgccctttgggggcgtgggcagcccggagccccagcctcttccactccaagcaccaggcgcgtcttattttcagcccccaaacggctacaaatcatccgccttattttcagcctccaaacggctacaaatcatcctgtttaaacaaagcggtctgtctaaaaggaggggcataacagggccggggcaggggcaagacctgggagtaggcaacctccctctctgccccgagccgtcccggccgcgcagccgccgagtgccacatcagcgacggcgctgcacttccacattcccttaggatgcagccagcgggcctgagagaggggcgggcccgaggccctccggagtggcgggccgcccggccaatcggcagcaagtgaagagctgcggccaccaatgagctggggcttgtgccagccgcggccgccgaggcccgtgccccgcggggggaacagatgaagcacatctggacagctgtgcggcctcctcgcgggccgacgtcagccgagcacgtcccccacgtcctctccttctcgccacttattatttattcgttttcccaaagaagcgactagggacccaagtttaaaaattcctccccccacccaatgcgagacgtggccagatcccatccaacacacggtttaattttcatggggctctgggatcaaaagaacagaaacagcaacaacaaaagcccagccgctgtctgattttaagctggcaaagtgggaaaaataaagtgttgagtaaacagaccaagttgggtaagttttggatacgtgctggatatcatatttctcttgccgtgatctctatcctgtgtctttttactgttctcaccagctttctcttcatcaaggggagaaaagtaacacttgctgcgacaaactggacccttcgctcccttctcttccgtttcactaacattttaatttaatttttttggtttgctattcttttttttttttttttttttttggtgagctagttttaaatatcctgggagcagcaatgtgactgatattctgttgtaaacctctaactccaaaattgaatctattgataaatttatttctctattttctttctgtgaaaatactgtgggtatttgtaaagccaaaatcgttttttatccccaactctgggactgttttgatgggagattgagaaaattatctgatcttttcagaattaacacgtttgcttctgttaataggatgtctaatataaattacgtaaaacctgggttatgcaggtagttgctggatttttcacttaaatctggaggtagttgcaagccaaatatatatcttttcggtattctcctatccatagtgggagacctgaattcctttataattgttaaaaacaaacaaacatgtgacagaccacttgtgtgttcataaacttataattgtatatatatactatatagtatatatgcactatatagtatggtatatatactatatacatgctatgtatacactatgctatatggtgtatatgctctatgtatgctatatagtatactctatatacgctatatattttgttgttgttgtagtttgtttgtttgtttttgagacagagtctcactcttgtcgccaaggctggagtgcaatggcacgatctcggcttactggaacctctgcctcccgggttcaagtgatt

SEQ ID NO: 40666 - DNA, 2444 bp, Homo sapiens
ggtcctgcaggttgggtgggtagggatgggcagtgagtctgtgttttggagtcattccatggtggctgtcttggagctctgtttaagtggtctggtgctcagggcagttacccaggctactttttgttaacaggccatgccctaaaatctttgacatggatgtgattgttacaaccctccccatccgcatacacgcccatagtgtatgccgagtagctctttctcatcctgctgatagaatcatctactcacattttaacacatataacttcataacttacaattattgaagtagataagaactgtaatatgcacttaagtggagagtcactttggagttcccttgctttctcttccctgagagcattgttctgtggtagagaggtgtgcctgatgctgctgttgaccacctgtgtgacttcaggcaagacattgaacccttgtggtcctccttgccatcatctgtgaaatgatctctagaggccctttttctctcagataatcatttattcttctccccggatccctggaacagtccattattcacagatgcctatttgatacatctgcgactaatattttctgatcacttaatacatggagaacgttctgatgatggtcatgtcctcctcacatcctcctgtgagggttggtacctatttgtgtcctgtttttctagttgaggagacaagggcaaaggcagtttaagaaatttgcccaagattacacagtgaacaagtggcaggtgtagaaccagtctaactttgtagcccgagccttacccaataggctatgctaccttaggtataatacagctacagctgctcttcgtgtttgtggtggtgatagttgagaagtacatggaaggaagatcattggagaaagggcatatttggagatattgatttggtaaaatttgcctggcgggggccagaatatcaatgtgaatcttgtctatgaaatgtgctccatatggagacaggagacatgtggatctcattgcaggcatgcactctgtcttttcaccttgtttgaacaaaacccacatagcacctggttgtctagcagacactcaatacatgtcaattgaatgactgtcccctttgaaaaaggaagttgtgaccacactatttttatttaaaaaaataaatagagagactatgaaatgtcccaagacttgtgggaaaatgggtcagatgccaggtaaacattctacttctgcttttggggcatctcagtttctctttttatttctggacatgctgtggttttgggctaagaacttctcatggtgaatatcaatgaaggtctattttaggtatatagttattaatcatacccattctggatttggcatctatctttttgggaattcattccttaaatattttgtgtattgaatcaactttaaaatatttgaaaaatgttttaggttgctctttatctaatgtagttgctcttttcagtatggcatagtgactaagcacacaggctttgaagtcagactgtgagggtttgaattccagatctgattcttaccaatgtggccttgagcaagtcactttcctctagaagcttttattatctgtaaaatgggggtactcatatgcattacatgagaaaagccatggagagcattcagtatattgtctggctcacagtaaagcctgtacatgtaagcaattccttttttattgtggtaaaatatataacataaaatttaccatcttaaccatttttaagtatacagttcaatggcattaagtacattcacattgtgtgtaaccatcaccaccatccatctccagacatttttcatcttcccaaactgaaacttaatactcattaaacaataaatccctgtaccccttactttgtcagcttctggaaccaatattctacttgctatttttatgaatttgactattctaggtacctcatataagtggaagtatataatatttattcttttatgtttagcttatttcatttagcaaaatgtcttcaagtatcatccatgttgtggtatgtgccagaatatccttcctttttaaggctgaataatatttcattgtatgtatataccatcttttgtttttccattcattcattggtagagggacttaggttgttttcacctgtgatgattagttatgtgtcaacttgtctaggccacagtactgagctatttggccaaacattatcctaaatgtttctttgaagatattttttagttgatgatatggtttggctttgtgtccccacccaaacctcatcttaaattgtaatccccataatccacacgtggagagggagggacctggtgggaggtgattggatcatggggacggtttcccccatgctgttctcatgatactgagtgagttctcatgagacctgatggttttataagggactcttttcccacttgctttctctgtttc

SEQ ID NO: 40667 - DNA, 2795 bp, Homo sapiens
gttatccatgtggccttatacattgggtacctacctgcagagctttttgtgcataacctctctagcccctcttgtacgccccacacaaacctctgactatgcagctaagtatagtcccttgtagggctaggcctctgcttctagtcttttccctgctttcttggaggagcaggcaggcacgggttgccaacctaacttcatgcttttggataacagcaacctctgccttcaccatttcctgacccaacatagtgaaaggagagtgtctcatcaccaagaaaagcctctcactttctccgtcttggtccaggaggtaggagaacaaagaggagcaaataagtcaatcacatcatggtgtcacagccaggctgggacctggaagcaacctttgcagtacgaggatgggatccacatcaagaagacacccagtcttctttggcccatgatggatcatgagtcagtgaatgtttcattagctttcatgaagggggatatctgctttctggtaattttcaaaatgttaaagaacccctttcggagctaggagcaaagtttagcgcgtgaagctctgtgaaggcaatggatgccttttaatttgggatttagtagagcttaaattccctctgatacatcctaagttccccaaaggcaatgtgaatggatggggtctgggcaatgtctgcacctccagctgagatgggatacggtagggtttagctttcatttcccctttcttttttttttgagaccgagtttccagttgcccaggctggagtgcaatggtgcaatcttggctcaccgcaacctctgcctcctgggttcaagtgattctcctgcctcagctcccaagtagctgggattacaggcatgcaccaccatgcccggctaattttgtatttttagtagagatggggtttctccgtgttggtcaggctggtctcgagttcccgacctcaggtgatctgcccgcctgggccttccaacgtgctgggattacagtgtgagccaccacgcccagcctcatttcctctttctgatatggatctcagaggtggcttctccttggctaggaatatgacattgccacaccagctgcagcacgtacgcacacaccctggggctttccaccccacatcattctgtgccagttgtgttggcctttttctgcccactgaggatctagagagacaatgatgtcagccagagctgctgtggcaggtggggctgttctgatgtctgatcaagtggccagagcctccttgccacattcagctcctgcccacgtcctctaggctggccccagtacggctctgggccactttccatgactgtgaagtatatttctgcccagcttagtagtaatgaggagtatttatttttatacgtttgcttgttgtttcaggtggtaagagttctgtagaagccaggctttcctaacatcccaagtccttcttaggcagcattttggtgctccagttatatacctgcccagttctgtccaatattgagttccaatctatacttgaaaagacaaagatgaacagtaacaggagagtaactgttgggggtgggggtagtgggcccagctgcactgacaataacaatcccttccccacccctccttggttgtctgtgaagctactctaaggagtaattcttccctggaccataccctgttgggaagcgaggtgtggaggtgccaggcagtggtttggggggctgactctggcccttgacctgtgagtcacagctgtgtgggagatgcagtatcagtcccttgatttgtttgtttttctggattgcacctttgttgacagtctggcacttactcttgtgcattttgttatttattttcaatggtgcaaggccccagtgttccatcctccttctgaattcacagaaacatccacgcaaatagactggccttggctcggactcacatttgagagacttcaatctccttggcctgtcaaaatgaagttcttcttaaaagtcctaactctctggtgctggcctatagtctaatcaatgcttcccaacctttttcatgtcacagtatacatggacatgacatgatttatgtaggtgggagggctcattcctaggcagtaggccatcggggtctggctactatagtccttgccccctcaccctcacctggctgttcctggggcttagggaaatttgtgtttccctctggcacacctgttcccactgggggcacacaggtatgctacagctaaggttagaagttctggcccaagacctagcatagaccacaatctcaaggtgcaacaaagtgtctcgtccataaacatctttgaagatgatcctagagggtggatgtactttcccaggatgttgtaagtttgggagaaccaagttcctgtggttgcgcccattgcttggtgcagtctgccaccacctgtccttctagaaggaagggtagaaggatgccaacactgcatgtcccctgtcccctccaggccagcatgaccaggatccttggctctgtggccaaactctaatgcttagcactgcttctttccatcctaccatattctggggttatttcacatgacttccacaggttcctgacctcccagctttgctacatcttctgcatcgcttagaacatcacttcttatgcaatggttgcaggtgtcatagacgttctgctgatgttgtctgtttgtgttgccgtgaaccacacctggataactggtctgggtggaattcagctactgcaagagtacatactagtcctcttttagcccttatgactgtgtggtacc

SEQ ID NO: 40668 - DNA, 2529 bp, Homo sapiens
ctccatctgtgagacccatttcagacttctgacctctagaactgtaagataataaacttgagttgtaattagtggtaatttgttagaccagcagtgggaaattaaaccaggggtatttggtgctgtagaaagtgcactgtcctccagcaccccagagaactggattccatttctgcactctaccattcactggctgtgaataattctggcaagccaccagatgtctttaagataagctgtttcttctgggaattagagccaagaaaccagatgtccttgagggcaggactgggctgatgacctcacacacctcacagatgcactccctgccatagccttgattcttctgctcagctcagctctgcacttcccaataggaaccactgttctcgctccctcaaactgagcctgagctctctatcatgttgtcctgggttattttaccactggctgaaattattttgtgtgttaacttgtcacaggcacttgctaaaatcaggaggcactatttccttggctgggcctttttttttttgagatggagtctcactctgtcacccaggctggagtacagtggtgcaatctcggttcactacaacgtccgcttcccgggttcaaaggattctcctgcctcagccttccgagtagctgggattacaggtaccatgcctggctaatttttgtatttttagtagagatggggtttcaccatgttggccaggctggttttgaatggctgggcctatttttttaagaaattaattaaaaattaacaatgaactataaatttcccaacaccaagagaccgagagaccagagttattctgttggcttttcccctccactccagtcaaaattgcacaatgttttgatatcacctcattggcttcagactctgcttttgtgatttatttgtttttcacaaacttctccctgccctacttccagtatttgagggtggacatggggcattatgtctaattggccagctctttcaaaaaggggagatattctagacctttgtatgactgtacctagtgcaaatataattggtagtgatgacatccaatcataagtccttggcctcatatatgcatatttaatactaagtctctttatccttagtagtaatattaaaccgcaaacttgagtgacttttgtgtgaaagttttctcatgggaattgtgcaaacttcattttttccaaatgatgttctgtttgttctattagttgctgtaccttatcttttgaaaaaagtgaacatgatcttggttgtacttagttggataaaatagttaacagctaagtttgttacattcttttttcctaagagaaaaggggaaaaaaagtcttgacgttaaggggatttcaccaaggttctcctagaacaatgtttcttaactagtgacaagagtgagaatttgccccccaggtgacatttatcaatatccatagatatttttggttgtcacatctagggggaaggtactgccagcatctcgtagttagaagccaaggaggctactaaacatcctacaatgcacagaacccctcaccctgcccctgcaccaaggaagtaaagaattatctgatcttagatgtcaatagtgccattgttgagaaattccatcctggatcagtgttgctcaaactttaatgtgcatatgagtcacttggggatctggttaaaaaagattctgatttgataggtctaggtggcccatgagagtctgtatttccaaccagctcccacttggtgtagccactgctggtgtgagtgccacaatttgagtttaaatgtcctagaattcttgtttcttatctgtcttcctacactaaaagataagttccatgagaacaaagaccttgtctatgtcctgtccgcaatggctagaactataactggcatatcatagttgtttaataaatatttgttgaaagcatgaatggatccatggaggaattaagaaatgaataaataagcagacaggcaggagcactgcttattctcacacgtacctctgaagaaccttagaggcacttattcttaaaaaaactgaatttcctctcaacaaagccagaaattcaccaacagctttgctcagggcatgacagtcttcctcaggttaaaaatggtctcctttctctgatgtctcacattgtccctttcgatgcagttccactggatagatggttgggctgataatagagggaaaaaccagaggcccaaaccctggccccacaccccagcctgtcccaaggtgaaaggcctagattcaatcatatttgtttgtattttggcagtagggggaaggaggaagtggggattttttttgagatggagttttgctgttgtcgcccaggccggagtgcaatggcacgatctcggctcactacaacttccgcctcccaggttcaagtgattctactgcctcagcctcctgagtagctgggattacgggcaccccacaaccatgcctggctaatttttgtatttttagtagagacggggtttcaccatgttggcta

SEQ ID NO: 40669 - DNA, 1832 bp, Homo sapiens
aatttttccatggattggtaatttatattgtcatttgtatcactcaccagcttctcatatgtgtatagtttctagctgtatttttcattatctcctaccccagtgactacaatgtctcctgcatgttccttccaatgtgagtttatttatgctcttccttatgtctagggtgactcctttttgttctacctttcgaaatccactcattgctcaaggtctagctcagatgacctttaaagttcttcccaaatccagtcatatgcctctgtccctcccttgaattaaatgaaggggctcagcacacgtatagcattttattcctctactataaatcttagcctatctttttggaatcacagtcacttctgtgtctgtcttctttgttctgccagactgtaagccctttcatgtttttgtggtaactgccagactgtaagccctttagtgtttttgtggtaggcagaacagtgttcctacctgcctatgtcctaattcctggaacttgtgaatatattaccttacttggcaaaagggactttgcatatgtgattaaattaatgacatacagtgaagagattatcctggattattctggtggactcagtctaatcacatgagttctcaaaattagaacctttaccagataaattcagagtcacaggaatccatggttaggaagtggtcagagatggaacattactggttttgaaaatggaaggaggggggctatgagccaaggaatggaggtggcttctaagagctggaaaagggaaagacatgtattctcccttacagcctcttcaatgggacatagcagcagcctaggtggcaccttggttttagggataggcatgtaggggcagctttgctgacaccttgatagcccagtgagatctgtgttgaatatctgacccatagaacggtaatataataaatgtgtgttgtttcaatgtactaattttgtagtagtttgttacagcagcaatagaaaactgatatatttgctcaccatagagtcccctgtaacttgaagcagatccttagatacaaagtgataaatcattgctcactgagttgaattgtgaagcaacatgtaccttggaactacagaatgaaaactttacgttcttactacatcattaatgatcagtgtgatgcttatcactagcatctagacctttgtcaatccatgacaaatgaatgacaaagaccagttttccttatcgttagcagtcctatgccctctgactttgactacagtggtggtaagtaaatactgttggctctgtgcaaagctttacctccttaacatgtgctggcagctcagtggtagaaaggaacagaaggagatgcctttttccctatgttatttaacctactcaaggtacttgactgagaccctttgatggggccattgaaaagtgttttctagtctttgttcttaggtaagggatttggagtcagacatacaaggactttgaaatcctggctctggtcttcgttaactctgtgacatagagtaggtcactaaataccttggagctttggttttcttatatctatggcagagataataatacagttgacccttgaacaatgcaggggttaggggtctggccaccccttgcagtaaaaaatccaagtatagatttttacttcccccaaacttgactggaagccttttataaacagccaattaacacatgtttcatatgttatgaaatgtagcttcattatatactgtattttttttcttttttttgagtcagagtcttgctctgttgcccaggctggagtgcagtggtacgatcttggctcactgcaacctccgc

SEQ ID NO: 40670 - DNA, 757 bp, Homo sapiens
tagtgtttgggtcagcttccaggtttccccctgagtttcacagttgtatcagagggatggaagtaactcaaaagggtctgtcctgaactgagcagcccattatcacctagagataaaataaatctgctgggccaggggaaatcctgaaatctcctttcatgagtttccttggacctggcctagtgtcagatccacaagggtgattctggactctcttttcattattctgttgatggtatgatatgtttcaacaaagggctactcacgtaattaaaaactcacataattcttttttttttttttaatagcagggaccaaaaatggagggtattactgtttattaaccagaagtgactccactatgtggcaataatgtaaacaaagtttgcaatttgatttggcttgatatctggctaggtggggctaaggtgttttaacagtaaatctcaaagtttcattgccttagcacaataagggattgtttcttacaaaatctgaagcaggctggttgatcaccttctgggttgcagatatgccacaccaaggttgcccaggcaagataagagagaggtaaaggagttgtgtagactgctaactgaccctgcttggaaagtgacatgtgctagttcaacttatagtgtattagccagaactaaaaacatgggcccaatctaactggagggagaggctgggaaagagtggggagcagcacacagatatttgatgaacactaattgtttcttccatacacttgatg

SEQ ID NO: 40671 - DNA, 1181 bp, Homo sapiens
agccatagtgacattcccactactgcacccctctgaaacaaaactgtctagaaacttaggtgaatatattatgcttccagtcggtaagtgtggcatatgaatgtttacagcaaaacgctgtcttaagctaacaatattatgtcgtgacttgcttttcaccatattaccatatttttttctcactacttctccataaatggttaatatgttaatacttgtgcatgaactgtgtatagagggattagataaaacatccacctagactcttggaaccgtaagtatggagatgtgaattgaaggaaaccaatactcagattggccacttttttatcacacacatataaatgattgggtaatacgtaaatggagagggaatttcccttccaacttattagcaatgctttctttcctgaaccacatcacagtcaaaaatgctttctcaataacctagccacatcatgcaatttaaaaaagaaaaaaaaatcctgcaagcccctttatactatgaatcatgttttccctgtgtctctgtgtgggagaatatttcaaaagctccctttgcaacttctcattcccaagctccctccagtcatcctcaccgcccaggtgcagggacaatcagggaatgaggaaggtgctcctgctgtctttgcttcttgttttttaggacagttgcttccactgcatctcccagctccactagtccccccagagattcctcccatcactgcacagatcctgagcccaaacgaaagctcagcctttgttttgcctttatgaaggacgaaagttcatttttaaatgacaaaaaggcccaactaagcagtaatggtttgaggtctgatgcggcagcagatcaaacatttgcttaggcttttagtgttgaaataaatgattggataatcagataacaacaggaaattcagacttcgttataggaaattggccccaggcttattgcctattagagaagataattatttaaatttgaaatgtgatactaatgaagcttaaactagtcgaaaccagatgttcaggaatggcatacaagttacagcaagaaaaactttttttttttgcagattgaggtttttttttggaattttatataaggaaataaattaagacgacaaataaaagtgtggtttctgtatttaaaggaggatttaatgagttgtggc

SEQ ID NO: 40672 - DNA, 709 bp, Homo sapiens
ggagaatctgtcccatgctgatctcctagccaactgccagccatccttggcattccttggcttgtggcagcaagacttcattctctgcctttattatcacaagatattcttcctgtatttctttgttttcctatgtcttcacatggccttcttataaggatgccagtctttgggtttagagccaactctaatccagtatgacttcaccttaacttgattacctctgcaaatactctgtttccaaatacaatcacattcagagatactgggagttaggatttcagcatattggcagacacaatttaacccactacaaatgctaactcttatctctgggagctgaagcagatcacttcccagatcgcaggtcatgtggatggcattggaggaatgttggcaggactgatggatgggatctggagggctagtccacagctctaaacactcatcttccctaaaattctcctttctacacagaatttttctgtcaatttccatgaatttgttgtaagaggaaggcatgagaccccagcttagataactgggcctttgaactgggagttgactatgtgactcaattttctctcttgttattccaaacagtgaacatagaggacctagaaattcttgccttcttccgggggcttcagggacctgggctctggtcactttggctcccacagtgagctttcctagcagtatataaaag

SEQ ID NO: 40673 - DNA, 2393 bp, Homo sapiens
ttctttatggccaaattccaaacctttccctcctactacttcatactgctctcttctgtctataaattcctagagcagagagcctggggaattactggatcatatgctgtttagtcctctaattatccctatccataaattcttctcactgcattataattccctaaagagaaacatatttctttggtctctattatagcacctaaggaatctttcttaacatgtagtattgaatagggagctctaggtgcagaaagaagagagaaagtataaggaagatattatcaatatgtcctaagatgttgtctgtaggtgaagaccctgagactggagagttagtgacttgtccaagagcaagcagttagtggccaagcccatcatcagaggtaagtctccaggcaccgtaagtgcgggctctttccacttcagcggttagactattgcatagtgaatggctcagttccttctcagatggacctgccttattctgaggaccatctgtcttcatacccccacctctcttcctgtgtcccattcagaggaagaaatgccagcttctgttcaaatatctctggtatttgattctagtcagagattcaggaaagggaggatcaccaccaggacagtgatggccagggcacacgagactccccagaataagataccttccccacttctcacttctcaagatatgtgtctaaaatatattccgtctctattgtgtgtatagtacggaggatgactgaggactgacgatattgcggaataggctgaacagtgaaaaagacaagagcgatgatgctgccctctagtggcagagtgtagaaacacaactcataagcaaacaccaagttcacatcctaaaagaagcgtccttcaccccaagaagtcagaccacaaaaatagttagaggtagagtttgagttattttaaaaaatcttaggttttaatttattagtactttaatccattgttatgggtaaaattgtgtctgtcccccacaaatttcatattttgaagtcctaacccccagtaccttagaaggtgatcttatatggaaatatgataattccagatcaaattagttaagatgaggccatactgaagtagggtagtttccaatttaatatgccttatgtctttataaaaaataaaaatttggacacacacacacacacacgtggaaaacaccatatggacataaaggaagagattggagtgatatgtctacaagtcaaggaatgccgaagtttggcagcatactatcagaagctaactaagagggaggcatggaacagattctctctaacaccttgaaagggagcatggccctgacaataccttgatctggaatttctagcctccagaactgtgagacaaatttctgttgtttaagctgctccgtttgtgatactttcttatagcaaccttagcaaactcaaacaaccccattactttacattagttttaagcttaatgtttttagatttcagaataaagcatggaaaatggtacactgagggcaatacggcaaatgccagggatgaagatattatctaccccaagttttattaccagccataaaatgcattatctttgttgagaaacttactgacaacttggcttagttatacatttatactattttatgggctcaccaggttggcaagtgtccttaaccagtatttttgtcattccaacattcctctgggaggcaatgtttatacttgtaaatcatttattaactagtgacttctgcattgttgtctttggtgtcttctaatgttttatacgcttgctaactagatcacaaactcgttgagtatccttgaatatcatacattattattaagctttctggggattatgggccttcatatcctgtaaaatgcatggttcttattgcagaatggcccctgtattagttctccagagaaacagaaccaatatacaaatgtaggcttgaggggaggattttaaggaattggcacaagtggctgtagaggctgacaagtcccaaacctgtggtactttcttagagcagccttagcaaactaatacaatcttattactttaacattagttttaagcttcatgttttagaattcaaaataaggcatgtatttgagacaacaggctgggaagagttgatgttacagttcaagcccagaggaattccttcttctttgggaaaggttagcctttttttattaaggccttcaactgggctgggcatggtggctcatgtctgtaatcccagcactttgggaggccaagacggaaggattgcttgagctcaggaattcgagaccagcctggcaatataggcagcctgtgtcaaaaaaaaaaaaaaaaaaaaaaattagccagtgccaatagtctcaactactcgg

SEQ ID NO: 40674 - DNA, 1927 bp, Homo sapiens
aatctagccccttcttcggggccaagagaactttgagcattagccgtctcttggccgccggctaaataaacggactcttaattcatctcaaattgtggtgttttctctaactcgctcaggtacaacagactgccagaggtcttattttccactgttgctgtcttagaattcaactgctatgtgaagaagcaaggttattctgttgaggaggcttcaggaagaaagaggccctagcggagaaaagactatgaggtaaagaaaggtccagctgacttagcctttctaatcaactagctaagacccagacaggtgagaaaggccaacttggattctccagctccagctgagcttccagatgactcagctaaataaacatgaggaacaaagctatctctgcagagtcctgcccaaattgcatggtcataagcaaatgaatggtgattgtatcttaaatccctaagttttgaggtgacctgttgcgtagcaataaataacttacactgatcatttcattaaataattatactttactaaatggaaagaattaggatccagaatattatcttgtcaacatgtaaaggatagtgctgtttcacacaggacattgcaaatttcaacccatcttgctcagatcagcttatgacttcctactactatttttaggactagtgtttatacgggactatttctcagatgattctcttgcttagttactacaaatttggggtttgcctttcacttgaattgggctttctagaacgaaaagaagaaaatcaaactatttcctacactgtgcctctcaacttaaccatgactgtttctctgctcttttaatctttactatacacctctgccaaccagctcagactttggagatggaaaatggaagaaataaaagagaaagcgaaaaagaaagataaaggaaacgaatctgcagagataaacagaggaactgatgttctctagagcaaaatgaagaagtaaatttgaaactaaaaaagactttcgggagttccttttctttcatcttctagagcacagagagcttcattcagggttacatgaatcagagtccagcatctcccatgggcacatattttagtttcatggacaataaacttccactagtgttaaatgagttactttccacaaaatgatgcctccaggaaccaatcagccccgaagatcctatctggaacacctggctctggggagagtaggaagttcctaagaacaaagggctatagagaaaagaagatgcaaagaaaggtgcatgagccggtgacttccttttggcctggaaaagctttttggatccctttctccctgccctcccttaaccactaggtggaaacggagggtgctttattgtacagatgtactaaaggatgagtttaaggtttctctgttattagtagctcagagcttccaacagtgaagcagcagcaaagggcactggtggtttcccaagtggagacgctcagaggctccgtcctgagatggggaagttgggattagccttcatcaatgctgcaggaggtatgataagcaggtttctatgttcttaactttccagtggggtcacagtgcaggttgtagggaaataaaggggatttccgagcctcttgacccttccaggtacaagctcattaaaaacctgctaaaaagaataagtgaataaaatgaaacaaaaaagagtggttgtacagacaacagaaatataggctcttgatgaattttagcaggcttttctgaaaatctggctatctttaaggccatgagtattcccataaagtaacaaataaatgacctattaaacaaaatgccatttaatctcttaccatttgctactttgctataaacttgattcacttcttttgggagaattaccccagagtagtggttaccaaacttcagcagacatcaa

SEQ ID NO: 40675 - DNA, 827 bp, Homo sapiens
gaaattctggatacttgctgttctttgatgacacaaacgttgacgatctaacatggaatatagtggttaaaatggacacttgagagtataggggaaaaatgtacaagagtaggggaaagaaaactctggggccaaactacctgagtttagatcccaataatgcccctcactagctttgagcaaattattaactttgagcaaattattcaacatttttgagtctcagttttcctgcttattatgtgcatagtagtaaacccatgaggcttaaatgagtcaatatattaaaaatttaagatgatgtctaggacgttgtaagtacttaataattgttggctgctatcctctaggtatttttagataattcagtgcagagcatagttttctccactccctggtttataccttgaatagataccattgacctagattggacctttggattgagactcaaattaccaatccaaaagtttacaataggtttaatcattaagttcaattgactagctcaaaactgaaacagaaacagttctaagaactggcacatcttcctgtatttgcctttcaatacttatgctacactgtaccatcaagaaaaatgtttattaaaatatttagtcatgcataccaaagtataataagaattaaaaaaggaaaaattatttaaccagtttattgaaatatttaaccaggtagttaataccggacaaagtttaccttaaataaagactatgtgtattttatttgtataaatctttcagggtttttctctttacaaccagaataaactttcccaagcattgtcctctcatttaagagttaacttt

SEQ ID NO: 40676 - DNA, 1331 bp, Homo sapiens
tactaccctggctccctaatcacagatgggcagggtaggggttgggtgggaacagaagttggagagtggatgtggctgccaaccacacaagttgtgccaacccacagattgaggaaagatgctaaatttggaatctggcaaaccagtgtttggttcttagctctgccacttctaagctgtgtgaaacttggttgaggtccctaacttctcctgagggtgaacaactcacaaagttgttttgcttattaaatgtgataacacctgtaaacatctaacagagtgcctagcacatagcagggatctagcaattgaattagggttatttgtttctgtctactgattgggtattgtttctgacacttacccaagtgtgaatagcctataacactggtataatttgtgaaatgatgctgccatctagtgaaaaccaagacacacacacacacacacacacacacacatacacacacacgtgcgcgcgcatggacacccagcttcaccaatgacaatatggattggcatgttttagcctcacaacacagagccctggggctaactggcacctagagaggtcatctcggccagtgccttccaaactaccagtgctgaaaagccagttcaaaaaattttgaacccattgcacaccaatatttttgtgaaataataaaaataaattactggaaaaatgaaataaaaaatatgtataaaatacaaaccaaaattttagaactgttagattcaacagcaaaaaattgctatatacatctctgaccaattgctttcagtttctgtgcttatctctctacgacctttgtaacacacagtgaaccagcgctggcccatggatacactctagtagccccaatctagctaaggcagccccttatagttaatcaatcctgtcaaacaggaaaggctggcaaaaccactggtctgcatgtactttgtcctttacacaaggaaggatgcaaacgtggaaaactgagtggacatggtgttcaggagattgaggctcagctaaattccagcttatttacctgcagttgcttacaaagtgtttggacataattgtgtaaagctagggttttttttctggtttttaaaacaggtaaaggatgtcacagcaccacttaataacatttcttctgaagtccagattttaacatctgatgccaataaattaactgctgagaacatcactagtgctacgcgagtggttggacagatattcaacacttccagaaatgcttcacctgaggtaaaactcacagagctttaaaaaaaattttttttttatttttagagggggtgttgggaaagaaagagagatg

SEQ ID NO: 40677 - DNA, 578 bp, Homo sapiens
taattttgtaaaatgcttccctctacattatcatatcagtgatgccacttgctactacaatgattcatgatgataatgatggtgatgataatgtatgatatatgcttctctgatgatcagtatcttctctttggcaggcaaagaaagttgccatagtaacagtgagtcaactcctagatgccagtgaagatgcttttcaaagagttgctgctactgctaatgatgatgcccttacaacgtaagcacaaattcaatttggaaagaaaacttgactaagggctgtttactttcctaggctaaagtattaacagagatatctttatttctctcatggatgcagtaactgactgattcctctggaatgtagataagagctgtgactttccacttgacctttagttactagatggagtggtatatgttacctcctgcatccaggggtgctggccatggcctgggagatagggagtaactgggctgatttagattagaacttgttttcctcaccttagtttggcatgaccaagggacaacttccatgcacagcaagacctcttccaaattcttttgcaaaacat

SEQ ID NO: 40678 - DNA, 2427 bp, Homo sapiens
aactgaattagttagataattattctcaagcctgtatacttcaggtaaactgctcagcaataaggggttaatgtatttcgcttttaaatatatcatgagctttacaaaaggaagatatatctggcaactgtctggttattttgacccatgtaactctgtgatgttgactttcattaacacttcagggatgactaattaaaaatatgagtcttaccttgtttttcagactttcaaaaaggattatcaatatcccaaatcacttgacatattatccaacgttggatgtgcactgtctgttactggtctggctctcacagttatatttcagattgtcaccaggtaagagcagaagcaggctcttttcagaagagaaattgctatcttgatataatttactctgagaattctcatgagtagtgtctttgaactaggcaagaactcagagaggtacttattttacagaggaggacatttaggcctggaaaggctaagaaatacacacaaataaatacgtaattacaaattgtggcaagtgccttgaaagaaaattatatgccacttatttacaagtttgtcatgtaaaatttatgtggtcctgcagctcattaatgctataattcctcagtgttgaatagaaccatgcctagcaatttgtatttgttaaggaaagagacattgcaaacagcaattttttaaaaaagtaatttaaaaaatatatcaagctttcaaatggtgaaacgtttttcaaaaatatagttttcaaatggtgaaagtttttgaatcccatacattaaattctaattttaaataatgacctataaacaaatacttctctccaccttgaccccttcatttgaggtccaattttgtatcccattcattattttttgtcacatgctacatttttttaactgcctgcggtcttttagaagcttgttcatttattaatttactccgtttactgtgtgtttcctctgtcaacttcacatttcatgtttgtttggtctttcatgacattgaaatttttcaagcatccaggccagttactttgaaaaatgttccacaatgaagatttgtctgaaattttcctcatgaagagatgcaggttaattatttttggtgggaatactgcaatcatggaattttttttagtgtgacacaacaagaagtgcgtatcagtatgtcccattattgttggctgtaagtttgattcctcgtttaaagtgatgtctgccagatttccacattttttccctgtgtaaataatagatgactcgtggggtgccactttgaggctgcatgatatcctgtttcccaaaaatcttttacttaatgatcttgttactcatccttactggaacaaattattacattaagtggttgaaaaatggtgatttttctaggctatcactctttctatatttgtttgctatactcttttgtaaaaagcatacttcccagtgtagccagagggagccccttcatgttgttttgccacgtctcagtctttagtcacttccttatttcaatcaaaagcaaaatgatcatctttcactttctctgcctcatacctgaaccagccatttctccaaagagccagaattgttttcgattccttttcttccccttttcacattaaatgagtctcttgccattcatttaaaagttttatagtgagtgcttatgttgtaaggagctgaatacaaaactatgaacagacagataatctcccatctctcatgaaatatacactgttggggggaaaaggcagacattataaaaatatctacacaactgaatattacaaattgtggtaagtgccttgaaggaaaattacatgtttgtcatgtaaaattaaatgcctcttaaatttgtctcattatttgtatttctaccatcaccacagttgtactgacaattatttggtcccatagggatgagtcatagttgctgcataactagtttctttgccaaaacctcactcttttcatttgtcatcagatttttttcctctttcatcaatatgttttctagcacaattatgcaaccaaagataccactaaaattcatcaggaaacaaaaataaaaataaacaccaggcatggaggctcacacctataattccagcactttgggaggccaaggcaggaggattgcttgagcccaggagtttgagacaagcctgggcaatacagcaagatcacatctcaaacaaatttttttttttaaagagagaaaaaacaaaacaaaaataaagacaaaattttattgattttaaaatcctgaattataaaattttctttgttcttggacaggttcccatataataataatgcacagaatacaaacagtcccctactgaccatggttcaacttacgatttttcagctttaagatgttgcaaaagtgatagcattcaggatgttt

SEQ ID NO: 40679 - DNA, 2393 bp, Homo sapiens
tagtaattttccatccactgaccgacttccaccccttggctataaattcctacttactcatactgtatttctatttgaacaggtaagggagaagggaagagtacgtaggacacactcaaatgccttatcctctaaaaatcactcaggaatctttagccttaatttcccagcttttgtcctttacacagttacagattttccttgctcataaacgctgtaggtcttccctgcttaattggaaactccttgctcacaaaatgattcacccccattcctagaaccgggcttggcaaagcataggctcccaataatgaatgaatggatttatagaagaaaaggttttttctttttcagctgttactacaatggtcaacaataacgacaaaaaccacttaaagttggacagacgtctactgcaaccaactctcaaaaagtttagaacagcgcactacgccccgcccattggcgagaaacggaaatacccgctttcgagaaaaccggaagtgcgtggtcacgccccgcgcatgcgtgcatcggggcagctcacgcttcctaaatcccgtcatccagtgagaaagcagggactcttcggcctaggcagccgggacccagccagccctgcgcctcgcgccgtcgcgcatgcgtcctgggtatgtccacgcgcaataaggaggggcgaaaggacatttttttttttcttgctcccgcctctgttcttcccccacctgccacgtacagagcccaagttctcgctaggcttgttgggtcagcgcgattggccggggcccgcgcgagcctgcgagcgaggtgcggcggtcgcgaagggcaaccgagggggccgtgaccaccgcctccccgcgacgccccagtccagtggcctcgcgtccgcccattcagcggagacctgcggagaggcggcggccgcggcctccgcaagccggtatggccactggagacgggggttgcgggcgctctgtccgaggaggccgggagactaggaggcgctgggagggcctcgttcgaaccgcgcggcagctggggtcggaggcactgtgggaaggggctggagggaggagggggtgggagggaggagggggtgggagggaggacgaggccgggggggagggcgggcggggccttgcatggggggaggggaagggaggtcgcggagggggaggggagagaggcaacccctggctgcggtggccaggaggcgcgcctggggggctccgggaggggagtgcgccagctaatgccttggtgcagcctgcctccaagcgtttggattgagaggagaggggctttgggaggtttggggcggccggcgcccaatacccgaaggagctcggaagggtgtggagtggcgcctacgggaataagttgattggggtcatagaatcggagcctagttccttggctaagtcagcgcttaatcaagcgccggctggaggcccagcctggtttatagtgatgattctagctaactttaagagtttgctttgctggacactacagtaagtattttggatgcactgtctcatttaatcatcacaaggattcctccaaattcagatatggttgttttcatttcgaatgtgatgaaagtgagccttggaggacttaagatcacatagctagtagtgagaatctttaccgtcttgctgcactgcctttgaggcagggtttgaggcctcttggcattctttagaataattacaggttgacttggcttagtatttcttgaaggaaactgctcccctcaggaggtgcttaagccacagcctctgaaattgagcagggtcttacccttagaggtagtagaaccagaagtttgtccgccgaacctagaacctggttcaggaggcaggctttttatatgaccttgggcgtgtcagattattcccagtgctgagaaaagtgtacctggtagagggttatattatacaagttagaagccgagtcatttctggacttcagagggggcggggcaaggacaagatgggagaagagcttgtcgtagggctcctactggcagttctaggaactagttaataccagtctctactttggaagagaaaatgagtaccagaattctgtatgtgaagtaatgttgggttgggatttccccttgaagggaaagttttgttgcacacttacttttgagatacttttgtgtttactctggggagatgactgcaagagcaaacgacagctttaggaaagaagcactggttcctggccacaagatgtttacagtcaataggaaacacaaaaagtgaatttgcaggtaaacacggcagatagaaagtatacgtgactcaatttttttttttttttgagacggagtctggctctgtcgcccaggctgtagtgcagtggcgtgatcccccagc

SEQ ID NO: 40680 - DNA, 961 bp, Homo sapiens
catcttcttggttaaactgcttcctagatatttaaaaaaatttttgtagctgtggttaatgggattgcattttttattttttattgtatgtgtatagaaacactacttatttttgtgtacttattttgtttctggcagctttattgaattcatttattggttctaagggttttggtagagtttttaggtttttgtttatataagattatgtcatctgcaaacagggacagtttgcttccttcccaatttggataccttttatttttttctcttgcataattgctctggctagtacttgcttaactgtcttttttttattttttatttttttgtcttgagacagggtcttgctctgtctcccaagctggagcgcagtggtgtgatcatggctcattgaagccttgaactcctgggctcaagcagtccttgcaactcagcctcccgtgtagctgggactgcaggcatgtgccactgcactcagcttcttattcttaatgtttatcaaaatgggggtctcactgtgttgcccaggctggtcctgaactcctgggctcaagcgatcctcctgccttggcctgccaaagtactgagattacaggcatgagccagtgtgcctggcctttaactgccttttttcccacttgaagatgctttgcctttatctcaaactgacctcattgactggctttctcttaactactgtttagggcaaaggtcagcaaacattttctttaatagatcagagagaataaatattgtagctttgtgggtcacataaggcctctgtctcatcttttttttacaatgtaaaaaccatttttcattcacagacctataacaacacagggattttgtccgttggtcacagttcatggacccttagcttgaggtgtcctcgttgtagtttgtcttccacatttagttacaactttgtatttcatggtttttttttttttttttt

SEQ ID NO: 40681 - DNA, 632 bp, Homo sapiens
aagatacattattatgtgtgctagggttctccagagggatggaaccaataagatacatgggagttttttagggagaattgcaaggtgattacaaggcgaagtccggtgataggccatctgcaagctggggaaagagagaagctgatgctgatagtggctcagtggctcagtccaagtccaaaagcctgaaaaccagggaagctgatagtgcagcctttgtctgttgccaaaggcctgagagtcccctgggaagctgctggtacaagccctggagtccaaaggccaaaaaacctggagtctgatgtccaagggcaggaggagtggaagcaagcatctggcataggagggagagcgagctaaagacccagcaagcaaacttatcctaccttcttctgcctgttttgtgatagctgcactggcagctgattgggtggtgcccaccaacactgaagatgggtcttcctcttctggttcactgactcaaatgtcagtgtcctctggcaacaccctcacagacacacccagaaacagtactttaccagccatctaggcattcctcactctaatcaagctgacacctaatattaacttaattaatttaaacttagctaatttaaacttttaattgagta

SEQ ID NO: 40682 - DNA, 844 bp, Homo sapiens
atggagaaaccctgtctctactaaaaatacaaaaattagctgggcatggtggcacatgcctttgtcattgtcatttgcaatgagagattgttgatacaaaaacacctttgtcacctacagaaatcacacacacatggggtattttcacatgaaatattttccagagattaaatttttgctaagaggcctgaaaacaaaacaaaacaaaaaagcccatagaactacagtgaactgaaaatggaaaaaaagaaatcatagccatctggactttgattcaaatgggcagtgcattccacattcgttccaggccattgccaaaagccctgtgctttggccaagtctgattgctggaattgtctccatgtctttttatttcacagttacgtacacttaagctccattttcagcatgccacatatacaagctactttttgggtttttttttttttttttggccaatattttgtgatatttgacaagtttcaaagaaattattttgcactaaatttaattaacatgggaactgaaaggcacatttttgttttggcctgattaaaccctatataacaaaaattatttgtgttggtaaaattttttctgaagaagcacattttgtcacagatgaatgacatcataggtctaagagaaatgtctcaatattgattgtacatagaaaataaaatttaaagtttcaggaaacagttatttgaagtaagaaacttcaaatagaagttttggaagataaagttgaggacatttcacaaatactagaacaaaaagtcaaagagatgaaaaaatgagagaaaagaaagttggagaattattccagagaatatggtaccca

SEQ ID NO: 40683 - DNA, 911 bp, Homo sapiens
ttgtgaatttcagagcagaaagtaggagctaagtcaattagcacaacagacaaatgtgaagaagagaaagaataaagtatagctagatataacacagaagaaaatcactgaaatttaatgtcagttattttatgcaactcattgtgctcttcccacagatactgtcagatcaaggagaaaaataacagagtcacatcacttcctaaaaaaatagtccaatgtcttgaataatcagagattcagcattcagcttctaaggaaggattgactcttcctgattccttggggattagtcttagtaaccacagacagaagaactcatagcaatgagccaggaagaaatttttaaaatattttattctagaacacacaaaaagtgcagcagtgatctcatgctcatggaattcactggtcttgccacattccacaccatcccgaagctgctggcttgataggatggtggaatggccttttgaacactcagttataataccagttagatggcaataccttgcaaggcttgtacaaggccctctgtatatgctctgaatcagcatccaatatatggtgctctttctctcagagccagaagtcacaggtccaggtagcaaggggtggagatgggagaggcaccatttcctatttacacatagtaactcacaaacaaaatgtatgcttcctgttcattagactttatgctctgttggcttagacgtcttagtcccagaggtaagaatacttccaccaggagatacaacaatacttccattaaactagaagttaagactgccactttgggctcctcatgcctctgagtcaacagccaagaagggagttatgatgttggctggggtgattgatcctgactaccaagggtaaataggactactactccgcaatagaaggaagag

SEQ ID NO: 40684 - DNA, 1008 bp, Homo sapiens
gtgtattggtgaggtgcaaagaatggaaacaaactctatcttatttaagcaggaaaaaaatgacatgaaaggatattggaatttcacattccttgggaagttaaacaagcaggaacaaaggaaagctctgcagccatggccacagccagagatgcagcacagagcctccaggtgaggacacgctgcccctaccctgacacgtgcacccagcaccggacccaccaccagagggcactcctgctgctgccctccaggaactcctccctatttatgcctccgcagcttctttaactccagatttaaaaattccaggcactacattagatagacctaattccatgggagctacaaaagcaatttctgagaattttctgtttctacggtggtaaggaatcttctgtgtctatagggggtggactctgcttcccaccaagacttttatggcagggaatttccaaaatagagaaaaggaggtaaaatgctggagacttttgcttttgcttttgtttttttaatgacaagcagtccctcttccacaaatttctcaggtaattgttcagaaaatgtcttgtggacatattctcctttcctgattcccatctaagggaattggatttttatggtcatccctaagtaaatagcctgtctaatttcacagagaagtctaaacttcctgttatccaaatgctactccctgggagtcctctaccttacccaaggctgaaaggacagaatattttttctgggtgattttccccacacaaccctatccactacaaaatggcctccacttcacactcaacttcctgcattattttaaaatctagctcagggcaaaagtacactgggtttcattactgtgtgagataccatcatcttcctctttccttcctttgttggcccaagagccgtgtctagtgtactttgaattttccttctttcatcaggcctctgaccattttcccttccatgagtacaatttctaagtagtcatgatgttacgtgcag

SEQ ID NO: 40685 - DNA, 667 bp, Homo sapiens
tcccttcaatgaaaatgcctcatggctgttgatgtaagaatacagaaatgtcaccaggcttttccctttgcttctgagaagaaacaagacacttgagaaaatttttggctaattaacttatagaacattatttaagcctaagattgtaaatatgaagaatccttccaatatgccattgtttttctcaaattattttatagccatggaatgccatgtaaaaagctgctaagttagaacactgtgaaatgctgccaagaagaggtataacagcttcatgaactcaagctctgtgttgtgactcatgggaagcagataaggtcattcagagtcaatagtgtgaacccgcttggaggttaatagtctacaggttaagtagagggttcatgagaggttttactttaacgtttaatatcaacccagtacattgtcttcaattcagttattgcatacctatatcaccctgaaacttagaacactctgctacgctattggaatgttttcctatttctataatgtaaatatagactctagatttgaattaacttggtgcttcaacttcctagtttaattctactaatttgagatttttttttttttttgagacggagtctggtgatctctgctcactgcaagctccgccccgcgggttcacgccattctcctgcct

SEQ ID NO: 40686 - DNA, 1962 bp, Homo sapiens
aatctgtaattgttaactgtctctgcagaaaccaacggtaccatcagaaacagaaaaatgaaatgaaataattgattcattgggcgttcgtttgtgtactggactgtaagcatatgagtcctcgtcctctcctcctaccatccataggacttaacacaaggacttgaggaccccctaatggatgaaatgtttgataaaaacttctcaactgggaggagctctacctcacgtttttataactccactttcttgtttccaagacgttgtacacaaaactgaagatagtcatttaaaacaaagtaacgtccaaaacaaaaaatatgctgaaaataaaaacacaacgaaagcacggcttcaaatcctttgtttgactttccaatcacttttggaagacgcagggtaggctggaaaagaaaaaggctattaggcgggcctgttcagcagaacgagacccggagaggcattgtatcaaagaaaaggagtctccggtcgcaagccccacctttcctccccagcagcagctacctgctgagggaaagaggagggagaggggaagggacgcaaagtcgagaatcaaaggaagagaggaaagtggggtcaggcgctgagaagccgaaatgaaattggaacattggtggaattacgaggaaggcgtggcagagagtgacaagccaaccgggaagatccatgggccgatgagacgcaaggagggtgttcgcgggaggagggaaaaaataaaaggggttttgaggtgaagagcgcccgaggcttcgatgacagctcggaccgggtcttcgactccaggggcgggggcgacccgggagccttccattgtgcgcgccccttcctctccccgcccccgccctcgcccccgcggcttcgggccgcaaccccagctgccgcctgcgcctcccgtttcccccgggtaggagacaatatgttcagcccttctctgaccctttctcaccggatgaagatggccgtcgcccgagctttctcttgtccatcttctcccgctgctgaaatttcagttgcaggcgctgtcacctcaggacccctccggcttggagagggagggggaggggaaaggaaaaaaaaaaaaaaaaaaaaaaaaaaaaaaaagcccgcaaagtgcgaagcgcgcttgcgcaagagccgtcgcctgcccttcgaccggaaatcagccgcccctcccaccttcgaccggaaatcacttcctgggacttttcactgtgggctgcctcttccagcgtttttttggtggcgtttatttcatgatctgagcccctctggggaggtgaaccacctgggtgctcgattttagctttgttgactttgaagattagattgacaaaaattaaaagggaaaaacaggaactcctccggttcactggatctcgcgaggtggccaaacaactatgaaaacaaaacgttagcgtttgcagtattacatccctcacagcctctcttacatatttgcccccaacgcctttcctcgaactcagaaaccaaaagattttaagatggcaaaatcacctaataatagcctagctattagtttagcatttgctgtggaaatatgtcagcagacgaggaaaaatgtcttaggattcctttttaaaattcgaacttgtgatttttaaagttccttaaaagaaaagctagaacttaatttttcaataactgaaatgctgatatgacagaaagtgggtggctataaacttggaatttgttcaattaacatttaccacgatacttaagggactaatccagtcctcaatgaactcaaggtctggtactattagcctgattatccctaatggtgcatatctgaataatttttaaatgcacgtgtaagctttcatgacgatttaatcacaagtttaacaaaattcagcacagtgctctaagcagggaaaatgtttctggcatgttcaaagcccgaagggactctggaagtag

SEQ ID NO: 40687 - DNA, 1228 bp, Homo sapiens
tcgcccaggctggagtgcagtggcgcgatctcagctcaccgcaacctccgcctcccaggttcaagcgattctcctgcctcagcctcccgagcaactgggattacaggcgcgcgccaccacacctggctaatttttgtatttttagtagagacggggtttcactatgttggccaggctggtctcaaactcctgaccccaagtgatccgcccgcctcggccgcccaaagcactgggataacaggcgtaagccaactggcccggcccagaagaagtttttaggatatatggaggaaaacacaacacaacacagctacaactccgtgacaactgagagcgtagtcttcgagtacccagttgcctactgacagccgtctcctctaaggcgcttcttttagccaagaaagcgttctttgcgtgctgtgacgtaaaaagcagcgccggaagggagagggcggaacttccggctgagccccagcgaccgctctggtcggctgtgtagactgttgggtaggctgcgtgctagcttcggcgcggatccctgggcgtccgtacgtcggagtccttcgtcctccagggtccctgttctttgcgccagcgggaaccactatctctgcactcctggtaagcgagtttcttctttcgcctaatgtgtgtgttgggggtgggaggacgccggagacgttccaagatgcacttagtggagcatgtgcgttcggaaggcccacgggtaagaggaagcccagtgattttaataaactataactagtacagtacctgaaacaaaatcagtggttcctgaaatgatgtacttgattgctttttacaattggggttttcatttctgtggtattctaagtccttgccagttacaagaataaaacttttaaaactccttctgaaatcaatgtttattagattggggcctggggaccccagttaaatatttccgggattctaaagtaaattgttttctctttaaagggaggctgagccgggcgcggtggctcacgcctgtaatcccagcacaatgagaggccgaggtgggcggatcacgaggtcaggagatccgagaccatcctggctaacacagtgaaaccccgtctgtactaaaaatacaaaatagccgggcgtggtggcgggtgcctgtagtcccagctactcgggaggctgaggcaggagaatggcgtgaaccctgggaggcggagcttgcgccgagatcgcgccacta

SEQ ID NO: 40688 - DNA, 2720 bp, Homo sapiens
atccgcaaatattgaacactttttatattcatatatgaaacgcacagtacacagtttttaaaaactggtctctgttgtcaaggaacttttgagccattcagagagacaacacttaaaacacacacacacacacacacacacacaaactgagggaagtatgaagtgaccaaataatggtatacaaagatgatctcatttgatccctattaccactctttgaggaggtactattattattgctcttttatagagaagaaaaggtagctctgtaggcagtaagcaagtctcaaggttactcaagcaggaaagggcaaaacagattcaaatccaagttctgactcctaagactttctctaactatatatggtaagacaaacccagaaactccagttccctaagcaagtaatagaccccatttggctaggagggctggataaatactgagaaagggggaagatgaagccgaaaaggtaggctagggcctaatgtaactcacggacttcagaatgcagactgtaggaatccactaaaggtttcttattaaggcagaaattactgcagtcttaacttgacatagtagtttctcaacttggtagaagcagactatacaaaaagtaactttacagttggctacgtgacttagacaaattactctctctgacctcaactcttacaggtaattgagaggagaattctatatttggacaatcgccgtgattaaacgagtgtatgaaaggcgtctgaagctagggggcgctagataaacactgatttcccctttagggaaaaagaatgcaggctttttgtttacatagagttggcaggcatgcgttatccagcaaggccggaacggaagacactctcagcctcagctgcaaccacatctgggtatgcagaaaccttctaagatcccagcgtttccagggagatgctccatttcccctcacttctccggacctgtcgctagaccatgaagacctgactgccctctaataaagtgcctagccagcactcttagaccgcccaaccttcccagctcttccttccgaggcggctactcgatgacatcacatccacttccgcttccgaaggcggcctcttttcattcctcgggaccgctctaggctgccaccacgccggctggccccaaaaactcgatggttgttgggcggggtcgtgacgtccttggcgtggctgcaggggaggccgcggcggggaaaatggcggacgggaaggcgggagacgagaagcctgaaaagtcgcagcgagctggagccgccggaggtgaacacaaccccagcgtcgtgggcagcgtgggatgctccgggcctttctttgagctcccagggtggggggagtggggtggggcgagaatgggcggatctggacctcacccggccaggtgttgggcccagacctgcctcgggcacgcccgatgcggccctctgggctccgggcctacatcgcctccttgcctggggagagccggccactgttcgtcacctcctggccccagcggaggccctgattccgaggagaagggagatgggcgccagaaagggagaccgaactcggggtgggaccaggagcggcggtgcaggagccgctaccgccacaccggagacgcacatcacacaaaacacacacaccggagacgctcatgagacataacatacacacagtgcgagccaccgagtagttgccgcgggaactggccgcaggctgagtttctgacggtgccggcctctcagttacacgcaggagttaattacgcttgctgctcccttttcactgaggaggtggacaactccggcctgctctctttcctttacttccaagtttaatattgaccctgtgacaggatgggccgaggtgatggaggggaagaggaatgcctttgcctgccctctggtttaagctgcggggtctagggctaaggtttggttgcttttctttgaagtatctcccttaggctgttgccagctgaccgcttgccagatacttaggcgactaaatagtctagcgtgactcttcctgtattttgttacgacgttaaactcaggttacagctatccttattctgtccattccactccctaaattcgggtcttgtgcgtgaaggaaaagaaacgtaatctctccagctccctctttgcacataacaagacaagtgacttaacacgtgcgagctgtttaaaatgtttttagaacattttaaacattattctctattctgaccaccttagttatcattcccgaaattatttaatatgagaaaatagaaacgattaatagcatatgaaggccactagtagacctactaacataatgtttcatgttaattgccttgggaacaaaaattattgaaaagattaagtgtaatgttaattactttggacccaggatttcctttttaaaaaacacgtacaattctgttagttaagctggaactccatctctctcttccctccccaccccctgtctttttttttttttataactagtaaaataccttatgaaagaacaatttaaatttaaaccatctactactttctcactagggaattttttttcccaaaaaaattgtattggaaattgtgggataaaattacataaaagtttaaaagtagtttgaggaaaagcaaaaaattttagacgtagtttgaggaaaagcctaaagaatcatgtgttgattttaaggccatctcgttaactgtctt

SEQ ID NO: 40689 - DNA, 2167 bp, Homo sapiens
ctacacagttcccaaacgcgtttttcacatcattaggggaaagattattaaaacattcagagttacgaatatcaagctgggcgccgtggctcatgcctgaaatcccaacactttgggaggccgaggcgggaggatggcttgaggccagatggagaccagcttggggaacgaggcgagacccgtgtctactcaaacaccccgcccccgcaaaaccaaacaacaaaaacagtaactgatatcttttacatttacttcttgttcttaaaaaaaaacgctcaaggcgatttctcaatcactccttatcacttctgcaaataattgtattattccttatttacgcagcagcggcaaaatttgaggaacactagcgaatgtgtccagagcagctcatactcgctcgccaaaacccaagcgcagcactaaagaaacgggagacccggcttcgggtgactcgtccccccttccaaacgtcagcacagtcgaaaacgtgcaccccgcagcctccactgccgcgagccacacgccacctccagagggccggggcctacagcctcaaggggccgcccaaggaggcggacctggcgcagcccaggcgtccggcccctccccgcggctggcccggcctccggggaagcccccttggtcccacccagggccagggcccgcccccagcttcgccggcctccttcctgtgggaagtgcggctcctttcgcgtcccccaccctctcggctccgcctggcagcagctccgccgcccagaggcgtccgagaccctccgactcgtgggtacgcataggcctcgccagcgagccttgcccaggcaacgagtcgccagcccgccccctcgccgcgggctaggtctcacctcgccaccagtacgtcttggacaagtagtgccaggtctgatgccgggtgtggtgagtgccgccgggacccaggtgcgccgcctcgatgaggtcccggcgtcgctccggctgcagcaccacctccagctccgcgaaggtcttgcggtgccgctgccgccgctggtaatacagagtcccgccgcgcaccacgtagcaggcggcagcttttcggattttacgcttgacattgccctcggtgcccggcgcatacggctcgcgctcgttcgtcaggtaacgcaggatggcccggtagctttcctcgcttgacatcgcggaccgcggctccctgagggcgcctgtcagggacaggtgaggaaaacggcccgctacctacgggcggctgcaggaggagcggcggcaccgtagggagaaacggctgcgcctttggcgagcgctcttcgacggctcccttagtccgaaggaaaagcgggcgagttggtaaccagggggaactgcacttctccagcgcgcgggatccgctggcgactgacaaaatggctgctgcaccaccggaagtgacgcaaggcaagggcggggactgagccctgattggagcgcactctcgttttctggcttgatggagccgatccagtgacgtcaggaatgcgggtggacattttggaagcgggtaggacccttcactgcagttcgagggagtctttaagcagacatcttaagtcctggcagtttctcttttcatttttcccttttccacgctttctaaggagccacgtgtagggggagctggtggacagttgagagttcagccgaaacatccagagggttaggagtccgtttttacgtttgagactcccaacatcataaaagcatattttcaggcttctggaaaaatattagtctcttgacacgggaccagagacagcccatttacatggaaatttagattccagttaacagttataaaattttcagtgcctccctcagtgatgagttattgtttctaaacttgcacctgctagctccagactactcaaggaagagtcgagattcttttggaattatcagcatttatagtcaatgttattgcgagtggaaaagggggtcggtaacactattttaaggctttatttacatatatttttacacaaacgtaggggaaaaggttctccattttgcaccaaatatatatgagggtgcaagaaggggagcggacttgagctgcgtctcccagtgcgtgctgaggatgctaatacaggtatttagctggtaatcccggagcagcgaccccggtcaccctttc

SEQ ID NO: 40690 - DNA, 2856 bp, Homo sapiens
tgatttttcacagctgttgcatatttagcaatgcacaaaggttccaatttctccccatcctcaccaacacctgtaattcctgtttttttttttcctgaatagtcaccctaataggtgtgtcatatccacttttaagtttctccttcctctgaactttcaacatattttatgtctgatggcatttatttctcacaatacctagaaaagtccttcatccagaaggtgttcagtaagtattcccaagcctcctgaatactagtcctaccatggcactcaaactttttctcatgtataacccagctaaaaggacacttaacaaggaccagaaaaaccactgtttttctagtgaatgaactagtgtatggtggactggttcatggtccactggctatgttaggactaatcctgtaaatattgcaatcaaaaccaaattatggtaacttctcaatttcctcccactggaaaactaagcccttccaccctgccctataacgcaaaggtgcttaacgtaatttatctgactttaaaatttcaactcggtattgctactagcctaaaatatatagagacagtttataatatctttttcattttgctgacgctttacagtttaagagctctttcgcatacagtctgatttaattttacagagcagaaaaccaacgttcagagagctttgacaacttaagagatagcccccaacatcaaggcgtattccacttaccgactgtccctttttgtgcttccttctgtagaggacagtccagtttatctgccgaggattcctcttggaaaggaaagccgactcgcatttcgcattaagaaactggaaaacctagagtgacaaatgcaaaggaattactatttaactatacaaagtacaagaggctgagtaagcttggaatccttagaagatcaatatgctagttctggcttatcattttacaaaactgaggcccacaaggaccaaaaggctgtcacataactggcaggtaactgtgtcacactatgaaggtccttgcgtttagtcttttctcgagagcaggaaatctaggctcatagcaaaggacagggtggtgcgtccttctgggaagcattctgctcttgtccgtcccaggattccaaagggtacctccgtacctcagttatttcccttacaccgggacatcagttacataaacccctcctgatgtccgacctggctcacaataaataatcaacactggttcacttagaggtttctggtcctaacgaccagtccacagagcgtccacgaagacttccagaggccagtggtgatgtggggaataaacccgcctaaaccgaattaaaccagcctttcctcctcggagtacaagaaggtaggtgaagccgacgcggctttttaccttcccgtcggtcctggcgtagcgcctcccgtgtccggggtagatcttgtacccgctaaaactgcacagctcgaccctgcaacaaaaagtgaaagtccatcagggagggtgtctacagccatgccagggacgacagagaggagttctgcccgaggatgtaagcggattgggaaccacgggtcgtgcttacttcatggcgacagctccacggaaagacaaaagatggcgaaaagaaagagagaatcatgggaagagaccttataaggtcgctgcggggatgggggccggaaatctcctccccaatatccttcgatgctcctggccctccttgatgacgtaatcatcgcgaggcgaaagatctcgttttccctgacagctgacttcctctggcgcaattcatccagaggcgctggagggttctcgggcccagagggcctgccaaaaaggcagtcagacagttggtttatgagtcattctgtctctgtctctcctctcttttttttttttgagacggagtttcgctcttgttgcccaggctggagtgcagtggcgcaatctcggctcaccgtaacctccgcctcccaggttcaagcgattctcctgcctcagcctccctagtagctgggattacaggcatgtgccaccacgtccggctaattttgtatttttcgtagagacggggtttctccatgttggtcaggctggtctcgaactcctgacctcaggtggtccgccctcctcggcctcccaaagtgttgggattataggcgggagccactgcgcccggcccattctgcctctcttactgccaagtatcctagagccatcttccggctgcagggaatgtgaactgaagagaaaggtgtcctctcttctcataaagagacccaaagacgaatgccccgcaggtaaaaccagtcacattttgccttccctgttggcccatttcctcaaccaaacaaattaatagtttcaccatttataagaaagtaatgacaaccgaaccgtttctcaggctgtgcgaatcgaacagtgcgcgttggcgctttgcattaattataattaacattctttgagcgctttctctgtgccgggaattatgccaaaggctttttaaacatgagctcattcagtttccaaaattcctattaagtacctgcctaagaactacaattcggagttgctgcctagtgaagttgagggggtcggtggagccccgctgggaggccaagggctcaatctgttgagcccttctatgatgctacatatttcatcgtatgacaaggagtggccagaggcaattcttgaattctgtgggaggttgcagtatatgactaggaaacaaatgtaatgactgagttctgctttctatgtatgcaactcaccctaaaaacgttttgtaaggtagctggttgaagatatttggaatgtctaacaagttggctgactaatgtcatgaaaactgtac

SEQ ID NO: 40691 - DNA, 1834 bp, Homo sapiens
ccgtaagtcaaaagatttgtcaaatattcaagaacaatcaaacaatcacttaaaaatactgtataaaagtttctatttcggcatactttacttttacttaactaaaatttcaaataaaatgtatccacttttatgatctcaacaagatcggtcattcctatagcggagttgaaaactttcaacttattcacaattatcaaaagaatggagcagcccccacagagacttccagcaatgagttgtaaaatgcagtctgcattaagtagcttccttacaatcatcccgatggtaaaagtgtcaaatttcgcaaacgcctggacaaggaagtgaaatgatcatctaataacgcagttgactcatctgtcaaataagcgagtgggccagggtccctgagctcactaccctcagattctaactccagcttcacatcattaggcgtaagcagccaattgggccgtctgggagccgtgcatcctgggagttatagtttccggctccctccttcagattacaagctccacagagccgcgggaggacggttgcctggtattattagcaagcagcaaatatggcggtggcgcgcgtggacgcggctttgcctcccggagaaggtaaggcgatccctaccccgagtcctaaggtttacttcacggagctgaattaaatagtggagagcagaaaacctaggtttagatgtgcagttctggaccagttcttttgatgcggatctgtggtcgtcgcggaggcgggctaccctctgggagttgtagttcacctgccgttcccagctctccggcgtcgcggtgagggccgagcgggggactacagcccccagaagccttcgcgcggcccggcgccctggctcccgcgctcccgatgctgaggaggcggtggatttcgggctgcgatgacctttcttgaccatttactttgagtcatgggtgcctaagcgaaatgtttgggatctccctctttcgcttcacacatctccctctcttcttggttcctggaaccatcaggaaaaccttccctcagagaccgctgcctagtctggctttgaacccttcctcggaggtggccagtggccgtgataaaatctaagggatgatccagagcccgcagttctgtactccttgttcttgcacacgggtcctaggatcgagtttggtcgctgcccagtagagcacaggactgtgtgggtgcttctgtggcctgaagatacctacctctttggggcgccggacgcgagctgcttttgttttggttacagctccgaggcttggcagcagtcagtcctctaaatcggggacagggcccaggggtcgaggcccgtcttcatggcttagaccaggagtgcattttctgggagctgtaaattcttgggggaagagttggtggatggttctcagacctctctgtcgaccccttggaattgtgtacaaaggctgtgcacttttctgagacagcacacccctttcatcaatttttcagaggggctcacgactcctcacatgctaagagccattagacaacgggaaaacgttgaaatcctccaggagagcaatctggcataattatttcctgcagtagtcctaatctgggtgtaaatttgaaattggccgtttctctggccccgccctctttggagatcggcttttcttaaaccacacctctcaagcccaccagggctacttaactgttaatagcagttaacatttacagagcactttgtatgacccaggcgatgttctcagtcctttttttttttgtttttttttttacattatctcattttctctgtagaactacatttataaggcaggtattatcccca

SEQ ID NO: 40692 - DNA, 2669 bp, Homo sapiens
gggcaacgagagtgaaactctgtctcaataaataaataaataaataaaaaataaaaaagtgtgaacttaaatatatttatatgtgtgtacatatattttcttttttaatattctggttaaatgagaggccatcgggcctctttttaagagtctaatgatgtgtatatctaatgcccattccagctggattgtaacactgcttggggaagataacttaaaaaaaagtagtaccgagattacagcagctagtgtcctaaatggaaaagaagtgaaactaaatgtcataggagaaatcctttcagttttgtgcagtggttcatttgctgttaaatctaccccattaccattccccttactccttgaaaataaagtgatcttcatgttacaggaccattgctttatttatgtcacagatttcttgtcctttaattagtcagtgaaggcacatgattgcgatactactttttgattgccgtattgtaaaagctatatggtaaaaggtaactccctccacccgcccactgcaccctcacgtttaggggccacacagaaaaagcgaaataagatgaggtgaatctaatgagaaggcaactctaatgcccatcaggagattcactaggacattttaaaaggacgtctttaaggaaaaagttttgtttgtagatgttgcctctgattcctccctgcggctccagtccaggtcttggagccggccctcgaggggaatgtccgggactcgggtcggtacctttttggtctgggaatttccagtgtgcagaaaaaaaatccacaaatctaggcctcgctgccccctccctgcctcctctggccctcctcagtgcccacgcaacccggttcgaaagagaggatgaccgtattctgcattttagaaaacaggctcttagcttcccccgcccccgtcctcactagagtggagaactgaaagcgaacgctataaagggcgccagtgagaggggctggcctcctcttgccacgaggtcagacggcgagttcttagagaaaaaggctgcttagctgctgcttatcatgtaacctcaaaaggaaactgatcgtctttctcatgctgtcacgtacttgggttattatcgctgattacagctggaaacaattgatttgctcttacgtatttgtgtgacttgactcttcaaacacaaaggtatatttttattatctgatattttattaaaatatcttaaatggtaagattttttttttctttttctttcctattcccatagtcagattcttaactttggagtcactctcctatgtttgagtagccatacttgctttggggcaaaatattgggggatagttttttggagaaagaaaatctgggatgtttttgtagtttagtaatagcaagaatcatgtctgtttgctttaaaggcccaggaaggactgagatactaatggaggagatcgatagaatgggtgatgaagtatcataaatctaatgtaacactatcttctgtcagtgacctagaactatgatatcccgaggcagaagtctcccaggagatttgatgtgtgggtttagaggagtactttcccaccaaccgtaggcatgaaactatatgggaaaatatatcagagtaaattgaaatactttatagcatgccctcattcattcttacagctgtaaaattaaaatgtatgaatggccattttatgaatgaggaaaacctgaaatttgatgatttggctggacccccagattcatgataatctgtatatgttaaggggttttgtttgaataaaagcacatttctaaatagaatggattagagattctcttcattgggattagtgaattcgctgcagtggctgaaggtgctgtcccaaagaggatgacagttacgtaaattttaagcatttggtaatatatatttcctctatttaaatctgacatctaaagaaatatctggctgggtggaatatttttttgcttctgttagacagtaggttgtttagacaataaaaggagagaaaagtttatcctagtctcattcaccaccccgcataatccctgatggagcagggcatcagccacacagatcatctaaacaggcagataaccctgcctgtttatttatttggcctcagaatacggtgtatggtccaccacccctctccaccgtctttctaacatcatcctgctgaggccaaagacacagttgggcagggtacaggcgtggagcactgcggtggcagagtcagtctgagaggagttagcacatgacatcagtgcacagtgcagatgacggaaacatttggcagcatcctctccagtgtggaggtgatgaccgaggtcagcataatccagctgttcagatacagacttttcctcactgaggaagaggaggcaaacccttctctttcttgtcctgtaacagacaagacaagaaagctctcagagagcaaaacaaaccctttcagaagctacagagccatggaaagcattactgaggggaaagattttctaattgttctgagaccaataatgaattgctcctgaaaacaccattttcttttggctcatagctgacactgatctggaggcctcttgatttttttctcccaggttaacaggaagatctcgagggccctggctgaacttcaccttttggctttcttggcctgatgct

SEQ ID NO: 40693 - DNA, 5115 bp, Homo sapiens
taacacagaggtatttgtctatctaaacatatggaaacatagaaaagaaacagtaaaaatatggtattacagtcttacaggaccaccattgtacatggagttcattattgacttaaacatcattttgtggggtatggctgtatttactttggacctacccccaccagggtcttatgccacctactaatactgagtaacaatccaaactcatcgtgtcccccccttcgtcctaaaacccaaacattctgctctgtgatcccttgtgatctggagctggtggccctgttcacctggtcgtggctccaagccatggcctgactggggaccctttcatttctccccccctccaaaagagcgagacctgtgggttctgccctagcaatgctgcccagctctgctttctgtcaatttactttctcctttcccactgtatctgccccagtgcccagtcatttctctcctgggctactgcagtggatcctaatggcctctgggctcctcatcttctctcaactgcttgcagattaattttgcctacctaaaattcatgttttctcaatgtttattaaataaaattccagtgtctcagctgctggaggtgctccacccaaaggcaccaagttatcttttatatttaatgccatcttctcctcttgacaatcgtaaaaggggactatacactctaatatgaaccctctccttaattctttgctcttgttctttctgtaaatgctgtgggccccaatcccacccatcctttaggacctatcttaaatgccaccacccctgcaaagattttcctcctgacctcctttttcctctaccagacctgttgtttctccttttaggtggctcactgaactttgtatccctcgtgttatttaatcataatcggtttatttaaacatagcatgtgtgtacttaaccttatcattcccgcattttttgctagttggacttgaacaaatagttgtataaatccattggaaaaaagtattcaagataggaaaggccaaaattactgtgttagtttatcagatagtgtaaagctatgcagaattttaaaagttatatctacatatactacagcacctacatgtttgtgtattattttgctaagatggctttgttctagtattgaaggatacagaagtgtggcattactttttattcatggctgcacctaaaacattatttgcgtcccagcagataatttgagaacataaaaatgctccaacatctctttcagttcgggatgttgcctaaaaccgtcgacaaacgctatgtttgagaagggaggctacgctggggcgccggaggagacaggcccttaagaaccttccagagatgccttaactgggctaacagctcgccgcgccggggcaggcagaggggtgcggggcgcgctccttccaggacttgccagtccccaagaaccaggccaaccggttccctccactgactcccgcctccctctgcaggcccagccctgcgccgcgcgccctctccccgggcgcccaggcccggcgggggcctagagggcagggatggcccgggcgagggacggggtcccggaggcgggaggcgggaggcgggaggcgggaagcgggaggctggaagccgcgcgctgtcggggtttcccggtgaagggcaggcaaacaaccggtcggtctgggcggagccgggcgggcggggcgagggcggagggcggagggcgcattgcctcatcctgtacattttactggaaatcggacgcatccggaggaggggctgggaggcggcccgggcaccgccaatggccgggccgggcgccggggaggtcggcgagcgctgcggcccgttaaataccctggcagtcccgcgccgcgcccgtactggcccgcgccgtccgcccgccgacagctccctgagccagcccgggaggcagccgcgcgcagcgagccggtggcgcaggtgtcggggtcctcgagcgcccagcctgggagcatgattgtggacaagctgctggacgacagccgcggcggagaggggctgcgggacgcggcgggcggctgcggcctcatgaccagcccgctcaacctgagctacttctacggcgcgtcgccgcccgccgccgccccgggcgcctgcgacgccagctgctcggtcttgggcccctcggcgcccggctcgcccggctccgactcctccgacttctcctctgcctcgtcggtgtcctcctgcggcgccgtggagtcccggtcgagaggcggcgcccgcgccgagcgccagccaggtacccgccggccccgcaccgctgcgtactcggggcgcgcacgcctaggaggttgggagcgggactccccagatggagggtggcccctgcgccctccttagagctaggacgtacgcaccttagccatcaattaccactccccgccttgcccgggccgggcgcctgcctgacctacacgcccttcgccggcccgcggaaccggctccctcccgcgggcctcgggggggcttcagaaaccgctcggccgagctctgactgccgggcgagtgaccaggagatcgctcgctctctaagaagcagctttgttgagtcataattaataaactatgatgagatttggggtctgatgtaggtgtaattttcttcttgtgaatattttagtggaaagctgtagcagaggataagggtttgggaatagcgttaaaggtcatgacttatttctcagtttttatggaatttttcagtaaaaagacttgaccgtcaaagaaaaggaaactgctgttatcaaggtgaagccgggctgaaaaccaactcaagttatgcctttagtttggcgagtttcggaagtctgcccggaatttttgcggtcttgtttttgttgtgtgtgccttaaaaaaaatggataagccatatctagcagagaaagacgtaatgttatctttcatgggctgcgaattggtttcctttcttagtgaaccgagttgcataatttgggggaaaacaggatgcccctgtgggtaggctagaaaaacgcctcgataattgaacgttgagagtaattagcatgattttaaagaacgtctctttccggtgtttcccactcttagccactcctgttttggttgtcatttattttaaaaagtgatatctcattttcattttaagtcatttaaaatcatgcgaaaagcgatttaaaccactgcgtagcagatccagaaagaatatgtgtttaggaccttttcttacccacttggccttcatctggctgaaactgttctgctggtcccttggtttaccacacagccacaggggatttctgaaactgcatttttttctttctgtgacgttggattatgaactgctgtcattccagaaaaatgctgtgttagattctggcaattctggtatctcttgaaatccctaaacttaaaaataaagccaactaatgtttcacttaccctatcattgaactgtttatctcatgtatttatgatagatacagatgttcaaattatgcgttgtttcttgccccatcttatttttgtacacttgatggagcggctgaattattcatttcctgactttgtgaatttgtgttcaacacacatactaagaggttgtgacataatagtgatcagaagtggagtactgtacttgtataccaaatgctaaagtgtatttcaaagtttaaaagtgaaacaagcatatttcctttttacttagaagacctgtgtaagtaattccaaaaacagtcaatgaggggaaatcctgtgtgcatatgtagaaatgtgtttaagctcagtgaatttaagcagcttttttggcacagttgaattgaaggaaataataagacataaatctaagacgttgttaattgtcaggttttcgtacatagagatctttgaaagaagttgttttgtgccttcttaggtaagcggaattgatagactttaaaatttctatgtgaacataaaaccattggtttaaaaagctaaaagtgcatcatttatcacttgctccccaaagtttttccaaagtcaagaataattatagaactatgagagtcaggatggcaaaatctgtcatccattctcatgggtggttagggctgagaaaaaaatgtgatccactctcatgggtggttagagctgagagatagagaggcttaatttgggtttacctattggctctgaggatccttgaccaaatttttatgaactttaatttcttagggtacccagtggagaaaggtatcaggcaacttaggacctttgagcagagctcgggactcacaaggccattgattgaccagagcaagttggaaaggttttgcaatgtgctgcttggggactttatacattaggcaacagctatacttttgggattattaacgtttatgtctgtgaagatatttaaccaggaatatgttttgttttcttttgaacagttgagccccatatgggggttggcaggcagcagagaggcccctttcaaggtgttcgggtaaagaactcagtgaaggaactcctgttgcacatccgaagtcataaacagaaggcttctggccaagctgtggatgattttaaggtgacatctatttttctgttttgagtatagagttggggagaggggttagtctgtcagggttattatgatgacctaggtccagtcatcaagtaagtcacttgaaatttttcataagatgacaaagtccataggacagagaccatatttgtctggtctgttgtatcctccttagcccagtgccagacacctggtaggtgggcaagagaaactcaatgaataaataaatgaaggcaagttcagaggctcaactgaaatggaacattttaactagaaagggaaaaatcaaatggtcttattaatttcatcttgacctgcgttgagctaaggtgaaagtgaaaatgaggaagtcgcaagatagaataaaaattgatatagaaaatcaatattgatagaaaaaccatatcagagatttatggtaagctataaagggtggtagagataagcctacttactgatgtatattaagaggaagtcattttgtatacactaaattggaaacttttttctttatagacacaaggtgtgaacataga

SEQ ID NO: 40694 - DNA, 1928 bp, Homo sapiens
aatagtatattgaacacatacatctatcatgaaacttcatcaattataaacattttgccatttttgtttcctcttgcccccatattttgttctagaataagttaaagcccactccaagcattatagattgtcagtaagagtcgctaacagataagtaacttgtgtccccagtaaatagctttctaattattcttcctccaatcttcctgcttttcttaccaatcccaaaatttccactacttggcatactgttaaagaaacagagaaagtttttcaaaggctcaatgctgcctgttgaatcagatgcaaactcttgtcctggtttacaaagctatgttgaccttagcttgaccctgcctgtctaatctcatctcatttttccccagtgggctatcaggtgggtctcttcactgtatcagctgatgctctgtttattcctgtctcttgtcaagtcctcacctccccaaattctgtgcatcctagaaagccctgcttgggtgccactttctctattaagctttttccagctcttactgactgctcctttccctgacctcctgggattaaaacacaattcctctaactttcatatctggtattttctgtcatattccagacttaattattgcaatcaggaaagtgagctctgaatctgaattttctcttccttgcttccttttttcctttcttccaacccttctctctcctctctccttccttccttccttctctttctttcctttctttctgctcccctgtccccctccccctccccttcttccctccctctcccctcccctctctttgtcacactctatcatccaggctggagtgcagtgcatgatcatagctcactgcagctttgacctcccggggtcaagtgattctccctcctcagcctcctgagtagctgggactacaggtgcacactaccatgcccggctaatttattcttgttgtaaagatgggggtctcactatattgcccaggccagactcctggcctcaaccaatgctcccttttcagcctcccaaagtgctgagattacaggtgtgtgccactgcagcatttactttttaaatacaactttaaaatgtctgggtgagtggtatttttgaggacacgaagaaggtgagtggtgctggatagaatctagcattggaatcgtaggcagaattctaagatggtcctagggctatctttgcctcagatgttactcctgtgattctgttaggttacattgcaaaagtgattttgcaaaggtaaataaagtaattattaaccagctgaccttaagatagggaaactactcatctaatcacacgggccctttaaaagcggagtgttttctttggctggaggcagaagaggaaatcttagagattccaagcctgagaaggactcaacccacaattactggctttgaggatggagcaagggggcaatgagccaaggaatacaggtattttgtaaatatccaaacagaaaatggaatctcaggcctacatccacagggaattgacttctgccaacaacctgattaagcttagaagcagattcttgctcagagcctccagataagagcccagccctgctgacaccttgagtttggcgttgtgttacttcatgcagagtcaagccaaccccgcccagactctgacctgctgaactgtgagataacacatgggtggtgttctgagctgctaaatttaggggtaatttgttacacagcaatagaaagttaatacaatatataacacagggtttgagcttatagtgcaattttatgcatttcctgctattttaattaaggctccaaatcagcaagagaggttttccaataaatgggggcactggtcttaggatgtgtggtcattacacaggctagcagtgtctttagtttatgatatctcacttttgtccagcac

SEQ ID NO: 40695 - DNA, 1758 bp, Homo sapiens
ctcccgagtagctgggattacacgaccaccatgcccaggtaatttttgtatttttagcagtgatagggcttcaccatattggccaggctggtctcaaattcctggcctcaagtcatctgcctgcctcagcctcccaaagtgttgggattacaggcgttagccaccatgcccggctggaactttagaggtcttgggttcaacctcctgaaatcacctttgtctttctctttcaagtctttgcctggtttcatactgatagacaatataagccaatgctacacttctctactaagtcactaaaatttacaggggatgggcaaggacctttgatccgccctttgtctctctggagtgcaatgctccaacacttaccatcaccgacatcagagtttgactcaagttttgtttgtttttttgttttgccaagaatcacttgggtagaactcctgacacagtctcttttgtctgagaaacagtgttggcattgaagccagacacagcagtaaaaatttcctagttgtttgactttaagtatgtaattcaatctgtcaagcctttgtgttctcacctgtgaaatgttatcactgataacttgcacgaattgaataataatatatatgtaaaatatctggtatacaataaagacaataagttatatccctggtatacaataaagacaataagttatatactttgcttgggtaaataacatttttatgataatattaaaattattctctgtcactgattgtaacctttcaaagtaggacacccatgagactagattaaacagagaatgctgagaaggaaaaacaaatgtaatttagacaggcagttaaaggtgagcccattgaaagacagcaaccagagtcactctctttatagggagtgtcctgttggcactctggcaaaagcatgtgtgggcaaacaactaccttatttggcactgtcttcaacaggccaaactctaatgacaaggtttgcatctctggcaaacattttcaaaaagataagttctttaaaatatgcagacacaaattgttgtgttttacgcaaaataatttttagtaaaagtacatttttacttctttcgtttttttcacatgactctgcataggtccgtattattgtctccctagcactcttttctcaagcctaactttaacctttcctcccctgccctcgaatcctttccataacttgtccagtgccttctttgttctccccaaatcccaacttcccaccgtatgcatattttaatggaagggtatccagagttggtaactttacaccatcatgataacaatgtaacttatataaacctccttgctttacaaactgatttcataggcaagatttggttttctcctcctactaaccctgtgtggtaggttatctcacttctgagagtgaaaaggttgaggtcaggagaggtggcaaagcaaataatatcaggtcatggcacggttcatcttaccttttattatgcatctgctttatctatcatacaacattgtctcctttgcagagaaaaatcttgtattgaccagtggatattttaatctgcatttaaaaattatgattctaggtattgctttacttagggcagtactttgtagagactccaatgttgttgtatatatgactatatttggatggccagaaaagggaaattgtcttggtcgttaagaaactgctgagtatcaaaaaaaggagaaggaaatatattatttcatacagaaagagaacgtttaagtt

SEQ ID NO: 40696 - DNA, 2705 bp, Homo sapiens
tctcaggttcaagcaattctcctgcctcggcctcctgagtagctgggactataggcgcatgccaccacacctggctaattttttatttttagtagagacagggtttcaccatgttggccaggctggtctcaaactcctgacctcaggtgatccacccacctctgcctcccaaagagctgggattacaggcgtgagccactgcgcccgggggtttactcagttttaacattgtgccacattgctatattttgtgactagagatgatatgggccctcagggagaggaactgatgatagctgctggagtctgaacagggcttagtctgaggaaggaggaaaaccaacagagaacagagtcaaggacagcaaaggaggaagaagacgttttaaggagtatggcctggtcaaagtggtctggtcctacaatgcaataacttgaaatgtctccatattgtacaacaggtggattattggtgaccttagtgagatcagctgcagtgagatttcacttggctgaggagataaggaaacagagataagtgtggactaaaattttcagaattctggccaggcgcagtggctcacgcctataatcccagcactttgggagactgaggcggtcgaatcacgaggtcaggagttcgacaccagcctgaccattgtggtgaaaccaagtctctactaaaattacaaaaattagtcaggcatggtggtgcctgcctgtaatcccagctactcaggaggttgaggcaggagaatcacttgaacccaggaggcagaggttgcaatgagctaagatcgtgccactgcactccagcctgggtgacagagtgggactttgtctcaaaaaaggaaaaaaaaaaaagtaattttagaattctagctgagaagcaacagaaagtcttaaaagatgtcaaaagacagaattacaataaatttagtttaaaaattgaattggctttatttgcaattctagaatcagcaacacctcattctgagggttccaatttgctgagcagaggaggttggctttatgggcagaaaatggctgaagaaagtggaaatgaacaacaaaaaatagattggttgtttcaaagtgactttccttatagggttaaaacagaggggacttccttattacactgactcaggttgactggaatctcctaatttttagaaaatgagctcatttcaaagttcactttgattatgtggcacttagtacaagtgacctcattctggtttggtctggcctgccagggcctagtgcaggaggctagcccaaaacaatagcctcccataaactttaacaaaagggatacaggattcaggaattttaatttttttattttgtatttattcaataatgggttagatctgagtgtgtgtgtgtgtgtgtgtatatatataaataatatacgtatacgtatacgtataacatatgtatatgtatacatatatgtataacatatgtatatgtatacgtatatgtataatatatgtataacatatgtatatgtatacatatatgcataatatatgtataacatatgtatatgcacacatatatgtataacatatgtacatgcacacatatatgtataacatgtatatgcacacatatatgtataacgtatacgcacacatatatgtataacacatgtatatgcacacatatatgtataacatatgtatatacacacatgtataacatgtatatgcacacacatgcataacatgtatatgcacacacatatgtataacatgtatatgcacacaatatgtataacatatgtatacacacacatatatgtataacatatgtatatgcacacatatgtataacatatgtatacgcacacatatatgtataatatatgtataacatgtatatgcacacatatatgtatactatatgtataacacatgtatatgcatacatatgtataatatatgtataacacatgtatatgcatacatatgtatatgtataacacatgtatatgtatacatatgtataatatatgtataacacatgtatatgtatacatatatgtataatatatgtataacacatgtatatgtatacatatatgtataatatatgtatatgctaaggagagggaatggatgaaaatataggaggctagagggagtaacatggctcctgaaaatgtacaggaatggaagtagtagccttggacaggaagaaagaagagacttcactgtcattgtaacagagaggaagaagcagtccctggtgtggatgcaaaatgtttaggcaggggcatgggtaggaatgtgaggacctgtttgcctcatggcctctaattcactgtaaagtggaggtaagatcatttgcagggtttcttagtaaagccattgccctctgaggtctctggaaccattgagatagaatgaggccacagctgagcacaccctcatttctcactccctcctgacacacagaagaggggacaggtgctatgtctgctgggaactgaggtgcgggcagtatgggagacagttggttccctctgtgtggctttctccatctcacatcactccttacctccactcatgcattcgcctgcctcctgcagactgcagagcccttctgttttctgtctgttcattgttccttctttccttccattgtgtcagaatctccgcctttgattggccaccactgctgctgtccttaag

SEQ ID NO: 40697 - DNA, 2818 bp, Homo sapiens
ggcaataagtattgaatacagtctttcttgcctgtttagctctatgctgtgcaatttttctttgatatatagaaacttgcacagtattttacctaaaccgactccaaatgagtttgaaaagccattaacccagaacacaggataactttgtcatggtacactgttatttggactaattttttggggggattctgacatataaaacattttgcataatatctcctttaataagtccaaaaccaaaaccagaatgcttctcatctttctttgtcatgagatataccaggtattcaaaaatacacaattctatacacaaacacacacacacacacacacacacatacacttagtagctattttttttgtaggcctactttatgctaggcactgtgtactttctatacatagtactttataaacatttcttcatttaattcttatggcatctctatgattagggctcattatttattttacagatgaggaagctggggctcagagaggttaagtaatcaccttaaatcacagctggtacacgtcagaagtgtgatattaattcagtcactgagtctataaatcataaaatcgtgcttttaatggttgttttccaaggattcactgggctaccttgttaggattctggcccagagagaaatctgtatttccaaagggattaaggatgagcttctgtcaagttttgcttctgtcttacctcctggaggcattgtactatttccctgagtaaagattttactatttcttggaggacttcttcccaaagtatgtcccccataccccttcccgcccctgttttctctgtatccatgtatcccacccttgttttctctgtatgctttgtggcctggtccagtctcttggagcagccattctgatcttgctttcagggttgctctgacaagaacagctggggatctcccctggtgcttccagcattcagtatgtgcttcctcagtagaccttgaagatggtagcaatttcctctctgactcatgcataggaggagattccaacattttctctgtcattctctcaatcatctgtcctctcagcagcacttgggtgatgactagggctcaaataatgcactatgatatcaccagctcacaactgatgacatcacaaggcacaataataacaaaagcatcaggaagcaggcagagcaagggtttcgatgtatttcaacatatctgcaatgccagagaaaccaatccctgtttaaaaacctaagtctttctagcttccaagttttttctctgagatggaaggaatctttctagtattgactaccttcattaaatacttgttatttctgagtctatgcttaaaagtatcctagacagaatctcagaaccacttcactgcctagaaaaaccatctctgggactgtgaatggctctgtgctccaggcaggtgacaagtcacatttctgctatagagcccacctgtcatatagggtgctgtaaggttttattttgtggacctgtagaaagcactctgtgggtttatgaacctgggccgcttgaattcaggggagcaatgatgagggcactaaaattctctgcttccaacttttctcctttcttctgttggagtggctccctctcactaggcctccagcacatgcagcccttgccttggatgaatctaagaattttacttctatttattactgataccagggtttagattattttcagtgttaatgaggcattttatggaaatcaacatatattgtcatagacaagagaagttaaaattatttaaaataatacttttctctagctataagaacttcgtggaaaatttggaaattggaaaatacagaaataaaaaagttatgcacaatcccattaacccagaagcattcattgctaacagttttttttaatctttcaatcttttattctgaagctcttttgttttcaaacaaaaagacatggcccctaagccctaaaacttacaacttcaagggcaacacaaatgagaaaaattaagacaaaatgagattgaaaacccaataacatatgaaatattggtgataatagaacttcaatccttctgtgagcatatctactcaatttttattttaaaatgagaaaattctaaaaatccatatacagtcaatttggaaaacagatgagtctgtcaagctctcagtggacaagctacagctaattagtggctacaaaacaattaatggataagcataatgaataagtttggggttgattcagaaaagaaatatgaggtgacttagtaaacactgcatttttgatatgctccctggcttgtaaaaatgccattgagacacatattgcctggaatcagtcacatcctgtcttgtttaccacttattaagtatccgtaggcaagttacttaacctctctaatgttttctcgtctataaagtagggaaaacaggttgttgtgactattaattgagataattcctctaacatgtttaatgtagtccctgatgtgtgacaagtgctcaagaaatgctgagtatgattagaggtagtggaaggtagcgggtaggacaagctctggtcagactgccttgccactcttgtggcattttttctactgggttgtaagactggatcatcaacaatgatgtgaatttgaaaatgaaccagttttgtctttgaattgctttaaggtaaattattaatcaaagaaagcactcacaaaatgcttctgggaagtccagatttttcttttctttctttcttttttcttttttttttttgagatggaatctgtgttgctcagactggagtacagtggtgtgatc

SEQ ID NO: 40698 - DNA, 1147 bp, Homo sapiens
gcgcctggcctactttttattatttgccatttctcctattaggaggtggggtctatttctcctccgcttgaatctgagtgggctggtaattgcttggaccagttgggtgcagtagaagtaacactaggtgacctctgacactgggtcacaagaggccatgaagcatatttcttgttcactggaaagcttgttcttggcacctggaaccatcatggaagacagctgattaccctgagactgctgttgaggccacatgtaggcactctgagtgacagcctcagctgaagttgcccttcacccaccccaggccaagtgccagctgtgtgagtaagaaaagtgaatattgagagtgcattcttctgtccctgctattccagacataccctttgagtcacttcacagccttcagagtcatcatagctgagaccccagaggtcactgggcagagacaaattatctctgtcctgttaaaattcctgaccactagaatgaaggaacataatagtatgtttattgttttatgccactatgcttcaggcggcttgttatgcagttagataaccaaaataataatgcctacacacaggcaattgagactttactgactatcaccgtttctccatgtagtcacagccatatatatctgcaaatttcaataaatttgatgggcatagaaatgcgtacagagtcaccactgctctcacttggacttgagcttggcttaggatctttgtaaactagatgccagacttagcagataaattgttttaaagagcaaagtgtctctaggctcttcacttggaggaagattattgccccccacagatgggttcatccttcacagttagatttcctctttctgtggctgaacgtatcagccacccatttaactggaaagacttgctccagcctaattctattctattcatttacttctgaaaagcaaaccaaatagcccttcaagacttctttcccttggcacggactatttgttttaaaatgtgctctgaggcagtctgtatgttcttattaattgtaattaaattaattaattattttagaaacaaggtcttgctcagttgcccaggctggagtccagtagtgactgtggctcactgcagcttcaaacacctgggctcaaatgatc

SEQ ID NO: 40699 - DNA, 1976 bp, Homo sapiens
agccatactgacatttatctatggtgatcttaagcatttttatgaatttatgttttggggaagacatcattggagtaaattatgcacctctgctctttagctgtcatctatagctgattgcttctcttctggtttgtatgacctgttccaaaggcagttcatgttggagatggaagaacagagtaaaacccacaattggcctccctttaactagtcaaactagttaacccagttacctttacagtgtgggtgacaatgttttatgatatttgaaggatctaaggaaacaataaatatgataatgggtgacattttaatggaaacctattgtttacacacactttcaccatacattatttaatttttataaagaataaaagaattatcttgaaagtagaatctgacttcagttgtgttatgcaatgctggaattagcagaaaagaaggcttagagttgtccagttacaaacttcagatacaaagggtttctgacatagtagaaattctccatctcaacttaggaaaggaaaaaacaaacacatggacaaacaaatagggacaaaaactgaaaaatgaggaagaaattccttatgctgaagactgaatgtcaggaggaagtttcagcatttcttcccccatttgaatttactctttggaatgattcttaaatatttaagcctgatagctagaaactgaaaaatcgacactcccaagtcatgtgtagatttttaagtagtgactcttctcctttcaaggttgatgatgatgatgatgaagttaatgtttactgagacttaccatggatcacatactgtgctgacaggtttacaggaaatatgccataatctttccaataacctgattaaacaaaccctactatctccattttcaaacaagggaaaatgaagcgtagagaggttaatcgacagctagtgagtgggtgaactgactggatatcagattaactgactccaaagtctgcatatttaatgattatactttactacagggcagacattaaggatattgtagcagagttgtctgaacaaaaatgtcgctattttgcaatacattctaatcaggtgagctgctcggtcaaatttccgacagatcactattcatgttagtggcctttgtgaagcagcctgcaacacctcgtgtcatgcaagccattcggctgagttcacttctccactagaccgctgagaaagctcacggtgcctccacgaggcagtcaacatggctcgaagtgaggaggctgagcccactcagcagcagccctgtcatctcaatgtttggctttgttgctattactggtcatgtctattttatggatgaaaaacctgaggttcacagagattttatcaaatgtttttattaagttgttatttttgttagagaccagatgacaacattttggatttgaagaaatttttgttaaacataaacagcatgaaaaataaaggtctcaagacctcccttgaccttccagctactctggaaactcaataaacactagaacattaatcaatctagataatttctttaagagtaagaagctttctatatgtggctctattctagaaacactgggttctaatagagaagagatattcctctggagagttttttttttttctcttctcagaatggtggcttcctttttcttgccttttgagaaaatgtgtgttctgtcagcagctatgagcacagatctgggtgccgatcaagactttgacgtgaggcctgagaaaacgcagaactgaggtaaatagttccaggaaacactatacagcctgtcacgatgttctgcggtatttcaaatgttttagaaaaaggtgaacttgaggtgaatatgaaaaagataaaggttcattttagtctgggaaacagaaaattctggaaagcaaaaactgaatttttattttcagtgttatataagcatagctttttgctttcattaaaaagaggaaaca

SEQ ID NO: 40700 - DNA, 2168 bp, Homo sapiens
tgctaagtggttacaaaacaatcctatgttaaaataattttctaaattaagatactcaaaagtgtaacctgaaagtattgtagatgataagataagcctacatatttaagaagaaagtgagtgctccacatttagtggtaaaactcaaggaaaacatacacaatcctgggttgaaatgaaaaaaacaaacacaccccttagaaaccaaaacaaagttaggctgacttcaatgtttgggatgtgattacacaatcaattcactgtgtcataattggaagtgcgaaaacctgtttaataaaaggaaccctcacctccctaggaaccctggggagggagagaacatgcaaagtcatttctgtttttactagataggacttgtgtgatttggggatagccactttgcgtctgtatatcacagaaggccttgatttattattttatctgtgtgctttttttagtctgtggtattaaaaatgataacctcttaaacatagggccatagttcaattttctaatcagtgcttctagctcagaagtaatattactttagaaaactcctcaaataaacattgccagagatccacagtgctccctttatgctgctgaactgaagacataggtcactcatctgcaaaagcaacatgggaaatgtcattgaggtattatctctagaatctaggcttttttattcatctaaatgacgttgaattgaattcatttttcaatttggatgattcatcttgttaattttcactacattttcaattggtagttttttggttggcttttatgaactcgacaagggtattgctttttcaatttcctgtaatttttagacatatctaagcaagcagtaaatttggtgactcaacttgattccactatgttataaatattccttgagtgttcataataataataaagaatctattgcttctctcttcaaagcttgattactctaaaaggagaagttagcttaattttaggtactctgggtctttttgtattaagaacctgtctttgaataaaattactgttgctagattatttcagtgaggctactcttggggaactcaaccaaaggatcaatgtttttcaccaacctgagctaaaattgtattaacagttagaggaagatcgatagtgggaagctctgtaatatagagtgttgaagttgaactttgaacctaggtctgattccaaaaatccaggctttatactactgtctcttacataaaatttctgatgtggaaaacaaaataatttttatcattgagtcctattagggtgcaataattcccgtcaagcccctgggcaagtaaataaataagaactccttattatagttaagtgaaattttcacagggcctgtagcccgtttgttttggctgatttctcccttttggaatgggtgtattacccaatgcctttttatcttggaagtaactaacttgtttttgattttacaggctcgtaggcagaagggacttgacttgtctcagatgagactttggactgtggacttctttttttttttttcaaagaccctttcaaagccttgaggtcttaggttgtcactaatggattgacatatttgaatgttgacaataatttcaaggtaggagagttccaggtgacaaggcttgttatcacagtaaatattttgaagttgggaaagatatacagccataccggttttattgtgcttcactttattgtgtatttttacaaattgaaaattgatgccatttttttgaaagcatatgctcactttgtgtctgtgtgtctacaattttttaaagcaataacttattttaaattacgtacattaaaatgtacataaattaacttatgtacattttttagacataatgctattgaatgcttaatagactacagtatagtgtacacataacttttatatgcactccaaaataaaaaaaagtgtgtgactcacttcattgtgatatttgctttactttgatgacctggaacagaacctgcaatatctgtgaggtaggcccattgtaccttaagaatttattaaatagatgacaatcattaagtgtatctagcatatgagatacaaatgggtagttcatataaaaataaatctaaaaatataaaataatttgcttaatcagaaaactattaagatgctggggttt

SEQ ID NO: 40701 - DNA, 1506 bp, Homo sapiens
ataaaatcaggtacatgttatagcagacacaaatattagtaattaatcaaattttgatttattttctattataacaagaagtctagaggtaagtctttgctggcattagttcagcagcttgatgctctttgggccaaggtctttatgattctcttgcctttatgtttgcaagatgatggctacagctacatttctagcccttctacctgtatctcagacaggataaaggaaaaaggagaaaaaaaaggtgtgtgctagctgagtcttttaagaatttttccagaagccctactcaatgacttctgctcatattttctgaaccggaactctatgtcatgtggctactgctatatgtaaggaaacctgggtaacataagttttatctgtaaacattactgtgccctctgaaatgtggactctgttaataaaataaaaagaaaagaaggatattggtttggaagctagcagtatataccacaactacatcccaagagctaaaaataaaaagtgaattgacagatccttcctcagtgggtagattctattttgcttcatacagcaaaatagaagcttgggaacttcctgttccaaagagatgtttaaagagcatgcctcaaaaggtaaccttacttaaggagactggggaagacaacatattttagacactggagtttacccagagcacagttactattttaattcgtttgcaacctgaggaaatttttagcagttggcagctgtgctgcttcaagactgcgttttggctctcctgttgattactgctcctggtttcctgctgttggagcacactgttttctttcactcagagacatcttgttcttttctgagtcactacaccattactcatcttgagttggttccttgttgggtttcataaggttatccagagagatgcagggacatgaaaaacactgaacttgggaagatcaagtgtagggtgttaagagatatgagctgtttgtgcttttttccagggtcacactgagcaagtcaggacttttaaatttgtaaatcaatgagtagcccctccactttctgctataagatgaaaaggaaattcacctgttccttgagaaaactagggctctagataactgtggttgtaatttataccaagagtaacatggagggtggaattgaagccaggtgcactcaggtgggcattatagtaatccaagtgaaagattatgagagaaaataggagattcattggtgggagctcaaccatggcggcaagcagcatattgattcttcagagagctaaaaacagaactaccatttcacccagcaatcccatttctgggtatatacccagaggaatataaattattctaccgtaaagacacatgcatgcaaatgttcactgcagcactattcacaatagcagagacatggaatcaatctaaatgtccatcagtgacagactggataaataaaatgtggtacatgtacaccatgaaatactattcagccataaaaaaagaa

SEQ ID NO: 40702 - DNA, 723 bp, Homo sapiens
cactgtatgggagtgctgggctagatatgaagacatgttcctcctaaccccgagagtgtattctctaggtcgcttatttcatgttttgatacttcacactggtggataagtctctttaagtaacctgagtttggttttttcatacctcccctgataatacctaaaatgtccttcaactcccagcttgttgaggtgtatccagggaatgtttcacatgcgctcagtgagtcatgttcagttaccatgaagcagcctctgtttgtttcttgtcctgttgctcttttcctgtgttgtgagtcagtagaaaaaaaaattttcccttttaaataacttttagtcagtatggcttcaacccagagccactttgccccaaagtcttgtagacttgctagtgaaaatggtacttttggttattatttatggcactaaaccatctacctccccacctctcttgctgaacatgcagtcatgagttcatcaagaggctaaatcaggagacctcaccgtgcatttctgagtccactctcccttagctaaagaaggctttgtgtttgggttgacagctttgtgcccactgacctctttatttacaatgaaatgacatccagggagttccttaatttttcttgcaaatgggacttggacatgtccctttaatttactagatagatctgactcctgtgatgttagacttgagctcaaaccatgcttgtattgagctaa

SEQ ID NO: 40703 - DNA, 577 bp, Homo sapiens
cttctttttcttctttaccttttttattgagcatgttaaagagccagggccctctgaggaagaaggattatttcttgtctttcttgttgtatgtggaaagcaggcaagggagggctgtcccctgaggcacagcagcctctttctaacccagtgaatgaaccacagggcaaactagagtttgtctgcttacccaatcatctcttacttagggagtaagaagcctttttgtttgtttttcatatctcttggtctaagctgcattttctagttcagttttgatcaaagcattatactgggggagaaggaaacatttgtcaagctattactaaggggcttatattatctcttattttgctattaactgttgtttgtgtgatactttggcagggagcccagaatgaacagagtaaatggattctgataccaaaaccctatcctgaactctaacaactttcacagttacaagaaaaacaaacatatttcttttgacctactattcataaacgtcatgtcagatgcataaatattatgcctctgtggtaacaatgaggggtattctggcattcctaggagacaa

SEQ ID NO: 40704 - DNA, 1118 bp, Homo sapiens
aaaatgagccacggtcctctttgactaagatttaatgttaagacaatattgacattattgtggcttccagactcacacaagatagaaaaaaaatggatttataaagaaaagtttgttggattttattaataaatgtaacagtaaaataacctatgctttttgggggagttttcaatgattatggaagatacaaaaagcaccaaaaaacctagagtgcacagaacatgaacaatcaagaaaattcccttattatgtaccaaaatagaattccccacatatgattggtatttccctcaacttctggaaagcaaaaaatgaatgggaggacattaagctgacagaaggcagaaggtggaaaaagggtaaatagtattcacgttacacattaattcaattactcattcctttgacagagattttaaaataatctaaataaacaagggttgcgtgcaagaagtctatttgaattagattctcatggatgtaaaaacaaaacacgaccacaaagggaagcaggcagggctgaaagacagcacagaggctactagcttcataacagaatagtcagacttagggtttccatattctaccaaaaaataaatgagaaatcttctttttgcatctacttctcccatcaaaacctttccattgctttgttttatgtcaccttgtttttacttgtatatattcaccttttgttacatcctcatatttctgtggtatctatggagtcctgtttcagaggattcacttgaaccagctttgatttgcatgtaactacctattgccatagttccatggaaaaccactaggagagtgttattattccaaagctggattacttccataaataatctaatgagagcttcatttttttctgcctatgaaagccagttgagttccattccatttatggaaaaaaggcttttctatttctattcaattaagcaaatggctgtcttttggcaaggaaagaagaaaagcattaatcatttccagttcaccatatcaggatgtttactcacaaaagacaaagattcaattatatctttcttattatgacctccaggtatttttctcaatgtgacagttctataactcttcagaagaggttattt

SEQ ID NO: 40705 - DNA, 3866 bp, Homo sapiens
atctactgatttctttcaaggtttacagaaagtcagggccaggtcttagtaagttcgctggagcttatgaggagcctgcttctttgccacagtaataaatgttcattacctaaaagcagaaaggaaggcatctccttctttatcagcttcttggttcctggatttgctagcattagagcaggaaggaagcagctgcccagattctagtctgaaggcgtgctggaaaaataggtctttcttatttctttaaatgaaagagaaagattccctggtcagtaggcaaaaaattgtagctgcctttagacttattcacaccagtaaagaaaatggtccacaaatatcttccagtttgttcatgtttactctgtgcgtgtgtgtgtgtgtgtgtgtgtgtgcatgtatgtgtatctgagtttattttcatatcatagtcatcaatatatttttggaaaactagtcttgcaagatgatttctgaaaactcctctggtcttacagcatttctcttcttgaagagtcataatacctactaacataataaaggtactggagagtctcaaagtaaagaaacacttgaacttgatttgacccagaatttccctagcttcatttgaccatgaagcactttttctcataatgattaataatatttcagttctgtaaacatatttaagaaatgctgaattagatgatttttccgaagaaattcgaatgaacataatactctaatgacagaggaatgtaaaaatataggcacctgccagtttcaatgtctctgccggcttctttaagcttagcttagtcaattccacttcccaaagcctagatctgctaaagtattattaggcccacaaaccccgtaaaattctttctatgcaagtagcagctgataaaggggctcgctaaggttttttatttttattttttaatcttaactagagtgttccttttcctgtaatacgctgccaagccagttctgttaggcgagtcaattaaattacttcctgtctcttctatcgtcttctaccatctgatactcagtgacgttgggaccaaaaaatgtagttttttctaaaaacatacgctcatcccagggaaaaaaatagcaatgaagaaaaaatgttcctcagctatctgaggattccagtccttggtggtacttgcaaacagcaacaagctacatttaacagcacagatccgtttggtgtcttacattactctgtgaatagaaatttgggctattttcctctaagacaacaggaaaaggtctgaatttctttgacctttgcttgacggtgaaaaaaaaaaaagtaaagaaaagcacacagttattaattaacttctgtgaaagatactttatttgattaatggttcacagctaaatttaaattaggggagatatgctgaatgactacatgtttacccagattattaccaggtatgctgccaggaattttattaacctgtaggctacttatgatctctcttccctctacccactccacaaacaaacaccaaagaactggtctaccagagtcagactgaaatcttgactgaggacacaatgtaaataactattagtgtgtttgaaattaagacaatggatatcttttccaggtcatggtgcacacatggatttttaactttcttaacagagcacataacacaacaatgatttggagttgtctggattaaatcagatggcaaaacctggtgatcaacataataaaaattccctttcccccttctttgtcatttcagacaaaactcttgtgtggatatcagctagaagagggtaactactgtcttaaaagagtatttcttttaaatctttttagcgtagaaatgtcataatacacagaagtagagagactagtatgatgagctttcatacactaatcaatctgttaaagagctaacaacattttgcggatcttgctctctctcttcattcctccttttttttctcttgagtatttcaagcaaatcccagaaatcatgtcattttgcagcatgcatctctaactggtgagccttttctatttcataacaagcatgccattgctcaatctgaccattgaaaataattcctgaattttgagtctatataaatctcctctattttcccccaacttttaccctgacccatctcttgatcacttctagcccctcaaagactctcgtttctaggaataagtagatccacgaagtggagggcatttttgccttcaatccaaagcatcaacttaaagtcatcacatcacttccaaatttccctaactctgaactctgctgctactactttagggcatagtttcaatatccatggattgaaagcaaggccaagttattttggtgacaagccagagatgaaattctagaatgcattccacctagagtctgcttcccaagcccttcaggaggcacacagcaggaagtggacttagctattggttacaaagcaggatttcctcatagggagtaaagtgttttcttttcataaatataacctatttatttatattttcaagtaatctattgcagccttagttgtagtaggtcactagttcatgccttcaataaactgtcatttagtgcttactgtgtgtgaggcattgcactagtaaagaaagaggatataaaacaaaaatcactgcatagaaaataaagtgcagtgggaatttggaaacaagctgttttttacttgagttcatgatggtcaaaaggcgcatttgacttgggccttaaaagacttgtagaatttgaacaattagagaggaagaaaagccattgtggggggaggaaagagagagcaaggcacaaaggtggcaaaagtgaagcgagctgagcaaataataaggagatcagtctggtgaaaatgacactatcttcaggacaaacatcgtggcttatcgtgaccagctgtgcagttaggtgtagatattatgtaatcacccagtaaggagagattccagtaactgctatcagccactgctgccaggaactactaatcaggcagcatgtctagaatgttaagacgatgattattaatcagtggccaaccaagaaaactgatgcatggcagaggcatccagtccaatgtgatataataattaatccaactggataatattttacctccgaatccaatctagtggttgggtcaacaggcaaatactctgttactatgcatgtgagaagaaaaagaactttttagcattctcaggaggcttgcgaagctcaggccccactaagtgaagcctcttttgttgtggggctggatcctccttagatcttcatagaacaacctcacatgcttttttaattttctttctaagggtcaagacactaaaactatgttgttaatacagatatagcaaaatcttcctgaccccaaccccaagcttgttattgctgtcatccttcagctaaagaatggactcaaattggtggtgacattactgatttaggtttgctctgctgtgctcaacactgagattaaatgttctggatcagagtataactttatatcagactagtccataccttagtccaggccatgtgccttatgaagcctgagaaaaagtgtgttctcacatggacacagggaggggaacatcacacatggaggcctctcagggggttgggggcaaggggagcgggggtattatgtaacaaacctgcatgttctgcacatgtatcccagaacttaaagaaaaataaaaaacaaaacaataaaaaagtgtgctctcttattcttcaacatgaactagaaatgcatttttttttttttttgctaatatcttatcctgtgtttattatgtgctaggctctgtgtctggtgcaacataagcattagctaattta

SEQ ID NO: 40706 - DNA, 1887 bp, Homo sapiens
aatcacatgtctggctgggtgcagtggcccatgcctgtaattccagcactttgggaggttaaagtgggaggattgcttgggcccaggagtttgagaccagcctgagcaacatggtgaaactccacttctacaataaaaatgaaaatgaaaattagccagatgtggtggttcgcccctatagtcccacctactctggaggcagatgtgggaggattgcttgagccccactgtgatgagccatgatagcaacactgccctctaccctgggcaacagagtgagaccccatctcagaaaaaatcatttgcctgttataacccattgttattaaacaatgaagttaaaaaaagaaatatttacatgggggatggtatttaaagcataattatttcttttctaatatcacttgctgacttcttgtaaagtctggagggctaagcttcccctagactattattttcacttctgtgctgcttctacctgctttggactttcagatcttgcctctggtgtcctctctgctctatacttgatggctgaactctgcttccggagtctgctttttggtgctctccaaagactgaacaattacacagctcttgctcttcctgcttcaggctgcttcagaaatgtactccacccatcccacttgacccctgggacacagattccagcataagaatgtgcctgtgccagcctgtcccaggaggcaggtgcactgctcttaggagttatatgatgaaaatatgtatgtttctgtggaagtattgctcattagcaaatcaaagccccagcaaaattggttactgtaggagataatgttcccacaaaatcacttcccacttttccatgctgagtcacgtcctggtttcattttctcaagcaggtaacaactcctgtcaatgacacagaaaatttttttcttaaatcactgattggagagttttatacacttgaagacaagttacgttttaaagctcagtcatgggagaagaaggaagccaggagttgatgggaataaacgtttccactcacctcaaaccttcacagcactgccactggttcatgtgactttggatgaatgcccaggctttcattctgtcatgtgtaaaagggaattgtgatgccaaccttacctgttgtgagaaacccacgtgttaatggttcaaagggctattagagctgattgtccttagtaaaccttcttcaattcgacctcattttactcccagaaagtatctcacctttttcctgacagagaagctcatcctatgaaagggaaatgtttaagaaaatataaccatttagtatgaattgtaatctccaactcaaaatgtttctttactgttagccttcctctgctcttgtgtgatgcttaggccagcctgctgctaccttgtctcggattctgggaggtataatatttttgaaagactatcctatggttttttttttttccccatggcactttctcctctttgtctcttacttgcctccatataaataactagcccatatgtattgcctcaggagagggaaaaagctttgttggggcttttgtttcttcatgagggcttagaacaggagtgagaccaagacagaagcggcttggaaactagggaggaaaacttttcacccatggcctcccccaccaggaaggattccttgggctatcagaataagaaataaatgagaaaaggcaaggaagcttgggggggttcctggaaaaggtcctgtgccaagctggaggctttgacaatagctctagatagcttgggggatctgagaggagagacagcctatacctcatttctcttcagagcagctggtgagagaagggaaaacagctctgccatgtggctctaaccagatgggatgttagacggctc

SEQ ID NO: 40707 - DNA, 919 bp, Homo sapiens
gtattaggaaaattatcttcaggagatgttgactcacctatcttcccttacccatgatctacacagattaaaatgcacccacagtcatatacgttatcaacatgtaaggtagttttacagtgtaatagtactatctcagaattgcaaggaccacaaataatttttaaaagttcatgtcaggaactctgagagtttgagatcttaccctgcttataagctgaagagtgagcttgctatagattcatgaataccataagaataaatgagactcctgagtcagatacttggttatttatggcacaacaggcagcataagatttatgtttgcattggttcccctctccccatagatctcatggggaatcaccaggagacagtcccaggtggatgctgtgtttgcaatgtgtttgtgtcacagctgagaaatcctaatctgtaaaagggttacaagcaaacctgaccaacctttgcccagagggagctctcgctgtgttttcttatttgtattatgttggtcggcaaacaaatctgccctttgcccaggagggtgacactctttctatcatttattgaaaaaatgtcttgaaaatacattttttgaaaagacagtctggaataagagctgtcatcaactctgctcacaaaacatgaatacacacataagagagacataaaaagctgtttcccaacaacgtattatttcctataatccatgctctctcatttgacccttatacaaattctgtgagattaatagggtaggtcttatagattttccattttgcagatttcgctacctataaaatggttctgttggctaaataagactaatatagcttccatagcctgaaaatagtttagctgatgaaatatataggtatataagaaaaatcccaaatatacaaattgaggtttaaag

SEQ ID NO: 40708 - DNA, 1637 bp, Homo sapiens
actcggatatatatgtcatagaacaaacgggaattcagtatgaaagattaaaatggacttaattcaatgtctaagatattacctttattatgaattatcccttttaagatgtttattcataccaacatctgtaataatagtcgtgagcagaaatgatgcaagcaatatatttttctcatggacagccatatttcaggtcagtcctaaaataaacttactatcaaaatttttagctaaatattatctttactgggggatgaggtagggttatcatataaaatacaaatggccacaaatttgaatttcagatacataataaatgttttttagtgtagatatgctctaaatatggtatgggacatacttatactaaaatatctattagttgtttatctgaaattcaaatttaactggaggaatacttattttatcatgattatttctgtcctaatcggcaacctaggcgtgaggggaaaccgtcgtttgaagaaggtgtctgctgaagtctcaaatagaaaagcagagggacacacttgttaaggcagctctggtaaggtttcctctatctttccccagtttaccaaacgaagtggaagtcattgactagggccaaaaaaaaaaaaaaaatctcctcaccactgtcccagctcatttatgaagacattttcttttcgcctggaactgaaaaaataaatcaaagccccttggagcctgatttattagttttcaccgagtgtcatgcagccactagatggcagtagcagcccatcataccccgccccctccctggcgtcctggagccaattttctgtaccttgtcctctttctcttcgcaggtttcagcttgtcacttttcttctccctctttgttttctatttttacttttattcgaatgccagaaaaaccagctggttgaagaagtcgtgcggtgctccacacgtttgtcacagagggtgctgtgactgaaaagcctaactgattttctaggctgccggagctggatatcaggcaccagggcacaaggacacttgcactggaagctgtggctgggtagataaggacaaagagtgtgatcatgctttgctaagtccaggacacaagtctgattctcctgcatgtgagaatctctctcagctgcagctaggtgctaatccgtgaacaagcagctcatgggggacttcccaaaggttgtggagttggaattttggtgttccttttcaagacatgaattttgttttcaggaaaaaaaaaaaacaagaaaacgaaaaaccacattgagttacaaagctattcacatggaggtatcaggaattgatcttcagtttctaaagtcctccttagagatttttaaagttggtaagtgagagaagaactttacattttgtaaaaatctattttattaaaaagaggatctcttaaattcttactccgaaaaagtagaggaatggagaatactgtgaagcaaacgggttaaatgaattcaaatcttgctctcaccaagggcatggcatccatacggcgaaggcagtcctacccttccctcgctgttccctttcccttctgcccgccccagccactgcagttgtgcagaagaccttgctatcgatattgactggtacccttgttccagaattca

SEQ ID NO: 40709 - DNA, 588 bp, Homo sapiens
cattattaattgttttatatttattaactcaacaggaatgatctgattgaccattcaagagtacagttatttcaaaaagtctgtccttcaaagggcagccttctgctccaaatgaagtacagagcaattgatcggatatccccaacagatgattctgcttgtttaatactagtctaatcttaaatattcacgttaatatttatccaaggagtaggcaggctttactgacaacttttactctcattgcattccttatcacctcatgggaacatctgccagaaaatgaaatcttcttttgtttgttttaaacttttacctctgcagccaacacttagttgtaggttggctgcggttatacttgtggacttaattgcttctcatggtaagttgtactttaggggtgatgcaatagttacagatcataggaaccagtcctctgatatcctataaaatagttaagttttcaaaggggtaaaaaatatgttctgttctcccttcttaaaattgtgtttctttgtgatctgacaccactttttgattagtagacacataaatgtctattataactttatcagattgaattttatt

SEQ ID NO: 40710 - DNA, 1060 bp, Homo sapiens
gggtaaaaagtaatgccactttagggagtactttagcttcctattgctgctataacaaattaccacaatataagggcttaacaaaacacaaatttgttctcttactgttctggaggtcagaactaagagaacagtttctcttggctaaactcaaggtagtggcagaactgccttaactggttctacgtgaaaaccccttttcttgcctcttccagctctcaggggctgcctacattctttgttttgtgacctcttcttccaacagttgcatcacttcaacctttgctactatgatttcatttccctctctgaatctgattatattgggcctgtgcagataatccagaataattcccccatctcacattgcttaacttaatcacatcatccaagtctctttttccatacagggtaagatattaactggttctgaattctagtatatagatcggtttggtgggccattatttcacctaacacagacagatatatatctttgtagcaattatcaattaaaatcctataattttaattatctaatacctataatttttattagatacatattagtttgatatctgatgaaaaatttattgatctgataaatgatataggtaaattttgggtatatcagttaaaaaaatcagaactgaattaggccattcagaaagaagaagtggagaaagagaacctctgtgcattctcatatttctcatgaaaatgaactgctaatccacttaaaaaataggagtctgaaaattgttaacgccgtagtgtaaaattttgttaatgaaacagtagttgactttaaagtagtccagtataacagcttttgaacttgctgactgcttattgatttcttagcttgtttgctaatattctgctcacaagttcagcatccaaagcttaagtgtgatgactacatcatattccaaaacttgataataatttcaaagggagaaagaagcaggtgagctttttatcacaatatggtaatattttgacactactgtctgcgttgaagccagaggactggaaagggcataccctcgaagcttca

SEQ ID NO: 40711 - DNA, 699 bp, Homo sapiens
ccccgcccaaatctcatgtcgaattgtaattcccaatgttggaggaggggcctggtgggaggtgattggatcatggaggcagatttctaccttgctgttctcataatagtgagtgagttctcaccagatctggttgtttataaaagtatgtaacacctcacccttttctctctcttcctacttctcccagcatataagacttgcttgcttccctttagctttttgctatgattacaagtttattgaggcctccctagaagcagaaacctgtccagcttgcaacaccatggccaattaaacctctgttctttataaattaaccaggcttaggtagttcttaatagcaatgcaagaatgagctaatatatgagctattatccaacaccatttttatttactttcaagattaatcattgaaaaatcgttaaggttggtttctatgacctttggacatactgtaatccagtttggagtacctctgtattttcggaaaccacacatgttgcaggctcatcgtatgtttccctttccttggctctagaatctaccattttttcaagaagccttaaatcattttatagaatattggtatttagtaaccaagtaaccaatcgagtgctcgtcgtgctcattgtcactgtggtattattgcttctaggccctttaagtgaacaaagctaggaaatatatgtatgttac

SEQ ID NO: 40712 - DNA, 672 bp, Homo sapiens
tagcttattctttatgttgacatttcaggctgtgtgtaatgagtgttattggctgaggaaacttgactgaattttatcatttaaccaacacccctgggagagagaatgaaggctctttgtggtatgtggcatgtattactgatttttctggcttaaatgccaagaacaataactagcacttagatttgacaggtatttgtgaagttaatgagtgacaaggatggagaagttaataactaacacttttttcatgcttgctgtgaaccaggcagtgttctacattctttgcatatttaatactttgagcccttgcagcattgcattccaaaaggcactactgaaacttaaagcactgtgacacaggatagttagggaacttcccatgaccactcaggtactatgtgttgcagctggcattcaaactctaagtctcttactccaaagtctgtgatctgaaccacatgcatctacttgtgaatattatgcttcactttgcttataaggactttttgccatatctgggtctagattcactaatccagtgatgaagtaaaagttttttatcaggaattaccaactatttttaacaagagctaacagagttttttgaccaaatctgaatattttaatggaattgcactcattcatgtcaatcatttatctcttaagata

SEQ ID NO: 40713 - DNA, 900 bp, Homo sapiens
acttcaatttgaaatattaaaaataaatatatctctgcttcacaaggtaactttttacttattacactgtgtgttaagctacgtttgcagagaattttcatatagttccaaattttcagcaaagcacatatggagtaaattctaattttaaaaccttattttaaacacagaggatctatttttagggtttcattcagctttttaaattataattcttaaaatttataagttctaaatgttagaagctgaacaaattaagcacaatattgaaatagataaatcgatagctaaagcataaggatacttcaaacagatctataaaatatgcacaatttaaacattactattgaaaatagagtaggattaaggtactctgaaacagaactcaatttgggagacacattaatctcagcttgattaagaacgtcaaatgcttcaccttactttgtcttttttctgcctaaacgactgtaaccatttatcagtaaaacatttccactcagaaattggtattttaaaaatagttctgagagtcacaagacaaatacaatgttagaaaatattaactcctaggatggacttaaagggcaaagttcctgtcctttacaaagaaaaaaacaagggtgaaagctaacaggacacgaagaggtaaaggctttcttgcaatgactgaagtgacaatgaatagctgacttcctgttcactcacttcaaagaataaacactgtagtcatacaagtcagtgcaaattcatatgcccaaagtcaaaacataccataacactggatgacttaaggcaaatatgaaatgcttttcaaaaatacttatgtaaatcatttttatgatatcttgaaaataataaacatttaataagatggtcagtttcctcacatttcacatt

SEQ ID NO: 40714 - DNA, 1788 bp, Homo sapiens
tgtactccagcctgcggctcctgcagccaccgtgactgctcactcagcacctggcaggagggtgtgtgggagcaagcaagtgcagggtctggctggctgttccaaatgcatgcacaagggtggctccgtgcagggcttgcgacttgactaggtgtgcctcactgaggggaacatggtggtgcccaggcagagatgcccatgaccccaaagccccagaaagggtgttacaacatgctagttagctttttagtcttgcctctgcagcccaacagacagctgcatgtttacagcttggttcagccccttgccccactctggcttatagctctgggactggctcaagtccgtcattgctttctgtagtgtagggcagctgccctccactggcagatggcagagagcaagagtattatagctttctgagtacctgtgtttggtaggtcctgaatttttgtcctgcattcaagaagaatgaggtcatgctgacaattgaagggcgatgagggtggagaattttattgagcaatgaaacagctctcagtggagaggggacagaaaggtggcctcccatctgaagtcgtgtcatctcccgccagtgtggcggagtctggggtttttataggcacaggatgggggaggggcaggccgttggtagtataggaaaaggcaacatttgatgggttaaaaattattattcagaaagaatcaatattggaaagggcaggcaaacaagaacagaagttctcactctgggtcatggctttcatccagaatcagcaggctgtttttggcttgaaggaggggtttctctaggtatgcacccctatctgcgtaggcattgtatggctcctgtcactatcaaatatagatgatatctactttacatgacctttcacatatgttcacaagtatctcagtctggagatgaatatcaatgatactaaacattttcacattgtgatttagattgatatttccaattaataaaattattttttgtcttttttgaaaagctgcactttcagttcactcttttcgaacagaaaacaaaattacctaggtattagggatagtttagcttaataataaaagtagatttatttatttttaccaaaggagcatattaattttgaagatcagattgactcatataaatagtggaataaacaatttattttaaatttgttttgccttcaacaattatatagactaaaagggttttccttgaaaagaatgaagaactgagaggaaatatgtgaaattataaatacatattatcctcaatatggaatatcagaaaaaaattgattatgcctacaatgcaaatataagcaaaggaaactgttaatcacaccactgtattcttgaaaataagctttgaaactgaccagcagttgagtgcattgattggccgtatgtgtgcacacacacaggtttgtgtgcgcatgtgtgcattttaactgattacaagagatttcagataaatactgtggtactttgtgtattgtaacagctgtcaacaaattattactcaaccctcggtgacaaaggccccaactgtaatatggtgagcaaggtgctgaactgctataaaagacatcacagaaaaagaaagtattttatcttccaatgtctagatttaatttattgtttggcactcatctcatactcagctaactagccactagctggtggcctctttttttaaatctgtgaaatattctattgtgaaaaagtaatctcataaaagtagatgtaaatatagttcttataagaataatcctttaa

SEQ ID NO: 40715 - DNA, 861 bp, Homo sapiens
ggtcaaaatacactttaaaaaataaatatagaatattaattttctagtctgggacgtaaggagcttggcagtaattacttagttctaacaacaagtaaaaagctgaacaaacagaaaaatcaacaattcttcttggaaccatcagagaagtgagctcacagggcaaagcactgcccttaaaattagaaaggcaaacaggcacatactgcaaaacacaacttagagcagaaacacctgagcagaaaccagtaccaaggaggaaaacctaagcaaaatagataaatggggaggggaaaataaccattttgaaatacatcaaggcattctgctcttcttaacaaggcctgccctcaagaaaaactacttcacttgggcctaatctaatgggattttatgagattctaactgacctagggaaaggagaacacttaagtctagctgattttagccttcaacatggaagaaggaaaatgcataaccccgtcacactttagctatgctgaatcacccaaggggaggagggggaatgataatcacttggaaagtttatagtccaggagcaaaggctcactaaaacactgagatctaattatgggactaaagaatgctttccctcttcccacaacttaccacattaccaaaggcctatttaccccaggtcctttcatcaagtatatgatgtctagctgtaagaaaaaaaattacaagattcactaaaagataaaaagcacaggttgaagaaactgagcaaacatcagaactagacccagatatgacaaaaatgttggaattatgagatcagtaattataaatatatatgacattaatttgttggggatttaatggaaaaagtaggcaatg

SEQ ID NO: 40716 - DNA, 5863 bp, Homo sapiens
aatagaggagatcagatagagcgttcgcggacctaggttaaatatattgtcaggtcgatttattctaatacaccccacttacaaccacagtgaaaaagaaaacaattccctaaagcaattctacaggagtccatggaaatgctagcatttcagccaagcttagctcaaggaatatagagttaaaaggcatttgcctcctagcgatagccttcctgttgattcataagatgcaaatgaaatgttaatgtttaaaccaagtgggagaaactacttattttgagaggaaaaaaatatggtataaaagctctactctagaatattgttaatgtaaggagaactggaagaacaggacaagcaggcttttgagaaaaatcacagctgaagatagggcttaatagtttagagcactaaaagataaacaattttaaaaatcagtgtgtgagtgtgtgtgtgtgtgtgtgtgtctgtgtgttgcgagtctccaatctcgctggtaactcgcagttttctgatgaaagtgcagtatgtaacgattactagttggcatcctctgctggagaccagtctcacaaaagggtgaccctgtgatgcacgaaaggctatttaatgccccagcgaagtgcttcagggaccaagattttattattctttggtgatgagagttgtgatcctgcatccctgatttagagccacttagggctccgacagctccaccccggtgttctagaggaaaatcttccttcatgctctctgcctgatttgaaagcaacacagcttcccgatgttcctcctgggaggtggttcaatctttagaaattgcctaagaagcctgtccatctgctggagtgcctggctttcgggaacggaccaagacggacttggcttttaatctgaaataatttgaggattttctgtctataacttaaaatcaccgcttaactcaaagtaaaaaagtgacacgctctctagagggcttttgtagacattgggaaaatccgtatgacgaagtacggtttagaaattccggatttaatttcccccgggaaaagcaaatatcttctgttggtaccgggcagtcgactcacgtagtcttcctttaaaaccaagtctatgccagccgggtgtgaggggagtggtgggggtgagcagggggaggagagagattcgaaaagtacaggaggaatcagtccagtacaggggttgcccctgccaacaagtagctattcctgttaactcccaagaagcaagtttccacctttgccacttcctcctgccctttcctttccttttcccttcactcccgctcttggacccaaggttcgctccccaccgccaccgccctgccccactattctctttacaggacagaaggctgcagcagcacggcggagaaaaatctctgaggaatgagtcagtgggatgggcgtatgggtggagggagagggcagtcgatttttaaacctcagcgagggtgggtgggcagttggaagccagaggccttatcactggggcgctgcaacatcacagaaagtgttagtcccagggctctccctggcgcgcgcggctcctgtgcttgcttcttattggcggacctggccctgggggcggagccgcggtgaagcaccgctcatccgggctccaggaccggggcacgcggttctccctgatcccggagctgggctcagggctcggactcagtcctgcagcgcctctaggctgcggatccgcgcttcaaccacctgctttgcgctgcgtccggggaagtggggaggagacgggagggagggaggaggcggggagaggaggaaagaggcagcttacacacgccttccagtccctctactcagagcagcccggagaccgctgccgccgctgccgctgctaccaccgctgccacctgaggagacccgccgcccccccgtcgccgcctcctgcgagtccttcttagcacctggcgtttcatgcacattgccactgccattattattatcattccaatacaaggaaaataaaagaagataccagcgaaaagaaccgcttacacctttccgaattactcaagtgtctcctggaaacagagggtcgttgtccccggaggagcagccgaagggcccgtgggctggtgttgaccgggagggaggaggagttgggggcattgcgtggtggaaagttgcgtgcggcagagaaccgaaggtgcagcgccacagcccaggggacggtgtgtctgggagaagacgctgcccctgcgtcgggacccgccagcgcgcgggcaccgcggggcccgggacgacgccccctcctgcggcgtggactccgtcagtggcccaccaagaaggaggaggaatatggaatccaagggggccagttcctgccgtctgctcttctgcctcttgatctccgccaccgtcttcaggccaggtgagcaagggcctgggagcagccccagacagacgtgggcctggagcagtttcctaggtccccgtcccagcctcgcacccccgaggcagtgcgcccaggcgcgtggtggaggtaaggggaccgctgtcctggcacagagctgtccccgggctcggtcacctgtgccgcacgtttgggcttggctggttagctcaagtttgggcatcaagctggggaaactgggtgaatctccaggaacttggtgctccggggtgggcaggattcgcctgacgctctccccttgtccctgcggctcccagctaggcggcggactcttgccctctgacagttcctcctgtctctgggtatccaagtccacgtcactgcgccccgagcagtttttctttcgcttagttctcggatgaaataactgccggcactttttcgtgataaatcccctagtaacttccccttggtgagccgaggaagggatgggaggggtagagaaggagaggactttaatcacctccccccgccccccttgcgaaacctgctaaagcttaaaatcgtggtttcaacgttaccccctgcggtccccgtccattgtctgggcgggtggtgagtgaaagggtgaccgcaggcagataacacagccagaacaggaattagtaggtaggcctgggagacacctcagtgagaggtttgtgaatttccaggacctgctcatagagcctcagttctcagttctgtactgagtcttggaagagagagagagagagagagagagagagagagagagagagaaaaggcaaaattcccaacaactaaaatatctctcgggaaatccctttccacaccctcggggacgtcccctggccctggtatcctcaggcccgcctggcggctgacacaagttgttctaacagggtattccgtgcgctcacagttgcctgacagagcagcaggttcctttgctcccctaaactgaaaatttaggggatttttttttctttgaagttttttttttctatccctgcgtagacagttgccagttaaactcctacttcctggtattttggcctgtttgttcttagctttttctttagcttttatcaaagaaaaatctcacttccttttatccgtgcacatcccttcagctgtcggcaagctcaggtcacagaagaggtttgaaagcctctgaatctctcccaggaactggcggggagaggggtttgggggccagagcctgaggaagagattacaagtgtttgcgagctgctgctgctgctgccgttgctgtgtgtgtgggcgggaggagtgccctctccagatctctttattaaagttacatttctgggtgaggtaatgagctcacctgatgtttctgaggctgagggaaaaaaaaggcgtctgcgttctctgacaaatctcgggctctggggcggggactgtgaaaccatagttcaaccggatttaaagcaggtgtcctagtgtaacaacgctggggaggtaggtggaaaggcgagacccccttgggcctggcacagtgtggatttcactttttcgagattccactgtccgatggaggaaaggacactttggagccagggaatgagccaagaagggaggacaagggtgatgtcggtttgtaacatgcaaacgtccacacgcccacagttggttttccgattaaccccctcgagacttggagaatgtaatctcaccctcgtccacacccctgacacaggcacataaccagtttccttttcggtgccgtcacaggcgggccacgtcgcaggataggtttttctacacatttaactgctaaaagggggaaagttccgctttcagacctccttcacggtggttcttttggcgccacaggctcgtgtgtccagggggcaccgagctgcgcgctttcggcgagcggctagccccggctcaccgcaaccagccaccgtgaatctgaggatccgatatcggccctggaccctcagatccgtggtttcggtgaattaccgagctggcattgccgaaattctcattgcagtatcagtgtgttttgaaaggaaaggttacagcactaaaggcgccgtgtctacactgaggaagcaagtcttggacagtaagtgcgccttcttcggagccctctgcatagcagagcccggtgggggcgcggtgccaaaggccggcttcatttgagcggggtaactgccttccctgccggccactcttcatttccggagcagttttaatagtgtatgtccagttgtagaggtcaaaaactcgagtttgtgaaactgcttccccgggtctttcggcttgtagtcgctacaaagtcattgatatattttaggcgtgccacgttacctgttttgaaaggaggagaaaaatatatgaaccacgaaaactgaattcagagatgaaggcaatgaagtgtgtgttcaacatccgagatagcaatattctcgttattcttgtagaaagagcgtcagcctgtggtgacattttgtattgcttaaaaaaagaatgcttttctggattatttacaaggagatggggcgctgcagttaactctttcttcacttgggtcatctgtatgaacccctctatgggatttttcataactactcactgatctcactgatataagattcattctaagacataagcacacataaagctttcttcagtgggatattatgtttgaaacatatcaattgatctcaacaggacttgggaaagcatcaactcaaataatgtcctttcaaagactattgatgtaggactattgaaattgattaatttaaaaactaaaaactgtttaacagccaatatatatatattttttccttaaggatttatttaatccaatagcaatttacaatttaatggagcattatttgcagtaaattgcttttctaggctttcttcaggacatctaccttcaggcacttgagcaagtcatttaacctttttgagcttcagttttctcatacaaaataaaaagacagactagaggcctactctctgaaatgtctcccagctcaaaaactctttgtttctgaagtcttaaggtaaaaaaccaatttaggcaggcagagtcatttttcaacactatttttctaaggatctcagtctagacaaaattcatataaattgtattattagaaaagtatcagtagaccccaatttctaatttcctttttttttctacctttaaaaattcatgataacatctatgcttactctttccagccttagtagggaaaaaaaaaagcgtgaaggagagaaattagccttccactctcctgggaaaagaggacccaaaagtaagaaaggatagtaggcctcagaaagccctgctagtgtaactcatctctcctgcaaacctgttcctatataaactgcatacatagtacctagaatgagatgtaaattatggtttatgcttaaatattcatat

SEQ ID NO: 40717 - DNA, 1412 bp, Homo sapiens
cccatgggtccctagcattagaccctgcttcctgacagtctagacttgggcttgtcattataccaccataaattagaccctgcttcctgacagtctagacttgggcttgtcattataccaccataaatatatatatatatatctgtaattgtttccttagtgaattgaaggttttttcatttaaaattaaatttgtgtggaaagtatattctttcccatcaagttaggaatatttaaaagaagtatacatgttagatgcaaagcgctaattcaggaatgaccagataactagtatcattatattctttttccaagtatattccccaatgtttggaatgctgttcttttgatcttaactctttcatctgaaagcacccatcaaaggttacatgagcaaattacccaataaatgttatttttccaatagtttcagcctcaccctacttaaaattatattgaatgttcgtgacagttcaaattgacaaattttcagtttgcctcttctttttaccccacgttattctccaaatagaaatcttgagattttttccacaagataaatctttagaataactgaggactaattatatgttccacagcagtctgtagtagtctcacaggctgagcgtccaaatgaggttgctgctatagggaagggcaggcggaaatagaaataaaataaataatccttcccaccctcacacacacacacacacactcacacacacaatcaagaaaccatcaaacaaagctcagaaacatttcaaacataagatcatcttttactttacttttttgttgcatgtttactttgccttctggaaatattgcacaatctattagctttttctctttagatgtttgaaggatacagaaggtactactaacttaaaaaaaaaaacattgattctcacagcagaacctgtgtgtacttgttcactacatacctacattgttaaatatagttgcttcacaaacaatacaataagaaagaatttaagaaaacagattctatgtaaatagtctgcgtcactaactctattatttagtgattaaacggaaaaatatttagtattgagtgttggttcatcattgttgaatcagtaacggttaccaggatcattgtcaagttaataattgagaccaggaacttccttcttgctgagggcttttagtagtgatcagtggcagagggatatgaaaggctggagaagaaaacaggagacccagtcctgcctttaccagcagccctgagattttggttaatcacttcatatttctgttctgcttctttgcttatacaatgacattaggctacagctgagtgggctcccttccgtgtggttgtgagactttattctactgccaaataaaaataatatttgcattatctctttttttaatatttgcac

SEQ ID NO: 40718 - DNA, 1652 bp, Homo sapiens
cttatagccctaaaccactaatttgaaaagatttttctaaaagttcatctttctaatatatcataatatttctttttttctggccctggaagagattgagtactccgtattttttaaatatataatggatatattataaatactagaaatgagtacaatactattatttaattttgtgccaatttcatgaatgaggaaactagatattgagcaaagtgcaaagatagacattacagtcctgacctctggtaagtatttcagaattgtcactttcaaaaggtaattcaagaacactgtatttatgtatctctcaataagttcactatttgcctctcctatagaaacatggtagttgttgtgtgaaccattatccaaagcaaagttagatcaatactactgaagtaaataaattgaaaactatattaaaactgaaaaatgtggttgtgaggacatgcaagaaaaacaatgtggtgctactagcctggaattggtatgaataagccctttaaaaaagaaaaaatgaatccttaatctttatgccttagtatcttacaattctccattaacctttgataaaaccatcatattgggcacaaaagaaacacagtcaatgaatttttcttgatattcttttttacaggaaaaaaatcaaacaatgtgattcattataaaacctatggtcagaatcaataatctatgccttcatatcatgcctgtttagataataattattaagccaccatttaaaattttttaaactcaaattccatctgcaaaaaatctattttgcttttaaaacttaatattaggtttcaactttactttctgtcatccttcttttggttgccacatcagtagactcagaataaaagcatctgcccaaagcaaatacactggagttcactgtcaaacagagattcccaagaaaccaaacagaaaaggaataaaaatgagaagcatgttttattaaatgtcttctacacctgcttcctttatcttttagacctgcttaccaaagcccattggatattttgattttttaagtcacaggcatatgaactagcttgaacatttatagtatcaaattattaaaggtaatgacctggtatttaaaaaatgatgttccacatctaggggatctccatgaaagcttttcagctgaataaaggttataattgttaaacaaattggttatttattaagctagcactataaacaaaaagagtatttaaacagctggtatccctgtgaccctacctttaatcttctccagagaaaatgtgacaagaagtgatatttaacaataattttagaaaatgtaatgaacaccaattgattatgtaacttgcattttattttcaaaattacattaaaatagtatgcaactattcatttaaatgcattttagaattaaaatgaattattttcacctacaaaacttatgtttaaaaatgagatagtactgttttattattgatctacattaaattagcaatatgttaaaattcatttctatattgtaatgcttggaaaattataaatttttgaactttttaaagctatgcttgaaagttcaagagagccttactcagtaatgaaagttaaacaaacaaattaataatacataaacaaaaaggttgtttataaccagt

SEQ ID NO: 40719 - DNA, 793 bp, Homo sapiens
ttcagccaacagctctgtaacatcttgcctctatacatgatactgcctttttagccaattccaacctagagcaatgagtaaccatggctccatccaattttccacatgacatctgtggcagtagaagtattaacaggacttctctcctggagagctttgccttaggaagagcttaaatttctgtaagaaagtcactgacacaggaattcagtcaggactctgcactaggactagaagctgccagggttcagatgctgacaaggcaatgtttcttatctctgagatttcgtgcccttcccccatgaagctatgctcctccagtctggcagggaactcgcctatggacaagagggtgacagacatcttttgatgatgagcatccacaggcacagggaacagaatcttgctattcattgagctgcacagctgtggcaactggattctgcccgggtgtcaacaatgggggcagggcttcagtttaggcaaaagggaaacagcttgagtataaatgaactgcttttaggctctttgaatttatcttccccagatgccctgagatttcagatccactctttattttactaaaacttcatagctgtgaagtgaccatcttctctgaaggctcacatggaaaaaaaacaaacatgtttctacatggtaaaaggcatgtttgcatatttacatatgaatatattgatggatccttggcattaatgattctacaactgtatgttcttattaaactctgggttcagcataaaatagtatcttactgatttatcttcagtgctat

SEQ ID NO: 40720 - DNA, 1921 bp, Homo sapiens
tgaaacaagaaacttgttttctctagtctctttacactagtgttctttcaagtatgagttataaaacagatattttatgtagaattttttttaaaaaattcttatcatctactacctaacattagtggcagacagcattgtaagaatgaagacctgggtggttatcagagtccatgttcttcagggcttgaggccatgcttttggaaatcatttcccagagccggggcatttgaggagagtacagaaaagcaaatgaatggtgaataggagaaaggccatcagccaggcagctgcaggttagacggatggattgacttcccagcagagcagggcacagtttgctcaattacccttttgtacagctgggaaagaaagacaggaacatcagagactgctatctctcagttaccaataacttttgaaagaggtatttgaaagacatataaatgatattttccactgcctccctgtgcagggaaagcattgtatgtcaagtcaaaactgaaattcactagtaaccaaaattaacagccatagtctttggcaactatctttggtcacactatcacctagaattggctttgtactttgtatcagagctttacatgaggtccttgatctactcatcagtgttttcagaaagacttctggattcccaaataaattcagaaacttctcttaaaaagaaaaattagtactgattaaaaagcacagtattacagaacttgttattaacattttatttttgcatttactttttccaatctcaaattggtaagcacaaagcttaagaaaacaaacaacagtatttctttaggagagtttaagttccagctttgggtttttctctttctgtagtttatagtgtgtggcaaaaagggctcgcgtgtgttaaagccaaaatgcattttgcattaacaatttgcgtttagaaatccaagcacctaacaccaccagagttaatatttgctttggactcttctacttatttagtctcaagcttttccaaagagctaacacaaaaagacagctttcctatttgcctagtgagtgtgtgatttcacacatagtgtatgatatgcttctacagagacttggtattagctgtttttcatgtgagctgtgtacttagttatgttgggaaatgtgaactttgtagttgaaaaatgcagcaaactgactgaggctcatatcgattctactttagaaatgtctcctgtctccttttcactgtgcctctttttcattcccactgccctatttcactatgagtacataacctaaacactttaacacgattaccttccccgagtcccttctccagctagtttgccttcatactgctgccataattttcaatagcaaaaatctgaccacttcactgccatccttaaaatgaaccaaaaatccttttgttgactccacattctttacagaataaagtccaaattgtttaagctattatttaaggctttcaaagtatcaccccattgcttctttcccaggtgcctttccttccatcacctcctacagcccctaaacctcagccacactggctgaacatgattatacccttgctccagcctttctcttgcaaggagtttccttcatccttctttccacttgaagaaattcttatctgtgatgattcagtataaatgtccattccaggcaaagccttctccagcctattcatcaatccctcctctgctcctgcaacatttggcatataatctccattattccaataaataaaagccaaagagacataataactttcagcactcgttgtatgaaaagcacttttttaaagcaacttatacttattaatttagtatattcatgataacactatgagcatgatactattaaaagggggaaagttcccttgtccccctcacagggcatgcgacaggggta

SEQ ID NO: 40721 - DNA, 646 bp, Homo sapiens
tcaggggcaaacgcagagcaagggatccttaactttgaggtaaacacgttagtggacatgcagagagttactgtcaaaacgcaaatgtgttacattaaccctttgatgactctctaatacaaagcggagcctattgaaaagggaacacagagaaggggagttttaaaatagagaaggaagtcagagattgccatccctggctgttctgttgtgtcaaccttgatcagagatgtgccacagtgacatgccacaggccaaacatgagcactagtcagagaagggccaagtaagaaaagcaagagaggcccggaaacggaaggtcagcagggcaccaaaaccagattttatttacttttcaacctcaccggaaactgctggttaggaaactacttcaggcaaatccagaaaaacaaataagaaatgtattaaatcaatcaccgtttaacctcagaatgtactggacaagtattcagagatgcccaagcatagagaaaaggcaaagaaacaatctataacaaacttctaagtttttttatctgcactttatctatagaaaggtaaataaatgaccgcaagagatagaacaaagcctccaaaagtataacttactcatttcacttgttagctaataaaaaaaataggtttt

SEQ ID NO: 40722 - DNA, 636 bp, Homo sapiens
cctcttttcattccattacgtatgaatttttgattcattctttttaaatgacaatactaatggttgctattgagtacaagatgcagagattttgctggaggctggtaaattttctctgcaaaacagatatccccccaccccccacccccaaatttcaggtccaggtttgctatatcatcactagtccttttttaattctcactggaaattttcaaatattgtttataaactgaatgagaatgtgctatgttctctaacattcttattttacatcattctctaatatattaggaatgttgcaacaatgttatcacaatgaagtggcaacttttggcctttagactgtacctatcatcagcaatcataaaaaggccaaaataaacagtgctattccaaggtgacatctgaaactgttaaaacaagtgaaaaatcataatgacaaaacaggggttcataaagcaaaagaaaatttgccaatgcaattttaaaagtgtaagaaacttcactcatgtacctactcatgggaagaacatctaaggcaaatgaaaaattcccctccagggacataaccagctcagaaccatctgaaaaaattcatacaaaagcagaaattacccaaggcctgtgagtcctcat

SEQ ID NO: 40723 - DNA, 3462 bp, Homo sapiens
actcaatgaaccttttttgaggacctgctaaaatctgccactacattaggtaatggaaatataagataaagaccagttcagtccttgctttctgggagtcgacagtctagtggttacttagatataaaaacacacaattacatacactctaactgtacaactaaggtcattcaaggtgcttccaaaacacaggaactaaagagaggtgttcaactctgttaagaggagcagagcaaatgcagaagaacgtgccaggcaacaagcctggcagatgaaggcatacagatgtagaccagtatggcaatatgacagactacagggatagaagtgatgtgtattcaggaaagaggctgataggggagcaagaacacatcatagataggaccctgcctccccatccaggctgcccactgcaccagcacaggaccccttctatccatgctgctcaggaattcagaggtctgcatgtgcaaccatgcttccaccagggagaactgcatgagtggggagttcaaaacagaaaaccactttcaataatacgttatcaccaggcataatttaatcattaggaattcttagatttttacccaaatttaaaagatctgttgaagatttctctgttgtaagataacaaatgagctaggagcgtttcttccctgtatccttatgaaatataatctagatttaacaaattgagaaaacaagcaaaagaaaacaatagtgcacagagaagaatgcaccagaagcctatgtcttagaagcagatgttctactttggcggagtctcagcccctggtgtattaaccgtttgaaacacattcagaaatcacactgttgatgtacttctgaaaagatgtgtttctctttcaaaataccacagttaattccctcacttccagaaatgattcatctgataaatatttagtgtagtaaagaaatatatcctttattcatgatctaaaatagaatactgagcgaatatggcaaactcaaaacacatattatcaataaccaatcaaataccatgccacccactgacgttgtcttaggtaattctcttgataaagagactcctagcagctctcaagaataaatcccacttgattctatggactacactgaaatccgttcttttaaaatggactgaagttaagcattacatttttccattaagttttatggagcaagataaatttcctgtgtcaaaatttgtcacaaaaatctgttttccagacatctggtgtcacacatacatgaatacagtaccacatggggatatctgtaaatagcaatgggtggcctagcatttggtttctgatcagcatttatttccattatgttagttggtgagtttaatttggattttattaatatctatttttatcacgtacattccataatattttatatatgccacaaggaataatacaatatcttgtttacagcattttcatatttaagtgtaaagaaggaaaaactacacggagtggtgaatcttaatttgaattttatttaaataagtgtctaataatggcactcaaaatttggtccttagaccatcagcatagcaattacctcagagcttgttaaaaatgcagaatctcaggtcccaccccagaattgctgactcagaatatatactttaataagatccccaggtgattcttatgcaagtttaatgtctgaaagcactggtttagcaggaccctcaaaagatcctttatttttcattgctctgcctctaggtaaaactacatctaaagcatcttcaagatctcagtacttacttaaagatttgtgaaagcaattcctctctgttgtcccaaaccacatatctatcagtcagtccctcccaagtggggaggctgctaacgtcactactggactggagcatcattgttttagagtgagttagcttctctctcaggtcagacctcaagggcaactacttatgggactttcatttgtcatccctcttgctcaataaccctgaagtactcatcccctagtctttgacagcccagtcctgggacagcgtgtacttttcacatttgtaaatatcaacatcagactgataattccctcatcaccacaccccagtccacccccacatttctatcctgggagaaaaattaaattcttccgatgggtcaacagactgccaaaggtcagaaagagggcggctctttccttgcttcctcccactacaagaaatggaagaggaccaggcacatcacaagttcagtctaagtgtgactcacctctgcctaattcgagaaaggagcaaattagttcctccctcaataatctccatcaatcaccattaacctctgagattcctaaatgcaaacaatccatctgcggtgtctagttctatccttaaggtcaggaaaggaggaaacaaatttaaaaaggtaagaccaaccagtaaagaaataaaaaagtattttctccaaatgcaccactaagatgctttatcctctggaactgatttttcctcctcttatgtatctccttgtaacttaataattaaagagcaatcagggcctcccctgattgcttccaccagcataaatatccttggaaaatgtcagtcgagcactgttaacttattttgtcctgagaacctctaatcaaaagagaaagatcttgacacagtctgtggtgggatgttgaatgcaacatcacagaacaaggccagagagtgatttgaaaggagcagctgcagaatcctacaggaaatgccgctacattctggtacctgagagaaggaaagtgaaaggcagaactcttggtggagcacacaagcatgcccagcactctctgggaagctggccctggagtaataagccaagggtaaaatgaactaaggggctctgaaaagctgggatgcaggaagcaagtcttttcataaggaactgatggaggaaggtgttccttccataaacctctggtttccagatgctttaagagatgctaaaatgtttaacaaaaaaaaaaaaaaaaaggaagggggagggattgacataggactcttatttagttcatcaaataacaccattaacacaaaatctattatttacctgtcattaatattttcacacaagaagaacaaggaaaagaatctcaggaaaaaaaaagtatccatttaaatgaaataaactgaatttcatgaaagattcactaaaatgcctattataacttccagttccacgtcacaaatgggtgctaaggaactcatcaggagcaactctcaggaaaatccgaggtgtagctgttccactttgcagtacatccacatgcctctaatcacaggtgaagaacaactcaatatacactacaaactttgaaaaagaaatgcaaaaaagggtgacaaagaagcttcttacaaaaataaattaaatatggcctgctaataactagttattcatctatgaatatgaagtatgaaaatattagctc

SEQ ID NO: 40724 - DNA, 1006 bp, Homo sapiens
gtatttaccactgaaatgaaacctctggacgaggaatacaatcctcaatgggaagctgtctatattctcaaatattcataaaactccacttcaaaacaaaaatagaagtggtaactatttatatgggtttgtgacctaatactaaaacctcaaaaaaaaaaaaaaaacagaaattgtgtgagatccctatctgttacagcaagtggatattctttttaaaggtcacaaagatatgatgagtcataaccccccagtaagctttgccaaatagctggctgaaaaccaactcaaagaacacagacatgccatgggaagtaggcatgtcataccaagttacttttaattttttttcattgaaatactaccctgcaacaggttacttttaattttcagtggcaaattgatggatagaaatgcacaaaaaggagatatggcaaaaatatccgaaaactgttaaaatactggtcaataatatggaatacttagaaaactaaatcttaatttaccagaattaaagaaatttaattgaggctgatttgtgtaaaacattcattgttgcttccaaaacttaaaaaaattttttaagcaattcatttttgttacaaaactaaaaatggaaccatatgaattgctagactactgttattgagctgcacagggacacgaacaagctcttttaggcccactcaccgctatctaactatagcaataagttaattttgagtaacaccaaactaaacatttaagtcaattagtacgttgaacagtacatcatacatacatccaatagaataccattatatgaaaggaaactttaacttttcaagtaaatttctgctaatacattcaaatgtcacctaaataaattttaccagattaaatttttgagaaagattagtcacttattttcttaaagattctacttttcctcaaaaaactgtgatatggccggacacagtgactcacacctgtaatcccagcatttctggaggccaagatgggagga

SEQ ID NO: 40725 - DNA, 4176 bp, Homo sapiens
tagttttataaaaactaaaaattcaacattttaatggaaatttgtaaaatctggtttaaaaaatataccttttacctatatcattgaaggtaggatataaagtgatgggttgtgaggtaccataagagacaatgatccccaacacttacattttttatacaaatacaaaataagaaataaacatcatattgtttctgttttaccaaatttataggatgaagaaaattgatccatgtacttgttctgtcccttacatccaaaaacaaaatacatccaaacacaacataatttacatacctagctaacattattctacaatcctggtcctttaaagatcagatatctatatctatatctatctatctatctatctatctatctatcacctactattcaaatggtgatataactgcctaagagatccataaatctttcaatgccgaacagttcaaaggcttacacattcaccttcctaaaagccaactgccagagcaaatgatctaatcagtcctttctagtcctaaaataggtaggagcccatcacacaaaccagtctatacagtaagttaaaatttcacagtaagggtacaggttcacataaacactactgccaaaacaaaacaaaaagaaatctttgcagggcaggtagaaaaagaacctgattacaaaggtcagggcttttcagaagtgccagtgccaaatgcgcatttggactttcctctttgaacacacaagaaagtactgcaatcatccaacctatgaccctggctttctcaagattgcccgggattgaaatgtttataaaaacaaaaacaggatttttgctcactgatttgtcctttcttcctcaactaatgtttcaccatttcatatctttacccaacttcttttccctcctacctcagaggaagaaacagcttcttattttcaaggtcatgatttcatcccttctcacttcttctcatagttcaaatataaatgaacagagatgtgaagtctgcatctgtgtgtatctctgcttgcctcaatgttatgatactaaacacatctttctgcatcttaacattttttttgcttgttccataccagcacatataaatgtggctcattatatttaaaaatggaaatgtttcatcatatggatgtataagttatttaaccaattgacactattataaataacttatattattatttatcattatcttttattcatctgcaactataatatgaacatatatggtgcacacacacacatatacaatggcagtgttgaaccaatgtatcaacaaattacacttttgaatgggataacatgtttaagtatttataaatgcaagaggcatagaaaagctgctcaaggaaagctggctgaatgtgaaagaaataaaatgccttaatggttctaaggccttctagtcatctaacacctctaaaagctcaggtcctattctcaggatgagcattctaacaggcaaagtttctatgtctttccatggctggtcaattctggaactaaccggtactctctattttgggtattatgaattggatctccctcttcttttgaaagtgaactaaaataatgttcccactcagttacatttgctgggaggttattatctgttctagcatactcagggccaaactaaacaaacaaatctaaaatggagtgaagggataacactaggacctttttagatatgcatgggaaaatctgcctcccatttaaatggtcttcaatctactctactactcttagtacccaaacaactctatccattttgtttcacttttccatcttgtgttttcttttaaaagctacatttaattaatgaacatatattactaatattattcacttctcacccagtagcactgtctacagaagtgaataatggccttcaggtacatcagcattttctgctctctgtaacttcactgctccttaaatcaaacaaacaaacatagttgcttccccagaatagcatagattaggctctcaagccttgcccttctcacaatacaccctaccttgttgacatgctatctttgtgctgcttttgttcctgtttatcgctcagaaaagtacttgtttatagaatccgttcaatgccctattcatccctagaagttaagtgtgttgaaattaaaaggctctgcttgaatttgataagttaaatgacagaggacagaaggtttaaacagctttatcttaggctcctataaaaaggccctaaaatgcaaacattgtctctgacattcttcctgcttctactgaaaatagatggcaagcttgaacttcactgaaacagctgtttctgttaggatcagcgtctctgacaaataaaaccacacagaatggggtggccctgaaacagaaggctccctggcctaatctcatagatgcttctcttggagaccttccatccacacaacgtaggggaagggcgagaagggatggcttcccctccagactgaaccattatttctcttgctatacctgtctcccttagtggtcacagcaattgagcatatacattttcatatcacaaactattttcacaacactagaagagaatcttgagttcaaaataatcagtttaagaaacacataggagattcatattatttggttagcttaacctacttccaaatcaatcattctattccaaatcctcctgactgagtcaccagcaccctttgataaacaacttattgctttgctgctggttactcttcctactgctatgcaaggtctgagtcatgtacctcagcaatcttgacctttgaaaaagaggaggcttttctgtctgggccacaattatcatgtttatttcaagtagcaactaatctcttgtgttgagctcttactcgccagggtccatgaactctgcacccagaaattctccataccagggtacaaagcacctacatggttctcttgagcttccattcttataatgtctccatcactctcttccttcttaggccctcaaactcaaccctaccaagctgactctgaatctccccactgtgttctattttattctttaaaagaatccaaataaactctgacatttctccctcacattctcacctttcctacttcacccttttgaactcataggttctccaaaactcctctgctttcctaactttggtccccatcatcagtcctcctgagtagtgggaatcccaaacttaagcttactggtgttttcttcctgaagcctcagcattccccaaactccaggtttataagctgtcaaatccacctgagctccttctgcagtcctgctcactcttcaaggatccatgtagggtggggtcctgataagaaagacaagtcactacagtctgtctttacagtacaattgtaggcctaaagggctctgtaacatgtactattggtggagactgttaccatggatgcaaagtcaaatcttaaacaccttcaccgcttatgcttgtaaaatggactacaggctagttttttgccacccaagcaaggcaactttagttaacaaatatgcacctggaacctaaaccaagtaccacatatttctgtcacgtaagaggactgaatatcataaacacagccttaggtcaggagggctgtggagtagagtcagcctgactttagcgaattgcaatctccccactctgggcccctttcttctttgtgcccttccctgatgcctatcacataacccattcctattcacaactaaattatagtaataacatcttaaaatacgatttttatgccaactgtgggattcaaggtggcagaaatgacaatttggagagggaagctaacagctcagcctcatctggtgtccctgatgagacagcaagggcattcacgaaaggggagcctcctatacccttccacttcactccagccactgagaaggagacctcatcattccaccttctcttgtttagacttagacctactaaaagaaacatatccccattctttgcaaaagtgttaggacatgagagagccatatacacaatcctagagtgtaatcagaagagtacctagagcgttactataaaggcatctctccttttctctcctcctatcctagattattcctctttataggatttatcactaactgaaattatagcatgtttgtatatgctgatttccttgtggtctac

SEQ ID NO: 40726 - DNA, 618 bp, Homo sapiens
gtaatgtattttatacacagttttggctaagtgtgacagaataatactatctgatgctgatgtttatttccttctcgcctaagcaaagcagctctagtctatggagaagtcaaggacttaggctccttctcccatccctgttccatcaccctccttcacatggttgagatgactcataaccctgttcacattctagccagcagggagcaggaaaaaggggaatgagcgggcatgtggcttccctttaagggcatgatctagaagctgcacagctcacttctactcacatccaattcatcaaaacttgctcacagggccacatcagcaacatgtgaacccaggaaatgctatctttactatggatggataacaatggggaaatatataatgataggaaagggacaaaatggattttggaggcaattagcaatctttaatacagatgtcaaaggaaacgacaaaacaattttcattaaatattaaatgctgtttcactgagtggactaaactaagttagaataagatttttaatttttgtcttttcttaaaggagaaaatattaagatagacgccaaaatacttgaaagttaagattatatgaaatactaaacattttct

SEQ ID NO: 40727 - DNA, 3985 bp, Homo sapiens
attccttataatttgaataattttattattaatggaaatttctaaaattaaatatacttttattttacatcatttaacatcaataataatctagattagatctgttttgaaatcttggaacaacacaaattttaaaatgaaaattccaaactttatataagtttcctctgagacatttaaacaatcactgaagaccagtatcctaagggaattagaacctgataattaagtaaaacctttcgttttaaaaaaaaaaatttgagagtaactatttttccagaccttaaggttgtcaggtccagaattaacttgccctctgaaaaaatctctacctagcccattttactattaatatattttttaactgcaaaaaagacaattaattcaacaaccttaaaaaatatatcaatcacaatttcctggggtgggggtgggcagttgaggcagtggatgaagagctattggtcaaaggatacgaaatttcagttagaccggagacataagttcaagaggttaacaatgtactgtatattgaaaattgctaagagggtatattttaaatgttctcaccagttaaaaaagaaaaaaagtaagtatgggaagtaatggctatgttaattagcttgatttagccattccacaatgtatacatatacagaaacatcatgtagtacaaccataaatgtatttgtcatttttaaataaagaaatagggctggacacggtagctcatgcctgtaatcccagcactttgggaggccgaggcgggtggatcacgaggtcaggagatggagaccatcctggctaacacggtgaaaccccgtctctactaaaaatacaaaaaattagccgggcgtggtggcaggcacctgtagtcccagctactcaggaggctgaggcaggagaatggcatgaaccagggaggcggagcttgcagtgagacaagattgcgccactgcactccagcctgagcgacagagcaaaactccatctcaaaaaagaaaagaaaatcaagtaagcaagcaagcatgacagaagtcaaaatcaaaaacaaaatcttccccactatacataaatgaactcaagtattcagaaacaaaatatgaaggactaggttaaactccgacaataagagcacagatttatcatagggaagatgtgccctgcttttaccttgctgtatcacaagataccctatattcttcagaaatgctgcagtctcaaaggaaaagatcatccatgggacactttattggaagcttttcttgtttaccaattaaactatgacttcatgttatcacaacgctgacaaggtgtacaaactatgtaacattttgcaactacaggacagtctgcctttcacatatcacttattaatctccatgaactattagcatcagccatttttcaaggctctttatcttcattttaactgcaaaaaggaattgctttttccaggttcttgaggattcttttcattggtgaaaagcggcatgtaatgttacaaagaataacccaaaaaaagctttcagttatgaatgtattttcctatatcatgaatagttctaaaaacgagcttcagtttgaaaagagtaactttgaagtcagatttctcagaaatctttttgtgaaaactgaacaactggatgttgaatgatgtgtaaaactactatctcacagtgaaggaaatgtccagggaagctgtgggaaattagaaatgatcaccataaagaaaaatgaacaccagtttagtaggaaggagaagggaagacatcaggagaaatatttaaatctttaattcaaccaacttgatactgaagcccaacttagaaatttaaaatagtatgatttaaaattaaacagaaaaattattttactctaagtcacactgaaacccagtaaaatgtttacactcttaaaaatacaacctactagctccagattaactaattgcagtggattgctaacatattaaaatacttggtgtacattctgcttctttctaagcttcaatgacctgcagtaaattgaaagcttcctaaaataacatctaattaaaattcttgacagcagtttgagattgcagtacagcaaataaagtcctgctctcaccttgtttacttgccatctgtctctcttttaaatgtcaagtaccaaacatgctacaagaattccagttatttaggctttccagttattttaatcccacataaatgacagtttacaataaatgcatacaaagaaggattaaacttgatgctggaatgatgccacacatacagtagaggaagtaaataaagaatagttacataatggaatgttatctggtacacaatacatctacactgatcttccaatataaaggttacctcgagtgattagaggtaaacactgcttgccttttgtgcctcacctctaaagctttacttcacaaccttaattaatctcttgataaagatgtgggaagaccaccatgttacacaactctcagaggtaccacttctcttaagaaatagtaaaaaggttatgacagctctgtctagtacacctttccttcactaatggtttctgaaatcaaaagatcctctcaatgaagtccagcagccccatcctctctttctaacacgcttacctggatcaaaataatttagcatagttatctgtgtctaacatgatctcccaggaaatgaagtgtggatttgggagtgtcctcaatcttgctataataaataaaaattaaatttaattgtgtaagaactatccagataaattttaaaaagtaattcaaggaggttcccaaattagtctggggacataccatgagcaccccgcagaggcaatatgaaacaggagtttatcttagggctgggttttgacctccagagttataagaaaagaaaaactatttcacaaatatttacgggcaagtttcggaaccacagtatggcctgagaaatagggcaaatatgacggtttcttacatgaagggatcatggccaactaaaatggtaaagctgagattactgacatcccacactagttaacttacaaaaacacacaaaaccacccccacccttggtctagtgagtcaaaacaaactgctgacaaaccctaacagctatgtgagggggcgcaacgataatacacagtgagaacacacatgcctctgttttcctgtcaagtctaagtctgcatggtggatgtaagaaaacagcaattcctttctttaaaagccctgcctacatattcaaaatatctcagatgtccctcaaagctgatatgctcacatcaaaacaaaacaagaccaaaaaaaaaaaaaaatcatttatagcaagaatattagatccaaccctccgacctttactttaaaaggaaagaaaaagagatagcagttaagcaatacataaatacaaaatagccttagctaaaatttaaaaactagttttcaagtttggaaatcttcatccgtattaaggaattccgtcaacaaggacacaagacaattcccacaataagacttaaaaaacattgtgcacgcgtattaatgcactgcctcaagagtcctgaataatataacaaccatctgctgcacagcaagctataaagaggatgaagcacttctgtcaataatacataccaaatgaaactggactattcatgtcgaaagcatagatttttggaggattccccagttgccgaaaagtcctgtgtattcagggtcataagtacaacacatcacagaaacaaaaacagtctttgaagaaatgttaatataagaataagaggaagtgaaaacactcattggagctcagatacagaactaataagtcaataagaaagctatgcaatatgctcattgctttgagtagtttgtgagagtaggcagaatgatgtgaattttttaggaatttatcttacaggtactaagtgtagctacaaggacactccattaaagaagtacttgtaaactgtagtaatttcatga

SEQ ID NO: 40728 - DNA, 2530 bp, Homo sapiens
tttacacacagtagttttaagagcagtgatcctagatttgcttttacaatactaagagttaaagatgcatcctgctcacgtttcaagtagctaaggctgaactaatactcaactcataaaaaaaaaaaaaagaacaaacaaaacttaaacaggtttcccccacctagataaaaacagaatgttcttcccctcctgccttaattccaattcaaaataccagaacaactgaaggtcctatcatacattttgggagccttacgcagaaacttcactttcactctgttagatttctccaagttacataaacataaagattatcctacacaaacgtaagggacagctctgttgtcaacaaaagcgcagggcatgtcccacactaaaaccaccaagtacggacacacgaacacctttctttaaatcaacgcggtgagtcgttattcccaagaaccaaatgaaattaacacacaaatagcccatttgaaaagagaaaagagaaaaatgacaagagcggccacggaaaggaggagttcacttctctggctcctcgcctctgccctcaacccaaagctttgtttcaggacgcctgtgtcccttccctgctcaggccccttcccggcccctcgggtctgagctgcaggaggaaggtggactgggaggggacaaagtgtccctcccgtgcccgcagcaccgtccgtctagggcgcgggagggacactgtgggctcggcgcctgggtggacgcgcctcccggccgcctgctgcagtcctcaccgccgtctgcctggacgccctctccctcctccccggcctgcgggttctggtctttaaatgccccacttcaaactggacggcggcggcaaaggcagctgagagccagggctgtcccctcttcctccttggcccgcgcctggctaccccgggcccccgggccggcaagaagtgtggagcctccccggcgaccccttcccttcttgcctttcggcgccgtagctgtccagagacacgcgtgtgcgcgggtcccactccacacgcacgcagcccagtgtgtgtggggagccccggctgggagtgggatcgctgagaacagctcgctcccgaagaaggagcaacccagcgcgcaggcctccgagacgtggaaacgcaacaattaccgtcaagacaaatccacacccgctctcccctcccgcccgactcggggaggccgcgggacgccgcagcagcactagcaggaggaggagaccgctcgctggacaccccacccctgtggcacacacaggacccaggctcggggcggggcggggcgggggcggggccgggcgccgctgagccaatgccgcgcaaccgcgcactgcccgacagcgggtgcagccaatggacgggaggcgcccgtcctcctcgcgctgccgccccgtccacgtcctccacagtacacaatggccccagaggaaggcccgctcgcagcacgtcagaaaggaattggactcggagagaaatgaggggcctggactctcccgggaacgaaagtggaaacgggaaaggaaatggacgaagggatgcaaggcacgaaggagctaaccaataaggggtggcaggtgggcgtgagcgtcgggaccgggagccaaagccatctggggctgaaaggcgggacttcctgcttcgcttaccttcctagtcttttgtttcatagcaacagagtagtggctggaagggtgttgcttctccgctctgggcgggtccaacgctggagaaattcatctccctagggctgccaaacccttctacccaggacagcagccaaacaggtctatgacgttgcttcttgttggctatcaaaaagagcaacagccactgagcttctaaaatgcagaataaatctcacagagagtaggctggggtgacatctgaatgccaactgaaacttcccaagtttccgagtttctcttttgctgttagttttagagggattgcagaccaaacatcaggctgatgaaaaagcaaatagttgacaacgctggccaaacagtctctgctaatcatgccaaagcaataaaagtaccagataatgggaattgctgataaataccttgcacctttttacttagtgcaagtttctgcctaaatgactgaggaggagacagctactgtgttttgtcggagtcacctttacatagatttctatccatttaaaaacaaccttactgtagctgccattctctaccagcattgttacctctttctgtggctcccttctttgtgctcttaaaaaggccgacatctggctagtctttaaaggagaaagctactgtgctgggacttgtctttcagcaatatcataggttaaacaaatgccttccatttatttcagtttacttcaatcccaccactcatgctaccaacaattgctctggacttcatactttggaactttctttccactacagttgatagcgtttattacacttttcagcttggacatctcagatgttctgatattttacattgggttttttgtttttgattttgttttttca

SEQ ID NO: 40729 - DNA, 1330 bp, Homo sapiens
cttactgcaactattgcctcctgggttccagtgattctcctgcctcagcctcccaagtagctgggactacaggcacaccaccatgcccggctaatttttgtatttttagtagagatggggtttcactgtgttggccaggatggtctccatctcttgacctcgtgatctgcccacctcggcctccctaagtgttgggtttacaggcgtgagccaccgcacccattcttgactggaatattcttaaaggcccagctcaaatattattcttttctctccaggtattgtttttttaacctctgcactattgacatttggagccggaaatgatttggtttttctttgtttgcttatttatttttagagacaggatctgactgtcacccgggctggaatgcagtggcatgattgtagctcactgcagccttgaacttctgagcttaagtgatcttcctgcctcagcttcgtgagttaactgggactacaaatgcacaccaccatgcctgtctaattgagataatttgtcactgtgggcagctatctatgcattcttaagtagtaaccccctgttgtgactatcaaaaatgtatccagacattaccaaataacaactaggggaaaaaaatctcccttggttaggaaccaccggtttacccagtcattctatcatttactccatatcccaaagccagactaaatttctccattctctgtgcttctagagaaattgggctttattcttttgctaaatcagattcagagagttgtatattttaaataaataaaaaagggtttacacacacacacatatacatacatagaacttcatcttttgtaatgccacttatgtcacttattcattaatgcaaaaaactaatcatttaccatccttcaggtgtcacataacctggcatacttggtttcctagagcagaaagattagagtgggagtagttaggagctgttcttcaaccttcctggaatatgagatagacaccggaagtgggaattaacccatgatatgactgggagataaaatccagttaagtgggcagaataaggtggctggggcacagggcatgggacaatgggatggtgtgtcaacattgagggtgttttatgtgtcaacattgaggatgtttttgcataagattaacatttaaacagaagactgtcctccatagtgtgggtgggcctcattcaatcaattgaaggactaaatagaacaagcagaaggaatttcttcagccaactgcctggaagtgcacctttggctttcttgcacctctagcctactggcccacactgcagattctggaattgccagcctccaa

SEQ ID NO: 40730 - DNA, 794 bp, Homo sapiens
agggaccccaggaacccacttggtgctttaccccactgaggccaagctggtacctgaagccagcacatctgagtctcacccaaggcctacggcatagtacttgggtattacttctggttcttcagagctcaagggctccttagtcagcaggtggtgaatcctgccaggactgggtttttcccttcaaggcaatgggttcccttctggcccagggtatgtctagatgtgtcatctgggagctatggcctgtaatcagggccctacaactatgcccagtgctctttcctactctggttgagatggtatcaaagatgcaagacaaagtcctttttattcttccctctcctcttctcaagccaaaagaatgagtcacttttgttgctgcaatttgtgctgtctggagttgtaggaggggtgatgcaagcactttcttagctgccctggctggtgtttcatgtccaccagctctgcgttcagcacagcactcggacttgcctaggaattgtaagatttcttttcaaatttattgaggaccccaaagcacttcagcctgtgatggcaagacttgccaaaactcgagttctgaccctctggctagggctggtctagatgcttcctccatgggtgggtgtcagctgattttagctgggttttgctttctgctgtgacagggcagcacttagttgaatgcaaagtcccagagttgctgtgctgtccctcccccaaggacacagattctgtctatataccatgtggtcactgccagggcatagaggaagtgtgccatctgtaat

SEQ ID NO: 40731 - DNA, 1000 bp, Homo sapiens
atatgggactgtgatattgttatataatttttgtatgctaataagataacgaaaggctggggctcctgggtaacctcagactgagagttggttgccaggggaaccaatcctgtgattagaggtttaggaattttaacccaattcctggactttcagggtcaggagagaggctgaaagttgagtcaatcaccgatggccaatggccaatgatttaatccatcatgcttatgtaatgacgcctccacaataacccgaaagaacagagggtggagagatttctgattcctgaacacgtggagggtggcatggtccaacagagtgtgtaaattcccagcctctccccacatatattgcccaatacattcttccttctgactgttcctgagttgcctcttccatctgactgttccttttataataaaaggataatagtaagtaaagtgcttttctgagttctgtgaactgctctagcaaattatgaaacagagaagggctttgtgggaaccctgatatgtaactaggttggacagaagttgtgaataaccaggaacctgctacttatgactgacacctggagtcggggtagtcttgtggaatttcatctatgcatttcatcttacagtactatgggaatttgggatgggtgtttagtaaattgttcacaataagtattttcaaattttcaattataaataaaagtttctgattgatgaagcacgagtatgtagtcatgtgatttatgggtcatgtcacttattcatatatctggaagtgactgatttattcatcccaggagttgtttccaagtcatgcaactgctttgtgaacacaactgacttagaatctcagaagatgatgaatggttcatgcacttgatttataagatgcattactgacttataattcctccagctgaggcagaagtcagtgctttatacttgggtataaacattcattttattaataaaataagactgatttattttacttatttgtgtac

SEQ ID NO: 40732 - DNA, 445 bp, Homo sapiens
tacaaattggggaggagtagaaataaagtggatatgaagaaagttgtgaaataattacacagcagaaaataagtagttcttgtatattatttcttattaaagacagtttcattttgtcaggaattatagccatgatatttttaaagtgatttgcaaagactacattttagtaatagcaaattgggtttcatttttgcttttaaaaggaccttgtaatgttgagcaatttcgtcatgctttgagaagggtcaataatcattccagtttctaaacaatctgcagcatttactaataacctatcatgtgacaagcattgtggccaaacattttcctgaacataaattaggtgctaaactaacaactcaagtaattcataaggaggtttaaaatgtgacagagacacaaactggaagctggtataattttagtttctataaaagtatag

SEQ ID NO: 40733 - DNA, 507 bp, Homo sapiens
atttcatttatctctctctccaatgtcaccaaaattttccccccatatctgagagactaaaatgcaaccttacttgcctgagtccttatcctaagtagtcactgtccagtaagcaggtagcatgtgtccctacaggcacacgattcaaaccaagaaatagaaaagtcttgaaaaaactttcacattcaaaagcggcacctttgttgatctccgagagctctggtacagttcctcagcttgttgtcagtttttgtcactaaaatactgccaccttcaggaagaaatgtaggaatctgcaattgcattagtgagggaatctgactgagaacccttaaatccaaattccacacggccctttattaaagcatagctataatgtatcctaagttattttttctataaaactaaatattagtaatctattttagtagattttttccttaatagctttttttttcctgaatagctagacattacagtgaaaagctgcccagaaataacaaatga

SEQ ID NO: 40734 - DNA, 445 bp, Homo sapiens
atagcatttgcatacaactgagtttatttatctatgctgtacgctaagtttaggggcaggcttggtgcacagatggtttcgcccaccctttgcacagggcaagccccccccaggcgcccaggctgggaggcccaagtcccggcagctgctgcggtggacttagaggcagcagctcctgcttctgccccaaacgttcagtgtagtcggattcccggggacagcagggcagtctgcgcgcacatccccggggcatcgcaggacacctgctgccccctatcggtggtgagaacaataacccgaacccggttggaatcaactggaagaggccttttgaaaaaaagaatattccaggactacgcagtagccagacgactctctaagaacatgggtttccgcagtcagctccgactgcctcgttttaatgcagtttttcgccattgtagga

SEQ ID NO: 40735 - DNA, 1987 bp, Homo sapiens
agaagtaaaaggaagctatcggttaccccgttacctctgaagcctgtatatgtgaaattttcttctgagaccgagcattaaaatttgcttccacttggacatagccaagattgctaacaggctgggaacgtgtgtgtgtgcgtgtgtgtgtgtgtgtgtgtgttgctacatactctgggatttctaattttattttcatcactttctccccgcttattactacccccccaccccaatacacacacacttggcagtatcctaacttcttcactcttgtccacatttgtcttggcgctctggggaagaaggtaagaatagatagacgaacgaaggtgcgtgcaagaaaggagggaggggaggaggtacggtcggcttgcacaccagactgtgcttgtttgagcaggaatagtggcggggtgtcttcgagaggataacggaaatgccccaccacacgcccacagcgcaagtgccggcgtccccaatcggccagtggcagcagcagaaccggggtccacttggcacctcaggggctctcgcccgtccgctctgggcgtcgggctgtccagtttccctgggaatctgggagaggaaggaggcttagctagctctgttctccctgccagtacgctgtggcggcggcccctggccagggcccggccaactccccgctcttgggtggctgcaggtgcccagtggcccatccccagcgggggcgaaacgccgagctggccgaaccttccacacgtccagctcggagtgcgtctcagtcgcgcggcagaggcccctgggcccgggcgctctgggttcccgcggcctgtgggcgcggtgcacaagggcgcgggcgggcggcggcagctcccaggcggaaggcgcggcggggccacggtcaccgccgccgccgccggggctcgggcggaagcgcgggctccggggggaggggctgccgcgcccccgcaaggcccagggatcccggccccgagcggctcccatccgagcagcagcggatcccgggccgcccttaccctcgccgggcagggatgagccctggtcaggttcagccgcaaccccgcgcgcggcggggcgaggccgaagcccacgcaggtccgcccggtgtgcgtctttcactcgcacacactgagccccttgccaggcgcgcaggcccgggctacgaggccggctgctccgccgtctgccacctccaggacccagagccgccagccctgggctcccggcaagctgtgacttcccggatggggccatgcttttcttccaggacaatcggggctcctcccctcccggcgatctttctaggaggccacctccagagattgcgaggcgatttcctccctgccggtaccaaactgtaactcctctcgctacagacgcggagaaccaaacgctgactatttggcgagggaccaccaccacccagaaaaacacacggttcagtgtgcgttgattgtttgcatcagcgagttcatggcgaatagaagttctctatttttgatagccctgattttcaagcgttttaaaagttacgttctgttttctgcttggtcaacaacacggaaaatggaatattgctttttttgtgattcaaaatcaattgtagttacaatgactttgagaatttcacggcatcttgtgagataaaatggagatgcgcacctaggtgagagtcactggagtggattacgcagtggccggctggatccggctaacagtctctgaggctcattccttttcgtaatcagctcgcccactctagtaggactttcatctttaaattattttttaattatcatgaggctctcagtctaagatagcaaagattgagcgccacatttaagcagttctctcaaactagctttacctttttagggaagtaattcctgggctaatcatttcagatctgagaacaaaagaagttgctaaaaaaaaaaaaacaacttttatttacgcagcagatacttatggatcgtctacc

SEQ ID NO: 40736 - DNA, 4045 bp, Homo sapiens
atgtatatattgaatcaaaggtctgttttgaaggctaagggtcaatagccaatcttccatgacttattttacctaacagcacagtttgcatgtccacacaggtgatggcagtccactgaccagttaaaagttgtttggctatttcagcaaaatgtttatctttgtgtgttgttatattgatttttttgaatctacctacgaatgaggcactaacaacctcaatgcattagagtcctgataaacttatcttgcactattttggcctatgtgatagctaacccattgacaaaagaaatccaaggtgataaaagcctttcttggccacttgttagccgggtcaggctgtaaaatcgtaacacaatgcaggcctcttccatggggcaccaaaaggcagcgatgaaaaacccccctcacttccatatccagtggagttgtagtttattaccataaccctcccaagtcaaaaggacaccagtttcaagccttgcaacttggtgcagacaggggttttcccctttaccccactctgctgggcctctttacctgtcctctcctactgtctacaggtcccgaacattagaaaatagaaaatgtgatgatctttgtgtgtctctgtaaaatgtgtgtatgtgtgcgtgtgtttgggtgtaacgggcctcttgtttggctgcgcggcctgtccgtcactgcgcgggccaatggcaggctgccttatataaaatgagtgttttcagtctctccgggttgcatgtactgtatgtggagcagtgtacagtgaagcggaggcagagcggctccgcgagcttctctccactttcccatagagaaaccctgactggccgctgagggctagctacacacacgccctcacgcccggcgagcccgcgaggtaggcgccccccatccccagccctccctgggcgcactcccctcactttctgttttcctactcacttgcgagccgccgggctgcagccccaaggactccgcggcaggagcagcggcggcggcggcggcggcggcggcggcagccggtagggtggacttgaggaagacggagggaaccccgcgcgtccggagccgccgccagccggcccgctccctgggcactttccccctccgccaaaactttgggtcgggagaggtcgggggcgagggtcgcggcggccgcgccggctggggccggggggcggggggcgctgaggcagtgccctgcgagcgggaggctgggggccgggctggggagtagtaggccagccggtgccaggctgcgtttgcaaccagcacctctcggcacacaggcagcgccgcctgagaggggcacgggcgccggggcgcgggctggagcggccccaggaaaacaacaacagagccctcacgccggcgggcggctcgtggccgcccggggagccccaaacttcatctcggcgaaagtacgtggagccctgcctggtctcggctgccggggaggtggggcctggggagcaggggcagtggaggaaggtacgaggagccagccttcggtggatttattgaacgtttcgtctgcgttggtgaccgggaacagcagcccagttgctcgttcatctggagagttgggatttgggtgttccggccccgcagatcagtgccctctcaccccccacccctacccaaatgcgcggcgagtagagaaagtgctgttttagtgccagagtagcctggaggaagaatagggggagagggggaagagggcgagggagaaggggagagagaagagggagggaaggggggggagagagggagacagagagagagggagagagagaacgggagggaagagaggagggggaagaggaggagggaggctgtgtcaggattttgcttgaatgtgggattatgttgtgtcaataagtttaaggtggagagagcgaggctgagggtggtggtggaggggaggaggaaggccttggccgtttaaagtcttatttctgaaggtaagttacggctttgcctggtcgcgatgacagaaaacttgcagatcctttatccggggatggggtcgatgcctctagaaagagctccctagccctcttaagccacactcgtgttacactgttatttgctgcgatccgggtcgctagtaaattacagaaatcagactcgaggtttcttttcctcctccacctcgtctcgctcactcaccctctgaaatttattatcatattttatttattttttggtattgtatgaaacttaacataactgagaccgaacccgagtcctgtaatttacaaggaccctgaatcccagaatctggaacacgtttatgtgtgaaatagccgcgatcatttctgctaaatgaggaaggtaaaacgaaacgatgcaaaaagctaagacacaacatgtacgacagagggggggggggggagagggagagacagagagagaagctattttttgctttcctttctgtaggaaggaaaataaagcgtgcattccccttccttcccagtgtgtagggtctagtcaatattttaactgtctgtggacaaattagtccaggtggatcttgttgaaaagtttcgcgaggtggggtggaggtgggggggggggcgaaggggaaggtgggtggaggttgtgggggatggggacggagcgagctctgcctctgctaatggtcattggcctggggctttgaaaccattgcctgtcctgctaatgacacgtccagttctcttctcccggccgcggacgccgggctgccgttcccggggtggctgactgggactggggtactttccccgcgcggggaggggcgttcttcgccatctcctggggttgcccactggcggcgtgggggcccccacgcggccccccgcccctgcgcgccgccgccacctctgctcgcgcgacttttgtaggcagccagcggcccaggggcgccgggggtccccggcgccgacgtccccgcgcggccaccccgggtccggccccacgcgctctgcgccgcgcggtccaagcccggaatggcagcgccgggccgggcgccggcggtgcctccctggggggcagcggaggcagaggcagtggcggcgggatcttcgccggggcccgcgggaggaggaggaggagagggagaaggaggaggggaagaaggaggaagaggaggagagggaggcgttttctgcccagaccgccgccagttcgagcaggcacgggcacggggacaccccactcgttgctcctccgttatggaaaggtgtttagcagacttttacgcccggagtgtggtatttgcacttcattttttcttcccccctctttcccaaagcaagatggactctattccctttctctttctcccactgcctctgcctctgtcttgtcagcctttaagatcgacattttgtactaagatgcaaacttgatggtgaccagcaacaaagccggggtgggatccctcgctctcttcctccctccttgtttcctagctccccccaccccgacctcgcagacctggtggccctgcacttgccgctgtgggctttggcgaatgtgttttccctggtcggttcctatctccaatctggggattgtgacccgggctgggtgtttgggagacggcagtggccgcccaggtctgaaaggctgagggcttcgatacctggacccgctgccgccgcggtggcacctcccgccgtctcctgggcaaggcgaggctcgggctgcctatcgatccctatgatttggttactggtgtgtttgtcctgggggcggtgatcacttgtgcaagttgatgaatgatcgcggtgtggtttttgcgtttgcagaatggatcaactttctgctttgtacatgtggggagtaggaagcgagggtacgggagataccctagaatgccagttgggttgccccccagcctctgccctttcaatacggggagcttctttgccttctgttcccacagttctccagtgtcggggggtggtagagaaaggggaggggttagtgggagctggactcctgggttttggtaccttctcttcatagatgttacaggact

SEQ ID NO: 40737 - DNA, 1261 bp, Homo sapiens
ggcagacactttctgccccacaataggacccagctaggcaagcctggggccctctggccccaggcagtgaccctgggggaggaaggggatattaacaggtcagagtagaggtggattggcagagcgggggctggtgggaggtgggaagcttacatcatttccctgcaactgggctctggcggggctgtaaggccttactttcccctgtgtaatagtttaccagattgacagagattcatacaaggaaggaaaggtatggcaggatggatgttcacgctgtttataaatccttgctattagatgaaactgtcaataagtaactagaagcagccagtactgtctgtgcttcgctctctcccccagctgagttcctttctgctccgccccatccctgctctctgctgctcagatcagcttcctgcttctcatgaaagctgttcccctataaagctggtctgctttcactgaaagaattatattcataagtctgaggctggttttgtggaagtattgttggtttggtttcctttgggggatgaaggaggaggaaacaattttttttaaaaaaaaagtgggggcaggctgaaagagcaaaatcatcttgaattttgttgtcacatcgtgccggtgttataaccagctctgtagactgccgcactgaaaacatttctgtgagaggtatgtgcttgaaaaatggaaaggtgttggctgtggaacaaactgcccgtccagcagctgcttagatggctgtaaggtcgtaattctatctagtgttttgatatggaaagggtaatccttacttgaaacgtagtacagttaaccagcttaatggtaaaaaaggttaaatatgtgcttcgtccccacatcaggactcctgaaatgctggttcaggctgaaaacgtctagtcaaatccacagtgttattccaggctcttttggtggcggttgtctgtaaacaagatgatgatttttaatacgtctctcattatttatgaaccacatgacaaagattaatgagagactccaagtagcctagaagcttcagattcatgaggagctttttgcactgacagatggcaaaagtaaaaggaaatgggtgatgatttattgtaaactaaagtgaaagttttaaagtttttagagggtgtgttacatttaagtggaaaaatctggaggagccactaaaatttagaagcatagcctaaaaccattgatgcctgacctatattaaggccagaagccttttgaacacacatgcatg

SEQ ID NO: 40738 - DNA, 984 bp, Homo sapiens
caatttaaatgtttaaatcattcccatcagcatcagcttcactgggattgttattaatacatcttccaattctactactaccattaaaataaccttcaaacaggcctgccaatgctcagcttaaatcatctttaaaaacgtatgtttatagaactacccagagtaatgtgtggtctctggaaaccatcaaggggaagcgttatgaaattttctattgtaagcagcagaccagctctccaagggatttcccagactgcccgataaaatcaggcctcctggacaggaggtgaagtcctcacaaagtacaatagatacttgttttggcaacaatccagatactcaccattaatagcttcttctaagtcagtttgattatagcttgattgggagaaaacaccctccctgtctactttgcctacatgaaaggcatgaaagaggtggggcagaggagaggccttctatcattctctaagacctagaaatctactttcaccggaaggcacagacttcacagaagaattgagcaagagccagcgtggaaatattggacagcttcccggcaactcttgagtcaggtcattattgtgcagtttcatcactttgtttgaagggaattcccaggacttcaggcgtattcaggttcatatgttatgcagaaatgcattccaaaatcaaaaatacggttactgtgatttgggactttctacccctatacttcctgctattcactaatataattatgcatgttttataattagagtatgttaggatacacatttgcatcttgtatgtggttgggaatacattctcaaatctatttgtgggcccaataagccatgtgaccatggcaagtttcctcatggctctgtatgtcaatgtactcatctgtgagctagaggcaggggtaccagatggtctttcaactccctttgactctacacatacatttccatctacaaactaagtctgaattcctttagaaaa

SEQ ID NO: 40739 - DNA, 584 bp, Homo sapiens
ttaccaaacagaatctggatctgcctgcctggtgcagtagagccaaacatccacatggaggtttgcagagagaggaaggagggcattcatttgcagggcaccatgcagagagaattgggaatgtttaagacctgacctccctcatagcttacaagcaagggtttttaaagacagggctacatttcagaaaagcaaaagtcacaggcagaattgtaaatcaaatacacaatggttctgtgttggtttggcccaggaaagcaggctatcttgatgtgagggcttacaggtcataggtagattcagagattatttgaatttcaattggttaagcaaataaagccttgtctaaaactttgggtcagcagaaaggaatgttgaggtttggcctgtgggcatgactctccaggcgtgttctctccaaggagaaatttagaacaaaaaagtggcactcagagttcagtcctcagtgccctcttacctgaggtctatgtgaccgtgctcagcattttccatctggcggtccggctttctgaaaaacaactcggggacacatgtcaagatattagagttggctgggcacggtg

SEQ ID NO: 40740 - DNA, 916 bp, Homo sapiens
ttgcccttcattcacctgtgtcgtccttatcatagaactgttggatttgatttatcaggagaccctggttgtgcctctgtgactatgagccgtggccaaatcagagaagcctgatagatgtggtcggagtgattaatagcaacctgtctccagagataaaagagtggcgagtgagacgcattgccctgactccacttctaattctgtgttgttatatgcggctgtttggccaagcggaggcaccacacccacagcaccgtatctggctgcaagccctggatttcctgggtcaccaagataagattctttcagtggaaaagaaaatgatctggggcagtggtatttacccagagcagggtgtgagcacagggtgcatgtgcagctgcacttccatccctgactgatttcatcactggacaaagtgtaagctggagaaggcacaggaaaggcgtgttggtgcaggtttcacccctgttcctgcaatgccattatctggtgctctcccagtgagaaattcatcagtaggacaggatgcccaggaatgtgagatctgagtccagggaagtggtgtctgtttttagacactgtagttgctaagcttcaccgtcttctgcaaataaaacagcattactttgcaaagccaggtactttcctacttctgttccgcagatatctaaatgccctagcataagaaggattaaacagaaaaaaatctccggatatatcattgtgacttactaatgttaggattttcttcccccagcaacatgtcttcaacattgtcagagcatttactgattgcagtcaagggaaaaagcaatggtgactatatcttctttctcaagccagttcctaaattcttaaacagagcttctgggactgtcatctgtcaggaaaggggaaattgaggtcctgg

SEQ ID NO: 40741 - DNA, 1898 bp, Homo sapiens
taaaacggttcccccaaataaagtgggaaaaacttcaacgtacaatttagaatgtatgcaagtggctgatggggcgtgagggtcacgagaaaggaagagtttccagcaagcttatttttaggattaaaaacgacagcaaaaattacacggccggaagattcttctgattgaatgctgagttgaaaatgaaacttaattgtgtcctttacgtcctcttcgctcctatgttcatgtgggaggcaaacggcagaaaccccttctcaccgacttcgccaaaatgcgcacttccatcgcaagaggcccgggccctcccactctccctccctcaaccccaaatgcgtctaagcactgagaagggagaggggtgcgaaagaaggggatccctagcagctgcagccccttgcctctgatcgcgccctttcttgctagttaatttttgcgcgaggtgcgcggtttggagtcttcctgtgtgtgtgcatttggagatggagaaccgggtggaggagatgagccccgctctcacccagggggaagaagacgaccagggaaaggaagggaggaagaaggggggcgcccgattccccgtggggccctcccacgtctgcacttcgggcgctcagggcccgagtgttctgcgccccggccaccctcttcagggcgccgccgggctggctggggcgcagcccacacgcccgcgggggcgaagcgacagcagccgcagggctgggagcgaggagccactcaccgcagcacgccgagcccagcaacagcgccgctaccaggggccacatctccgcgcccgccgcggggtcgccgccgccgccgcaggtgtccggagcagcagccgccgccgccgttacaggcaggaccgaccgccgccgcgcgtcacaggcaggacccactgcccaggctgcacggccgcgcgcacgcgcgctcccactgcttcccgcccgctcccccgcctgctccccgcccgcgagagccgcgcacgcgcactcggccccgccccgcaaccgctgctgttgacgcggcgccctccccagtcgcaggctccagacccggggcccgcctgcccgctccacggaggccggatgcctgctccagggcggtggcacgcgccgcgcttccaggtcacgtcctgtcgcacccgcccgcccctggggtccgcgtgctcgcccgccgcaggaggctgaaccctgtgttcccacgctcgccggggacctcattgcacccgttcctgtccgcgggtcggttcctgcctttcgcgcggcgctgggccccactgtcctctctctctacttttctcctctttgctttcactcccaccctcgcgcttcaggggccgggtcccgtcccgccccagcccgcgtctctccctggacccgacgtccggctgcgcgcgtggaccaggacacctaggctttcaccagcgcccgtttcctccggacgcggccgtctagcgccgaagcggtccctgagcccgaggccgccacgcccagggcagggcggtggtcgggtacctgcccgcagggagcttccactcgcccctcgcgggctctgcgttcggctcgtctactcgctctgctcttccctatgcggttctcttccctctttctcacttggttctttagtgttttcatcctctgatcagggttaatcaaacaagttccattcacggtggtaaacattgttacctgtgaacaccgccaccaccgggactagcgagcattgtcgcaaacaggcattagcagcgtatccaacacatccccaccagcaaggttattgagcttggtttgtgactgccccatgtgcagccctctgcgctgcgcttgggtttaacatgcttgaaaaatgggttcgaaatgtggccgcaagccacaatagggacaaggcttttg

SEQ ID NO: 40742 - DNA, 1350 bp, Homo sapiens
ccccagttgtatgaacagggtcttaaacaacaacaaaaaaccccaaactagaaaaaaagccttaagtgataatggcattcctctctggaggcgaattttggacggtcttataatttttctagacatttacttgtgtttttctgagttttcttcaatgagtatttgtttcatctttacaatcagaaaatatagtttgtgttttctggtaatgcgtgtgtgttggaaaaaaacaggcaagctgtcttccgatcctttctgccgttccaaaacttatttattctctctacaaaaataccaagtcagggctgcgtgagctccacggacctcccgggagtttggggtgaagtgcccttccctggctaggaagacggaggcaaggaattgctaacccgctctcacgaaactggttcccagcaggaccaaggagggcatctccctgggggctagcaggcacccgggcgctcggggacgccggcacccacctggacggggccttcaggttgctcttccggaggaactcctcctcgtagcggagcagcttcagcttctccaccaagtcctccatcaccacgaacatgtggtaggccgcgccgggcccccgctccaagaccacttccccggtcccttcgccacgggacctaggcaccccatcttccaaacccgacgtcgtgacgacggccagagcagcagtcatcgcagaacggacagagtccagcgtgggctcaggcccacagacctctgcggcctaagccgccagccctgccgccgccagtacagccacgaccggttaccaggcgaccaccggacaatccgtcaccagggaaactagactccgcctccttccctccaatcagggcggctttcctgaatgacgtcacctgtggccctcttcttgccctgcctctgtggaaatggtggtcgggaagcagccccgcccctcatggaggcgtggcgttcgcgccccactgccggctgcgtcttctccctcgctgaaagtctgaagggagccggcttacgtttctgctccgcttgcctagtgagtcttgagctggcttgaggtgtgttggacctggtggttgctaaaagcaattaagcgggcatctgggtcagctagtagctgttaaaaagattaaagggaggtgaagacgtgtagcactgaaggctgcactggctcactgatacctttattttctcagaattgaaaagtttttcatagttgtaaagatagtcaataccataggtttcacttttactgcaggaactttccaacgagaggtttctctcgttctttctttaattttatctttctctcactaggcaatgctgcacttaacagtatattgtaaagct

SEQ ID NO: 40743 - DNA, 1620 bp, Homo sapiens
tatctaaaataagtgacaattctattaattttatcaataaaaaacaatgttctatataaagggaatcattttgtttttgaaaaatcccacatattcagaatatagaactagagattttacttttcattttgttccttgagtgactcattcaactttttcactgtctcaatttgtttattcagagaatcacatgtgatctgtaaatctttattcttcttttcagtactttcatttctgaaaagacaagaaaatgagttggcatcattatggaggaaaacatatgaaggagaaaagaagctcacagtgttttctttactatctcttctaaccaaattgcatatgctggaagagaaggaatgttatgaacaagcaggacataaacagaatttcatctactctaaaaggcagtaaatacatgttttggttgactgatgtggtaaaaattactatgaaatagaaatgtgtggggcattaatctcatatttatggatataaagccttattttacagatgatattgcattacataatttgctataaataagtttagggttctacatttgtctctttaaaactctgcatctaatagtcctaagtattttacctgcaaggtaaacacagaaaaaaatcctttctaaagtaatactttgatactcaactaccataagcataaaatgtcttttttatttcactaagcacaaagatttttaaaaagcaacccaaaaaccaaaccaaaacaaacaaaaaaaaccagtagccaaacttggccagcagtttttgtatctaatccatacaggaattttaacaatctgagtttgagtgcctttagacagtcctgaccattacaaatgaccttttccccagccagcttcatttacatgttatccacttgtccattcaaggaatttcaccttctagcccctaaatcactagctggaacataagcaggtcttagaaaccacgtatttttcttggacgctgcctatctcttaggttctctatgtgagacaaagcaggtatcccctttttaggaggtctgaggacctcaagctggaaaataaaggaaaatcctgagttcactcaagggaaattccagggacctagatagccctagaagtaaataagtaacttgttaaacaggaaggtaatagtagcctaaatcaaagttaacaaacttaagagtaccagtgatacttgattctttatagaacttaaagaaaacaacttaacacatgtccctgagttgtatttcagagacccggaccctcattgaggaagcccactgaccagatccattgacaagtagagctcaggtaaggagaaaatgaaggctgaattttaaccactgttctttgttctaagtttctttctcagggtcttgaacaaagtcactctccctagctagttaacatttttctactgaccccaaatgtttaaacaaagctgctcttccttaaccaactgcaaatcgaaaaatctttgggtctacccatgacctgtaagcccctgcttcacaatatcctgtcctttaaacttaaaccaatgtataacctttaactatttatttatgatttttgtctgtaacttccactttcctgaaatttactcgcctttaaaaatc

SEQ ID NO: 40744 - DNA, 1803 bp, Homo sapiens
ttgccccactcccgcttttcctagagccttcagtgagcgctcttgcctctcgctgcggccagcggaaccccgacactcactagcctttaccagtacgaaaagacaacagagggatcgaaggactgtcctttctttcccaggctggggccgccactcctcggcctcactgtgaaataagaattgctaggggaagccccatctgtcctctaccccagagcctctcacctccaagtgccgcaaaagctgagtggcgttcgcctctgacttcacggctttgtactgactgacagtcaggagcaaggacttcaagcaggcagtggagtccattgcaccggccgcggcccggcttagggaccaccaccgcccagcgtgcgccggcctttagctttcgccgcgctttttttgattttcggccccaccccctcgctctcagaagcttccggatccggtcgggctccggaagtccctaggcaccctaggggaccgttctcggtgacggccggggtgggccaggggtcgaggtgatttgtgggtccaggacgggggttgggagctgcccccgctaacccaccctcgtctgagaggccgcgaggtttcggcctgagatcccgtgaaggcgagaaatctcgcgatttctcgggagaggaatcggttaggagaagggggattcctcactcagctgtgcgctctgatttcgtgcgcttcctcgtccttcatgttggatggccagtttttcgtttgtgcgtcatcctctacctgagaaatggtcgcttgcccctagtctagacacggtgaggagctctgaggagaagaatcttgggccctagattttgaggcggcctgggaggggcctcgtttttaaatctctcctacacccgccccttctgcccggggatggtagtttctcagagtcaacctattggcattatgtggcaaattagtcatgccctgaccaaagtatttgtcacatttattcgagaagactacctcctgctgaccctgggccaggtattgctccggagggtgttactcgttagcgtcagtttttgtaagtgaaggtgtctgtttctctctggcatgattgattgttttataattctcgatgtctacgaaaatggcactattatttgcgttttttaaatcggagatagcttaatattattgcatgtgtatgtaatgaagcgagtcagttactggttttggagctttttgcttaatatttcctaacgtcgaataaagctttaaaaaccaggatgtagaaattgtaagaatagggtacatttccatttaattaaatcgtttatcagaaatcatgttttttcacttcaaaagaatttttttgaattactagatttttgaagacaggtttggtgttttggttttgttttttataaaagtttaaatctgaaagataaaaatgatttaaccagttgggacattcatgtaaaaatctttgggtagcttgtgtgttcatttatgctttcattcattccgtaaacaattatagagcgtgtaacatgggttagaaactgccagtcagggaacagagatgaagtagtatcccctgctgcgagggaactgtctagtaagggaaacatacaaaatagtacttttgaaattcaccacataaatgagaggcaccatgcagtaacatgcagcagtggtaaagagtagagagccaggttgcttacagattctagctccacctttgacgatgtgactctaggcaagttctcactgctgcagaatcttcattaggtaaaatctggccaagggagatacctggttcataggactgttcat

SEQ ID NO: 40745 - DNA, 778 bp, Homo sapiens
caagaattgaactttcatacccatgatgatctttcccccaatctgcccatcttctaatatgcagaaaatttcctcctgactcacagtttctataccagaaaaagtgagagcaaggtgaacaaccagcttccccactatcctgggttccccagcaggagatctgtccctgcttcaatccacgagaagcctcacaagtgtctggagggagaaacgtccttgaggacagtaggaaactactgtcctcagccctggaaactgtgctaggtaactcagacaaatcaagtggccgttcagcagcatcacactgcaggaagtatgttccacaggtcccttgggcacaaacccccagccaaccttcccacactgctggggaatcccccttaggactttccctatttaggacagggcagtgctctgatgatttactagagccaaggccaacctgggttatagcaccacctagtgccgaaaagaaggcagcaacctaggagaaaaatttaaaaaaaaaaaaaccaccaggtaaattacgaataatcttcaagcaaacatacccagtgaaaacaaaacaaaacaaaaaccagacagagaagactgggagaggtcattaatccttcagtgcaaagacatagatgtacatccacaagaaacaacagcaaacagagaagcaggacctgcccaaacaaagcaaggaatcagtgactgaccctagtgaaaaagcaatatgtgagctctcggataaagaattaaaaataatagttttaaggaaactcagtggtct

SEQ ID NO: 40746 - DNA, 900 bp, Homo sapiens
aggaaggagagaaacacacataggtaaacagaaggggacatgcaaagtctataggtattacttaataccttttaagactgaccaaaaaaatgtataaagaaaattttctgcacagaacccccatttagatgctattgtccaatttctgaattgaagctgtcaactcagttggcttccaagaattacacaccagtctcaatctgaaaagacaagacagggttttctataattgtatttgctgggatttgtccatggaaaatgaagagaaaatagcacatagaaattcctcccaaacttgttttatcttctttcagcaaaaccttttaaaaaaaaccctggcaaatagccaactttggtgcattattagaatgcaaagtgataaaacaagacacattgatctttggggcacactgtaataaaagccttttaagaagttcaaaggtggaaaaaaacctcacacatgtaaggaagacttgtaccttgacctttgagcacagcacttacagacatgcaatgaatcactggtaattcaaaggaagaggtaagcacacttttcctgctgtcacaaaaagaactgcctcttaaaatttcttatctaactcaaattgcagacttttgaagtgaatcaaattgtcttgtattttctccaatagacaaatgtcagtctgaggaacttacttaccgatcattatattatcttcctctcatatcatacaacaacaacatacagaaaatgcctggtatattttagacactcaaaactttttgtttctaattgacaatttgttgactgtctgattttccttgtactagtgtcatatccctcccacatcaaattgccagacttctgtcatttgaagtaagctttaaaatgtcatctctgctgggcacggtggctca

SEQ ID NO: 40747 - DNA, 3666 bp, Homo sapiens
ctagattatcaagtttatcttctgtgattaccagaaccatgggaacagattgaatccctgtggaactaatactaatgtccacagagctacctgcagagaaaatctggccttgttcaattctacagtgaatctccagaaacgcttttttttttcttttagtttagtgaagcatggaagacttaggaaatgacagactgtgttttgatagtgagccaattgggcaaggtcccttgatagttctgtgctctgtaagcgagctagcacattgctgatgctcaataaatgtcacatattgtcaactatcaattattcagagtgtaatgagaaaaatgccttggcatgcattaccgcaaagcttaatcacgaagctgtgtgactctaataccatatcatataacagattggtgttttacttaaattgctagactgtatacatttgtattaatgacacatctttaaatgactccaacttgtttatagtgacaaccaacagaaatcactgaaattattgaacatcagtaacaggaagtttttaaagtaggcctaaagagtattcataaatgtactgtgatggccccaaatgatgccttgctgatgcatagtgtccattcaagtcccctgacctttcctcaggctctgttttcctggatttttcttcctcccccaactcaatttgtcctcatgggaaaatccaactcacctcactgggaaacattccctgaaactattttctcccacacaaggaacaattttgatgtctgtttgtaatgctagtacttggaacagtgcacatggaatatgttcaaatacatggattttgaaacgtacttagagcctagaaagtgtctgataaatagttgttgaatgaatgaataacaactgaaggataaaactaaattctcaattttctgtcttttaacgttgctctttggtgcatatacaaattaggaaataaatggaaaagagtgaaaagaaagagatcttggacaacatgagcttaattgtcatcttcagatccaaggtcatattggatcatctgaagatccaagattggtcattttaagatccaagatccaatatgacctttgatcttaagatgaaaattaagccccatataatggggagctctcctcttcctcaatgcaggtaggatcagtcagtctttgaaagatcctgagctacctacaactacttattcaagtccttaagctacatttccaaacattaagcctaagttatctcaggctgtagcaaatttttctttttcagacggagtctcactctgtcgcccgggctaggctgtagcaaattttaaagcctgcagtaaccacattaaaatgaatacaagggcagaatacatttctctaaccttttagctaatttctccaagttaatctggctcctactgttaatatatggtgaatatatgccctcatgtcctgatgacagcagcattaaagcctcagtagatacgagaagaagtatagtgcacttgagttgagtggaaagattaaatagggaatatacttcatctgtgtcctcagcaaggcctgattttattcttaaattgagaaaaaaatgaaaacaaatgtttcagcttccaagacagaaccatattctacacaataattgaaaaggagtttttaattacactaactaggtccgaatcttgttatcttgtgccttgctaaagagctactttctgcgggtagctcaagactttacagaaaccatcattcattcttaggatgtggttgctaggtcattctctgcttaaataccaggatattctctcagtcctaggaaagaaatggccccgctaagaggtttgacctgataatgatgacacattatactaacaatacaaattatagtaaacctgtcaaatcagttaaaaatgattcccttaacaggtactatagtaaaattttgttctcatgtagcaattatttgagagtctcaaataacttcatataaataagtgctatcacctgctcacttccaataagttgactgtagttgaaagttcatttcaatgtttagttaagagttaatatcttctcctcccccaacacgttggctggctctccaccttttactgatgccagtgatgacattgaatcataccaagctgtactatgccctcattccttcttatcagaattttgtaaatgagcattacattttccaaagctttgtggtttgtagagttggattgccttgctggcatgactcagaacagaaactaagttcggcttgcttcttgatagtgtaaaggtttttttgtttgggtgttttttttagtttttctttttctttttcttttttttttttttttggagacggagtcttgctctgtcacccaggctgtagtgcagtggcgcaatctcggctcactgcaacctccgcctccctagttcaagcaattctcctgtctcagcctcctgagtagctgggactacaggtgcgtgcaaccatgcccagctaatttttgtatttttagtagaaacagggtttcaccatgttggccaggctggtctcatactcctgacttcaagtgatccacctgcctcagcctcccaaagtgctaggattataggcataagccaccgtgcccggccaaaaggtttttggtttttttttaacctttcttttttcttctttaaaattttttaaatgatagcagatctgatttcacatgtttgtcttctaacatttattttttgttgatacgtaatatgggagcttaccaaggtctgtcatatcatattaaagtaatgatttctaagtataaagcatcagagttgtaaacagactccgttgacaagcttcattaattcttcccacttgatctttctatttttcaaagatattccaatttgatttcaaagagcatttctatatctttataattaagattggcaattttcatggatttcagcttttttctttcatagatcataagaagagacaagttctggggaaaactattgaaaacccaagcatcaacatcaaaacaaaactacaacattctatttgttttctgtagccagttagaaaagactgtaaactgataggccagtgcaggaaaatactgactccaattaattcaatttaatttgaatcagttaattcaattaagttcagtaatgtttactgagaactattatatgaccagcactgtgctaggcactgaaggcacacaaacaggagtaaaaggtagtaccagccttcaggaagcacataatctacccggaaatactgaaatgtacctacataaccatcatgtgggaaaacatggcctaacgattaaaggtatgcagatgtaagaaaaagcagccaaatctgaattgggggatctgagaaggcttcattcaccaggaaggataacagtttctggcccatgaaggatcttgtattatatcttcaccttcccgataaaactgagttgcccaggccacattcacctctgggcccagttggggccacacttacctaatttgtctcattttactggctcatgctcttgtgtgtgaaccacatctctacttctgctgtaaagctttaccctgttatttctgaacacaccttggacaaattatgaaacttgataatactgtctccatagaattgctgtattaaatgagaaaatgtatgtaaaaattt

SEQ ID NO: 40748 - DNA, 1734 bp, Homo sapiens
ctgtaacacctatttacatagcatttccattgtattaggtattataagtaatctagagatgatttaaagtatacaggaggatgtgcatacattatatgcaaatactatgccattttatataaggcacttgaacatctgcagattttggtgtctgtggcgggggtgggggtcctggaaccaatcatctgtggatagcaaggaacagttttaaggttaggatttaattgagatttatatttgcaactccaacgatatctaggacaatgtttggtgtgcagtaagtgtttgatgaataaatgggtactgatgaggatggtgcctatcaggaagccatagtcacaagattttgctcttacccttttatgtcagtgacaggacaaacaaatacgatgtgatgtaatttatccacattgctgtccagtgagtcagtaagagaactgaataagaactcaatagtattttttcatttctgcttcttcagtttcatccacacagcagagccagtctcaaaagatatccacttttgtgccaattcattataatttaaatagaataactaatggatgagaaccactgtacacataacaaattaaaaatgaaggtatttattttcctgtgtggattttacttattccatttactttcttcagattgacctcaaatatctcaggcaattgaatcaggcagaaaaaatatatctctcacactgttatcttcaatgacagtggcaatctgaatgaattttattgaaagtaatttagcattgactggttaaatatacaaactacccatctaaatcagagatagtgccggactacttcaaattagagacaaaaaataaatatttggagattacatcacaaattggaactgtcttagaaggcagttcaaatgtaaaaatgaaataaattatttaaatttaaaatattttactccatccatcagtgacaaaagcagctgcactttctctttctaatcataacaatagaaaacaagctagctattttttaacagacaagttgaggaaagatatgccttcttagctccattcttttgccccattaaaagtatattttcgaagaggtattctggtgatctttaatccaggcagtaactatacagagaaaaaagtagccacacctgtagtatagttgaacttttaactacctttaaagaccagacaggaattctctggcatttttcctgagagttttaatgtttaactttgggttgtgccccacttggggaaagaatatggagggagtatagcctggtatttaagaatgtagcctctggaggcagaagtctgtttaggtcttataaacacctaagggctgctattgttaaagttacaactgtacatgattatggtagcagtgttgaggaaattcctactggggaccccagtcaacaatttttaaaaattttttttaaattttttgtttttttagaaacaggatctcaccccgtcacccaggctggagagcagtagtgtgatcgcagttcaccacaagcctcaaactcctgggatcaagccttcctcccgcctcagctttctgtgtagctgggactacagtcacatgccaccacacccacctaatttttttatttctattttgtagagacaaggtcttgctatgttgcccagactggtctcagactcctgagctcaagcgatcccccttccttggcctcccaaagccctggtattagaagcatgagccaccacactca

SEQ ID NO: 40749 - DNA, 924 bp, Homo sapiens
caatgtattacactaatgcaaaatgttaataggagaagctatgtttgtaggaataatgtcatgtgagaactctgctcaatttttctgtaaatttaaaacttataaaagtaaagtcttattttttttaatgacagagagaaagtaacactttgacattacataactatagcagtgccagcaccgcttgcctaccagaatgttttactcagagatagcatgatcatgcacttgatttgcccaggatgatccagtttatgtctgttgtccaggtgtaattattaactgagcctccctttgttctcagaagttttccattcccaatgataaattgcatggtcactgtacatagaggggaaaagagaagtaaaatctttttaacgtatgtctttgactgtgccccttttttttaagagtctcatctaagcctcataatgttcctatgaggacaactttgtcttcttcaatttccaaatgggaaaactgaagctcagagaggatagtcatttacctgagaccatacaattcatcactggcagaaccaccagttaaaccttgatctctatgactccaaagctcatgctctatttactgtagtatttcaattctggaaaaaagccaggtgatctttggatatctttcaagatgctgtaatttttgaaggaattctatagcagctatactaagaagctcatatacatggtacaaggtagtagaaagtagagattatatataaagagttttatttacaaaactctgagcactttgggaggccaaggtgggcggatcatggggtcaggagatcgagaccatcctggctaacgtggtaaaaccccttctctactaaaatacaaaaaaaattagccaggcgtggtggcagttgcctgtagttccagctactctggaggctgaggcaggagaatggcg

SEQ ID NO: 40750 - DNA, 1636 bp, Homo sapiens
aagtaattctccagccttgtcctcccaaagtgttgggattacaggcgtgagccaccactccccgcccgagtatttttttatatctcaaattgtgagttttaaattcagtcattattgttccccattttatatatgactaaagttggtataaatttttattggtaactttttcaatagcacagtaagtgaacccctaacctactgactcccaaagaagttcaagtttttctccttaaaataatttgaaaaatctttcctcagatcagtgctccctgtcagattgtcaagagatgtgaagtgaaggaagcagtggctgtgcgactgaaaccctcccttgtcagggtccaaagtctcttttgttctttggtttactttgttgtttttttttcctacatctcattgcttgtcctaaaatgataaataagagactgtctttatccaaatggtgttagtaatctgctcacaggctagaaatccacggacagaaaaagtaagtaaacggagcccaggaatagagaaggaagtgcaggttgtggactgggcaacccccaaggcggcaaagaggaaaccaggtgagttgaggtcatctgggagatattagggctttgatttaacaattctttaccacagcctttggtaaccaccagtaggactttctaattaaggtttgtgtataaagtgtataactgaatcatctttcttttgtcagtgtaattgaacgtaacattcagaataactggagttctgggctgggcatggtggctcacgcctgtaatctcagcactttggggggctgaggtgggcaggtcacttgagttcaggagttttgagaccagcctggccaacaatggcagaaccccttctctactaaaaatgcaaaaattagccgggcatggtgcgtgcctgtaatcccagctaccaaggaggttgaggcaggagaattgcttgagctggagaggcagaggttgcagtgagtcaagatcgtgccattgcactccagcctgggtgacagtgtgagactccatctcaaaataaaacataaaataaaaataaaacataaaaacacagacaccaaatccaggccagattgattcatttttaaatgtaaggctttagcagctagccagacaggatttaaacccaacctccccttcactagctgtgtgacctgggcaataacgttaggtctctttgttttctcatccatgaaatgagagtcatgaaaataatagcctttacttagagggttgtgggcatgtctggagaaaacagtgtctggagaaaacagtggctggcacagcacatgttgggatcagaagagcagggcgtggtggctcatgccagtaatcccagcactttgggaggcaggagaatcgcttgagctcatgagttcaagaccagcctgggcaatatagtgaaaccccatttctaccaaaaatacaaaaaattaccaggcgtggtggcgcaggggtgccagctactcgagaggctgaggtgggaggatcgcttgagtccaagaggtggaggttgcagtgtgatcatgccgctgtactccagtctgggtgacatagtgagaccttgtttcaagaaaaagacaaaaaaaaaaaaaaaaaaagagttggagaggaatgaattt

SEQ ID NO: 40751 - DNA, 2743 bp, Homo sapiens
tcactacaagttccgcctcccgggttcatgccattctcctgcctcagcctcccaagtagctgggactacaggcacctgcaaccacgcccggctgattttttgtattgttagtagacacgaggtttcaccgtgttagccaggacgatctcgatctcctgacctcgtgatccacccgcctccgccttccaaagtgctgggattacaggcgtgagccaccgcgcctggcttgaacatagtattcttaaatatgtttcttcttttcttttccttaattcagactgttatttaaccagttttcttctgaattactgttaccacttactgactgataaggtctcccaccttccccttacccagtcctcactattacccctagttgagccgtccgaaacacagatttttagctagtccttggctagaaaatctttatcgttctctattttctatagaattaagtagactccttccctgtctgtcaaggttttacataatctgttctcaaactgcttccatttgccactacacctttcaaggaacacagtaaatatcttttattcagcatagagagtgtatttatttttatttatttattttgaggcagagtctcactctgtcccccaggctggagtgcagtggcacgatcttggctcactgtaacctcggactcctgggttcaagcgattctcctacctcagcctcctgagcagctgggactatagacgcccaccagcacccctggctaatttttgtatttttaatagacacggggtttcaacatgttggccaagatggtctccatctcctgaccttgtgatccacctgcctcggcctcctaaagtgctgggattacaggcatgagccaccgtgcccagctgtatttttaacttttattttgaaacaatttcaagctcatagaaatattgcaagaatagtacaaataaccactgtgtaccctttagtcagattgactaatgtttaacattttgctatatttgctttctctctctctttttatacatgcacgcacacagacacacacaaaatgttctttctttttaaaaaacaggatcttactttgttgcccaggttgtaatagagtggcatgatcatagctcactgcagcctcaatttcctgggctcaggcgattgtctcaccttagcctccagagtagctggaactacggtcactcactaccatgccaggctaattttttctagagatcgggttccaccatgttgaccaggctggtctcaaactcctgagctcaagctatccacttgtcttggcctcccgaaatgctgggattacacgtgtgagccactgcgcctgggcacaaatttcctaatcatttgagaataggatgcatagatcatgtttctttcttcctcagcacttcattatttcctaagaagaaggacgttttctcatgtaaccacgtatcaaccacatatggtatagttatcaaattcaaatattgatacaatatttttgtcttatctacagtccctatttcaattttgtaaattgtcccagtaatgtcctttactgcaattttaaaaataaagtttaaggccaagcacggtggctcatgcctttaatctcagcacttagggaggccaagtcaggaggatggcttgaggccaggagttcaagaccatcctaggcagcatagtgagaccttgtctctacaaaaatacataaatgaagtttaaggggaagacattctatgactcagaatgaggtgttgcctgatgaaagataaaaaatcaaggatttggtctaggattatgtgttgtactgattgccacatctcttcagtcttccttaatctgcaacagattgtcagtcttttttgtttgttttctttttcatgacattgacatttttgaagaacatagtttagttattagaatgacttaatctgggattgtctgatatttcttcacaattagattgactgaaggttttattgtgtacagagagggggagggggctcagttcttggcaatttcctcatagcagccagactgggtcgcagctcctcctgctgcttcttgacatggacgtgtgttcccacccttttcttggtgaacttgagggcccgtttggtgcttggagtccttgagcagctccatggcatgcagctcgtaagggtgagagccacacacctcttggatcatgtcccttggattttgtatgcttggtgaggcgcctgcagtggtggctgtgctgtgccccgctcaccttcttggttgccctggtggaggccatgggccatagggtagcgcaaagtcctggctgctgctctccagggtagctgtgggaagggcccagccacttggaactctaggattcacagctagatctaaactatgcatttttgtctggaatactatgcaagtgatgtgctagtaataataaccatggttccatagctgtaatatgactatatgcataacacaataagccagagtgcttcatcttttagtctcccacatcgcagcttatccaagttgaatcctattcgtttttaaagatcagcccaagttctacctattagccagctccctgcagccaacacagagttctccttttctgaagtactcaatcacttgtctaattcacacatttagctactgcttaataataggtctctgtgcattgcttattatcattgcataagtagacatctcattttcctgtccttgaaggcagaagctctgtttattttattctcttgaa

SEQ ID NO: 40752 - DNA, 477 bp, Homo sapiens
ttaaaactataattaataagcttaagttatagaaaaatattaccagaaagacactctaataagcatttttcatgaattgtttcatttagtctttaagaaaactcttaggtgacaggttctattattatctccactttacagatgagaaaatggaggaacaaagaggttaaatatatggttgcagtttgcatatctggtaagtggtagatctaggattttgaacttgatctctgactgcagagcctgtggtattagtcattgatgagtatggatggccactgtgatatgagtcatcgccaccaaaggtcatggcaggagctttgcggctctgttctcctgcttctccagagttgaagctatattcatgtttcaggtgatgcttggggctatgattaaaattaggcaagcccatttttatagcttaattaatactataattgtgctatagagcaaacaccaaaaaaacttctctagttt

SEQ ID NO: 40753 - DNA, 3039 bp, Homo sapiens
acgcctcctgtttctaaggttgggacaacttgacctttagttgcatgatcaagtccactccaatatcaagatttaattctgaacatagataggaaaggtctaagaaacttaataatcactcaatattttcaggaatgttgttggtctaatctcatctcaataactgagtctgtgccttatttctctggttaagtctttcctaatacccaagtcttaaatcaggattgtgcttttgacatcttagtccaggcgtctctcttgattactaacacagtacagtgcccccaggtttggaatccttttgtctttgccagtcctccaggaatgacagcttgtgcacaaaagccagatgtatgactcagtcctgttttcttccgctacccaaggaatcctggctctcctggctctgctctgcttgtcagccagaggcacctggcactgcagttggtgttccttcttatgctagatggtgtcttgagtaacctcttactctacgatatgctgtctacattaggaagactgctgtataggccttcctaacattatcttaacaaggctaagtgtcccaacattagctctgtatggcatcatcttctctgtccctaattgggctctcctgctttgtcatcaattcagctttcagactgatgttgtcctcaaactccctaaaagttttgaacttggaagtagggtacaaatatgccaacactctagcactagaagagtagcccctccttaccttcccctataactatgtaatatacccagaaactatcatgtgttgttcatttaccatcaagaaggaagaaacattctcagtggcttaatagaataggttacgtattaggttaggccatggtaagaaacactttcaaatctcagtggtttaaaacaaaaaaacaaacaaagaaacagttatttcttgctcataccttataaccatattgggttggtaagggaggattccctcctgtcatcactctaggcctcagtcagccactgtcttgaacatttgcaattcttatgacagaggagaagagaaaatgtcctatgcctcacacaggccattgagtattcatccaggaagtgacacatacttctgtccacaacacattgaccagaattagttacttgacctcacccaagcccaaaaagatctaccaaatgcttagaatggggagaactggaaattttgtcaaagagcactagtaactgtcactgcagccaagctcactgttagtaccaagacctgccttttccaaaatcaggaagcacaggaaaaaagagacaagaagtaaagaaaaataaaccctagtgcccagaaaatgaaatagagcattgaactgctgaagtggaggtagaggcaggaaacaggagttatagagatgagaagcatcattactgacagaaaagaggtaagaccaaagatcaacagtagccactagaacagaggaaagtgtccagggaaagtgttcagaatgtggcattctgaaagtagtgacaggcccagccctctatacttcaataatctccaaagttagcatttgtttacactttaccaaaagagttgttatattcatttgactctgttaataggacacattagcagtttcagtgtcaaatatgaaaatttgaaatattagtctaatatgcttacaaggctacattcatttaagaataagaggggagagctctttggaatgtagatgcaatttcctttcacattaatgaaatgaagaatgttgcacgtgaagtgacttttgccacagagtagagatagtgttagaaggcaagagtttctacttccactctccagtgttaataaatcactggtttcaaagtcaacttagaacttcctggcagggaaatcttgaggggccacaacttgcacagcatgcctgttgttgtggtgaggtatagtgatctctgactgcttatctttgagaaatatttcatgtagaggaattccagctgggttactttttaacttctgagatgacccagtcttcagtaacgcaatggatttcgtgaacatcatatgagaagctttcgcttctgatttaaacttaaaaaataagtaactgattatgggatctctcctgaagatttcaaacaggaaatagctaatcacaccttagtaagttccatatttaaacacatacaaataacaatgatgttatggctggtttggggaccttctgcagcacttgcacccacaatcattcatatcgctcctatctccaagaatggtttgaaataagaactatgacaaatgacattttttaaatgttaaaataatggatgaaggccaaggaagcccttaagtaatgtatgacaacatcttcaaaatgtatgtttgaagtgaaaaacaaagcaaggcacagtgcagagtgagtgtgctactctgctggagaaaaaaaaaataaaagctaatatgtattgctacttaacttgttcatgtataaaaatgtttggaaggatataaaaatgtaataacagtgtttatttgtggatgaggggatgttgtggggagtgctatggaatgggaactgggaggataggaggatagggaaagggattagaaggagaaaaaattttgccagcaacacacacacacagacacacacacatccccacaatttttgtcttgtacatgtcttattcaaaaattttaaagagtagcatgtgacattaaaacgaattactcactaattaaaattaaagtaaaataatggtcaagaccgagtaataaaactgtataggattgtgcattgggttatttgtatgcaataaacatggtgatataaagtttagtaacattgaaaaaatatagtatttgcctaaaaagttccatcaggttttatgcacccaattctgacaatttatggaatttaaaaaataagccaaattagaaatggcagcatgttagtgtagatcaaatttatcatttcatttttttaagagtgattttgagaactttctaagaattagggagtcatttgttagagctgtataatttctctatgatttgaataattc

SEQ ID NO: 40754 - DNA, 598 bp, Homo sapiens
caataattcatggtcattctccaagctctatctgcctcctgcacaaaccaaattggtaagggggaatatggtggaaatcaccacctgtgcatatttcagatccttgatgatggcactaatttctgcaatccctctagcaatgcagtattgcctctggctaaatattcttccaaataaaggcgattctattggcttccatttggccttttctaccataatatccctcactccaaaggtcagggaaactatgtgggaactctgccagatgctaagaatgtctgttccaattatttactctggaacttgggagtaggttcaaggacatattagatccattatgagattgactgagctaaaactcctttgatcaagagacatacataagaccttactctgactagtgtaacacaagtgatattcttggtctccaatcatctctgaaaactatgattatttcatttccctcactgcactgtcaccctggtaaaaggctgtagatccatttgggggaagacagaagaaatattaaccgtgtaaaattttggcagaaaagcagggtttttcctgaaggggactcagcctcccctttattcaagga

SEQ ID NO: 40755 - DNA, 2691 bp, Homo sapiens
ttaaaagaagactttagcccttttcatgatataaattgactggagagctatagctcattcttattccataagtatttttaagctaccaaatgattttctatataaagaaattgatgaataaatatagatgacttctgatttgcttgcaaaatactttctgtagtctgtgttttagctgaatctgcttcatcctttcatgcttgctaataagacatctctttggccgagaatggtttctggctcatccaagtaaaactcacctgctgtgctgctgcagacatggagtgagccttgtcattctgttctcctcagcagaatatgacatgcgagaagtgaactcagcgtgcagactggtgaagccagcagagggagagttaaagggtttatagctatggcagcatgaggatttttacttcctgaggatccacatgacatgccaaattaaatattttcatttgcctgcttattaacattttagtgaatctttctaccactccaactatcttatgacatggtagatgtcaaaaaacctatgcatttatgttgatcacattttgaaacacagtatgtgtaacacagattgttttgttcaaaagatatgaccaattattagtctaggttagaaggtcaccaaattgggcaaacattaatatctgttactagcatgtttcaaacattgacattacgttttctttaaaacaattctctctcatacagggtttttttgtgttttttgttttttcatgataatctagcactgggctcaaaaccatgctggcaaatctatgagattctactctgcagaaatctctcgaggaaatgaatcactttggaagaatgaaaaacatgttcatttctactccaaagaagaaaacaaagcaatggcacaggaaatggtcaagaggaaaatagttatatctttcataagattcacaaagccaggttctattaattttgggtagtaaatcctttccttttagactccaaaagtttggtggaaccaatatgcatgtactttaaagaagcatttgttgtagaaacatctgtctaattccaatctcagcctacgtgggcccagttgagagctctgccaagtaaacttgtgccagtgttgtgtcccagggccaaagcttgggtaaatttttcttctgtgtgtagccagggttggaagaactagagagataaatctgagcctgtttccttctgagtgccaagtattgatctacaagtcaaaaatacaagaagagcaaaaacagttgacaaactaaagtttaggaatcaattaaaacaggaatactcaaatgaaatttgaacaattaaagtaggagaatagctggaaacaagctaattggggtacattttagcgaagtacctgggatttatctttagttattatattcattaaaagtctttattgagcatctgttatacactgggcactgttttcagtacataggatacttcagtgtaaaatatcaaataataagctcttacttcttagaacttaacttctagactgagcgggtaagagaagataatgcactctctgtagacataagttaaattatataattataagaaaataataggtaatacaataattcaaactagaacagagtaatttggattagacttaagaagaaagggatagtttgcaattttaacatgatcagagcaaacttcatttaaaaactggcatttcaacaaagatttgaagaaggggaagggattacatgtaaatatctgagaaaataatattccagacaggagtaacagttagtgtatgccctgaagctgaaatatgccttaaccataggaggcttgaagtgtttttaggttgaattggcttgaaggtaaaagagtatttgaacattatcaaagcttactgactcatctaatttctgagtggcttccccgagtgtttaacgttagtcatctgtgttatgtccattagcttcctagagcttttgctgtctgactttctttgtaagactcagatgctattgttcctgggagacaactgagaatctgcttctgttcaattgaaggtccacgagcaacttaccaaacactgttctgagagtagaacagattcagatggacccattcagtttattatatgtaatggtcaccaaaaatactcacatccacaagcccagaacctgtgagtatgttgccttacatggcaaaagagagtttgcagatgtgactcagttgaggattttgaggagagactatttctagttatctcggtggctgcaatataatcagtagagtccttataagagggtggcaggattgtcagtgtcagaaagagagagatttgaaatgcacatttatggctttgaagatgaggaaaggagcccaaaccaagggatacagatagtctctagaaggtgaaaaaggcaaggcaatggattctaccctaaatcctacagaaggcatcttgattttaggccttctgacctccattaatgtaagaaaaaaaaatgtgttgaattaggtcaggaaatacgtggtaattcattataataataaggaaatgataattattattgtaataatagggatttgtcagcaatttattttcagttgccctaacatgttctaatcctaaaaattctgctaatcccaaaggtcaggattctgtggatatggataaaagttacagagcaaagaattctcagtttc

SEQ ID NO: 40756 - DNA, 846 bp, Homo sapiens
atatgaattaacaaagaaattgtatgaaatcctgagaagcacagaaaaatgtatgtctttttttttcttaagctagatatttaagaacaaggcacaatacatcttgaaaaaaagatttatagaactaataaaatcttggcaaataaagcattatgattccattcacaaatgtgataaagacagtaagctaaactttcaaagctgcatcttagacactttatcctaactaggttttctaagatttaaccacccatgcgaattactatgtgttgtgaatttcaagtaccatttttgcctttatttattggatctgctaatttttcacttctgagtcacagcattccagctgagtaatcattgcatcattattttaaaaaaaggaaagaaaggaagggagggagggaggaaggaagaaaattataaaactcataacttttttgcaaaacaaaaccatgttttcctccaaaatacaagaattgacagcagagtttatgcttttctcacaattgcaaatacagttgacctttgaacaacatgcatctgaattgcacgagtccacttatacatgagttttcttctgcgtctgccacatctgagacagcaacaccaatttcttctcttcttactcctcctcagcctacacactgtaaacacaatgaggatgaagacctttatgatgattcatttccacataataaatagcaaatatattttctcttccctgtaattttcttagtaacattgtttttcctctagcttatttaattgtacaaattcagttgtacaaattcaattgcacaattaaataagctagaggaaaaacaatgttactaagaaagtatataa

SEQ ID NO: 40757 - DNA, 1648 bp, Homo sapiens
tactacaaactgtaaagctctctgataaggggtttaatttttttttaaaaaaacacatgatttcaaaaactaatcaattacaatttgaaatgggttttgaaataatttggtttcaaggtaagctattgttttccctggtgccatctgtaaatatttataaaataaattagttccttaataagccctctggttcactccctgacatcattgctaccccagttgtactgaagaatatacctttcaatccattttgaaagcacttgtttacatgatataatgcactcaatttttccatatgtcattattaaacacccacttcatgtcaggcaccatattaggcttttagaaagagaatattaataataactcagtttaagttattcattaaagatgtgtccaaatgatttctaggcaatattttgttggttaattgttaacataatacttttggtaataataaatttgtatacattttgtaatcatttaaaatttttacttaaaaatgaaatgatgagtatatctgatagttcttgcctctggtcaggacttttcaattcatcttaaactccagacctttctatgcacaacctttgataatgtacaaatacagcacctactctcagctcaacctagaatttctcatcttctgttcttgggcatctctgactcagcatcaagcagtcatgcaaatgcaatgcaaacaatgaggaagttaataccccatggagcaattgtgaataaatgtgccaatcttttgttccttgggtaggttttgtgagatgactccacagaaagccccagcctaatcagccccagatgcccttgcaaggacagcttagtatttattgaaccttgcatggccttgtcctccatcctcgtttccctcatcccagcgtcactctctcctgactcgggatgatttctcaaaataaactatctccatgtaagcctgtgtcacaggccctgctttcataggggaagccagggtaggaagtgagttttcacaaaagtcacaaatccaggtaggcatgtggctgcaaattcatacaccactgcaaaagtagttaaaaaaaaataaaaagacttcattattatattctgttcacaacttacctaataagacctacatttcttgcttagcattaaagatttttaatactctgtacctcaaccctggccccttccactcacagtatgcaatcttactccctttttgtaaactaaccgtacttgctactcagccaggacctccagctaaaggaaggccccttctatcgcacccactggtcaagcatatcctgcttggacatctttcttccctgaactcccattgctttcatagcctgcattaccaagtttttaaaagattgtattgccacaaaatcttatctaataatattggggatttttttttttactctctccaattatattttagcaacttgaagacagagacactaaattttgtttttacatttcatagcatagagaaaattgcggacacatagtaggtctttaataaatgtacagtgttcatggattctcccttcagtatacttgacagaatcttaaaatctattataatatcaagatgccaggaaagacagcctagcttttccctgaggtcagactcatcactctctgcttt

SEQ ID NO: 40758 - DNA, 773 bp, Homo sapiens
taagaaatttaaagtaactggaaaagaaaataaaagaaagacccaattgttagaaaatgcctagttttccaaacaacatttcaagttttttcaatattctgtgggagtcacacatgtaaagagaatgatggtttcatctgaaggagagtggacaaatatcaatggaaagattactctaaaatattggtttttaaagtatctggtgatttttgttctcttatcactttttacatttggaatcaatcatgctaaaaggatagttcactaatattaggtttctacatacagttaacaaagttaatagagaagacattaggttgagagagctctaccactttgattttctgtgtaaacaaactgaagtccgaggtaaccagtaaaacaaaactagacttaaccaatcagaaacctccagctaacctctaactagggactttccatcagataatgcccaaataagccaaatgctgagctgttgccaatcagtaatttcttcactttgcttctataatcaccttatgaaagtccactgccaaaactgatgaggcagagctctctgaatctcttctggtcctaaagctgcccagttcatgaatggatccttgctcaaataaactctgctaactttaatctgtctgaagtttttttttagacagtaacttacaacaaaatatttcttcatatttcaaaaagcacagtaaatcatgaggcaggtattaaagaattcatcaacccttttgaaggccattattattattacattaaaaaataat

SEQ ID NO: 40759 - DNA, 1451 bp, Homo sapiens
aattgatagcatttatcttgttctacctacaatgagggttcaaaagtggtcttgagcatttagtagataaacaaaagatgaagagaaaggaatttaaagcatatcaccaaaaaagtcatcaaatcaaaaaggaagacagcaagaaaggaagaactgaaagtaggaactacaaagcaatcagaaaatgactaacaaaatggcaatagtaagtccttacctgtcaataattacttcaaacaaaagtgtttttgatggtgagcacattcctgggattgactaaactgatgacaggggaataagagtacaatttccagtaagtctcccaccctccaattactaaaactttaattagtaatttctctccaaagctaaacaccctgggagccagattacttatgtgatcatgataatgataatgatggctgatacgtattgagtgcttgctctatgtcagacactgtccaatacatttcacatctcttatctgatcgacttatatgatcacatttaatgctatcacagcttaatgagcagaaactatactttttcttttttacaaataagttagttcagagagtcaactaccttgctcaagttcacacaactgaaaggatgattcctactagtgcaaaggcagataatgcaaatccgaaagcagtttgcagttaacttttaaagtgatttaattgggtcaaggttcgtcaacagcagaagttatccaatataaaaatctgcacagtcattaacttttatggttgcaatattggccttaaatatcaactacctccttatttgccaagtcatataattctgctcctaggcaccaaaaactgaaaatttttaagataccttatttgtgctgtaccaaatctctccaatccaacttataaaacacaagccctttcccaatagacaggatctgtataaaatctaatctttttcgttttacaaaagaacaagtaacaaggcttctggccaatttatacaacaggtacagaggcctttaaattcctcactgccttctccttatcaagaaagtgaattattaccaaactcccagctctcaaaaagaggtcaaaagtcactttgctccaaagtccttgccaggtaaaataaagtgggaggaaaatggcagttttattctgaaccaaattcttgattctctagattaacacaacttttaaaacccagataaaatttgcaagaatagttgttacgtgagggtgggagacacggggaagaggagggagttggagagagagtaaaatacttgagagccacaaagaaagacagttcagagtagacagtagataatcaactattcctaaggtaaaatggtagagttcgagtgatgtatattaaagcattattaaatgaagagctaatctagtaatattgcctgctctcttactgtgcatagaaacttaaaagctatccaggccttgtctgga

SEQ ID NO: 40760 - DNA, 813 bp, Homo sapiens
attctcttctggatagaacagggatcagagaagaacagattatttgggaaataatgatgtatgctgacatcagaggactcaaactacaaaaatgtaatttatatttcaatgcctcagtgatgttttattcaaaatgccaaataattatattattttttacaataatcttaatgttctagcatgggaacgttctcagtgtaaccagtgttagaccaccaagggaattaggaatttttgttttagttcaggcttttactgataaactttccaaagactattaaaatagctccttgctttaactttaaaatggttttcacactgtgagaaaattataagatattaatgagttcatgcatgtgatgtcctttgagttccctgaaagaaggggctttttagaaaagtgatgctgtcctcttttgttcttttttgtttggtatcttgcctaagttgactgaacatttgtggcttgttgattctgctagtcaccagaaaaaaatgaagccatgcttcaatggccaaattagaatagaagtcagttaatgatttaacttctacctccagactttcaggaataaagattttggcaatgctttgattgccattgctttagtgtgtgtaggttggtacttcaccatgatgtgagatttacttaataagaattcagaagctatttgtaagaacatgggatgtgagcatcagagattgtgacagaacttgagagctacctttaaaaaatccaggaggtaaagaaggaatggagaggggataaaagtagctgttaatagaaccagcaatattccaagtaagcatatt

SEQ ID NO: 40761 - DNA, 2808 bp, Homo sapiens
ggactggtgtcctctgccttcaattcaccccctacgctggacagtccaaattgtccaccctcctactccccccgcggaaccaatgtggcagtggctccaaggtcaagctgccggtactgtgcgaggcgggaggatggagagggcagggcggagagccacctgggatgagcgagggtcatggtggaccacagacgctcttcttatacgggcaaatgtttaatacttcccgaggtcgcctctctgccatcaaacgaaaacaggcaagaaaataaaactacacatacgaacatgcaaaggaaacaaaaccaaagaaaaacaccaacgcactcgttgggggaaatccatggcctcctgttgccagtcgcccggcgcggaaagtggacagcccagcggccagtgagaagcaagagcaagaaagcaaaccttctgaagacccctctcctcgcccagctccgccgaccattctaccaagctgccctcccagaaaaaagagcaggaaaaatgcctgtgcaaacgtgccttggcgagcggggaataagtgggctgggaagaagggaaggattcggagagcacagctgtcccggggaacaggaaggaggagaaagtctctccctcccttcagtgccccgcgccccagcgaggaggaagattactagtccagcaggctgcgtccagcttcctacacaggaacctttagcatgggcaacggaagggcagccccctcctgccttcccctccccaccccaccccctcgtcccaggtccccgccacagggagagcgccgcccgggagaggagaaggccgagcgtgattgtcccgcagccctcgcctcagtcggcgccggggcccccgtggacccgcgaggggtggagtgggcgagaccattggaaaggcagggaaggggggaaaccaggcaggaacgaggggcggggccgactaacctattccagattttcctgtcccttttaaatctctgctgtgggagaaaccccgttatcaaagtggatgaaaagaatatttttttttgaaaggggaggagcatgtgtaggagggcggggtgggaggagacagggcttgcgcccggggatcagacgggaggtggagttgcgcggggagggcgggcgagtcgggcgcccgctctgagagtcggtttcttttccccctcttgcgtggggcggggtggtgcgttccgagttcccaggagttcgacgcgggcgggtgccgaggggaggggagtggcggcggcggcgggcggctcccgcttcagcctcggcagtggcgtcggcgacggcggtgtcgaggcagccgccagcgttcggccaagtgtcagccggcagcgacggcgctagagctgggagctggggacgcgcgcgccggaccttccacagcctccgcccagagcctgaggcgccggggccgggggagccggggggcgggcgggcgagcgggccggggggagggtgggggatggcgcggaccctgcggccgtccccgctgtgtcctggaggcggcaaagcacaactttcctccgcttctctcctcggagccgggctcctgctgcagcccccgacgccacctccgctgctgctgctgctcttcccgctgctgctcttctccaggctctgtggtaggtgaacctcggcggccggcgtgggctgagggagccgccactgagggtgcgggcgccgcggccggctctgccagccgttctctggagcagcgaggcggttggttgtgcgagcgagtgccgaggactttggctggaaacttttcgccgcgcccggggcgaggccctggaagggccaggccagcgaatgctgagccggcggcccgctgccctcccccgcggccgcgcgggtcgccgtgcggatggccgagggttggcgatggtgcttcgtgcgccgaactccgggtttgctccggggaccgttacttcctcgctcattctctgggaaccctcgtaggttaaggtgccgggatgcacgtttgccgctttttttcccggtgaaacttgagctgtgagcccagaaaccctagggaccggagcccgatggaatgaagcctccgggtccacttctcatggccttccaccctggagaaggcaccattttagcccacccagccgcagaatcccctacagctagttttcttctgtcttgtgcccactcccccggctctgccctgacagcttctggagctctctagattgaccctcgtccctgccctccagcttgtgggacgtctctcacactgcccgtgcttattttaccaaaccgcaggaacaagatttacgtgttaaatacctgatttcatggactgtgtgccccggctgttctaaccaaaacagtcacgcgcctgtttcccatctcttgaccctcgtgttatgttactgttttcctgtcatatttgggagttagtctctgagttttcttcccaggtatgccagactagaagcctgcttattaaggactgtgctaaaaaaaaaaaaaaaaaaaaagtctgcctcatgcaagagaaatggacttaagtggtaattaatgggaggcagcgatttgggaaaataaggacaccagtctttggtgggaggaggagtatcagaacactgcgagtagttatttatttgagggctcttggtaagaaaagtagaggggcagaacttaagcttggtcaaagattggttttcagtatttcataaaaccgtaaactgaagttttactagtatttattaaaaggagagatgtgtgcacatttcttgaatagtgtgatttagaaggaggagaatcctgttacatggtaggtgagtcaggg

SEQ ID NO: 40762 - DNA, 606 bp, Homo sapiens
ctgtatcaagtatgagatatcaatatataatgtatgaaaaagaacagagaaaaagagactatagaaatatttttaaatgttagcagttatctttgtaatagacttctcagtgaatattatttttgttatattttctgtagtttctgttttttctgcagtgcctttccccacctctgtaagtagccttttagcataagaaaatagagatctattgaacacctgagtcactggcctggaatgttaagctggtcatactggttatgcagtgtgtcagcactgttaactatctgagaaaactgaatttctttccaataatttactatagtatattgcattctttagtaaatgtttgtaaatattcatgacagtgttagtagagaaagaatgtttttacatttttttagtgtatggataatacatacaaaacaatataaagaggtgttttctaaggtctcattcctatacctatttaccctacccccatctacagataaccacttttattaatttatgtcttggcactgtttctttaagcatagacaagaaaacacacacacacacacactcaggtgcattttaatttatttcccccctgtataaaagtaa

SEQ ID NO: 40763 - DNA, 988 bp, Homo sapiens
cagttggtcataatgaagaacatctgctagacgtcattgctctggccctgtgccattccttccagtgctcgcactgtctgcctctggaacaatatcattcctagaagaggcccctcacaataggtgagctatggaaagtcatttgagatctgacgagattaaagcacttcatacaactatccacccagaatcatgatcattgctaaaataacctcacacagtgtatagcagatgtgacaatgtgtgaggcagggctcaatctgcccaagcttatcaaagagaaagtttctccctgagaagccaaatgctgtgagagagaccccatagaatgtgccagactggaaggagccatcagtcttgtgagctgcttctctagctcttcagaaataatgagtgtccagcatccagcaggatgtgactaaatggctagaagttataaagctgagtgccaactgagagactgtccccactaaacaaatctgccaacaacctctgcacacacaaaaaaaacaaattaggtaaatggccaggccactctggaaccaaaagctttctcactctcccaacatgatgtgtcaggcatctggtatgccaagatgatgatagaaacagttacagattaaagagggtgcactatgggccaagtacaatgctaggtgtttactagattttctcctgtaagcctcataacaatcccaggcagtagctttattcacagatggggaactggggttcaaaaaggaaaataactcggagagcaagtaacaggacaaacatccacaactggttatttctgtctcaatcccatgttcttaacatcattctaacctgaatttgcttgggtctctgtccccatactccctgcaaaagcaatgcatttttcatcaaagaggacatttgtgggtatcacatctgagagcacagcccaacacaccaaaccttgaaagtggttctgggttagagaagataatgaataggaaacatattt

SEQ ID NO: 40764 - DNA, 650 bp, Homo sapiens
attaatttataaatattaatatttaatgaatgaagatgcttatagacacacacacacatacacacactagtggccaggtaggatgacatttggtgccactaactatgttttatttgcctttaagctaaaccagaaatccctgtgattgtggaaaataactccacggatgtcttggtagaggtgagtcacataaaagcctttgaaaatctacagtattacatgtaaggtgtgtcaggttgcatagttgccaggaatgttctctcaaagaactttactccttggcccttgaccaattaactgctaatagggatgaagggaagctgggttgtttctagaaagtgaatgggaatttttacttttagacttagggctctcagaatgtttgatgtgcacttttagtccttaaatttctcagaaaaaaaaatagtcacaatttgtttaaacttctcttttataaaaattcaggtggatagtgaggacaaagtagggcagaaagcagtgtgagccctggtgtaagaaggaggcttttgctcagctgacgtttaatttgttctaatccatttcctttacccactttcccattgtttttatttcaaagtgacaggaggagatatgccctcctgtactcctgcagaaccctgggtatgtct

SEQ ID NO: 40765 - DNA, 1334 bp, Homo sapiens
tgtaggtgaagcttaattatgtaatgcctgaaacacaaaccatcctagatgttgtcatccaaatatgagatacagcacctttctgggcctcttacctatcatatttctgctgcttctgtggtttacggaaattgtaaccctttccgtgtgtgtatgggtgtgtgtgcgcgcgtgtctgaaagaaggaaggaaacatttgcggtcgcggtgaacatctgagtgctgactgtgtgaggggctggaggaaagaggacctatctgaggaccgactggccgaagcctgcaagtttccacaaatgcagtcgctgccgcggcgtctgtctacacacacactggaaggcaagagtaacggagggaggagactggggagcagggaaggcgtgggagcgggacagaggggcagcccggagagcgctggccaatcggagcgcgctccgccagcggccaatcacgggccgcctagcccggcaaatctgcccggcagtgcggggaggggctgctgggagtcctggtgccgccggctgcacttctgtgtgtctttcaggaagccacagggcagggggcgtctgtgcagagaagcgggggagtgagtagcaggcaggcccagcttgtgtaccagcccagtgacatatatagaaacataaatcaggctagagccggcgcgcccgggcgcgcacctgtgtatggacccgcaggcatgtctgtacactgggtgggcacctgtcttgtgagtggctccgggtgtggctgctcctcggactttcagtttatgtaagatttatctctaggggcctaccttcccccatctccagaggggaacataagaagtttaacggagctgggactgagcagattaagggagtggagcggaggctgggccggagagagtggggactgtgagtgctagtgggtaaggatccatctgtttgccccgtcccccagccagaaaggcattttggaaagactggcgtggcaagcgtcgccctgaaacgtccacagagcccaagaagtgatgatcactgagtgagtggcactgggctgagactggccagtttgttaacaacagggatgctagcagttaggaaggccaggaggaaactcaggatggggaccatctgctcccccaaccccagcgggacaaagacatcatcggaggtctgcaatgccgactggatggcctcgctcccccctcacctccacaacctccccctttccaatctggcaatcccaggtattcgtctattcctacttgttcccactgtgtttaattctgccattttagtgttgttaaggggttgggttgcttttctattgtgctgagaaattaattgtca

SEQ ID NO: 40766 - DNA, 2018 bp, Homo sapiens
aaagtcacaaacaatttagatctggatcaaaattaaaactgaaaaatattttatttctcatttatctgaccttgtgtattggaaaaacaaaaaatggataagcattagagaataggttcagaatcagaactgagtataaagacacatttttgttgttagaaagccagaatagagaatgcagactctcatcacaggcagtcattaggtgtgatgaggtggtggtgtttgaagctttgtctctgtatgtatgtatgtatacaggtgtctgcctgactgatttagaactgcagccttgaaaagcacttctgctccagccactgtctctctgccggaggttttatgccttgacatcatttgttaaatgtgtcctcttccttccactcagaaggtggttattgtatgttttctagggaaggatatttggacagtgagtttggcctggtgtgctgagcaagtcctacaaatgctgatactggaaagcactcctagaagcaggggatggactactgccaatcctttatttcactcggagacataacaattgaagttcacccacagactaccagacaaactcccaagtattccctagacccgtctgggttttttttgaggtttggttggtttttttgtttgtttgtttttggtggctgaaaatctgacctcatgcaactcccgatctttgctttctgtgcatgaggaagagcagtggtggcttcaaatgcaggcttttctttactcacctcctcttttgggtgtcttccaggttcattgtcctcataggccccggttgcttttgagcaaggagagggctgcgaaatttctttatagttatgatcatgtatgttttatcagccattgactacagttccttgggaaatgccagatgggcatgcttcagaacaggtcttttccatgtttaattggcgcctgtggagttgtcactgaaatgatgcatgggccacttttaacattagtcatttgccttcaggccttctgatggaattattttgttgagtgatatggcaggtaatatgtgtttgcaaacagaatggcatctttggcaggccctaaatggctgtgtcattcagggcatgtccggggtaggttggggcttcctccttccttgttgtactttggctcaaaccataactccagctctgctagtgggttggctgtgtactctgaccccgtgactgtagaaaggagttgggcatttgttctgtgattcataggatatctcacagttactagaattgcttgggtagcgggggagcaaatagctggtgccagctgctgaaactggaaattatatgattagccaccatggagatcatgcaaattctttcaccctgctttgtgaagtccggtcctgctaaggaaaaagaaaaaaaaatggctttgactcctcaaaagatgctgaattcactgctgtgaaatgccgtttcctcagcagtggaagggacattaagtgtatgtatgtgtaggctcaagacaggaaaattacatattaaatgctagccattcatggacttccccctactagttctctttcctctacctcgagcttcatactcaccagataaaagctggcagtcaagtcaagttctaccagtccttgctgagaaatcctgaaatatagtaggcatttgggaaatgggggccatcatcgtccccctacttcctctttaactcttccctcttatcatcatctgcatcataatagctattatgtactgagcactaccacgcaggacccattggcatacattacctccagtcctcataactccatgaagtaggtattaacatcctcactttagagttaagaaaattattgttcaaagaggttaagtaattttctcaagatcacacaaatagtaagtggtagatgttgtatttaagcccctgtgtagctgcaaaacccaggcactgtctctgtgcccctgaggggtcttgggaatggcagagcagtgggtgtaatctttaactgaaagccagtttcttcaaaccatcctctg

SEQ ID NO: 40767 - DNA, 578 bp, Homo sapiens
aatagagactacttcatccctgaaggagatataaagcttaaatggaaatacctctgaaagcttgtgctcttattaacatatttttgtaatattaagggaaatgttttatgtccatgtctggagaagaccctctaagctgtactgtatccactctcttcctccaacactttcctctgtataggaatcttcctgccatcctggactgggtgaaaactcagaagcctggagccatgggtgtcaacatcatcacatctgacttcgtggacctggtggactttgctgcgactgtcatcaagttgaatgacctcctacaggaggacacagctctggctaaatgctgatttaatttttaatttaaccttaatgttgaatttgttgatccagggtagagttctaaaggatgtcctgttaggatggcccctggggcagtgatgatgaagtaagaggaagatggcttttttttctcccttcctcacagggccatttagataaaattacagggctattaattgcatttttcccaaatgagactttttttaaaacttaagtccaagggaagaaagcacgcttcatgtgac

SEQ ID NO: 40768 - DNA, 8687 bp, Homo sapiens
ttaatagaagaaactccactattaaataggacatttgataaagtgacttccagatttccctctgagattgctgaaatctaaaggaataaaaatttcgtttcctctataaactattctcggggcctcttgtccacttcccagatgcagttacaagggaatcacttttctggatagccaatggctatcagactgtgctttctgccccccacagtcctgccatctgatttttccatgcagctctggttggatttaagcaggactagcagtctgtcctggtgtgtaatgattggctagaccaggcggctgaggccagggcagactccctccttcacatctgtcaatatacctggctgcaagcaagttgctgcctgtgaccacagtctgcagaggccagagagagcaggaaaggaaatggaaaggaacctcaccttcatgcttggggaaaaggagaaacctgtgttaatgtgtcttcccaacatcccactctcttcagcaatcgctggaacagccatgggccatccctgctgagtcaggaaagaagctgagggaagagtcgggattgaaaagcagcagacaaggtaggtgatctctctggtcactggcccttctcttgtaataacaaaatgagcagcatatacagcctcgtcaccagagtgtttctgaggagggtctgctggagatatggtagacccgggtgtgtgtctgaattcagtcatttttctatcagcctgttctggaaagcaggctgtattttccttctgtcttctatctcttctgaaaattgttgttgctcctgtacgtatttcagaaacttggaaggttttttaaaaatttttcattataacaaattatatgtgcgatttattaaaatgatttcattggtggtaactccacaagcatggttttgttccagaattttcgttgcataatttttttcaattttcaagacataccagagaggacagtgtacatatactgtagtatatggtatagaataatatattccgagaaatatactgtccattcacagggctgtcaacctcgtatgataggctctcccaggaagtcacgtatatttttctgctttggaacctagagagttaaaagtcctgaaattactggagcagaatcaagcctatttacctaagcttatcacatcggcagccaggtcaatcatttactgagactaggccgtttcttaccctgaatcaggaggaccaccaaagcctttgctggcctgagtccctctgtagcaaaggcatgggcaacacagaagaaatgctcctctgaagctatagtccagattctcttctcaccagaagtaagtttttctccttccgagaatagtaaatatcccaagaccccccttccccagctcaatgataaacaaacatgagcaaaactaatatgcaaacctgatgataccaatgccactctatgtacaaagcttgtggctttggagggagcttccctcatcactggaggtctatggggaagaaggagatgataactatgaaacaagttattgagtgattcttgaggaagaataaagttataaagtaatcaccaaggaaaacatggaaattttccccttcaagtctacacactctagaaatatgtaatttttatctaatatgattcactcttccttaagtctgaatataactcctctaattgcagaaatgttgtcatatggtcaccacatacaactttcgggcctgtgcagtggttcctggctcctatagtcattagttagaagcctagtaatgctgaagtcctatttttctgaactccctttagggaaggagttgggtcatgtaggacaaggtaatgtttgacattatttttgtcaatcagttgtggaactgaagtgactcccctcaggcagggtttgtggctgaatatttagtgtctgaggcagttaactagatgcaagagtggaggccattgtagacataaacccttgtgtgactttgggtaagtctgtggctacctctcaagaatgttgtggagaattatggaaaactgatacgtttctgtgaagatattaagcactgcaaaatgttaagtgtgaatctggctggtatccagaggatgttcatagataatgcaagtgatggaggtggttttgacgagggaaaaggatcttggggtgatcaaatgcattggctaggtcgggcatggcaacccatgcctgtaatcctagcactttggaaggtgaggcagaggattgcttgaagccaggagttcaagaccagcctgagcaacaaagtgagcctctgtctctacaaaaaattttttttaaaaatttatgcattggccatatttccccacattactgaaggctgccttagggacagacacacaggtctgacctgtcctttttttgtagcttctggctcagggcctaaaacaaactggaagcccctaagggtatgtacagctttttctttccatttcctgaatattggatagtaagtagagggagactattcttcagattgactagattagaataggcattgtcattgtttttcaacgttaggtagttagaatatagaagttaattaatttgcccaaaatcatgcaattagtctgagccaggattctactcagttctgccttgttcccaacccagtgcatttcccataaggtcatggagttgaccatgtggataagcataaattggagggtcactgaggtaagcaaggctgactaatacagtcagaagttctgaagttctccactggctcttggatgtgccatgcctgagcctctgtaacaaaaaggccagtagtggacttccaaaaaggataaaacaggcaagagcaaaagcaagtgtttttagtcatggcagtcactggagtcttctctgtcctgtatattttctaaataacccagataatcctcaggctaaatctttgtccctttttatactgtagactcaaattctgagccccaactaaagtacaacatctgaactctttccagagaagaaatgaccctatcccaatctttctcaaggaactcaagaatttactatctcatctcagcaaatacccactcatttaaatctaagagacttgggcacagagaggcttaaagcccgagaaaccatcaacagtccctcctgtcaaggctctcaccatctgcaacccaaagagacccatgtcggcttggagtctaaatggctttttggtgtcatttgagcagtgaatgagtaatgtacagcagaagccttaatccgccccccacccctagtttcacttttgttcagatatgtcctaaagattccattagctgtctgtcataaattccaaagtagccacaattcctgagcatttacaagatcaagataaagaaatgccatcatgaaatgaggtcgactaaatgtctttgaacaaagggtttctagtgacttgcctcacatgtatctcaagtgtgtgatagcaaaggcattacaaatagagattgcatcaccatgtctaccagcaccctttactaatcaactgaccttgcatgaactgtacttacatgccatcattttcattaaccaaaacgctaggagaaagaaagttgaagctaaaacacaaagactcatcacaacatttcacctgtgtcaagtacttattatgaccaaaacatgaactgctgccttcttatctacactttttttcatttaattttcataacaaacctctgcaacttgcccaagtcacagagctagtaagatgaggtaaaatttgagttgggatctgaatccaaatcccatgttcttcagcattctgttctgggaaacatactcacccaacagtgtctacactgttcacgttctaaatgtagaagagtaaaaaaagttctttctaaattatttgatcagatccttagagtatatatttattcccccttcccactcacacaagatgttcttgatgttcttgagtgtaagcataaaactcagtatgacagtggttttcctctcctctagaaaaggaaccacaaaacacacatgcacacatgcacacacacaatagcaattgcccaagagtcagtgctttgattcctttctgaagctgagagagaaaattgttcttatcatctcctagtttataaacattgttttgtttgtttgagtgattgactttaacataatgtacaagacaaatttgtcatttattttaccaagatttttttaaaagtttatttctgcagtgaaatttcagtctttgaaatcagctaaatttttcaaaactgtccagtatgtcaatagttgtatttaatcttcaccacagccctgtaagatgagtactgttttcagatgatatcctttcagataaggaacctgagactcaatacaggtgaatggccttctcagtctcactcagctaagtcccttagatcttgggactccaaattttttgttcttttttaaattaaatattcacgcagttccctggattcctaagtcctacaaatggtaggaatggggcctacaagctttttatttaaattttcagaaattaaaaatgccaaatgactacacagcctgttctcaggcagagaccactcaaatattgattgctttgctttgggctagaattctgtcaggtcagtgtggtaatgctgttattctaattagattttcacagagtaatgaaaataaatacattaattgttacttaataaaatcttccttaaaggcaaaaaatctttcaagcccatgtgcccatgagcaaaataagatatcaaaggggttcttgctagaaggataagccaccactgtcttctaatcagttgtgtgcctagagaacggtatacatgagtagggactagagaccccacagtgtcttgagatgcacaagccctctctaaccctgtaatcagatggatgtctcatgagtcaaacagttgccaaatggcatggaacctaaggaagtccttctacaaattgagaatccattattgtagtttcaaccctacagaaaccagctacagttacaggaggaaaccttatgccctaggaattccatttaagtcctaagatgttctgaagggtccgggagccctgcatcagctatgcatctggaggagatccagtgttttcttatccctaatgtttcactgggaattgcccctggctggctgcctgagtctccatcccatgcgacagtcatgttgtccacatccttgctttggtgttagtgtgcatcctcatcatactttttggtccccatttctgtgacttctgaggttctaatgatcttggtgcaggagaacccatagttttgggcagtgatcaagcagagtgaatgaaacttctgcccctgacccacccaaaacttgttcccctcctctctacagttccaaggtcaagtttcccatgagagcagtaaaggaactgaaggtcacaaaatgctggcaattcaccatgccttggaggggttcccagaaagtaaaatgaaaatgagattgttttcacataagacctctgtatttggaggacaggattcaaacagtttgaatgtgcaatttcactgtgcactgaggtaacccccacaaagtcttttttttttcaaaagccaaaataatatcaaaaatacttcctgcagagaactctaactaggcagaattcttttttgtcatcactgggttgatgttttcaaggattcatttctcaagataagccttatatagtgcatttggctggagctcatgtgtacttctgtggaatgatggctttcgtccatggggcctactttgtggtgatctcattaggtttcacaaggtaaacagctgaaaacttgtggttagtatgtgagcaggcttcaagagaagagaaaacccaggagaggtcggccagaagatgttgcagtgaattggcaggtggcaggcttctctctgtgacccaaggaaagccaatacccctacgaattccaaggagatgtacttttaatttcaaatacatgtatcccacaaaatttagctctgcttcctagctaggaatcctaatcataggaagagctaatggctagacttcccagaacgtgactgttctctactcaaattcatctcattttgcttttctttgcaaaatgaaaattctccattttccataagaatagtattgttatagaatacagttgtgttgataaattatagtccaacaaattaaactaaaatagcccaacagaggcatcctaggcctgacatcattgttgtctttctctgtggctttatgccaatttttacacatcttggggatggcttagtttcacatctttactcatctgcgttctaattttggataaccacaaacatttattgatgggttatccactcagttcagcaacaatcatctactctttcccagaagtgtgttagacactgtctttgacataggattaaataatcttgccacttaccagagatgagaaggttttaaatttatccagtaggccaaaccacagcttctttagagtcctctatatttgtgtgtatgttagtgtgtgtgtatgtgtgtgtctgcctgtgtgtatgtatctgtgtgtgtatgtgtacttttaatcattatacagtaccaagaagataatgggttctcagtaaatatttgttggtgatactaaactagtaatcagctaggaatttaatcaagaaattgatttataaaaagaaaactggaattgctaggggagactaaagaaagaatcagaagtgttaaccattggtgtagagggaatagggcatcaagggtctacttgctcttctgccaacccccaactgaatggtacagcacataggagacctcggttgtgtttgattctgctactacacacaccaacagggcaactctgggcaagtcacttcggctttcgtggcctcaattttctcattttcaaaatggaggcaggggattgagagtataacatctctaatgtcttctctagttttgatattctgtgttctatgaaaaactagaaaagtttacttcagaaagttctttacggaaaatacagaaataattttaatttatctagggagatcattcctatctcttgggtaaataaggggaatgaaaaagctgctcaagagatcccagctatgccaccttgaagatgttataaattggtgagtctgggcattgatctttactagagaagaagcccacttggctgggagagtaaagaaaccacatctgaattctcttgtccagcactcagctttgccacgcctgtgtgccactaatgcaagctccagcaggcagtcagtcatgactatcattctctctttataaataaacggaagcccttaaaggtgacgtgacttgcccaaggttacagaaacatggcagtgagtcagatggaactgtgtgtgtttggaggaggaggagaagatgacattataaacaaaaggcagagagtgagggacagatccacacctcttctgaagttaaaaaaaaaaaaaacaaaacaaacaaaaaaaaaaaacaatggtcacaggctacagaaaagctttgagtctgctctgaatcctgagatcacccctgtctccctgcctctccctgagccaccccaggcaccctgcccaggtttactcacccaggttgttgctaactgggtgcctgtgctcgtgtcccttcttgtaagcttcataaaaggctatttgtaatgaagagagggcatatcaaagaagggagactgcatcctccaggccccgaaccaaaaaggcaggtttttttttaagaggaagtctggtttccctattaaaatctgcagaaatgaatggtcctcaagatgactagcagaattatgacattctatttcaagcatttttaaaatttttttttacctgaggttattttacttctgtttgctctccttctccacataaaaaggaaagaataatgcttgctcactatgatactgtatgagagaaggcagcccgggcagtacaactcaaaggaacctactaattgcaccaaacagcaaggcacagctagacatttcagtaaataaagtgtgatatcatcatggctcacacgggtttaccttatcacccagacccatgcctagggagtgctaagaccctgaagaaccacaatcacaagtgatggcaaagaacctctggtccaagaagaaaaacgctgaaagaaattggacatcaatgatcttatgtctcagttgcatttagaggctgcatcactttgctgcctattattgtcctcattaaatatgagagagagagagagagagagaattaattaactatcatcaccaggggatatctggtaattttcgaggtacatgaagtgggcagacgatgccataaattcagtaagaacacactgatttcttggcggagtcttcaagtgactttctgctttactccacaaaaatcttactgagtatacccacttctctgtttctactctattcctaatatctaactaacttcttcttaggtagtctcttgggaagaaggatagataacacgtaacacaatatataatgcttagttgactgtcacaaccgtattaactacactcactttttagaagccacaaaactaacaatcaccaaaagtcacccttggcttgcccccccaccaaatacattcacttaaggtaggctaggaagaggacaggcttatgattcaaccatatagtatctcttaacaaagtcagagaatca

SEQ ID NO: 40769 - DNA, 2908 bp, Homo sapiens
agccatagctgcactgagctttatgatcctgcctgaaagtgagtatgttaggaaactggacaatgcaaatcaaggattttaggtatttgattcattgactccctagcattcttctcccctggagagtcaactcttcacacactgtttatgctgtgtgaacaatacagtgaatttcccttgagtgagttatttctatgacaagttactctaacataatagcgaactgcaaactgcacagggctttggagcccaactgtttgactttcatttccacctctaccactttctagctgggtgacctagggcaatttactcacactcttcatgttttagttcgctcatctgtaagtgggacttgtcatcaactgtacattgtgagattttcctaggaataaattacttaataaattatcaagtgcttagggcagttcctgatacatagtaagccccatatgtcttgctattactatttatttttattattattgttactacaactactactctactgcaaggaaaagagcagtgctataatctgaatgtttgtatccccagaaattcatgttttgagatcctaggtgatggtattaggttgtagtattaggaggtgattcgatcacgaggacaaagcccttgtgattaggattagtgccctcataaaagagaccccagagcaggccagccccttctaccacatgatgacacagtgagaaggcaccattcgtgaaccaggaaacagtccctcaccagacactgaatctgttggtgccttgatcttagacttcccagttcctagaactgtgaggaatgaattctgttttttctaagctacccagtctatgataaattgttaaagcagcccgaacagacgaagacaagcagttatggctatgtttgctcaagaaaatataatgccaaaatagaaaggaagcagtttggccttctggtaatggtataactctggattcagacagacctgcacatgacctttgacaccgctactcaagttgtgtgacctttgacaagctatggaacctctttaaatccactttcccgtttataaaatggagatagtaacatttacctcatagggctacagggaagatctgatgaagtaatgtttgggaagttctcaactgttggtcagcagcccaggaatggtagttattgtgtggcaaactggtcacatgaacaaagaaatccattaagtaagtttctcctaaaagcacttacaaccaccctacttgatacaactgactaaaacaatcccaacatctgagattcttaccaaatatacacagacagagtacatggtaaactagcacggtcctttgtatatttttctgtctcctgtgttaaacatggattgttgttaggttgataaattgcctatcacccctattcccaacctccccttctttatcagtcacacttttgtcccagcatatacatgttgatgtggtgaggttttgccagatttcataaagggaactatgataaaaaaaaataccccactgatcttcaagtttcaattttcagattatatgaaatttgtgtgatgaaataaaggttcttgaggaatcacaggtagggcaccagcatcattcaattccagggggcactgtttccatcatactgtattaaagctaggctccaagggcgcctttaatggagaacacaataggatggttgcctcctggagttgtgcaacagaatagctctgatctcaaagtgcaggaaacaaggtccactgacacagacttggactctaacctctcttctttttgatgagtcagactctgtcttccaaaagttaatttatacttgctgagtgagaacttgctaatacccaagcgacatcaccatgaagaggaattgtagaatcacagatctgagagttgaaagaccagcactggtcatcgggtccaccctctccagtgccctaggggaacatgccagtgcagttccagtttgcctttgttaatagggccaaaaaaagtctgaggcttggcttccaaggagtattagagttcaacaaattctcattctcaataggcaggcgtgaaacactcttaacccttggctcactccaccagcacatgtgtttgaagccccttagtcttcactaacgcactttctaaagaagtagaaggaagttgtgatatcagcactgaagggtggtgagaaaaaaatggatggacccaaacaccaatggaagaagatcatggaaagtattgactccagaacactaacaagtgactgtgctttttccttttatactttccccttctgccacccccacaggcttcttacacaatgtatcatacagcactttaaagctgaaagccatccacaaaattatcttgtcctaaggcacccagttttcagatgagaaaatgagtctcagatgtcaggcagtgcaaagcatccaggaaagataatcgatccaaaaatcacttacatttttagctgacttaaaacggagagagaaatgtattcaggtcagagcaagtggcatttttaactccattacataaatatagaagctaatgctcaaaataaaatggtgatgtaaacttggttcataaacttctctgctgggttagacagtctatggtgacatcagggcttgaagtgaagattggaactaggttatatccagaagttccctgagaagggaggctgagaggtgagtgaaaaaatatgttcccattatttgaaacttaaggtggaaaagaagccaacctctaatcaataatgtagatttactttaacatttcattgttgccatttcttcttttatatgcacacacacacacatacacatacacacatactgcaaatcagaagaatagaaatctgaagtcaaaacaccaggatttttaatttactacctgtgtcatctttc

SEQ ID NO: 40770 - DNA, 2011 bp, Homo sapiens
agatgttaatttttgtcttgacttaggtttgattttccaagttcctgcttgggttgtatatgaatagggttatctagaggaagcaggtagaaattgttaagagctggtaggatgtgataaaggttgagatttggaagttaaatttgaaaaaacagaatcagagagagggatgattgatcctgattaggattgtctagaagaaaatgaagaaaaggtgagagttgatagccacaaataggggagtttcccctattagaaagtacccaggaaagctattgtttgccctggccattgatattcaggcaaactacccaatttcgttttaggtgactttgatagaaactggattgcaagaagaagataaaatttcttcatgaaccagaatgaggaagtggtggtatactcagaagagaactaagggattcaaacaaaaaatcctgttgagtccacctggatttgatggtggggttgcctacctatagtttgtaacaaatgtttttcacgtttaagtgagaatattattctctgtaaacagcagactactattatgatgggtgtgtagaggagaaaaatgtaagaggacaactggtgagaggtgtagtgctaaaactatggcctgcagaggagctcttttctatttgcagacctagccccaacccatgaatgaaaacaatagaaatgatctgctataagatttcagggagtttaggggagctccggagagctgtatgtccacacatcagccagccagtccgtccctcacccacaccctcggatcctgccacaaatatttgaatcactgccatagcaatgttcatggacccatgccaaacaaaggtccatacgactgcctgggatttaaatgtcttcctgtgtaatctcatcacccaagtccacccacgtacttggagtttgctctgccctgccagcttcttttgcattgtctagctggacctacattcagaggtccttggagacaatgcttggattcatgtctggaatgcttcagcataccattgaacccactcccacttcatcattgcctggggaagagattcacaagtgcccaaggagcccactggttgccaatgagcaatttctcgagcctttaattatgggccaatgaaaacaatgcctttagtgaactgctgcctccctttcacctctgacccatggtcagacacgtgactgtgagtgttgccagatggaaattgttagtgaagaaccacatttaacagaacttttatttatcaactgagagcagcactcatcagttatcctgtgggcttgagctgtgtttaatatataagtaacctcaatattgtatgggcaacactatgggtttggatgaggattggcctatgaaagaagaatttgtcccctccaagttcccttatcaagcactaggagcatgaagagtatggaaaaaccagtccaaattattaggtaataatgttctgggaggcagcccaaagtccaagtaaatattctcacttgtgtccaaacccttgcttggcagctctgtcagacactgtcttttccccatattctaccatcctagagagtaaaagacaaactcttacctcaaaaacccctgccaaccaagtattcattatctgtctttccctcatctgaacagtttgtagctcagatcaggtgtttgttggagtctgattactctattttcaaataatacagcatacgactacagtgctgatagcaagtttaagaaggttcaacctaagggaagagtgatgttagggaactggagttcctcaattccaacattttccaggtctaaaagtgcactttgtagaaaaaacaagtgcttacattcttagctgtctggatgtgcaatattatctacaacctacagccttagaaacttttcctttgaactcgtgtttcgttccatctctaaactgtatgatctttagctgctctattcagtaagtatttgggcagatggatgcaaattgatgaaacacatatgtttaagacagagattaag

SEQ ID NO: 40771 - DNA, 1130 bp, Homo sapiens
ggcaaattctttcttctctgttttggtttcagtttaaacatcacttatgccagagatccttccctggcccttcctattcccctttaaactgggtgagactcctgctagagcttctttctgtagtaccaagtactgaccccactgggtacttatcaggcacagcttaggaattgtctgtctttcttcttaacaataaattccatgaaggcaacaaccctctctacttttctcatcattttgaacaagtgcttagcacatatgaggtgataaatagagctttatttttgttctcaggctattcagagagaaaaaagttttgaaatatttttagacatagtgtcttcttttttaggattctctatatatacattttatattattgcatagcttgaattagtcttgcatactaaccttatatcacatataattttgtcctacttccagtttttcctttttcttcttagttcctatctgttttcccctcctctgtccccagctgctattccaggacagcactttctaaaattccatagttctctgtgcttcaaaattttgagaattcttgctcaacatgactatttctagaaactgcttgcagcagttccaaagtccatggcttcagcatcaaggtcatgggaaaatctttactgttcagagagagatttctagagccctccagtgaatatgtacaaatcttctacggggcaatagcagaagagccaacacgtgataacctttgcttataatattctttctgaaatgggtagcctcaactggcaatttacatctaaaatatccactttgttttagaattaagctctatttatcttagtagtggcacgttctttaaaataaaagaattatttttcaagactgaggcttggagaaaaaaataaaataaaataattgaaaaaacactactagggaaaaagagaaacatgagcaaggtaaagaaattaaaacaagacaaaacaaaaactcatcacctttaaatgtgttcaaatctccaggtccagattattcagaacaaacttgcagatcaatgagggagcaagcacccagggagagaaacaggttgaagataaacattaataactataaaggtacttgtattcccgagacagaaaatt

SEQ ID NO: 40772 - DNA, 3909 bp, Homo sapiens
tgcaatgagagagacagaaactatttttacttcataaaatccagttttataaaaagctctgttaataacactgagggagtgtgagaacacaaaagaaagcttactaaatttggctggggaaagaatcaaggaagatttctaagaagttatgccaattaagataaatcttgaaaagatgaatcagctggtacaagtataatacattgccttcatagatcattttgcaagacttagaattagtgaaatttagacatagaagagaccttaaataatattaaatgtaacattctcatttttaaaatagagaaatgtgacttgttaaacaacatgagctgtggggtcaaattcaatggccaatacagagtagacacttaataaatatttgctcccttcagaactggccacataaattacagggcccagtggaaaatgaaatacaaggccccttgttcaaaagttattaagaatttcaagacagtcacaacagagtgttaaaacaagcataggcccctctgagcacagggccacattgaaataacccacagtcctggggttcatgaagcaggcctccctccctcctctaatctaagtttcaaggggtaagtagacacagaaactaaacaagaactcaggtctcctttggatacaaagacctcaaaattttaaaagctcataaacaatctgttcacccaatatttttaactgaggtgatatgaagatctcatatttatctttatataatagttaataaatttgtgcctttattcattcatgtcacaaatatgaataaatgtgtcccaagagcctaggacaaggctggttcataataagtattcagtgaagagtaggtgaaggatggatgaccagatgaatgagtgactaaacaataagctacaattgagtattattgcccataaaaagaaataaaattttgatacatgtaacaccatgaatgaaccttgaaaatattatgctaagtgaaaggagacagacacaagagatcacataacatataattacatttatatgaaatgtgtggaatagtcaagtctatagagacagaacatacattagtggttgctggggactgggaggagggaagagtaaggagtgactgctcatggatatgggtgttttgttttgttttgttttgttttggaatgatgacaatgttctggaataagatagcagtgatggttgcacaactttgtgaatgtaatcacaaatatcatcaaattctagactttataaagggtggatattatagtatatgaattctatctcaatttttagaatgtaaaacaataaattaaccaggatagaaagatttaagtaacttgctaaaaattgatttgtgttacttgtgatgattatgcatctaacatcaaaactttggctcctagttcaggctttctccagtctatcaagctactgcacagaaaactgcagagtgccaccagctatctctatggctccatggagcactgtgcttacatacaagaaacctctcttgtaccaaagtgtaaacacagtggtggctgcattctgcctccagaggatctggcctacagagtgaagaataaaggggagacagagcaaggggagagcactttccaagagcttcctcattttctctgtgttgtcctagacaccacccactagccttgtatctcaggtcttggttgagaaaccaaaataactaatgacactcctatgatgccttggcagcattccctgataacttagaatatttatttcctgttttcccaactctcatttatttccatgctagcatagagcaagatgacgtgtaacctcttgtgaaatgcttgatatttgtcccttagaagagacattagtactatacatttagcaaatagtaaaataacaacactcatagcttgttcttgtgagtaatatgtgaaagttttctaaactgtattttagttttaacttacattcgttacagcagagtgaggcaagcatcatgcattctctctcttttaaagaaaaagcactaaaacttccattttttcacttctagtttatgatcctctcttcttccttaccatgagaatcaataagggtgggtggtgtgaacacatgttttttgtcctgtcaggaaaagttaaaggttatggtcctgctcccaaatgatagataattaatcatctttaaaatggcaacctgtcactggaaaaggaaaagcagaaatataaaataaagcagatatatgatatcaggtagcaacaaggatgtcacagatttaatgagtataggggatgttgtacaaaaagttttatactaatctctagaaacaaaagaaaaagcagaaatgatctatatgttcatagtctatatggccatctctctaattttgaaatcagcagtcattccttggttggcatctgctacttgggagcagaggatggaagaacacagcaaacaaaagtttcatcgttaagctgtgaagcagagggaacaggcagctagccaaaacttatgtggttcttcaaatttctgatggggatcagagtgcctctccctcactgacaaatatggaatggaatgtaaggttgctactaacagggttctctgcaatcctgagattggttctgttctagccaaagctcttggattcctgtaaactccagtccagttgaaacttcccgggagaatgtgcccccaccaccccgtgcagaactcctggacatcttagtgacagccccacccccaccactagtcttcccagaattcgagctgtgagaacacatcaattcctgactcaggcatttgagtcaattttcagtgaactcaggatagtagaatggaacaccatctcacccaccagcaatccctggctagcacatgagtgggaggaaatcatgggctttgaaatcaaacaaactcaggttcttacattcactaattacactcagaaactgtgtattctttgtagaatttgaaagtgttaacctcattgagcgttacttccctcagctataaaaaatggatataacaatttttttctctgatgttgctttaaaacaaagtgagataaagaatgaaaatttccaatttacaaatatttcttaacaaagcgtagatttgttcctttctattccaaagctaatgacttcaggtgaaatggtatcttgagagtggggggcattctgaggaatcagtctcagaccaaattcatgtaatcagttgaaaacgtcctgtttgattagtccctttaaactctttatgtgcctttcctgtcctctaattcagtttctaaacttttgttcagtatcacatccctaaagaagcctttttagacattttttctgatcgtcctctcctccatgagatttaatgccacagagacaccattatgttgtttgtgaactgtatataggtatatctgtgctttatacattaaaatagtaagaaaatgttaaaccccccaagaaccaattttcaccctttggtggacaatattgttcctattgagaacacatggtctataaacaaacaaaaagttagaagaatctttgaagagataatcttttaaagcctgtgaaagaagacattattgaattcttctgaagaacagagtcttcccttcatcatctcttaactattagaggtagaaaactttggcgaagttttaacaatttcttgatttcctatgtttagccaatgatgttcaggtcaacctgttagaaataaagaaagaagcctcagatgcaaaaaagtaaatgatgatgctaggccccaacctactgatgtattgttttctacgcagagtataagatatactatctgcagcataagtacagtaataatggagctaaacctcaaaaaattagtcccacatcacttgactaataggtttctactttactccatgtggatgtccag

SEQ ID NO: 40773 - DNA, 2274 bp, Homo sapiens
aaaaaaataaacctggtttaggggatcagaatggctatttctagccatccaactcaacttatctgagattcaattttcccttatatacaatgaggataataatgtctaatgcatagctctgttgtgaggaataaattaagtgtacagagtaccaaacatagagacaggcaaacattaggaatttaataaatgataattgctgactagaaaatcacttaaagtacaaatgttcatcttgagacaaagaacataaagagggaaagtcataaatgttggaaactgaagattagggtttaaacattgacttatttaaatctcaaaagaagcatgaatccctgccaggcatagtggcacacacctgtaatcccagcaactctgggaagccaagttgggaggattgcttggggccaggagtttgcccaggaggcctgggccacataggaagaccccatctctacaaaaaaataaaaatttaaaaaaaatagccaggcgcgtgatttttttaatttacacgcctgtagtcctgtagtcccacttgtagtcctgactactcaggaagctgaggctgaaggattgctcaagcctaggaattcaaggctgcagtgagctatgatggacccactgcactacagcctgggcgacagagtgagaccctgtctcaaaaaaggagaagaagaaggagaaggagaagagaataaggagaaggaagaggaataggaagaggaggagaatgaatctcacagatttaagacagtgccagctaaattgggaattatttgctaaatgtagttaactgaacattgctttatttctttgataagaggaccattttataaataagctgggtgttttttttttttttttttgcctaattttatgagtgactcaatagttctcaggcctggctgcacattagagtcacctggggagtgttaaaaattaccaatgcctgggacccagcccagaaattctgatttcatcggtctggaaaggggctggggcattggtgattttaaagtttctcctggcaatattaatgtaaaaccattgtaaagaactcacagcagcattaacagtttgattctctgggtcttagggaatgtgttcaaaattgtggggtgaactgtctttagagtatgccactctgacatcttagaaagagacaaaccacagagactagctgtacccacccagatgttctatccacagatgatcttttcttatttttctacatggtgttgtatgtttgtgcaatcaaacataagggctttgcatgaatgacattagctatgtctgctcggaaaaaggaggttgcccttcacctccacatcctgtgctgccacttttcttttgagtcctcggtcagagctgggtgtttaaacatatattctgggtttttttttttttcatcttttattttggattcagagggtacacatgcaggtttgttacatgggtatactgcgtggtgctggggtctgggacatggatgatcctgtcactcaggtagtgcagaaagagtaaacatgtattcttaagcaatacatgtatatctcatgagtcacagcttcaagaagacaaatacaatctgcatggactggtgctctaattaaaaactctaaagactcaggaggcctggataagtctcctgccctctttggtcttcaaatatttaatttgtacaattaatggatttccttttataaccctaaggtattttccagttactatgattcactggttgtaattctcataactaatataataaagagcaaattctttatatagcatccatttagaactctactactagtactaaacaattcctaaaataagggtttatatctctgttaaagtcattagtacatacacataaataatatcttggtctttgactagtatatttatttaccaagaaatgcaatggcttaatctatactttccagaaggaactgactgctgtcatcgaggaggaatagtcacataaataaattattgttcttcacacatagtactcacaaaaccttagttaattgattattcaattatgatattgtgaaactgtaacatgacattaatcattacctggtgaaatgatcatgggcctttgtgtgatgctgcggcttcctgggaaactcactaatgtattcacataaaccagatgtgccagaagaaagctcttgctgtggaattgatggagagtttgtttaaagaaaggaaaacaactctaaatagtaaaataaatattttcttctgcctttgggtgaccttatg

SEQ ID NO: 40774 - DNA, 3588 bp, Homo sapiens
aaagtataattaaaaaagaaatttaaaaaagacattccgtaggtgaggctctccctaaaagtcaaacttttacttgcacatatgaaaagtgtaatcattaaataagctatttcttcagtgacggtatactgagttctgctcatggtgccaagtactttgcatatattattcagaagcttattagctgccctgcagcaccagtatcatttattgctgcactccaggtgaagaaattgttgctgggagctacaacaacttgcccaaagccacaatgatcataagtagtttgcgcttcgttgtgctcttctttgctggtgtgagattctcgagggccaatgtccttcatctgcgtaactctagggactcgcccagaccttggaagaggttcacattcccgcgtgccgagattgattatgggccaccctcggtctcattcgttgacttccaataaagcattggctggtggacctctacatcagcattgttttcattggatatagcaactcagaaaaatattggggaaaatataaaaactttcaagagatatgattgcaagaaaatcagaatgagtttaaaaccctcctgaccccagtccttagctcaggccgttctccaaggattttgcaaacctgctttctgacgcagctggtaaacttgccccggggcgaactgtcggaaggaggtgcggtcacctggagtttcccaatagatacttcgctgtctggtgaggaaatcatcaccctaggacgtaaaccctcccgcccttctttcagctcttaaaaaaagcctgccacgaaagtccctactgcgttgctgcgaacgtagctttgagaagctggcgcccagtgatggggcaaacagccatgcccttccagcagccgtgaaagccccaacagcaaactgcctgggagcggggcaggtcaccaacttcgttgctcgaactccctgggtgcccgccgcggtggttacaaagggggtcaagagtgccggacccagccgcgcggagcccaccattgcggcccgagggggacccgacgggggcccgacggtgtggcgtggcgcaaggagcgcgcctgccttctctcgccgccgggaacgggctgcaccaatggccaggtgaggaggcggcggtggtcgcccgggaggagggggtggtgccgactccgtgtgccaggagtgcgtcccggggacgctgcctcccccgcggccgagttggttgccgccggttgcgctgcggagggttgggggcggagaggaggcagtggctgcccgggccgaggaggggcgcgctgactgctcaccgcgagtcaggaggggccggcgggctcacggagggagacagggtgggcgggggcaaaggctaggcgctagggcggcggcgccagcgtagagcggcggtttggaggaaagatgagacggtgagtgggctccggggacacagagtttctttgcttctttacaggctgtagggacaaaagcccgggctggggtcggcagtgcccaggctgcgcagctgggtgggtgggggtggcgaaccccgttgtgcatgactctcggggggctgggtagatctccggttgaggggatcccggggagggagtgtctggtagggaagatgcttccagagtgattgtagaaaacaggcagaatgtgggggaactgggggcaactttttccagcaactctggaatgcacatggagagagggatggggatccttgggatagctccctgagaaagagaaggtccgctgctggatggtgtagggcgcgggattcagagaagactccctccccgcaaatatttggctagctgcgcttctagttccactttctttcaagagtgaacctacgagctttaaccgccaaaagcggctgatttcgatttggcctttgaccccccactgaaagtttacagtgtggccgtctcggcacccctagagatagcagctggaaggcttggggagtattttaaccctctgtttctccagctccctgcgcggcggaggcgcagctgaatcgtttgctggttcgcttaataacttagccctagcagtcatcacttattaaagcgccgaggacctggctaactcccgccaccaccaggaaattaaaaggctgacaggctgtccctcccagggttggggtttcctgtttgaaagagcttgagaagtcaaactgcttcgcggttcctcacttacctttcttatgtaaaagagggagcgacgcccgcagctttttctctcggtaaactacccgtggctggaaatcctccgggcgcctggccctgccctcttccctagaaatctttatcctgcaactctgaagtagctctaaagagctctagaatgcacaactagtcatagccaggcacagctgggagtgtaactagacgaggcataaaaatgtggagtctttttagtgtaaatatttgtcagccacatttcccttcgtaatatgaacgtgtaagttacagatgtaggttttcaagtattggacgtgtaattttaagcttcctagtttggtttaatttgggcgttcgagatatgtctctgggattctaacgtttgaattcggctgggagagatctaaatgaggtccacagtttcagaaggttaaacttttgccctgtgaacacttgaattcttggttcctggtaggttagcaacagaactgtcggatttgggataaataaaccgttagagttgcccactattttaacagaatggctatatctctcttgccgttgccttcaattgtgtaaatatttgtttgaataaagagcgaaggttctttgaaaagtaacagttctgtctattcttggctcccctttcatatcctctgcttagttatttaaaaggattttctttgcctcttacatttaatggggaaatttaaacattacatgtacttaaattctgtaaagttaccaaaccatttataactggcaaattatttaatgacaaggaagagttgagtttgtcgtcttagttggctaatgtagccttcatctcttgagacccagaggtttgcagatctcagcctgtcagaagtggaaaaatgagatgtctggttaagagtagtcatcatttcagtcaatttgcaggcctcaatctgttttatgcagctggcagctgctgttcttttggtgttgagatcgtctgccacgagtgtcgcctggatccctgtttgaaaaggggaggaaaagatacttgggaaattggactgagagcttgcttactcctccgttcaataactgtgaccaagctgaaactcgttagcaacctttccagaaacgttttatttaccatgtgtgtttgttgtgtatgcaagagaggaaaaaataagccaaagtgattaaccaatctctggttttccctattttcttcaaagctccattttgagatctataagcaagggttgactctcgagttcattggagaagttacctcggctcactacaacttctgcctccttggttcaagccattttcctgcctcagcctcccgagtagctgggattacaggcgcctgccaccacacctggctaatttttctatttttagtagtgacaggattttgccatgttgg

SEQ ID NO: 40775 - DNA, 3498 bp, Homo sapiens
gaggaacttgtgttcattgacaactttgagatggattaaagtcatgggatttgggagcattagagcacaagggagcctcagagatcacttaatttctaccccttctttttatagatgtaaaaaactgagacactcagagctttaggactcataaggtctcaagcgagctaagggcgggcagacaaagttctaggtacaacccaggagttaaaaattttaaaatagagattcaggcaaatgggaacaaaaaacaaaacacactggacctgaccttgtgtaaaagtttcaaagcaccattccctgtgagaaaataaataaatgcttcgatgggggaggggtggcattagccatagagactgtggggcacgtgcctgggtgccccagtcccagaaaggggtaattccattatatgacctgtgacactccacttctgatgcctgtactgtcctttccatggcaaagtaggcaacagatggttccacagacatagcagatgttgcttttgaatccaggtacaaaacagaacatttgagattttctgttcctccctgccttatcggttaagagtagagtacatgaatggatagggctggcttggacagaagggagaattacagaggcctcctgagtatggaagaaaaaaagacacctggcatatatggaaatgagcaagtgttggggaaattgtgggagaaattcataagctgatgaggggatatctaatataaattcaattgcatagaactaggattaagaatcagaagacaattcaagcttagctattctttcagcatgtagaacaaaataactatgggggtaaaaggaaccttagaaatcctcttatctgaatcttttccctccaaccaactaactgggttagatagcggcagaatctgcaagcctcctgttctattgtactttctcctgcacccacagtctctaccattccatgtgtttacctaatgggaaagaaaatgatagtaaagaaagttattgttaattacttgggagagtttaaaaagcatggtatttgtgaatggctgtttatagaaaggagttaccttaatgagtttatgattatcagaaaagttgtacaccatagcctgattaattacaaacatgtatactctcctgtttacattgctatggttagccattaggctcatgattatagattctagttctgggtgccaagctgtcctcctgtggtagttattttatctaatactcaaatctgacaggttctggccatataggaaagtttttagtatgcctttggtgggagacataaaacctctgaaaagtgttaagatagtttcttatcattttgacaactagccaaagggtgcacctcaaagccaagtacatagtgatatatttagaaatgactcaagagtgatagcccttttaagggatctgcccccccgcaggtactatgcaaaaggggtgtagcagtcttttcattatcatctttcatctggccattcttgttactgtttttcagatgatgggagaggagacaggagtagtttttaaaaaaataactgttggctagaaatatttattgggatttgattaaagtaacttgtcttttaaaaataaatgaaaccaaaattgttagctcagattttcaaatcccttcaaagtaaacatttagcaaggcagaacttctctctatgttcatccaggaatttgaaccttctgggagttaatttgcttacagttgttttcatgacgcttaaggatgtttcttagacattgcagaaaaggagctttgtgctgtatctgctttaaaggcaagatagttgtctatagcagctagtggtcaataagagaaacccaagtgtaaaaatcattttactgttgtgtgggaaactagaggttgtaggtaattgctatacaaagaaacagattaataagatatagagtaacagggttagtcaaaaagtttttgagaggatttttacaggagatacttgtttagtgtgttaggttgattttattagatgaagtgcttttccttactttacaaagtaaaaggaaagaaaatattgtgtatgccactgtttatcgatggccttaagccaggtcagctttttctgagacttgctgctaattcagtgggaattggtgttgatcatcttagaatgttttgtttgcacattgcatgtgactgccctagatggcagtatgttcatggaactagcctatgaaatagcaaaaaagttaaagattacaagagttttccaagatttctttcttgaccaccctactgctaaaacaaggaaagataaaggcaaaagaaacccagctcctacattcttttgaccagtgcagacccagtgtgaatagtgccgcacagccaagagatattcagaggggattgagaagtgatgtctggctgcctcactgcttacgtcattgcagaagtagcttttcaaaaacagcttaagatttattaaggaaactgcaagccatgggaatgcagacaaaacctttcttatacatcatgctcaatcaaatacccatattatattacattaccataactctgaccaggcctttttcccactatgttatgctaaaacaatttaccatgcctttggaatgtcatgggcaacagtccggtgaaatcttttcccaattaggtagctgccaccttatcactaaaactatttctgttctgtggtcatttccatttcctgcattatgtaatgagcactcctgtgttatttaaccagtatctgtgggagtccagaaagttggagcagaaagaacatgtagttcactctcaccatgttgagtatggagaaactcctgttgaaacaaaatgaagacaggcgaattgacgtgctccagatcttagttctgttagcagaaccagaactaagatggatcttctgacttgcttccctggcagcctatccagtgttctttctactagattggccactgtaataaaaataacatcctaacgtaaccatttcctttattagatcttttggccagagttattaaaaaaaaagcattgattaaaattaaattaaacttagtcaattgtttatcttgacttgttcaagttatttcccttctttcaagcagtaagtggtcaaaaggtagatagcatggaagggaaaaattaagtgttttataatactcattctgcacaatcagctgctaagtaatgaagatatgatattatcataattattatttttactttacaatattttagaaacctaccccacccactcattttttttttttttttttttttttggagacagagttgctctgtcacccaggctggagtacagtggtgcgatccagctcactgcaacctcggcctcccaggttcaagtgattatcctgcctcagcctcccgagtagctgggattacaggcatgcaccaccacacccagctaatttctgtactttaatagtgatggggtttcgccatattggccagggtggtctcagactcctgacctttggtga

SEQ ID NO: 40776 - DNA, 741 bp, Homo sapiens
tgttccttttcctgtcaaccaaatatatttaggcatgcatagcaattatttgttcataaatgtgtttttccctttgtactctaagctatgtaaaggcaggaaatgatatctcttaccgtatgtctcccaatgcctagctcagagcctgatttatattagttacttaatgaagattagcatcctcatagtaacaaagaaaccccaaatctcaggggctgcagacaatcttgtgttgacaaggaccttgttccatgtcctcattcaggagtgggggttaacaaagcctctgcaagcctggatgaggctagttgtcctagcaggggggtgggaaatggtgactgctgcactgactcatgatgcttcagcttggaactggcaagttactttctctcatatttcattgatcaaagcaagggacatagccacacctaacctcacagagatgaggaagagcaacctcactatgttcctgaaaggagaagaactggaatattagtgagtaacactaatgcctgctaaataaatgtctgataaacagtaggcatggatttaatgagtgaagtgcctaaaactacccattgagatttttaatttttttccctgtacaataaacagaactactcaaatatggaagtaaggtagctacattctaaaaaacaagaatattaatattatctaagctattattcagcaaacatctagagactttttataacaattctgttagctttattcatatca

SEQ ID NO: 40777 - DNA, 3970 bp, Homo sapiens
atatatttttgtcttttaagaatagttcacctccaaccttaatattttttaaaagtaaaacatttcataacccacccatctgctggttgattttaagtagaaagtgcaaaaagtcatcaggaaaaggtctaaaatatagaggatcctagataaatggtaattgtggtcagagatttacttgcatctgcctaacaaaatgctgaggtggaaaaaacaagtcaggaaaacgtcattggccaaaaagttaataggattaattaaatcaagttatattacttaagaatgtgtttaatgtaaatgaaaatcaaaataggctgggcatggtagctcatgcctgtaaatgccagcactttgggaggccaaggtgggaggatcacttgagcccaggagattgaggctacagtgagccatgatcacattattgcactgtagcctgggtgacagtgcaagacgctgtctcaaaaaggaagaaaataaaaataaataaacattactttagcatatgttagtaattaaatatgtacttaatttatatctatttttaaagtacaaataaaacaggcacatagccagaaatagtagtagaggcaagtgggtttgagggaaatgttgacacaggcaagtaacagtaaatatttattcagttttttttttctttgaggcgggggtctccctctgtcacccaggctggagtgcagtggtgtggtcacagttcagtgcaacctccgcctccccagctcaagtagtcctcctgccttggcctcctgagtagctgggactacaggcgtgagccaccatgctcagctaatttttgtattttctgtagagatggcatttcaccatgttgcccaggctagtctctaactcctggcctcaagtgatcccctaccttggcctcccaaagtgctgggattatcggtgtgagccaccagtcctggcaatttattcagtttttattttatttattttttaattggaaagctaccaaaccacaataggtttagagagacttctgagtaatcataatttttatttgtatttttttttgtgatagtaatttttaaaaacacaggtgaggaattggttcatgagataagattaaaagaactaaatttcttcttctaagtatgagtaaggcaggatatgagaaagttcctcaggtatttgaatgatgcatgccttcagtaagggggggacacccgtttctctgaagtttagggtggagccagggcaatgtgaagagaagcctgggttttatgtcaagggtgaagtatgtgtccttaataagacaatggattttttggagggtagttctttctagaagcaactccactatacttaatgtgttgctctgtagtggtgagcgtgggaggaccaaatgacaagatgcctttctccccaggttactatggcaactgggcagagctctgttgccaggggcagaggcaggtggaccacagggcagggagttggtggccttgagggaattttgtgtccttctagatagccaaagaaaccccacagatttttcagggagacatttggctgcataacaacgtatttttcctgtatttcctttccctgaaaataattgggtctagtttttaggcgtgcttgttaatcagtattagagatggttcttcagagtctacaagataattatctagttcacttcacgcttttgacagaaaccgtcctaaccatgactgacaaagagtgagcacctactacaagactggcaccacctttagacttgaaagcacatagtctatcacatgttcgcacacacatttctttactgaattcttccaagatcccaaggggaggcactaatctactcatctctgttttatagaccatgtaattgaggcttgaaaggttgaacttgattaaaaaaaataataactgtgttataggtctgataagtgccagaacttcaaatccaactctatgttctttctacttaagctgaaatacagattctgctcttcaagtccagctggacacagtggcccacacctgtaatcccagcacttttgggaggccgaggcgggcagatcacttgaggtgaggagttcgagaccagcctggccaacatggcaaaaccccatttctactaaaaatacaaaaattagtcaggtgtggtggcaggcacctataatcccagctactcgggaggctgaggtgggagaattgcttggacccaagaggtgggggttgcaatgagccaagattgcaacactgcactatagcctgggtgacagagtgagaccctgtctcaaaaaaaaaaaaggccaagggttctgtggaggtaagaagtcaatttattccacaaatcattaaaatataagatgacagagaggtactgagcctcctgtagtcctgatatctttatttttaagcacttcgcctatttctggtcattttactcctaattttcctggggaaagtgtgaaatgccccttctcattcgggatgtccagtctgcataaaggcaggagcatgctgccccagattgcaaagctctgggaatgagtggagatggaagtactgagcattagcagcttcttggagattgggagtttgggtgtggtgggtgtgaaaggggaagtagggaagtagaaaagtagatctactggataatctgatcaagatggctttttgtttattttgaggggagggagggacttgagtacattttcagacagaggagaaggagtcaatagagagggaaaggtgtaggagaagggataatcaatagagcaaaaccacaggacagtgggaacaaggtgcagtggtgcaggcagagggcttcctcttggaaagactgagagactctcctcagataactgagctaatgcttatgctgtttactttgtcccagacacccttctaagtgtcatagatgaacagtcatgcattgcttaatgatgggaatgtgttgctgagaaatgcattgttagatgatttcatcatcttgcaaaagtgtattatgaaagagaacggcaatgatttttcctattcacactggccactagttgcatgagagcgggccctctaattaggttactaagtctctctgtgcctcactttccttatctgttaaatggggattagaataaaaccaccccccacaaagtcatgaaaattaaaaattaaaatacaggtggggattgtgtctggcacccagcaagcactcagtgagttttagctaactgctgttgactactattttgttctggggataggtgggaatcatttaaaagtgtaagaattctaaagtagacagtaaccctttcagttggggtctgatgtaatgtgtcaagagattggctttctgttttttgtttttttaagtcatttatttatttatttatttgagacagtgtctcattgtcacacaggctggagtgcagtggtgtgatctcggctcactgtagtctctgcctcccaggctcaagtgatcctcccacctcagcctcccaagtagctgggactacaggtgcgtgccacctcacccagctaatttttgtatttttagtagagacagggtttcaccatgttggccaggctggtctcgaactcctgtccccaagtgatccaccgccttggtctcccaaagtgctgagattataggcgtgagccaccacaccctaccttaaaagtctgagctacctttgggagggtcaccccatgggtaagctagggattcctcaacatgttttgctgtaggtttgtttatatcagcatcgcagcaaacacatgagtaatatgttgcaacatattatgttacaacagctattatgtcattaaaaaataggaatttttcagctccattataatctttttttttcctttacgtttttcaggttagagaatggaagatgacacccattataattttatgggactacctttgtatatgtagcaccttgttgactggaatgtcgttatgtgtgcagatatttta

SEQ ID NO: 40778 - DNA, 2932 bp, Homo sapiens
agtaatagtagagtagttttattgctatgtatatcatattggaaaactcgtgcaacataggaattaggtatcatgttccctgtgaaccctcctgccatcctaatccatgtagttatttattttgtgtatctcacatatggcatggcctgcaaattctatttgtgtatttctcattaatatcagattctacacaaaagtgaagcaagttgagccaatgttaaatctcacttcccagggaaagttatcttatgttttcaaggtggaattctcaggtggaattctaggaacacgggcagaaacaagcaaggaagctacctccatccttcctaatattgttttgatggcttgacagaggctatgcactggagaggggactacaggggcttgacgcataggaccagctcatacagctatgagggaattagttggtcttagaaggtaggattattctctgtcattacatcatgtgaaaaatggcagaaactggcttggggtgaggaactccagaagaggatgtgggaagtggaaacaaagactggtctagatgatgttactacgtattcttgacaactaaactcaaatagagactcaacacagcttggcaaaaacattattatgtttctcaaataaatttattccaccatttaatgacacagctatttcatacactctgttcatactcctggccaactttcatccctctggctcagagatcatcttaccatagagaaattagaagcatcccatcttctcacaatgaaggcggggttccctccttccatcaaagaccactccctttggatgtgctctgggtgtcatcctatcccaccttcttgaggtcttcagtctttctgcaccctcaccccctggggtcagtttctctctctttactgtcagcatgccaatattattatttttaaaataaattactactttatcgattaacgataagctactaccttatctctcttctcttcatcatagctaaacttattaaacaattttctgggtatactgtgtctccttttcttcattttccaattaaacattcttcccactccagttggcttagacctctactcctccatcagattctctcctgttaagactactaaagacctcagtggtgcccagcctgctgggtgcttttcagtcccctcatgatcagactcccgagcagcattcagtacaggggacagctcttttcttggtgcttcttcactgtctcccttttgtttgcctctgtgtaccacaatcttctggttttccatctatttctcttacctctttctcactctttatctctcatctgaactcagttctcttgtaccctcatgtccttctatagctatggcttcaaataacttgtatatgctggtgactatcatagggatttctctagttcataaccctttttggaattctgactcatatcctgtgcctacctgacatccccacttggatatttcatgggtatttccaattgaacacacccataactgaactcttgatcttatcttttcccttgccttccaccctccaccctccatcctctagtttttccaaccaggagattgcatctctattcacctatatgttcaacagaaacctggaaattgatcttgacacgtctttccttatcatccctacattcagttgattaccagcttgtttcttgattgcttcaacatctctgcatctccactaacagcattctcttctctattatgaaaatctcttatttagtctacttccacttgctttccttcaatccattctcttcacagcagccaatgtgattaaaaagaagaaattagaccatattactgtggtttgcatcacactgtacttgactatgcatccaaattccgtagtgtgatctgtcaccagcctttctgtcaccaccctcccattcttcacagcactctcagagtcaccttcctttctatctttctgtttgttaaaagattcatcctcccccaaccccagtcctttgcagatactgttttcccctacctggaattcccttcctcatattccatgcctcattggttctgtctttcagggctcaagatcagtgttagtttttcagaaaagccctcctagacctttccagttcgggttagattttccctgttgttctttttacagataaacattttataatttatgtttgttttgagcctactagacatttatatcccactctagcctgtgaaatagaggagggcactagggcactgtgatccactgtttatccagcccgtagcatgtgccaggcaggatactgcccagtgtgcttacgaatattgttgttggattttcctgctaatggctggtccaggctgggccttagcaaaacactgagccaaacacctgccaaagagtgcagccaagtttcaggacagctgggctgggctgcccgtgtgcatatgccaggaggcctgtagtcacacggcccatcatgccaaagcgtaagacagaaggaggaagtggcctttccccttagggatcgtgtttccttttccatacacctgttgctgtggtcagatataaaccatggaatgagaaaagcaaaacctgaaaagatatctctgttgggcaagctccgattcagatgttaatagtacatcctgtaagcctggctctagaattttggagacaaggccggagccataggaaaaaggtttaataatacctcagaatgcctccccattcaaatcttttgttttttatttttttgggacagagtctctctctgttgcccaggctggagtgcagtggcttaacattggctcagtgcaacctcctcttcccaggttcaagtgattctcctgcctcagcctcccgagtagttgggattacagactcccaccatgacactcagctaatttttacatttttaatagagacggagtttcgtcatgttgtc

SEQ ID NO: 40779 - DNA, 1381 bp, Homo sapiens
ttgtattcttccgttgaaatctttttttactgaaatttattttcgcatatagcacgaggagggggccaagataattcagtatttcgttaatcaggcatatagatctagagcggggaatgtccgataccattccaggttatacaggcgagattaatgtcagatcttgggagcatttccagtacaggttaaaactgtcacgcggtcggcgggattgcaggtgatgcagcaagcctggtgtcctcgacaggagacgtttcccatctaggaccgttggatagggttcctttctgagcttccagctctgtagtatctatcagcccgctgatagggcagcctcccgacgccactcaaaacatcttaaaggccccaagccaaaccccgctactagtagaaccaacagtctaaacgaaagagccacgacgctctgcgcatgtgcgctcttcgcaagctgaaaatcttgcggggagctctttagcaagttccgccttccagcctgaagcgcatgcgcagcctcggttccgttgcgtagcgtgtccctcagtgggacactgcagggtgcggggacaactacgaagatggcggttgcgcgcttggcagctgtggcggcctgggtaccttgtcggagctggggctgggcagccgtccccttcggtccccaccgtggcctcagcgtgctgcttgcacggatacctcagcgggcgccacggtggctcccaggtcagtgtccgaaaggcgggagtaggatgcgttctttcgaacgcctcgggttccgtcagttaccgtgcctgtgcagtgcgtctttggcgcccggttcaaaaatgctcctccccctttctcaacaccccagttctaggcgctttgtagacttctggtgaaggctgtgaggagagctctgccgcggccctgcggcattctgggcaccccgggccctcgctggcgttttacactgtgcagtttaaagagctcctgctccttacctgcctcccctgcattaaaggccaacactagaaaaaattaaaatgtgcatttaatgcattattattagttacttctaggaatttgtagattgtgactcctaaaatgcttagactgactctcctttgagtttagggaacctaacaatgcgaggcatgttctttgtaaaagtgtagacgccctcataagcctaatttctagttctgctttcttgctgcacccactcagtgaaagaaccataatcattattgcacaaaggaaactagaatttgggctaaaaatcagagaacctcttatatgtatatatagtctttgaattagatccttttatttttttggctttgtgtgtggttcacaccattgccacgtagctgtcagatgatgcatggtgcttggagtggtaatt

SEQ ID NO: 40780 - DNA, 2226 bp, Homo sapiens
ttgctcaaaagttttcttggagaataagagaaggtaatagcaaagaggctgcagcctaaagccactgatatgtcgcacttcttcatgtctcacctgctatgggagaaagaagaggtggttggattgattctcaacaaatatgcctgccagcgttcaaatggcttttcttaggtgaagaaatggatcactgtgaggttgcttctcttctctctgccatttatcccagagcagcaaataccaatcctgtgattaaaccattttttatggggtttggagttattcattcaaatctcattcactcaagtttgtttctggctaaggaaagctgtttcttcttttgtccattgttaggtattccatgcaacaacagaacttttaagtgtggcaatgatatttgctttaggaaacaaaatgcaaaatgtgatgggacagtggattgtccagatggaagtgatgaagaaggctgcagtaagtagaaattcattcctttgggttcctgtattccctcttcagtttacctgtttgttatattttcattcccttcttggtgtatttcccttgatcgaggttgccatagccaaaacaagaatagtaactattgacaaactgagtctgaaattgtttctcagaaataaaaactctggaatggattctgtcttcttgataacagcattaatgaattaaatttttaaaatgagaactttcactttttaataattttaatcaagggagaagatcttaaataaaaaccttgtgagaaaataaatagaaactggaacgcagtggatgacctgttaatgccttatgttactaacaatatcaagtgctgtttctttaggcctgactcaataactaatctcccacatgctcctattagtcatgtggctactacttggccatgtggcaacatgtaaattatacatctttaccaatactatttacactagcaaacaattgctctgataactagttttccctgtaggttttcatttgtccaggtcttataaatcttttccccaatcctttctgtcacatcagcacaacttcaaagaaattctcaattcatttacattcctctttacctgacaatctaaatccataggcagctgtttgtgtcagttcagctgttacagcaggtccccctcctcctctcatctgcgttgtggtatagagactgtgtcagggcatgcttcaggaaggagggagtggtttgtttgtattggtttcagacagactcacatgttctctgtcctctagataaggagatttcaaattgctacctagtgagtcagttcccagccagcactaaaactggcttaacttctagtttttcttccaagtctacctttaaatcacatgccctttctccaccaaagcctgcagcaggagttcctccgcccttcaccgcatcatcggaggcacagacaccctggaggggggttggccgtggcaggtcagcctccactttgttggatctgcctactgtggtgcctcagtcatctccagggagtggcttctttctgcagcccactgttttcatggaaacaggtagggcctcacggtccttactttcaagtggcactctgtggccatagacaatatatctgccctcaaattgtgggaagcagatccctgttggggacattcaatcaattcaattgcactttcattttttggatcccacgtgtgtgacaaacatttttttttaaggtattattggtataaaaaaagcacaaaggaaacatcaagaatgaataggcttttactaaggctgggaaaataagatagggcttttaactcagagggagcaaacttaagagaatgtgtggagaatgtggagaaaaatgggcactggagagtgactggagaatggaggtccccaatgggattatgatgggatagatgctcttccagccaagggtaagaggacatcttagaaaataacctcacttaaaatttaaacttactattggaatctactgaatcttaggttaaaaaaatcattcacttctcattctgcattttttttttagtatttcaatgaagttacacagtttggatatttgtttccctgaaaattataggatttgtgttaattattaagatagcttcacatctgtttgatcatgagtctctaatgctgtgaaactgctccaaataatgtattaaccctaatatttctttgggtgtccattgacactcatgagacatcagctaagcaaatta

SEQ ID NO: 40781 - DNA, 3543 bp, Homo sapiens
gggtaaggatgggggtggggagaatcagaagtttgagaggtgtcagtgcttccagtcaggtctgcatgttttcgtgactacagatcctatcaagacctccctgcaaattcccacacccttcaatggctctagttctttatcagtctccagtcccttttaggcctaggagtgttaacagcttctcgctattgctagtccctgggtacgtcaccatgccttgttgattcccttaacccttgctccttggttaaaaaacctgttcaaaaatcccagctgagaatgcagcctgattcttgcaagatccacctgttggagcagaagtcagtgcaggtcagcagatgagtcactgcagactccccttagcaggcagatggatccaaagttcaggggatctggtagcaggcatcagactgctggagacaggatatctaggctgtgtctcaacatcaggtactgaagatgccagacttttggactcaagtcaacatatttggagtggagctgatttatatgcttcttgttaatggtctggtcttaatgtgtgtgtgtgtgtgtgtgtgtgtgtgtgtgttgcgtggagggtgagaagtaaggagcaagactattcggaacagaagcttgagagttgaggcccttggcccaacccatgctgtgcttaacaaacataattccatgctaactaaaccggaagttctgaactacagatagggtgtcaaggagattgtgtgtgcgcgtgcattgtgtgtgtgtgtgtgtgtgtgtgtgtgtaaggcccctcctctcaaagataaataataatggtcatttatgagtgcttgctgtgtcaatcactgttctgagtgctttgcttacaacaacccttgtaatcctggtaacaactacatttaggagggtacaaatattacaccaactttccagatgaggacgttggcacagagagatgaagaccgaggtctcacagtgaggaaccctctgggtggagaataacccaggtacactggttttagagtccgctgtccccagcaccacacaatactgtctctgtgcctgactctggacttgcgaggaagtgtgttggtgtatattattcaccttcatgcactcagaacctagcaccatgctggcacgaggcatggttatttgttgattgaatgaatgcacttttgctaggccgcgaggactgtggcaaaccccaacaaccaacagttcgtagggttagatcgcaaacttttctccgttggacggtgctgccgggcccaccctttccttaccacagcccggcacccaggcagcccctaaacggagatggtctgcatctgcaggcgcggggaaaggcatagcaggcagcgccctgaacaaatcagaaaaacagccttcggctctggagcccactccggcacggcctcaggtgctctaccccgcgggatccagggagtggccgccactcacagttgcccctcctgtccgctccggtccgctcccgccgcccgaggtccgcgacgccccgcccagtgggtggagtgtgaggcggggaggtcgctcgactcgccggcgctgtggcctcccgcggagccgctcagactttccctgccggcacatggacctggcccaaccctcacagccagtagacgagctggagctctcggtgctcgagcggcagccagaagagaacacgcctctcaatggtgccgacaaggtcttcccttctttggacgaggaggtccccccggccgaggtaaggtccccttggcgctggccctaacttgccggcggcgggacagtagtaggacccgggcctggcacccgcgagtttcgggtttccagtcaggcggggcgtcgacggcgccgagcgagggtggggcgcgctcgagtgctctgaatggagccgagtcaccgcgacacctttcggcccgagcagtcccctccccagcccctggggtcctccaacccctctgacccccgaggcgctttaggaatcctagtggtgaggtgtggccgctgctgtcttcagagaggtattccggagatggaagtagttttttaaagttatgtaacttttaattcagtttttcttttttccagtagggagaatgagaatgacaaattgagtatcctccttctctcagaatctcttctgtcctcctcttaccttcactgccttgccacttctctccctcccctccacccacctcgccgcagcccccagccttcttccatgcctaccatccgccaagcactttctgccttctcccagcctggccattggattctgccggaagagagataggggagagcacagaggagagaaagcggtcagaaggggagaaggggtagggctggcgtagagatggggcgggcgggttagggggtcggcgcgggggaggtgaacttgccctgctcaattgaaagaaaataatttcaaagttcttgtctcgaaggttgagacttcgcccaccttgcttttacctcctctcaatccctaaggaagtccctggctatttttaggccaagctcttttctgattcatccctagcaatgatgggaacattattcactctcatcaaagacttgtaaaacatcagagctttgacttcccagccatccaccttctgattaactcctaagattggcttgaggttttctgggtgcacagaactccccatatagagccccgacctgatctttctaggccccactcctccacccccaactttttggctgcccagctgttgattttagggataagcaggaaattcaaaagttgaaagcattgcttttgttctacattgattcctggaactattgcaaagtctgcttttataggtactctggagagtaatttggaaacttatttctgaataaaatatgaatgccacagaagaatgaaggttgaacaaagatagtctggtcaccagtgcaagtggccacaactgtgaactggctgtatgagtcctccagggcggtgtccaggaatgggagttggaaatacttgcctcagattagatggacccgcacaccctaaagactccctagcttggggctgaatccagaaatctggtgacagttttgccactaagaagtgtgtcccagaggcaagcctgtcccgtagtggtaatgtgtgcctactcggccttctgtgaggcctgggaatgccttgttgaaaacaggtggtgggtagaacaagccaaatccatgcagggttatcagtattctgtaattgtttagcacctaccctgtagcaatggttctttaatgttctcatgacgtccttgttagtaaggtatatacagataccctggacttctttgtaagttagctttgtaggtcacccaataggagagctgtcctcagtaacaggatggagtgaaggtgaagggctacaggagtacttggagtgtgttcaaggaatgccttgaactaatctcatctaatgtgttaatcattctcttttgtcctataaaataaagtgaagtgtatttcagttagaaaagtcaataaatataggctcattaaaaagattcagacacttaagaattttgtgtg

SEQ ID NO: 40782 - DNA, 1318 bp, Homo sapiens
acacctgggtacccagggcagggtgtccagtggggagttatattttttcactcgaattaagaattgtcagcatgtggtgataataaaagcagaccaacttgtagtaggttttattattgctgctcattctctacagactgtgcagccttcattgcctgtacatgggttgggcttgcccactactcttcccttgtatgccattgaagaatgacaaattcaggatcatggcttagcttaaagcactgagtaggggctttgtatgtgctagggaaaagaggctacctgtccaccagactcacaatcgacatggaaatttttttaatgtccatttttatgagtggaacccagggaattctgttatttgagactctttagggaaaaggtattaatggattctttccttcctcataaggaattataaatttcttgatttgaaaggtacagaaacaaaagccttcatctttttctcaaagtcattttctttctggataatttggaggatcagttgagtgttctcaagggttctcctttcttcaataattcaccctagtcatggagaggtgagaccctgaataacactttactaatgaagttttggttggggcaaaatattttaaatatttcaaaaacaaaactgtgacaagtaggtggatgcttagaaacatgatttaaattgataacatcctggagaccctcatgtgatatcccccaacattataccccagattcttgcctgaccctaatctcttaatttatacaccttttatgagtaggaacgctgtggtactgagatataagcaacgacttcctaagtgacgttgtgttgagtggatttgtttgcctttcagttgtgaataagagctacattttatgatgtcatgtggttctggcagactgacagttttcacagggtaatgctccctggtgtagggtgactcatgggaaaatcctaggcagacagcattaacaagctataagctgccaaggtcctttggggcaggaacatgagagcagtgctagacccagtaccttgaaatttctttccattttcacctgtttatcttttcttcaaatcgctgatgtttctctaccaagatggacacccttacctgtggtctccatataatatctttcagcttcctctgacccagagatcttcagatatctcctcctctctctaagcatcctcaggttcttcttaatttatgcctagtgttccattattggaatgctaatcatgtagaagttatttatatcttactgctcaaggtcatcaccaaagtctgaatgcaaaaattcgaaaagttcaacctcaggt

SEQ ID NO: 40783 - DNA, 1800 bp, Homo sapiens
tattacagcaaaaggatacattacatcaaatgattaattacagcaaaatccagagaaaaccaggagcaagctttcaagtgtcctctctcagtggagttgcaccagacttgtttaattcctccagcgataggctgtgacaacacatgtgagatctcatctactagggaagcttattggagattcagtacccggggttttcactggggcttggtcatatacgtagcctctgcctactatgcactaaaaatccagactcccagaaggaaaggagatgttagccacattgtacaaacagttgaggcacagtgagcccctctcatcaggggaaaatccaggttctcagacaccagccaggaccaattttgaggaggcctttcttatgctagcaatctcaggcctgctatattaactcttttctgcacattccttgctcgtaatgcctcgtatttccagatgtcatcacagaataagtaaccggaataccaggaatcttcctcctttttacctgtccttccatctcaaacactgaatttattccactatggtcttaaagtctatggcaatataagcacctggttcctcccacctacgcctttctcagggccagagaggtagtctcctgtgtgggaccagctggtgaggctgttgtggagccaggggagcataattagcacagtagtgctagcttctggcgcctggctcctcactttgtgtgattttcctttagttccaactacttaaaaatcaattagatggcagtcattaaacacaagcagcaatacataactaattgtcccaggaatgtaattcctgcacaccctggggctctgaatatagtttagcttcccttctgcaagcagagcatgtcaacatacctgtcctgtgagacatagtctagagtgatgacttcatgctcatcctctgtcttcctggggagacttcaagacatggactcgcatgctcattttctagtcacctctgttgtttgagtcgatgatgtcacttcttcatggtggtctttgccagcacagaattgggaggtgagtcaatgcagttacttgctcccacttcctgtccttcatcactcattgttttaggcaaactcgtcaaccctctgggtctgttttcccatttataaaatgtaaatgatttcggaatctgagtctataaatataccttgaccctaatacatgctaattcattgacctgaacaattcctgcacaccctggggctctgagtgtagtttagccacccccaccgtctcccagtacctgccttgacacctgtgtacctagctaagctgcaggtttagtctaataaggaagttcatattcttcctactcccttgggccctttccccagtctgtattcagtggaatctgagacccctttgccataaaacaaactttttattttgatagaggcaaacccctgtattttactcaattttgctgagtggagaaagcatttctgcttacacttgcttgctgtgttcagcctttacccttgatgctcatagttatgtttaagtatggcagtcaatggaataaataagtttattattatatgcaggtgtttacttttgtttttcatttccacctcccctactttctttagtaacttatgttgatgaagatgaaaatgaaatacttgaattatcatcaaacaaaacattcttcatcatgctgaagattccagaggagtgtgttgctgaagaggaattgcctcacctgctcaccgaaagggtaattccatcttatatattgcctaaggagttcttgacattagaatatgaattt

SEQ ID NO: 40784 - DNA, 2334 bp, Homo sapiens
cccacactgagattggtacattctaactgaaagcttaaaaacaactagaaaaaaaaaacaaaaactaagcaagaacttcccattaatttactattcttgctcacttttcagaaagcaaaaatgaagttacaacaaaacactccaaaagagttataaaagaaaagcttgaaggcagttgtagaaatttacctttaaaaaaaaaatcagtcactactgtaacagctaatgtgtcacaattttttactttaaaaatgctgtactgttgccaatatatttttaaaaattatacagccaggaaggtcaaaccgtgccttgttatcactaataaccagctacggctatctgaaaagcttgggaaaaaggttttgctcgttagatgggttcaaggttactgaatgagataatgttgccaatttcacctccttcctctgaaatctaaacgagttgggatcgcagtcacaacttccccactacagcggactttcatgaaacttaaaggaaaagtgacctcacctcaggtctcttttgacctctgtgtgtcaaacactaaattcattttttaaagagaagcaaaatccttgcttaaaaaggctaaaagacttccagtgtttggatttaacgttcttcaatctactcagcctccgaacacccttccaacccgacgtacccgaccgcgcagagttatgacgggagaaggcaggaacacgcagagcgtcgctccaagtttacccctgaggagtcagaaagccctaacgaacagccggttaagactacgggtgggggctgcacacttccctgtgtctcgagccctactgccttcctacaccttgccccgccggagaaagcggggactcctgcggcgcctggtccctgaaaagtcgagcatgtgcctgacagctcccggcaaccctggcctggcttaccttgaggaccggggtcaggtactcagccacttccagtgcctttcccttcacagtattaatcacattctgcatcctggggccggagtagcggccggccccgcgacgggatggaaagtgcagccgtgtcaggggccagggagtcagaaaatgtcctcgctgccaccgactcgcatcagcacccggctggcagcacccgaggggacgggacgcgacgcgacgggacgggcgggacgagggggcggggcggcaggcacagcgcgcgaagacggggtgcgcgatcctcgcaccccaggcagcccgcgacggaccggacccagctgtcacccagccgcgagggagggcagcggggccgaagggagacctgaggtgagaagcggacgcacacgcacccctcgccctctgcgagctgtctgtcctcgctttgcttcactcgcgccccttccggcttcccttccttctcactctcttgccgtagctgcgccgccaccggggcctcacgtgacactagactctcccggcacgtgacgtgagaaaggggccgggctggggcgggataagccgcttctcccctccttccggaagcgtaacactgaacgtgcctgcgcaatgggtgtcgggtccgctttttcccaatccggacgtaatcgtggtttttgttctgcaataggcggcttagagggaggggctttttcgcctatacctactgtagcttctccacgtatggaccctaaaggctactgctgctactacggggctagacagttactgtctcagctctaggatgtgcgttcttccactagaagctcttctgagggaggtaaccgcgccccgcgggcaaggaattgcgcctgcgtctgaggggagggtgcgccagtgaagagccctactgcgcatgtgtgactagaagggtagtccctgactgtgaagggaaatctggccccctcctgtcggggaggcgtcctgtaggcgtgcgcccaatggggctgtcagtattggcatttctccccactccccgcaggctctatgcgctattcctacagtacgctgggaggctttgggcaagttacttacccaacctggggtttagtgtcctcagcctatcaaaagagggccttagattcattgatttctacgatctcctccatttcaaacactaactagttcagtaaaactttacagcagtgtttcagatatttccattttggtcgttattgtaatgaagtctgtcctaataagctttttcctccgagggaaaagaggaggaaaatacaattctgaaagccttatcttacagcaaaattatttactaataagagtaaaagcgaggccgggcgcggtggctcacgcctgtaatcccagcactttgggaggcagaggcgggcggatcacagtcaggagttcgagaccagcc

SEQ ID NO: 40785 - DNA, 1459 bp, Homo sapiens
gacaaacgtcaacagttaataagataaccaaaaactgtgaaaatcaaacgttcctggaatgcatcggagcttcacactttagtccttcgcttgagactcaaaggccacatggccagataggtctttcacctctgcaaaccgttaaacatccttccagtaagacataatcgttaagcccacggtgttaaagaaacccagtgagctgttccccgcaggtcaccgcctgcctccaccctcctcccgcgcactgaaggcaaaacacttagaccggaacgagcgaggccagaggagacaacaactcccagcaggcgtcgcggcagcgggaagtcacgcacgcgcaacccaggccacaggagtaaaatctctctgcccgtcttctgggaagggagaatggcggcgcccgggctgcggctgggagcgggaagactctttgaaatgcctgcggtgctagagcgactgagccgctataatagcacgtcccaagcttttgctgaggtgctgcggctgccgaagcagcagctgaggaagctgctgtacccgctgcaggaagtagagcggttcctcgccccctacgggaggcaagaccttcacctgcgtatctttgacccaagcccggaggacatagccagggcggacaacatcttcacggccactgaacggaaccgcatcgactacgtcagctccgccgtccgtatcgaccacgccccggaccttccgcggccagaggtgagaggcgattctcacggttcacctgcgcgccggcgtcacagcgctaaccgcttccctggccgtccggctcgcgggtgattttgcggttgtattttctagctttatgttggcgcatatattattttaactcaataggcatatgtcgatgctccctgtacgtggggatacccgagaaacccattgttaagtacaaaatgcagtcaatacccataaacccatggtaaagtcaaaaatcgttaagtcgacccactgtaagcagagactgcctgtatacagcttaaattattttggaatgaatatagaagacttcaaaatgctttaaaagcttttcaaacccaaattaagcattcaaaaaattaactctccttttttcttctatttaacttaagtagggaaaacatgccagacaaattagacagaatttagacagtgaagaataggaaacgaataatagtttcacaaatgagatggtccttatcaataagtaactttcgcctaatctaaatttcctatcgtgcaaaaataataatctctagatggcaataatgtggaaaaatttttataacaacgtttattagtgaaatttcatgagtgagcattcttgcatgtcctacaatttattgatattctgttctaagtctgctaaaaggcatctcaactctccatatgtatttacactaagtgcaccattgcccagagatatttcgtctaaatatatgtggaactatag

SEQ ID NO: 40786 - DNA, 1922 bp, Homo sapiens
cgccttattttgttgttctgttctgttttgttttaggctttttgcagcttaaagccatggtttttagtttgtctctagtgaaaagagggatgaggaaagggctttaccagcccaaccggaaacaaagaacccatgactgtattctctcccttgggccccggagctacgtatttaatattcataacagcttccatttgagtgttcatttaccatgccaggcagtgttccaaatgctttctctacattatcaactctttcatccccccaaacagccctatgaggaaggtgcttttatctccatttgaaagtgagatcagtgaggcacagaaaggttcaatgactccttcaagctccagcaaagggtagagctagtattcaaacccaaacaacctggctcctgcgccaggctcctacctactatatgcccttcaccctaacaaataccacccatttaggtggcaaaacaccgtcgtttacagcgcactgtctcctaaattacatcattagatattcccaacgcccctgtgaggagtaggaggactaactccatttcacagataagcagatagaggtccgaaaagattgcagtttgagtcccagtgcttaggtgacgtccaccgctcctcgggtacaggaaaaagaaggaaaggggaaatggacggaagggtaaacaagactccgaagacccgggtgagcaagggttcccaggcagcactgttccccggcaccagctgagtccacctctctccgccccctcagcgcacggctgagccttggtctttcatctctccagccaagccctgggttagcacagctggttcaatgaaggaatgcgaagccagaggccctacaagctacaccagcaaagtgctgggaccgctcgacccctacgtgccccgcgccccttcccagcgtcccccgggccgggaagtcccggtaccacccccgcccacatgcgccggctgggcctggcggcctcccccggaaacgttcccccatcctcgcccggcgcctcactcaccaagggccgcgccggggttctgcactgtcactgcgctgcggttccccgccttagggattctcacacggttccacggctccaggcccggcggcaccgcagccatcatgcgaggcggggggacttacgaaaggcggagctacgcgagagcacgtccagcgaccggaggtggggcgatgggacccagtccgggccggaagggagcagggggtggggctcgggcggggccaggagcccggcgggaggctgccttcatcgagtaaacgcgtgggactgggaaggacccagtcatctgtatattggttaccaacacgtggccgcgtagaatcatgggggaaaaaaggccccatcccaatactaaccaacagaatctctgagaatgcgatgaggaatctgcgttttgtttaaacttagcgcaggggattcggaagcacaaccaagtttggaactgttaaatacttctaggcattttacaaatatggaaaatgaggcccagaattgagttggtgcttttacccccaactctgcctcagacattaggggaaaaaggaagaaatgaaatgaagaggtttgtgcaaggtgtggaatttgtagcgaagaagcagtgatttgctttgagtggtaaaggaaggctcctttatgtcttgaaccacagcaaaaccgagatcacatcaaagaaacttggaagacacctgtcagtcattcccacttttgtcagtctccaagacaagatcatattccaagctctagtgatccttacctcattaatatctttctaataattcatttatcctcagccatgctaatgcccccttaagttcttaacactcccacagtaacgtattagaaaaacagtgagttttggaaacagactgccaaggttctagttctagctttgctgttt

SEQ ID NO: 40787 - DNA, 808 bp, Homo sapiens
acagactttagtgcatactctctcccactcttggtgattcatgatgcataatagcatactaaaggctcagaaaaggcctgcagtaaagaaatctgatagcttttcttaatatagcattttcctaaattattttcggtggcatattttaatatctggtaggtttttagaatattcctcactaatctcctttccaccactacatccccacccctctgccactgtaaccttgtgagataggcaggaaaagagctcatctgttcatttaatcaacaaatacttactgcactcctactatgtgccaagcattgtgattgatgctggggatatgtgaatgaacaacatagaaggctctctgctctcatggactctcactgtttgcctgcagcatagtgatggtattagtcacatccatcattagtcatggtggatggctgtgctgtgtgtacctgggaatggcagaacctcagcagggggatcctctttgcaactggtggagcctaagagcaggaggctagaattatccccaccccctctgctccttcccttcttcatgcctctccaattccccacactttgctcctgctgtaaacagtggtgcctgatccagctggcaaggctccatgtgtttgttttctctgcatgtgccagccttgcaccgaggccactgagcttcccaagttggggagagctggcaggggttggggctgggggcttccagcagaaggcagggactgtttgacagaccaactgcagcatgcttcagatttccaaattgatatttatttaagttttaggtgatttaaaagaa

SEQ ID NO: 40788 - DNA, 1778 bp, Homo sapiens
aacctggaatgcagctctccccggggccactggtgcgtgtgtcttttgaaacaccacctctcacaatttaggcagaagctgatatcccagaaagactatatattgttttttttttaaaaaaaaaaagaagaaaaaagagacagagaaaattggtatttatttttctattatagccatatttatatatttatgcacttgtaaataaatgtatatgttttataattctggagagacataaggagtcctacccgttgaggttggagagggaaaataaagaagctgccacctaacaggagtcacccaggaaagcaccgcacaggctggcgcgggacagactcctaacctggggcctctgcagtggcaggcgaggctgcaggaggcccacagataagctggcaagaggaaggatcccaggcacatggttcatcacgagcatgagggaacagcaaggggcacggtatcacagcctggagacacccacacagatggctggatccggtgctacgggaaacattttcctaagatgcccatgagaacagaccaagatgtgtacagcactatgagcattaaaaaaccttccagaatcaataatccgtggcaacatatctctgtaaaaacaaacactgtaacttctaaataaatgtttagtcttccctgtaaccttcaaactgagtcatgtgtgagtcagcattttctttacatgttagaattcagtctctgagtatttgaagaaaatacccacttacaatattttcaggtccatcagaaatgagatctgaaaaaggtagtaaatgtttctcttttttgttttttaaaacagtgaatgtcagttgtgcttggattcatgcagaacacattaccgtttagtccacaagggaaccgttgtacaacagaccaggaaaaacaggttcatagttctcttaccaactggacttgagatgaagtttaggtcatattgaagaaatagaactaatcttttttatataggtgtgtgttgaagaccaaatattttctccaaaatactgtttagctaagtgctgtgccacacatggacatatggtgcataataaattcacttcccttctttccaaagatacaccaacattgccagagtagttgactcactagtttaaaatcaacatttacttactgttgtccaaccaaaggatcaaccatagattcttttttaattgaaattttaaaatctttatatgtggaagtggaattagatggagactgatgcttgcaatgaaagccttactacgctttgtgttttggggctggagagggtggggggagcctgtattttctagatttctgtaaaattgagttacagatgaaatgccacttgagacaatctcgttaagtggggggccagaccctggcttttaaacatgaagaatttgataaacagggtcctagggaagagtcactctgactgtttagggcaagtgcatcctctgctggccaaaataagtatagcacctgctattcctgacttctgcatcctttttccatcaagctcaacgtcagagagaacttcatgtggaagtgcagcatggttttcaggaaagcagtattttaaaaatattatttaaaaggaaggactgtaaggaacaggtaaatgttaggaaatgagaagcagagcagggaagagaagagaaaaaataagatactgtgatttcagacaacctggcatcacggcccagagctcacttctggggtgggtagggctgacgctctcagtcattgctttgctatccagaggccccccaatc

SEQ ID NO: 40789 - DNA, 1119 bp, Homo sapiens
aggtcacaaaagagaaatctagctgggtgcaatggctcgcctataatcccagcactttgggaagcgaaggcacgaggatcgcttgaggctaggagtttaagaccaacctgggcaacacagcaaggacctgtctctacaaaaaatattttttttaagttagccaggggtggtggtgcatgcctctggtcctagctactcaggaggctaaggcaggaggattgctggagtccaggagtttaaggctgcagtgagctatgatggcatcacatcactccagcctgggtgacaggacatgaccctgtctcttaaaaaaaagatataaatccccttggtaacaccaggcaatattcaggttaggagccatacatcacatgttacaggtacttcagccttgtcttataccacaagagaacatttgttctgaaaccgatcaacctctggaattgagcaattcatgggataagagagcaaaggtcacctatttttttcagccaaaactggcactcacatggttatgatatcactggttgctctgagcaaacctaaaaaaggtaccgaaaaattcacagacttcattgacaccagtgagctagagttgcctttatgcagtgagttctcagagtcaaagtgaaaagacgttttttaaaatatgctccccatccccttaggattccaattcttcagaggatatagaggttacagcctggatgtgtgtattctaaaaacctcccccaaaggattctgcttttccctccaagacctagaatatcacatgcccagaaacctattccaccctattacgtgatgagccccattcagaacaccatcttgcatgactagggccatatcactgtgtccatttctccagagtaatgttacattatttactatcccacctatactcacatcccattcttgtttcactgaagttttcttcttctttactttcggtgtctttcttacaccaactcggggaccacagcggttcactctgacaaatgacatctaggaataataatcacatcaaatttttaaaatacaagaaaaaacaataagcatcaccagagtgggggaagacacctgaaaaaaaaaacaaattttaaaatgccagaagaaaaa

SEQ ID NO: 40790 - DNA, 1860 bp, Homo sapiens
aatgtttgcactgagagctaaaatacgaataaaagttagaagcaggggaaagaatattccaggcaagggaaaatgcatttacgaagagtttgagaagttcagttcaattaacaaagatctgagagggtgagaggttaaaggaagaaaggcagacagcagattgtagtcttgtgagccacagcaatctgaacacctaagaccataggaaaccactgaagaattttaaaagggatagttatgactggacttagtaaatccactctgactggtgtggaaaactgatcaaagagaaacaagaactctttccaaacactgttgaatcaatcctacctaaatacatggatagagaatagatctgaaccctttacctacttcctctagattcggatggctccccactgtcaaaagcaatccaactcagcttggcattcagaccctctcccccatatggcccggctgacttttctttccagtgttctctcacatctcccgcaaatcctaaaaccaagctctcgcctcacacacagttgcaaccattcttttccctctgcttggaacactcattaggctcactctcttctctactgggttaacttccacggactcctcaaaactcacaggaggagccttctgagaagcccctctgacatccatcgatttaaatgacgctcccggtcccaaagcaccctggatagtttgcctctctcctgctacacggtgaactcccccaacgctacaatcgagcacccccaattaccagctctgtgcaaaagctcccgaaagcggtgcgcacgcgcatactcgaggtgctctggcgccacgcacaaacatacccagacacgcaccctgacacgtacttgcactctcaaaacacagagccgcggctgcgcttcctgaagtaaggattccccaaccgggcgcctggatcccaggcaacagacagatgccaccaccgttctccccacccttttggtagccctggtccctaaggctcgttgggactgcgagctgcaagcctcagatccatcatctcaacctgccttgcagtcggtcccgactgccgccgccaccgcagctaaaacttcaggcgccggaaccgcggagcgcgccacaggttaacccagccagcggcttccgggctgttgcctgggttaccagagctccgccccacgcccttgcgtatatccggcgagcccagtgcgcaggcgcctcccaaagcctatctcgggtcctgagtctaagggagagaggttcctctgcaaggttcagggcaaattattaaagaataggtatatagcaggccgggcgcggtggctgacgcctgtaatcccagcactttgggaggccgaggcaggcggatcacgaggtcaggagatcgagaccatcctggctaacacggtgaaaccccgtctctactaaaaatacaaaaaattacccgggccaggtggcgggcgcctgtagtcccagctactcgggaggctgaggcaggagaatggcgtgaacctgggaggtggaggttgcagtgagccgacatggcgccactgcagtccggcctgggcgaaagagcgagactccgtctcaaaaaaaaaaaaaaaaaaaaaagaataggcatatagcattagccggtgcctcgagaattctccaaaagaaagatgttgctctcctcaccagacttcacatatcacttaatttgctttcatctctattcatttgtttacaaatctttagtagtggaatcccagcacttttggagacagaagcagaaggattgcttaagctcaggagtttgagacaagcatgggcaagatggcgaaaccccgtctctacgaaaaattaaaaaattagctgggcgtgggaaca

SEQ ID NO: 40791 - DNA, 412 bp, Homo sapiens
ccatatctttttttttttaactgtacatatttacatacatacacatatggtgagggagagaacgtgatgacgtgagactctccatggagagtaggaggtaataaagaaataaaacaggtgtctgaggagaggttctattagagaggggagaatagagagtaattatcgttcagacaggcaagagttctctgcaggtagcagcctgggaaagcgaactcgcgcaccctcttgggggacgggctcttttgctttctatttcttctcctgcagccagggtgcacacgtatttgaaacagaccgaatttcctcctcgatgtggcgtcaggttgacttttcgagactagcgggtatttctttttaatgactccaatgcctttttattattgctgttattgaggttgagggagaagag

SEQ ID NO: 40792 - DNA, 679 bp, Homo sapiens
tctatttttttgccccaaccctttctcagaagccatgagtatttatatcaaccctggattatagttccatcctttaatcctaactttgatttttcccaattaaaagtccatggtgcctgtaggcaggttcaattgacaattaacaaccctactagactcccgggctccagacctactagatgcccgggctccacgcaaagcgggctcaggcaggccatatgacttcaagagtggagcagggctatcctctagtggccagtttgggaagcttggccaatctgtataaacagtccttacgtcttttacttttgatcgtcaccttcatgagagagacagagacagcaaaagtggaactaaagattccacgtggggcagtagtagtcaaatgaactagaaatggaggaggagggtacatttcttatatagcaatactctatccaacaggactttattcctttgactcttgacctaaatgtcccctaagtaatgacttcccaggccaccctatcaaaattttttacctccccacacctgatacttcctgtatttcctcccttatttaacttctatccttagcacttattactatctaacatgctatattttactcatgtatttgtttcacgtctaaagccctctttagaatgtaagctacatggagaatagggatttttgtctc

SEQ ID NO: 40793 - DNA, 1479 bp, Homo sapiens
aaacaggcccagagcagttatgtaatttgcctaaattcagccaggtagatactatgattatcctcattttaacatagggaaactgggactgggagaggctaagtaactgaccaaagggtactgagtgagtaaatgaagctgagactcaaacctaggagggcctgagtccaaggccattgctttggctactagatacatgcacagtgagcatatggaagaagccactgagagaaaaaaagaggatagagcagatgcacagaaaaagaaccagagaaataacgatcatgacagaaataacaaacacagatttaggctgccttagatcccacccctaacccctggcctgtctggtcagctttttctgagtcccacgcaacttctatttttcaacaatttccctttttcctaaggtaacttgattgtctcagcctctggctttgaaatcaaaagagctttcattagaaaagtctactcatcattctgtcttacatcccttctgtggagtacctcaaatggttactaaacatggatcatttatctatctgacggcatcacaaaaagacctgggccataaacaccagctaaactaggtgagggggggaagctgctaatatttaactaaaagtaaacaaggagaattctgaatgctgacctcctaggtaggctttccaatatctttcccatccattacaataaacacagcccagcactgaccttacctcaggcaattctgcccttttttctctctttttaaggtggcctactgagttgtcacagaaaattctctccttgcacttgtcaggggtataaataaaagacaatttcaaactggcctaccctgagctttacgcttgcctggaatatttttttcccgctgctataagaaaactttctctccaatgctaatggaaaaagagaactcatttgatggcattaaaaagtcacctttatctaagaatcaagtatcattaaatgatcaggcagtttgatgcacacattacaagaagtataaacaaaatgaatgttttggccttttttgctaatgcatagttaaatcgtggcacaggcatatcctaatctttttaataaatttcactgagcagaactccccccttacatcttcttatgggattgccctaactgcaatgtccaattggaataaaggagatttagcattactagtatcatgagttaggcaaacatgaaatacacagaagagttcaaagtcaaaactatgtatgcctacaagataagaggtgctcacagaggagaaagagttagactaaaatgaatttattggtaacattattcttccagacccactgaatgcagggtcttaataatgttttggggccaaaaagctttctatgtcataatataaatttcactgtgacacaaacacctaaacattttaaaatacaacaaaaagtaagaacttttaaatctttaccttgttcattgtttcctccattaagcagg

SEQ ID NO: 40794 - DNA, 585 bp, Homo sapiens
ctttggccaccccagctagtatttcactaggtcgtgtgcaccccaagtccagtggctccaagcccagtgcagcactaggacttgcacaggaattgcaggccttgtggcctttcaagttcatttagaactccagagcactttagccctcagtggtggggctagctggaactcatgttccaactgataggatggaagattcccctctggcaagggctggtctaaatgctccctctgtgggcatcagctgaattctgccctgtgttgctttccactgtgacagagcaacactgaattccaatgcaaagttgcacaatcactttgctctccctcccccaagcacagcgattctctctgcatggctggggaaggggggaagggtggtgtaggcaattcaaggctgtctttcctaccatcttcagtgtctccttccttgatatgatgctaaaactaggtactgtgatcactcacctgattttgttttctttgtacagacagggtctcactatgttgagcaaactggtctcaaactcctggcctcaagcaatcctccacctccacctcccaacatgccagtattacaggtgg

SEQ ID NO: 40795 - DNA, 2490 bp, Homo sapiens
aagagcaaacctgggaatatgtttcaggatccatgtaactcaccgtaagatttattcaagaaatctgtacgttgtttataggtaaggaaatgtcttctttgcctacacagttggccacgactgtcttgatctgtgtggtgttaggttactgtatctacttgatggtaaaaatgttacaagaacggaagttgaaattctgcactttggtttatgcagtctcatatttccagataaagttaataaacgcaaaggaccatatcccaatgtaacgaggagggttgggaggacaagcttcaagaacgagtggggtgaattcaactatcaaaattgtaaacatgaacaagagtccaggaatcttatatttcatccggatacatgaaagtagatttcaagagttggtcattcacttgcactgcttctactcagaaagcaaaagaacggcttctaaaaagaaaacacaagcctaacacttcgacagaggggtgagagggaaaaagcaagccacatgagtctgacgaacgggtacgaaagaaattcagagggcaaggaaagaaggggaatgaagaagacaggaaaaggtgaaggaggcgggcaaaggccatctggtgtgaacctggctgcccagctctttatgcacccagggcagcgtggggcccctctcgccccgcgcgcatctaggagctggggcgcagtgcgagccccccacgggcctggcagccggggacgcagggcgggcgggagatgaggggtgcgctcgccgcgggcgctgacgccccaccaggtgccgcacgcaagggtccccaggaaggaggcgcacttagcgcagccctggcctcccggagcaggaagggggtgggtggagctgagcccggggccgccctccggagccgcccccgcagccctggcccccgccccccgccccggctgtcagcggccccctcccgcagtcacttacccgccggctgcgcggtctcggccgcggtggcggcggcgacggcggcgacccccgcctgggtcatgatcccaggaggggaaggcaggagtgtctgaccgtctgggcgaatctctccgtccgcggccaccgcctgctcctccggggctgggggagcgcgggcccaggccctcctctccccccgcccccgccgcctctttttgcggccaccgcagccgctgcgagcccgagccctcaaggccggagacccggcggcagcgcggcctcaactttcccagcccccctccccccgcccctccccgcccctcccgcggccgcagctcagcaagcgaacagcctaccctgggcgcgccgcgttcccgcctctttcactcaacccgccaatcaggctgcgggaacgctgccgtggtagccaataagaagacagaatgccgttgcactacgctagagggcgggaggaggcggagaggaaaccaaggagtgaacggggatcgggcggcccaatgaggagggccggggggcggaggtgtgcaagttgggttgaagaaacaggaaatattcttaaaggtagagtgacggacaggaaggaaagccagtaggtgaatgggaaagaggtgggcctggttccttaaaggggacgccttgagaacctagaaaagaaggtgttttaagaaacttctttgtatcttcttctgtggtctcttttcttcgtctttcggtaggagtttggaagtggaaaaattgaaaaggaagagggcacggaagtctttcggaatagttagcccctcttaacgtggagggcaggaaggtgagaagatacgtcttagtaaatgtggagaagaaagaatcagacgtttccgacttctcgataactggaagattgttgctgacttgacgctgctcgcattcgtaggctgtggtctcttgtcatcctttatttgcaacaacacacagatttctgtgaattggagatggccatgttcagaaatgccctgggggcctcccagctgggacaagggagtttggcattgggggatggggtttgagatctcaagcctgggttactaaatacctggatctaggagaggtagggccaggggtcacgaaatggagacctgagtgccccttaactccaggatctgtgtggagcccttggaaccgtgatcacaactccctcttcctagtttcgcttcatattttataacctcctgctgaaacaggtgtcctccacctagttgcggttatagatttccaagcccttccacaaccagatttggaaatatcccagatcttagatgtccgtgggctaacttccagaaggtgcacacagggcatggcataatgggaattacttgagcctgtatacagaagcagcagacatcgcattgagcaaaagggtaaaggctaacagtaacggagtcttatgtttgtacagcagattgaaaagctatgatgaaacggaaggcctgtaatgttgcttataaactgtggtactaataaacaggctagaaattttctttaactcatccatctaggca

SEQ ID NO: 40796 - DNA, 545 bp, Homo sapiens
ttcttgagacttttcaatggtgctgaaagactatttgcatgatatataagtacttccttgcatccccagtttcatatcaagacctccgttttttcctactactggagatgagtgactgcgggaggaggctactgaaagcctggggcggcggccagagctgcggggaggccccggcctcagctccacccacccccatcctgctccaggaggcaagaacgcgcaaagtgagcctccttcctagggactactgtgtgcggtacctggggggtgccagcgcccgcggggtgcgcacccctcttttccccgcctgccccgcgtccccggctgccaggcccgtagatgcgcgcggggcgacagggctcccatgctgccctgagtgcataaagagctgggcagccaagtttacaccaggtgacctttgcccgcctccttcaccttttcctgtcttcttcaccccgtcttcttttcttgccctctgattctctttcggaaccactcgactcctgtagcttgctgggtttttttagtttttcttgtgtgtttgt

SEQ ID NO: 40797 - DNA, 3173 bp, Homo sapiens
tttatgagcttcatctctttgagggtaaagacaagctccaaaacggcttgagacaatgcttcggaaaaatgttacgtaattaatacattaaaactatacaacttaatggtaaggagacatttcataaaaacttaaccagtcgatccaaaataattcctaattttacgtaagaggcaaacggtgaaagaccgaacattaactttgccaatcacctgaaaggagcagcgtggtagaactacccaggaccgcctcagcactcaggggcaatagtgaactactgaagcaacagctccacctactgatccaccctatacttccttaaatatgttggcaccccaagtctacagtgatcgcgctctctccccctcctccactcgctgtgacccaacccaaatctagttgagtcactagctcttaatactcatccccgtgctctttattccaatttcttcttcctccagaaggttctgcacagctcccaagcgtgaattaaactgaaaggtgtcaaacaccgcagttccagagttgagtctggaggtggaagacaaccaaaccactccacctggagctgcgggccggcgtggctcagcggtccgctcccgggaaggaggccccgggcgcttcacaatagcctttccatgttgccccactcggtcgcttctccccactcaacaacccacactcgtctccgaaccgaaaccctgaagccccccgggtcttgcctccgctggcccttcagcccgccaacagcccgagcctcgcctccgccccctccgggagccgagggaactgagaagcagagaaatctccctccgcccgtcttcgccctgaatctctcctcgcctttgcggctctccccctctacatgggcccggacccttctaccccaccggccgggccctgcccggctgcccttcctcaccctttcatcttccccgcctgctgaggccgtcgttaccaccgatatcaacgccgtcgtagtcgccgcccttaggtctccgcacccttagctcgggccactcaaccccgcaagccggcctcctagcctgggcagggagctgtgcgagcaacgaaggccgcgagagtcgagtgagggcttgagtctggtgggggcgggagtgtctcccgccgccgcgcttgtgccgccgcttctccacacgtgcactcgggtctctcggctccctcccgccgctgccgccagccagacccgctgccgcgctgtgacctttcaccccgcccctcgcgcgccggcgcgccgccgcctcacgcgcagccgcactgctcgcctccgcgcaccctgccccctccactccggaacctccatctttctcctggactgggccttctggggtcatgctcctccctcccacccgcttacgacactgcttgtggggctggctcggtaggccctggcggtaaaatccagatttttccacccctccctctcttgtcccatatccgcaagatagtttttctcagccccgttcttcccagtttgtggtctccagagtgaccttcaaacgctgttgcctcctagtagggttttataaagttagttcttctaaatgtaaagaaatctgtggaaagctcaagtttaagttaggtgttttaaaacaaacgtagttaacaatcggccagatagattggctaccctccagcacgcctcaagttttaagatcacgtgattggcccaaacctcagagcctggaattttaccggcggactccagagggacggaacgccaccgccatttcctgtccctcgattgtggcgtgaacgtcacttccttagcaatgcgctttaactcttgctgtccacattttccacattgtactttataacatactctttgtgaaaatttatcttttatttctttaatccaagaaaattaatattcaagggatccgtaaaaattcaggccccccgagatgtagagcgctgggatggaggaggcagggcggagctcgacgtcatgtgactggttgggcccgcccccccccccccccccaacctgtgcagctgaggacttcccctccgtggtgacagcctctgggtcctcggtcggtacagtctctgcacctcgcgccccagcaggtgagcggcgaccggtaactggcgagtggtggggatagagggggtggaaggaggcagaggaaggagagaagggagagtgtgaacggcgacttttctgcctgaggcttcctccccgctgtcaccctgcaccggcaaggagctcatttctccttaacccccgctcccccaagtgtggtcgttcccgctacttggggattcagatgtccacctttcccagggttggaagtgagtgcggccattatggttccctactcagagcctttggggcttcgggtagcagattgtttcagccatttcacagggtctgcagtagacattaggtcccattccttaaagcccattctttggcaaaggtcctcactgtccttaccctcagctcagggctgaggagcggggaggtagcaaaaaccctggaggcagaggcgtctccggtgagacaggcttgggagggactgtcactgatacggccctcactgcagagtcactgtgaagcttccctccgaatgtgctttctcagtgattctaaggattttatctgacatacctgcagggaaggttccgtagatgttcacgtgcttcggatgggactagaaaagtaaaagaagggcttttactttttcttctctgcagagaggacagttgaaggaatactgtcttcaaaacaggaggtgttagtaatgcgacagtctcgattgaatgaggaggcgttgaaagatggtattgtggtgttgtggtgtgcaggaggcccaggctggtttagggaagagtgagtagggttccctgaaaccgaaataagaaactgattgggttggaaatagttaaaccaaattgatttggccatatgcttaaaggtagaatcaagtcgagatgttgctgtctgcacatgttttctgccgtcaatccttccctttttgtcattttcccctaaaatactactgaattggcactcccaatctattccttgatcggctttgtggtaaatttaggttaagtagcatttgtatccctctttagctttccccatttgtaaaactcccggtgccctcttcagattttgatgaatagtattttgtgaaaat

SEQ ID NO: 40798 - DNA, 467 bp, Homo sapiens
aaataactttattcttaagattttaggttttgtccaagtactaatacccttattaggggactgatattcctcagcagcatatgtgaagcaatgtattaatgagggagttttgcttctgtttttagccctgtggttcccaaactttgcagagtcattctgagaagctgcagcaaactcatgtggtgccaggatatttaaaatttttgaggcaaacacaggaatgttagacatattgtcagacaccacatgaactagtagcttgagataataaacagtttcattatgttgctgtactatatttttgtcaatgatgtcatatctttgcaaagctgagtttttggcagttgctaagctacaaaagcaggtatcatgtgacaatcaaaatggaacaagtttccaatctgattgcaagattggaaaattatatagttccccaagggcatatacattcatgagaattatggata

SEQ ID NO: 40799 - DNA, 840 bp, Homo sapiens
tcgtgccattgcactctagcctggtgacaaaagtgaaactccgtctcaaaaaaaaaaaaaaaaagacactgatatttccttttccatgaactttctgacatatactttaacaattttaacttgactatggtttttccatatgtttttctgggagctgtttacatattagtgtgatctcactttaaatacatgaccattaatctcctaattaagcattcccctgattgtggtaagcagggatttctgggagctgtttacatattagtgtgatctcactttaaatacatgaccattaatctcaatgaggcatttgtgttgcccagcaatgctactgttttactgttttcctaaaacattagtcagttcattcacctgtgctcctaagtatttcataatttctcctttctcttcaaacttctaacaacttttcttccatattcactttcaccttatgttctatttcactgcaaaatatatcaatgctcttcagccaaagtccaggagaaccatagctgtagttagacaacattgtgtttattgactcattgcaatgagggtgaaaaaataccatggagaaccatgaggacatctcagtgaaagggtgttagaaaggtcttactacaggatttgggtttgtgttcagtgattttgcgaggaggattcaagaagtggagctttgtcccagattacatattgtcaataagatgtggttattctgattgggtatcttaatacatcttatctagaaggtaggtggaataaagtgaagctaaagctgttattgggaaaaaggcagcagtcagtcatattagtcagcatagggacatagtcatttctgtg

SEQ ID NO: 40800 - DNA, 1244 bp, Homo sapiens
cggggccttggcactccatccagcctgaggaatgagagcgaaactccgtctcaaaaaaaaaaaaaaaaagtttccgagcaattcaccttttcgcacattggggcagggtatgccatttcctgggaggcacagtagtttgaggttgggaatagggaagtctcattgtgacccctagaaagacaagccttcaggctaacccggtaacacccatcgtcaggaatccttcacggccgccagagggcgcaaggagctgcggctggaagtactcggagggccggcggaggaggcgcgcggagcctgtaactcgcagcgcgcgctggaggtgggcgcggggcggtgcggtgcggtgcgcgcggggcggtgccgcggcggcggagggagccgcgatggagggcgctccgactgtccgtcaggtaagccgcgggcctcgctggggcaggttcccatctgtggctttagcctactttttctcacggtgattgcttgaaccttctcagattacagttaatccctcccttcccttttcttcgtgctctttggagtaatacggaaagttgttaccgaggaaacggtttcctgtgcctctgcgagccctttccctacgggcggtggtggggacatttgcttccctgtgggcgttgagggcttgaatttggtcccgaaatgtcctggtgcggatgtctcagccccaggcccccttgggtcaggccccatggtcgtgattctgacccactgtcaacgttttttccagccttgcccccttcctttcattctcagccctgttgtaaaggtccggatagtttaaatcactgtgctgtcagccaagtttttgatttcaactagtctagttttatttgtttactaccttatttgacaaaacggaaagcgtgcttattaatattcaggatgaaaccccgcttttgttggacgggcgcctgcgtttctgaacaccatcctccttctacattggtttgtgtgtatgtattttacttttagagaactgcggtcagtgctatatcttctgaagagcgttatagtttacagattagtggaggtacacaaataattgttgaatgaacagatgaatgagtgttatttcacttgatttgaaaaacattactatgaaatagtcaagctggatattcatgaacccaatcagtcactgattcagttatgtccctggcactgggtgttcgggattagatggtgattaacacagacatgatccctgctctcaataagct

SEQ ID NO: 40801 - DNA, 1291 bp, Homo sapiens
ttttttactgatatctcttattctctttcatcattcaagtttgttcaaaacattacaagagacatgaaaggaaaaataattgcatttttaaaactcagtctgtccaaaatataacatatgaaaccatgctattatatcttaggaaataacaacattcaaagttaatttgatatcaaagttcaagatgaagactaacctcaaagtatggcatgtgcaatgaaacctggaccttttaatgtggaggccaaaggtctgtgcagctaaattggctctaaatagtactgtagttggtagaaatggtgttttaaaagtctggaaaataaataattcattttttctctgccatttaaaatccatcaacatctaccacaactctagcatgttgctgttgttttcttcattctcccccaaataaagtaggtattgaagaaaaacaaatatgatggggaattcactgaggggtctaaaattaacacaaggaagacaagccaggcattgtagcacatgcctgtagtcccaggggctcaggaggcctgagaaaggggatcactcgagcccaggagtttgaatccagcctaggcaatatagtgagatcccatctctaaaacaaacaaatgaaaataaaacaaaacacaaggaagacaagtagcataacaggaatgtattcataaggcacatgacctggtatgtaagcaaataattagggatgtcagagccatttcactggaatacccaaggaacctagagttgtgctttttcactttagagaggtttctagcaaaagaatggataactttaaaaagtattggtatttacagagttaagctacagggatctgggaagttcactaatgtagaataattcatatgttctagcctggctaaatcagttgttccacagtagtgaatttagagggcagcatgatataattgaacacattggagactgcgaacaaaatatctggaatagagtctctgctctgcatctggtgatttcagggtgtggtcatcttgagtatgttgcataacctgtctcacctcagttacctcacctataaaattagagattgggtcatggtattacaacactggtctgtcttgaatcagtagtaacctcatgctgtttaacagattggctaataagtgcctttctgacagtaagactaatttaaataataagaattaactctctatggctgttgatagtgagcaatggcttaagattttcagattttttatttcaattctatagtttaaagataggaatcttagttgttgtatttgtttttttt

SEQ ID NO: 40802 - DNA, 1664 bp, Homo sapiens
caacccagaactatttaatcataaaccttggggcagaggcctagcactatgtgttttttattttatttttttttttggagacagactctcactctgttgcccaggctggagtgcaatggcatgatctcagctcactgtaacctttgcctcccgcgttcaagggattctcatgcctcggcctcccgagtagctggaattacaggtgcccgccaccatacctggctaatttttgtatttttagtagagatgaggtttcaccgtgttggccaggctggtctcaaactcctgacctcaggtgatctgcccgccttggcctcccaaagtactgggattgcaggtgtgagccaccacactcggccgcaatatgtgttttagtaagtcagccaggtatttctgatctgaagtttgagaagcattgaattgataaaatggtttggtggtttggaaaaaaatttcaggatatttcaaggtgacctttagcccaatctctgttttagtgatgaatactagttaatgggtaacctaacctgcttaattatttacaagaaaattctgtttggtggcacctcacttttgttttgctgatggaagcattgtgaaagactgaattactttgctcaatttttagtatttgcttagacatttaacatgactaagtggaaacattttgagatttattcaacatctacctaaaattgctaattagtttatagagttttaaaatttagcagttaagctaaatctcctcatagcagccctttgtatcttatattactaataatttagcagtacagtttacattctccacagagccagatcttaaccttaaaggtatggtattaacttgtttggcaggcagacttgattttgctggactttagtggtgaggtggagagaatcaactttttttttttttggagacagagtctcgctccctggagtggagtggcacgatcttggctcagtgcaaccatcaccttccaggttcaagagattctcccacctcagcctcctgagtagctgggattacaggtgcccactaccattgctaatttttgtatttttagtagaaacagggtttccccatgttggccaggttggtcttgaacttcagaactcaagtgatccgctggcctcggcctcccaaagtgttgagattacaggcatgagccactgtgcccagcccagctgagagaaacaactttgaaactgacttaaaatgtatacaattttctgagtcatctttgacccctctttacttttgtctaacatctaatcaatcaccaattcaccatcagtactacctcctaaatatgtcttaatctaactactctgtctcttactatggtcaccttctggtctgagtcaccatcaacttttctctggacttccaactgatttatcataattcattctcacaatgtgaataaagtaatctttaaatatatacatctgttcctgttccttccacttaaaggtcatcggtggcatctcatgacaaccacagtctaccatggcttgtgagactttacatgatgtagcttctccagcttctccagcccaaagatctaatagttcctcaaatgtgctgtgtttctttttaccaaaaggcctttgcatgtgctgttcccttatgatccttctgaccctttattgatcttttc

SEQ ID NO: 40803 - DNA, 821 bp, Homo sapiens
cttaatataccctctcattcttgtcatcttaaatgttctgcttttttttttttattaagtcttcaaatattctttctgccaggaagttgtgaccctcttattcccactctagttctcattaataaacctgaagtcaggttctttcttttagttttctataacattttgtatttctataatatgcattacagttacaattctatggtctatttctgttctccttgcttaactataaatcccttgaagacaaggaccatgtctgtcttgttcactgttgtatgtccactgacaagttcagtctttaccacatagctggtttggtatacagtttggtttaccaagtacggtctgaaactgtctgggtttaggcctttgtcaaagtaaatattgcgcttcccttactctcaaaagtgtgccagtttggacaataaattatacattacgtgtaacagatgatcaataaatactttttgaatgactcaatttagtagaacttcaatgatttggagtccaaataattactactgttaacaagatattataaattctcttagttcaaggaaaaggcaaaggatgggggaaaacacagacatttctgaaatatttcagaaacagcattcagggcacaccctaagttcaatgtatatttaattcaatttctttaaccttcaatatgtacggtgagaacaaatgattatcttgaaacactaaagcatcctcagttgccaaagaaatgttattttctatatacttgaattactaagaaaatagggttcgtatgtaaggttatcagtagtaacaagggttaaaatttaaaagat

SEQ ID NO: 40804 - DNA, 1518 bp, Homo sapiens
acgaacaggttgctaaatgaacagatccggcagcagtgatgggcctttaagagaaggtcagcgaaactgggggaggtacttggataacattttgcggtggaaagctccctcaccgcctgttgccggagtctgaatgaaggctggcggctccacggtctcacgtagttcggaaatcctccgggttcccgggtttcccgtatttccgtctccgcacctcgtccgcaccccggggctccggaggctgtcccaccggcgcgccgcccgcaggcaccggcggcgcccggctgccgcctctggggcggggcggggcgtggcgtggcggggcaggccggaggtgcgggacccacctcctgcccctgcctcctggacgcgctctcgggagccgattttccccttcccggcgccagggccgcgggccaggaggaggagcctcgcccgcgggcaccgcggggaggcgggcggcgcacgtgcggacaggcggggaaccccggcgccgggggcggggcacccggaagcgcgcgtggacctggcgcaccgagccgggcgggcggaggggcggttgggacggcgcggggaggcgggcgcgccgcccgggccgcggcgggctgtggtcacaggtgggcggctgcggcgagggagcggccgagcggagcccgggtcccggagactcctgccgtcacgcccggggctccgcgtagcagagatcgggagacgcgtctgtgcctccggggaagccgacccatctcccctccgcctctttggctgcagttgcacctccggccagagggcaggtaacttcccttccaaggtcattctcctggcggggtggtgcgcgaggcccgcccacgtcctccggattggcgggggcgggagaggcgcaccctgcaaggggcccgaccagttgggctggaccgcgacccctgagcactgccagggagcctggtgtgtcagccgctgctagcgggcatatgcttcgcctttccctatagccccgaggctgagttcccaccagcgcccaggcttggagcggagaccgctcggccctcccagcctgcacccgcaggtgagcgcaaccgcccgcgccccggctgtcccggacgcgtggtcggctgtcgccataggaacggctggtgcccagacggcgcctgcccaggctgggaaggggcggtgaaggcagctcagacctccaagaaccctggagccccctgtgtggccaggcggagccacagaagcctgatgaaaacgggaccccctccccctctctcttctcatttttgattgctcaggcgttggaggttaagcagagagagagaggcgtggacctatttacgagatgtaagttgtgttctttccacctttaccttctgagggcttcttacgcctcatggtgacaggtgcaaatcatgacacagaagggcagtatgaagcctgtgaagaaaaagaaaaccgaagaacctgaattggagcccctgtgctgctgcgagtacatagatcggaatggggaaaagaaccacgtgg

SEQ ID NO: 40805 - DNA, 452 bp, Homo sapiens
agaagtatggcactagcatctgtttctaatgaggacttcaggctgcttccagtcatgatggaaggggagctatcatgtgcagagatccaatggcaagagaggaaagcaaagaaaaagggggagggaggtgccaggttctttttaacaaccagctcttccgtaactaatagagtgagaatgcactcatttacagaggatggcattaagccattcattaagcaatccatctccatgacccaaatacctcccattagactccacttccgtccaacattgaggatcagatttcaacatgaggtgcaggggacaaacatccaaactatacagacagtttgcaaatactctctctctctttctgtgggttatctcttcacttgattgtttcctttgctgtgcagaaactttttagcttgatgtaatcccagttgtctatttttgctttggttgtctgt

SEQ ID NO: 40806 - DNA, 2077 bp, Homo sapiens
tggggttattatttttttcttatcttcaggtgctaatgcatccaaatgggtgatagatacggagagaatctattttttgaaagttggttgaatttagaaattactatgtgaatcaagtattaatgtattcaatatccatttgcactcctgagtttatttagatactttacgtaaaagtgaaggggcaggaatataggcagggtatttaatgtgaagctctctcccgttaataaagatcaattaccccaagatttgcaaaaaaaaaaaaagagagagaaaaagaaagaaatgtgcgagaagtttcctaaaatttaaggtagggggaacggagtttgcaaactcctttcaccccgatgggcattagcagacacctccggttttagaaaagcgttacaaacagttcttccacgatgctgcccaccaaagccgtaatgtgcccagaccccagagctcctagagcatttcactcagggtaatgctggctttggggcggtcaaggcaggggcgtgtcagctcaggatgaagaggcaggaagcacagacgggccgcgactggcttcctgactgcgccgcgccttgggaaagtccccgccctccaaagctctcgattgggatcaccttgggactcggcttccttgtgaaccgtttccagcgattcagccccatccttttctttgagaaggaccttccctgaggcgccaggagcattttccaagttcgagcccgaacctcggccaaagctgcagcaaccgcccttctgcccgggctgcctccgggtcacgctgggaattgtagttcctccgcccgcaaggaaagcaggcataggacaccgtcgaaccaccactcccacgaggctctgcgcaggccgctcgcgttggctcagttaccatagcaacggcagaggtccctcgctcttgccgtcatcaaggctcgcttgaatgtcggctttgctttttttctggcgcccagtgatgacgcagtactccctgattggctctgcactggaggcagtgattttggggcagagaattttgcaacacgtggtagtgaactgtgaggagtttgaggggtctgaagactgaaagagtcgaatggtttgttggcaggtaagtgcccctttgccctgctggtgtgggagctgctagagatggatgagtcacgtcgcgtccagacgcttcctggttgtgttgcagtaacggtgattgtactcccgccatgtctcctctgcttcccttttcagggtgtcctggtggattggtttctgtaagttcagattctcataaatcgtgtgagcgtcgccgacacctctgagataaaagggcccctttcgactagcctctgctgaaaggtagagttttcaggaagtttttattccgaactgcccatgggagggtgggaccgtcttcaatctctgagccaggtgcctagggaggtctggggccatggagatggcccatggagcaaagataaatccaggcttattggcttagccgaggtgtttccagagacagcccatttaggggtgataaatgggcttataaagcagagtaaagatttagaacaggagttttgaattcaactactttgtggctatatgaccctaggcaacttgtttaataactcagagaccctgttttctcatgcaaaatggggacgataatacctgaatcactggagtgttgtaatgattaaaaataaatgtatgtgaagcattctgccaggaaatgtaaactaaagttgatttgaaattggtgaaaatgaagttagggaagctatgccctcggactgttgcagcgatcctaggaccagctctgtaactggtctgtctgaaaggcggttgaataaattgtgctcatacaaactatgcagtaccacgaagtagtttttttcaaaagggtaagttagctttatgtctcttcttcaggaaagacgtctaatgtttattcttgagagaaaagcaaattgcagagaagtgcatatattatagtataatatgtttccatttttgtaaaagcaaaccctgaccaaaacactccctcccatatgcaagtatgtttaaatatttgtatgagaatgga

SEQ ID NO: 40807 - DNA, 962 bp, Homo sapiens
gacaggttttgagaaagtctgcattagggaaaacttctgtgacaaagatttttgttcacttggataagaagtaagagacaagactacaatttaacactgttacagtaatttttttcttgctcttttttaaacatgattaaactgttagaataaatgaggcccccgcttgtcataagccgactgcgacagggaggctgtaccggaattggccatcggagggcactataatgcagcaagaactctgccagcacggctggggtgagaagttcactgctcacctgggggctctccaggctctgtggggaggcagagagggaaagcccggcgccctgcttcctggaaccctgcagggaccctgcattcccacccaggccgaccgcttagcctctgacttcctctcggagcgattgcacgtgaccgactgcaggcgagggccgcgccaaagcacccggagggctgggctgggcttggccgggagagagaggcttggcccagggccacctctgaacatctggccgctgcgctcgcggcggtattcccaggtccggacctgccagcctcgcactgtgcgcgccgcccctgcagaccctgagccagggaccctccccttgtgtctgagctcttagctccctgggccgtttctggtgtggatgactccgctgaccccagcactggcagtgtgcttggtgattaagtccgcgggcatgagaaacggactgatcagctctgaatcccggctctgccactgaactgtgtagccatgggccagtggtttgttttttctaagatccaattttctcatctgtacaatggggataataatttctgcccgaaaaggctgtaatgaatattgaatgatattttctctgtaaaccttttttttttttaagtcacagtgcccagtgattaatactaaacattcaaaagacggtattattattgttattgttgtcataattatt

SEQ ID NO: 40808 - DNA, 512 bp, Homo sapiens
ccagcatgaaaagcagagggtatttgtgatacactttgttttgtaggtctgctgaatgaaaaaaataatcgggtaaaaaattagtacctatattttcacaaatgggcataatgcttacaaatgcactacatcattattttagcttcattctccccacaacattcatttattcattcaacaaacatttgctgagcacctactcctaatttgtgtaagcactttgctgggtgctagggattcagcagtggacaaggtaaacaagattccgccctcctgaattctgtcacctggccaaaataaacatttaacaagtacgctgctagaattttacttgagaaaaaggaataattcatcttacctagtatttcttctgaatctttcttaaacatatttcttgaaggtccagactcctttaactaagaagttctatcttaaatctctctctttccattgttatattcattcctttcttggttacaatgtggagagttcagattgcaactgctatcatt

SEQ ID NO: 40809 - DNA, 959 bp, Homo sapiens
aagttgtagaacattgtgttattagtattcggggtattaaaaggcgaagtctgcaggatgatctcatgaggcttgctgtcatccacaagaggtcagggcaacttcagtacaagcaagtataatgcagtacattcaggggaaaatgaaacaaggtatattttcaggaagatgtccagaaatgacctggctatctttgtggcggtgacatggaaaggacatagacttagtatcataaggccagtccctgctctacaacttactaacaccatttgcacaagtaattcaatcagttttcctcatccataaaatgggaacatgaacagttaccatagagttgtgaggatcaactgagacaatctatgtgaaagtgttctataaagcactgtacaaatgtaagacatttattttctgaagacagtggtgccaagtgtgagccaagcagtgtgccaaatatcctcagaaataggattggaaacaaagcagggaatgctctgacaaagctgaagaggacaaggatctcccatctcagtgtgactgggtgtatcgctcactcaaacctgaagggatttctcaccgggatgctgaccttgggttcatagactaactccacagtaggttgccacccactcataatgagtcatttaaagttcaaatcttacttcatgctagcgatgctagcacagaggcaagcagttttaggctttttttggtcacagatttctgctgccattgtcaaaacagtagccccaacctctaactgcaacctagggcagccagcccaacctagacttgattctggtcacttttagtggaacaaattggctcagaaaacatcgccttctacttcttctttaggatatccaaaatgagcaaaaacttcagtctctagcttttccttaagacaagtttctccctttgctacaaacggaatcacatctttttgttatgattcttcctct

SEQ ID NO: 40810 - DNA, 949 bp, Homo sapiens
agggaagtagtagaagtttcattactcagggcattttaaagtagaatagacaaaacactagtggggtatgttgaaataaaatatgcgtagtccgtctgtgaattagtgtttactttcaatataattataagtgaagcaacactgtaatgggaatttttcatacacaggaaagctatggctactatgtttccacatcgaccatatgttgcacatattggttgctgtggatgtgtatccctactgccctctagtggatgaaatgtaagacctacctgattaaccagatctaacaagctactggtttgggggtatatcaatctttaatcatttagggtagaaagaaaatagctgtgttgatgcattttccatcaaattataaaattgaagggcattaaaaacaacagaatcaaactctgtaattaagactgccatttaatgtttgttcgcacacggtattcatttctgtgtatccctgccaaagatccattgtgtaatgttgtcctcacatgacattaaaaacaccagttccctggaaaatacaaaaaagaaaccgtgctgccttgaaatacacggagttcactttcagaaacataaaattaatacagacacagtaacataatttggaacacaaataatggctacaagaaacttgaaaaccaggactgctccttaactctgagcaagcgtattagcagtctatgggtgtgctggctggtagtcagaagagggcaagcaaaatgggtttcagaacagggaagctgatttgagaaaggactgactaaacacatagtaatagggcaggaaaataactctaaacacacatttggtactgtgggtatatatttaatgctgtcacattgaggctgcttttcaagtgtagcacccagatgctgtactcccaatgaagaaagatagggacctgtacagttctttggcattttgtcattaa

SEQ ID NO: 40811 - DNA, 1072 bp, Homo sapiens
acaccccgttactttgttctcataacatctaaggtaggcatcattattattatcatctagttttacagatgagacaagcaaggcacacaactaataagtggcacagtccaagttcctatctgtgatcctgtctttttcatggaccttttcctatctgttgcctccatgagaacatatctgaactttggcctattcttttttaagactttgctccctcttaggagataacaagtagcagaactcacatgttacccagccaatagtgtacttagcttgggaacaaaagactaaatttgtggaaattcctcacatttgtacaagagaacgtcccaaagcaagatactatggcctggaaaatggaagagatagtttgggcaggtggatgttttgggtctcccaaatcacaacacatgtgcaatgcgcaaccatcaatacataaatccaatttaattcagtatatatttaataagcacctgctgtgagcaagggactctgctaggacctaagctctagaaagtagctacaaagattagaagcaataatcctaatatttagaacatgggagaaaagaaataccacataactaaaacacgatgcaaataagttaataccgtaaagcgttgctaaaaaaaatctgtaggtttcagtgacttgaggaatatcatttgctattcagcggtggacactgacaaagttacctgaagcaggcagtgtttgagatggactttggaatgtgggaaaattccaacaattagaaattggagagataggttttaggcaagggaaacagaaagagtcaaagcaagggataggaaagcacaaactgtgtctggggtcaatttgactagcttctagactactcaaaggatagcagtaggagtttgagatgttgtgggtgaaacatgtggaaatgtccattgagcagcaggaaacccacatgtgcagtaccagagtctacaggccaggactagatacttagatctctagggaagtgctccaaacatctagttgaagctatgtggatttcatgaaactgtccacagatttcaagaatgcagtgaggagagaaaga

SEQ ID NO: 40812 - DNA, 1914 bp, Homo sapiens
agtacaggtggggacattatttatgcaggtatatgcaaatcactttataaaataggcaaagcccttctgctttttataagttgccaaggtggttcctgatattttaaaagctatgcacctttaatgtaatttcctaagagttggaatccctctgtcgaaatcatagtcattgtcagagcaagttgatttttttttttcctatcctctgggacatttacaaggatcttataaccatcacaaaaagagtggtttccacagagatgtgactggaaaaatcccttggaaattgctgaggagcaagtcacagtgttcaaagcaaagaacataggctttgaaaacatgaacccatctgacctcttgaatttagtacagtgaattcctgagctctgaaacatggggcccggctgtgcatgccatattggtgctataagactggcagtaggttggctgtggcatggtctatttcaaactccttcacagtgcccagtgttgcatgttcccagatgacatttggttggcagaagctgggcttccaaagctggcagcctggaatgcagcccactgtgttttgacaaacacataattgaccatctgatcaccagcctacgttctgcactcaggtcactgggggacctgggctttcaataggtccctactcctcgtcttgttcatcttcccaaacctttctccagaaagcaatatagagaaggcttaaacacacccacgcatatcctcccatttgcaaaagagaacatagtacatgaaacataagctgttgaaaatttcctttaaattgtcctggcagcccaaagtgaacaagagaaaagcacacttatggtgaactctaattcagagagaaggaatgaatacactgaattgtttcaacacccggctgtgcataagttgcaattcagttcaatggtttggaaattttgcttagaaaaagggagcaatgagaaaatgataggaaattggggcattgattgactttaggggggcattatttagaaactgtttcattttcaggtgaaagaagagacaagcaggacactgggaatgtcttctccttatctgcctgctcctccctcacacccactatgggcagtaggaggcacgcgagcctggtgaccagggggcagtagctcaaagtgaggtcatattcaaattgaggtctttgctgaagatcccataaggatgtattttggtctgaaatttgactccacacaatgtttcagcctttctcctagaaggcaaagattatgcaataggccaagatatgctggaattacacaaaggttaatgtctatttcaacactaccaaatagcctctccctccatcctacccctactgcacagttcaggcctttggcttttacctttgacctggtctccctattctgagtcagcctctccactttcaccaagtgctctttctaaaacatacatctgcttacaattcttcaaagcctccttgagcctgcaggatcaagtccaaactcctctgcacggcatacaaggtcctccgtatggcaggcaaggtcccctgcctgctttccagcccaatctcatactactctttcaaccaccatgtttcaatcacactgaactattcactcctctgaatctcgctgctacttaacgcctcctgattttgtaaatgctcttacatttttcttgattatgatccccttttctttctgctctttcatatctacctggtaaactgcaatttactcttctgactttaagacccagcctggtcaccttaccacatccaagtgggcactcctccttcattcctcttactacgtcttgtatatacctgcatttcagtgcctatcatatgctatagtctttattcacttatgtatctcccctatcagactgagatttctaacaaaagaaagcatttct

SEQ ID NO: 40813 - DNA, 2905 bp, Homo sapiens
gtaccgagcagagagatgataatgatataagaatcactatctactgagtccttcaggtaccttgagaaataaatccttcccaaatttggatatgagtatacccaggaatgtgagcagtgtaacgggagtagaaaaagccacaaaataaatagtaaatacatggctgtcttcctggagggtcagtattccttgtgggcaagtaatttaaagtcttatttgcacacgtgttcatttatccaataactacttcttcaatgttataccaaaaagaaaacagatactgttcttgtcctcatggaacttccggttgagtgaaacaaacaagaatatattgaggagctgaaaggaaaatctgtgtatatattttttgggtgaaacctgagacttcactgaaaagtcttgtttgtggcagactacttcaagcaatgtcctggcaggcacccttagtattggatcactcactctaacttgaggatcacccaagtggaagagtttgagaagcatggttagcagtgtatcatttaatccccactacaagagaaaatactgttacttccaatttactagagaaaaaagagaaatttgagaaattaggaaacagctcagatcataccgctgctggcgtctgaataagtgtgtgccattccaaaatctacatatttttaaccactaaattacactacctttaggagtttcccactttatgtttccccttgaatctgggctcattcaggattacgcaggctagtttaagcttctctttggaagcagacaggtttggcttgatttgcattctaaatatttcacagtggtaagcgaaagctattattatacccattttatggtgaggaagctgaaccacttgccagctgaggtatctggctgggttaaaaacagaatctgggtcgtcagactctcattcctcttgactaactccaagcctaggcactattactgtccatgggcttttctgaacatgagattcacactgggtgataaagagtgagacaaattctgctaagagaaaacaataatagtgcaattgaaaaaaagggaaaataagtaatcataactcacaccaaaattggttactttcagcattgtgaatagaaaagggagagattattcatcacaaatgagtcagaaaattagaatgtgtcactgcactgatgacagagctgaggaatttggatgaactgaagtttgacacttatccttctagctgaagagggtaaatggtgtgacaacaggacagaaatgacctcttatttccaatcttaattaatatttccaatcttttttccttaactactctgtctaaaagttagatgggtttatatgtttgttttctatcggtagagataatgttttaacatccctttaacgttctagaagtattgcgttaattaattcttatgtgggagtcattccaaatagtaggatgatgatttttaccttattgattttcctaatacctttctggtttccagtgttttcaaaggatgaggcactattagatttttagatttatatgtctctcaaaattaagtgcctgtcaactgatattccatctttactctggatacatgatttcctttatctgacagattcaaaaaaatttgtactagatttaatgacatttcatgcatcttgaatttgggagtttttaattctctattttctatttggcaaaaggtttacaggagaaagccagatgcaagggtatttatatgtgcatacagaacctgtgccatcactctctaggtactttggggtttcctgcaggacagattcttgatgtattttcattccttttggtcaggaagaagaagactataaatgccacaaatggtcatacatatcttggggtctgctttccaaaacgcatattattttggatccgtctcaagaagaacaataagagaatgatactgagatctttttttcttaagatgctatgataacaatcctaaaaaatggcctgccttcaaaattttgatgatgaaataaggttataatcaataaagagagaagattttaaagttcagcaattaggtctgggactgcttctgcgcctgagacattgccaagatacaatgtaacactccatcccaccccatatgaatctccctgttccttcttgattcttacggggatagggtctgacagactagaatgaaatgaaagcagtagtgctgggaggggtggcaaggaccgaatttgtttaatacatttaggatggttttttattgctgctaaactagacacaattccttagcatgatgacattcaggaatcctttacaatctgattccaaagaactttctcttctatatcttaaactactgaaattgtagctctataaattccaaagggattgatgtaccaggacctttgacttatagtaaactgatcttaagggatgctgaaaaggtttggcactgctatcatgtggtctaatcatttagacttgtcactaccaactatttgcttaagagcctccaagacctttcacaatctggccccggcccacctctctacttttaataaaaaattttcccactgctgcttctttatatacggtgacagcctatttgctcttccctgaacatggcctgggacatctatgtctctgagtcagctaacggttcacacttgaatctcccaagcctagcatagtgtgtgaaacacagcacgacactccaatgtttgttgaataaatgctgtccgtctattttaggagacagagatgacagaagaaagttgttaaatcagtaaataaatagcaccagagagaggtcaaggaaaagttaattttagtgcattttaggagtgggggcaagatgagcttgaagattaggaaaactgatgctctttattcttgggtctagccaatgctatgagt

SEQ ID NO: 40814 - DNA, 476 bp, Homo sapiens
tgccatcactcctgcctaatttttgtatttttttgtagagatggggttttgccatgttggccagggtggtctcaaactcctgagctcaagcaatccacatgccttggcctcccaaagtgctggaattacaggtgtgcaccacaacaaatggccccaaaactaggttttcaaatatgtgagagtatctctcagctatgtcaaaaatcctatgagtcattcattcagtgtttatttaataccaaaacatggaagatagtatgtctaggaactaattttactccaacaataaatctagaagaatgagtacctatttcatgtggttatcatgaagaaactctgtcagaaaactaaaatgaaatggctcatgaagttgacatatgtatgaaaatataagaattctgctcacacctcttctttcttcctgggggcattatccatgagcatcatctctgtatatgaaggacggaaaacccgct

SEQ ID NO: 40815 - DNA, 904 bp, Homo sapiens
cctgggtactctggactcccctgccatagcccacctggccttgccttcccctgagtaacaccctgaagacagagctcttcgtttacattttcccccaatcaagttataacaggtatttgttctccattccctttagttccagctacatcacttgaaaagaaactgatttgggtgagttgttaatggttaataataatttaataaagtttatttcttgatgaaaacattgattttaagagtcaaatgaagaacctctttattgtggtcttttaggctctatggaaaatgccataataggtgagatgattctaatcagaagcattgatggatgctccattgcacattttttagccataggagccagtggatagatgggaattcccaggtggacaggaagtttggggtcacaaaggcagcatgacacaatacaaaatgaatttgaacagaatcaggaaactcaagttttaggaccaacaaactttgccacgaagtgtttggcagacattcagtttcttaacctgagaaatgaggcaggccctgggatcagaaactctccatgatcctctctggctcttacattctatgactctctgaccgcagatcagtcaggtctcctggattagctaccacctccagttaagaactaatagttctgaataaagatggcggtcattccacactgagccaacctaactaaagaggtgttgatgtccataggtgagttttacctgtctgcctacaacctgcatacactacttttgagttggctcctttatgctatacagatatttcttagcattttgttttccctcatttacttaattcagcaaacatttaatgagcactttctatacatgaaacacagagtcgatcactaaggacaggactgaacagggcaccatct

SEQ ID NO: 40816 - DNA, 2577 bp, Homo sapiens
cagtattagcaagaatgtttgctctacatccactatagatattctctcctgcttagctaggcatgtaagtactgtgagcataatgtaaatactcagaacagaaatgcatggaaagctggtggagtgaaactccaaatgaacaattaattccactttcacttcccccatctacctccctgaatactacctccctgcccccactcacctatcttcctccccccaacaagcatgtttgctaggcatgtcaaggctgacatccatcggtggcagtatgaaacctatgcctacaggctgctcctgagcatagcctcaaggctctgccattgtccgtagagtgctctaagttgtgcccgctaaaaatcttcatcattccatttgactgtttggtagtatttctttaattgtattttttgtttgtttgttttaaaaacaccctttatttcctgcttgccttagagacaccaagaataaaatccttgacacatcaaattctggaacctcaccactcaccaggactatggttcctgatccaaggagtgacgactgagaatcagcacacagtctcttgagggtgtccaggcctggctgttaagctccctgctctgattagtttgtcgagttcacagtgttccagagtgctgaagcacagaaattagggaggggaggtggaaggaaaatcactggagcctcttacgatctaacttccactaactgggaggaaatgtcttataaataaacaacagtaagagaaacaaaaaaaaaaaaaacccatcccgtcctgccagaggaatgtacattattgtctcccgacggaaaactttacaccacaccagaatgcagccatgtctcctgaaactacctccctcaaaacagaaagaaaaagagaatcaaaaaggaaaggagaacaaaacagaacaaaaaagatttcatccccttgaattctgttgggaagttcatgtgagttcccagtagacaaactaaactaagcaatttcaacagtgtcactgttccagaattttgtgcagaggctgcttattagccaaatttcatttctgcccagatcactgctgtaccatccagacattttcagaagggaagttcagggaaggggggaagggtacgactgtggagaagaggaagaagagaggacaaaggaaaactcctgatgaaccagaatgccctagccacggccatgatagagcgagcccccacccaccacccgactactgcttgttgaggacttggtgatgcggtgtgttttatctacttactctttctgctcgggaggctgaggttcctacatttccagctcatgctggactgtaccgtaagcaacaagtgaaatgagttcagtgatctcattctagtccttcgactcctgtccacatcactaagcgactgcacagcttggcacaggccaggatgagtcagcagtctctggtcatgagaggccaggcctggaatagcaggggggtttaggtcaggagcaaaatgaagcagaaaggcagtctagatggcagggctctgttctgcaatacacagaaatactgcaggtcaaaatgaaagcgcctcatcagctctggggtgaagattgtaggactgtaaaaaaagaagcatcaagagaaaaaaaaaagctgcctaccaaacatagcaaggacaaaacagagtaccacagtcagaaaaagagggcactggtagagccctggaggataaaagatgctcattaaggtttctgaaatgtcttttcttccacatgctcccaaacttgaattaagaaatggtgacttcctatatactatcctagtattttggtactgttttcccaattcagtaagtagcaaaacaaataaaatgcaaggcactgcagttaaatagcaagaaaagcctcatatttcataaaataatatgagtctgatatctcaaaggtgtacatttgggttaatagtgtctgtatatagcctgtatgaaatggttaaagaggagtactctttaagttgagcttgggtgggggtagagaagagcttagagaaaagagagttaccagttaatgataaaacataggggaactatgacactgtgaccatatttctactcaatggggccaacatagacctccattagacctccatcaagaagtgatgctcccactaacaggacttcaaacacttctccctctgcagtagtactgtaatatagcaaggggagagggaaaataaaatagatagaaaaacaaggttcaacataaaaaaaattagtgatagacattttgtttcagaggaggcaaattgctctataagtcaactgataaaaaaaagtcttggtatctgaacagacttagagaaaccatatctagatgaagatgccaggtggagactgataactatcaggaaatggtagtaatggccataaagaaggaagaaagcaatctcaagtcacatgatgtagaataaaacagcatggaaaacagaaggagagcaacagacttcgggaacacgagtaaaatatttctttaaagtccttttaagaggagtaatgaggacccaccacatattcctaaatgttgtccctcagagatgc

SEQ ID NO: 40817 - DNA, 3609 bp, Homo sapiens
attataattaatatttattattcattactagtaggcattgtagtaattacactattattggtattttaaatatcattaatagctataaacatgttatacataataataatagaaaccatttgtggagtgcttactgtgtaatacattttgctaagcattttatatacattcttaaaattaataatttcaaagatttaatgagctaagtgtcaccagataaacgagaagacataataatctttatttattaaaggaaaacttgccatatccacacaatcttccaaagcactgatagaacagaatgatggcatgatggcatcttaaatttagaaagtgtcattcataaaagtgtactgttaactactaatttgtgctatctgcaataataatattatattacacaagatggaaaggctaccccctaaaagatagcatttgataaattgtacataaaaatctagaagaataagagtataacagaggagtgaaatttgatctgaaatacagagaaaattaagaaaaacaaaacatgttagccctactggaatttgtctcaatgtatttcaaggttcaaagtatagcagaggaagatcattgacactgtcagaggattatcattaaatttcaacccaaaggcaactaactcaaactatgcagatatggaaagtagtgtttcctaaaatgaaactaaggcaaatattatttattctagcttctactcttttgactaatcagctgacccagaaattaaatatttaaaggcttaaaaataatatagttttaagaagttgacctatacgttactaaataaaatgatcctcgttgtatttgaagtagctcaccatttaaaaatttaatctatgtccacccattttctttcttcccaaataatacaatgatttaattaccccacagtttaatttgacagaggagccaaaaagatacactattccttcattgttaactttaaggagaaaaatacactataaactatattagaaatcttattttttgggtgtccaccacaatgttttcactacaaaatcccttgctgcctgaatacaaaatgttaccattcaatcagatgagtctccatgaagttagaaacattcaagtgaaactcataaaataaagaagatatactctaaaaattccagttcttgagaagctgtttacacacaaaagggctattaaaagtgaaagggtaagtagaaaatcttctgggctcatttaataaaagaatgtagagttccatgggattcttttctaaagaaaccactaacaatgttgcagatctacaaatcctaaaagagtgcataatggactcaagtctctgctttgtgactcatgggtgtacttcatcaggatgtacttcctcttttagggggtcatataggtgaataagctgacaacaccttcagagagagaaattccacatgtgtcataggaatagaatttatttgatctcaagctttctatatatagaaaaaaaacaaattctaatccaaactttaatgaattcagtattgttgttgttggtttgcctctagaatgtctcttttgaccaagtcacattcctttaaatttacactaggtaaattatatattttccaaatcttttataaaagcataagctaaatgagataacattaaaaggctgattggagatttccctttaaaagcagtcataagaacaacagcaataataatataacaacaatatacactacattttgggcaccatgctttgaatttatatacactaatattattaaggcaatctgtgcttttgagaagctactccagactaggcactacacaaactctgccacacacaagagagaaacaatttcaattacaaagagagctagaaaataaaatggataagagtatcatgaaagattttttgtaaaactgaatagatcctttcatgtttctcagttttaatctctccaaatatccctattgtctgctttttaaaagaaaaaacactgtaaaaattctgaaaaaattattcacaaagaaaacttccactcgtttatataaagcattattattaacttcataacatgcataatatcatctatttctgaaagaccattgaaaagtagccataaaaacttaaaaaattgaaaataatctttagagatcaacaggccaggaagagttctaagaatatgcattggcctttactaaccattttcaatgccatgcacttttgtctgtcaatactttctcctgttatttttaatatccctagattaagaaatattaacatctatttacaaaaaaatattctaacagtttcccccacaaaagcatattcccatgaagatcaagaaaacaaaaaacatagcagggagtcagtattctgacagccttttagtcttcttcatcttcttcctactattattattagacctactgcctattaccagtaggctttttaaaggtcttggacataaatatcagttgttaagttgctattttcatggtcatttaaaattatttcaaccataaatgcttttaatttcctgaatatcttaaagctgtctaagtataaatattctcccattatattcctctgtgctaacacaataatctagttggagtcaagtttcatgaaaataagaaaattggtacattataacattttaaacactgaaaaataaacgtgatagctgtaggatgtaaagtgtagtcaggcctgtagaacttcggatgcatcattttacaatatcatttatcattttgataaaactgaggtcaagtttctaaaaatacaacttgttaaaagcaggaataaatgaatgagagatgagtcagctcgtttgatggaaagggtttaaaaaatacttcaaaagcataccacatgacttggtaaatattcagtgtatcaaaatgtagttgccatctggcattgatagactgggctagaatatgtgtttaaaaagaacaagaaaggaaataactcagccaggttaatgtgcacttgtctacatttcataattcaggtattaagtgctttaataaatattcactatgaaagaaaggctgcattacaatcagacttgggcagtatttgttggggacagctagaaagaaatgaaagaagacaagacctgatggcacttaagaaagctaaaaacaacaataaaaaagtggtttaggtaaacagaattctcaatcatatgtaatattgccagaacactagtatcacagttaaatgcagggaagtggtaagcttatatttgaaaataaactgaaatcttgcttattttcagctttgaatattttaattattcttttctttggctttgacaatttaaaagtatagagaaatccagggaataagtaaaacccttggttggatagtaaaaaaaaaaaaaaaaaaaaaaggaaaaacgaaaaagtcctgacattctttgaagttttaaacctagagtttgatattaactttgcaatatgcaacaaaacaaaaagtaaatttgaaggactcctcttttctccctcttgctcaagaaataaaatatatttagaaagcagtatcattcacaaaagagaaaagtgaacacgagcagtgaacacttgcccaagcgttcgactgtc

SEQ ID NO: 40818 - DNA, 475 bp, Homo sapiens
tgtatattctgcacatgtaccccagaacttaaagtataacttaaaagtttttttaaaaaatatgtgataaaataaaaaaaagaattaaccacagtgccttgcctattcttctataacagtatctatttcactctattttattttgaagctatttatctccaagtttctttctagaatctaaacagttaacagcctgagggcattgaccttgactcttgtctaagttttacaaacaaacaaaccaaaaagcacactgcattgatatacttggccaagtaatgatgtccaaatgctacaatgtcacaaccagtgctcagtaactattagataaataagatagagtcattcactcaatcattcactcctgcatgtttcacttagtaatcttgtacgctcattgaataaattaaaagctgctttatgaaaatgttttctgttaatttgaataaaaacctttacacatcaactagataca

SEQ ID NO: 40819 - DNA, 2720 bp, Homo sapiens
ccattaaaaacaacaaacccagtatcaaaatttggtatttttttccccactcaagtgttagagacaaattcagaaaagaaactaagtctacgtatggtaggtagttttatacaaatctcttcagatagtaaccagttgtgagccatccgaacacggaggaattttacactttggccagctaacccagaacccagcactgggagatgtcatgtggatttgtgaaactccctggggcatactgcatccataagccaaagaacagaaattatactgatccatacatgcagctcttcatctgtgccatattgataattactcttcatttgtgaattaaatcctagttataaaaacaactttcagacatttgtcacaaatggcacattttacttaactctttcataacaccatctagccacggtctataggaaatgggagctaccatactcccatataggtcatgatattataggaagaatatgatgtagagaaagagagagagagagagagacagacttgagtttgaatcccaggttttccatttattaacaataaagctgtaggcacatcacttaaatgattctgaaacctcattttcatcacctgtggaataaagaataaaaccacctattttgcaggaacgttgtgaagattagagacatcccagcacaaagaccccctcataaaagggggcattaaatattaattattgtatatttaagaagtctatttgtgtgtgactttctcttgtattaatgatacataaatctgctgggagtaacagaagatgtgaggtactttttatgcttttttaatcaaagacaaactttttggtgatcacatgtgttccatgtaaaagtggaaataaaagcatatcacagtgtaacattttcagtggacgattttaaagcacttaataacccttgactttttgtgattgctggcactctcatttaacagttgggcaaaatggggttcagagatacatcctccaaatcagtaataataataaagaaatcaccagcaggggttagtagaaagtctgtttttaacatctaaatcccacagtgtccagctaaggaataactgctgcaaggtcacagatacaaaaggccacactttccccaaagctctttgagattattcactgaggccaaaacattaggtaatgctgtgtacatctgctgagataacaagggtgagtcagggttaggtcacggtttcaggttagaggggtggggtgaagagtggctttcagatcaaatgacgagagtagtttaatttaagcaaagaacaaaccatacagtattttaagtaagaggggaaaaaaagggggtgcaactacagccaagagaaggtgggtgggaatatagaccctgtgggggtcaaatgggtaactgtggctcaaagaggaaacccacccacattcacacacactgaaaagcgaacaaaaagcccagggtgcagcataaatcctgctatcccaataacacacacagatgttccaccattgttttcttttatgcacattttaattaagagatcagaatcaagcattaaaatgttattaaatggcttgtttacatttttgctatatgtcatttataatgcattttctaaatgtgtgtatatctattcggaaggactatttggaatttttacatcagtgctacaattgtcccactaactcacagtcatttttgctaaccaaatatgtgtcagaaatccttttcagtttaagcaactggacaggagctctcactctttaattctcagtcaagcaattccctacccccaatcacacctcctttaagcatgacaaagtccaccacagtacttcaagacaataggaaggcccaggtacactggcaacctttctgatttttcacaagagtcccagtttcaaatattctcccattgtgctcacaagaaaatagtcttcatatacatgcccgaccctttccctagaacagttttgaaaatgtcgggaactcaaagctaccacatgaaggaccctgacctatgagtgtcccctggaggggacacagtggaagaagcgggaactagtagatttttttttcctccccacaatccatcttctatttgcagtctacaacttatccctatttgcctgggcaggaatttgagttctctatattattctggagttaaaacaggtatgcctttcccgtctctcagattccacagatatcatgactgatgcacacaatccacctgcatatgtggatcacaagtatcctgtagtctgctggcaccatataacttaattacttttaaccacagggcattgtcctagaagcccactatttatattgtaccttatcaatcatggtacttggaattgcaaagtctcagaaagcaggaatcatatctcctccacgttcagttcaatgcctaatgcattgtgagtgttcagttaggacaagcaagagaggtaaggttttttctttctttttgttatttgtttgttatccaggataagcagaatgcttgtacagaacatgcataagaaagaaacgcaatctaatctcactgtcaatttatattctgtaaactgtctcatttgcagcataaatgactacaaaaatgttttggttactctaagtgttaaccttaaggtaagagttaaattaagtctgctataactggtggaccagaaaggactcagagaaaagcaacagcatggctttgaatcaaatcac

SEQ ID NO: 40820 - DNA, 2127 bp, Homo sapiens
tatttaagcctcatcaaatttgaaatctgttactagcaattcattcttatttctgaattgggataaacacagtatatttggaaaaacagtggactgtcagatgttttgatggtctgattttatgactttgatatacaaaaaagagtagaaaatcttattcttggtttggcttgaagcttttttattccacatacctcatggcaaaatttatgaactacttttgaaaattcataagtgatcatttacctagatccacttaattgctccacccagtttcttcaaacacttgttctttgaggtctacatggcaagaagtaaatacgaaaaccatttccaagtgaactaaagtaacctgaatatgttttctgtgttaggttgttccccctacccacagcaaaagcatgaagacttcctttaagaatacaagatatattctaagtctaccagtactccatcttctgatgtcagatggagttaaagttcactttcatctcaagagaaaaaacagtcattcctgacttacaaacatgagtggagggaagtacctgaacacagggattgctttcctcacatctggctctaagatacaaccacgcgctgtgacatataaaaaggtcactgacacgagaaaatatcgcaagatattacaaggataatcaaagccaaaatatatccaaacccacttttggagagaatcccaataacttcttttgaatgtgataataaaaataacatgaataaagatcattttcttaagaaaaaaaaggaacgtttctatcacttgcctgccacttgccacttaggagtagactctggctcccttttccgcttaaattcttccacagagtcagcttgccagactcttaaccaaggtttttcttttatctagactataacaaatactccattttgggtcatgagaacatagtagcaaaattcccagagttaatactttaattatacacatatgtatttattattttgtatgtgtgtgagctgttccactaagttaaactttaaccatattaatccaggaaaaaaatccctgattatcaactaacaattttgtaaacagttatctcacaggttaaatattaactcgaaaaatttaactcaaaactccacacaagcagaaggagccaaaaggccaggaagaagaagtaaagattagctgctttaggaggaacacagccaggaaagtgagcattttggtagctggataatgtgtaggaagtccagggggttgtgcaggggggggaaatagaagcaagaagggagcctggaggacacctgctgcttatcataatatcaaaacataaaacaatgaggtgagaccttaaggaaaagaaaattcatggagatatgaatccattgataatggccacaggaattcaggtgcaataaaggtttgaacctcaatgatatggacatagctaaaagatccaacacaaagctagctggagcggactgcctgcctgccactgaatatcatgaggaacattctggggtccctcttccactagaaataatgggatgaaggctgctctgcctgtcctgtttctgtttcctaacaataaaacaaaactgaagtgtctccctccagtattgggttattaggggcaccgattgcaagttctaagcctttatctaactgtccatcaattctctccctgattaacagaaccatatcacgtaagaaaaagttggaaccagcagtagactaagtcagaaggcttttctgtaccggaattgctgaactacaaatattgttctctggttaggattttgactaaaaaatgtcaagaaaatccacatggccagagaattcgcacaatcttgatatctgaggtacagggtaaagctgatgtattttaatgctgttttaggaaggttagaaactgttaagattcttcctgtcagtatgtcaaatatcagatcagtcctgcttgctgatttttaaggaagtcattaaaaaaatcctcccagtgagtagctttcaaggaagactcccatttgcccggcagatctaaagaaataatgaggccaaataatgcaagtttctcaagagaggtgtaggattgaatgaaaaaagggaagatatagaaatgtaggagaaataattcttac

SEQ ID NO: 40821 - DNA, 1459 bp, Homo sapiens
taagtttttagggaaaaataacaatatatgttggttaaggactttcacttaaatggcattatagatctttcagaaatgagagttgatttatacttcagtattttggttcccaaaggttgggacagtgggtggtagaggagaagtagagtaaatggaaggtatacatgtatgtgtgtgcatatgggcaactttaagcaccttgaatttaatgaacaaaaaatgtcattattctgtgtttatatatttttgtgtgaaacaagtacctttctctatcactggagtttacatggattttctcatgatatcttttgagaatctctttaaacactaaaatacatttttccaaatgaaaactcccataattctgctttattaatatctgaatgaatatttccattgatttgtccagaagaaggaactgagtactgtttagagagcaatctttttcatgataattggcagcaatgtttccctgctatcagaaagaaaactatagaaatacgaaactttagataaacatggagataaaaataatattatggagtccaactggtatctttgaggtgaggacaggctgagatggactccttggcttccttctgtccaaaaatttcctgtttccctatttcctacggttaccaccatggaacatgttaaaatctcagtagggactctgtttcaacttttcctgtcaaaacacagtgaaaaagcttaatggaaaaaaatgtccttcctatctccatgccaggcacagtgtaagatccacaaacttaaaagccaggaaaatattcttttatgtgccccaaagctgggcaagtgacctagtactacaaaaattcccaaataggcatgtgacctgactaatgtgtgctgtgagatgagtcaagaaaaatggaaccatctgtacttttattggacagtcaaataatttctttctgtccacccaaaaacataatttctatgttaagagtgatacaaggagacttttagaaagtctaatttttaaaatcagagatattaaaatatatgaaaagtataacctattaaacactggtggagataagcaaataggcttatgaaatcattattgctttaaaaatttgttacctactcattgtgtactaaggcttctctacgacatacagaagaggccggtgcggtggctcacgcctgtaatcccagcatttcgagaggctgaggcaggtggatcatgaggtcaggagttcaagaccagcctggccaagatggggaaaccccgtctctactgaaaatacaaaaaaaaaaaaaattagctgggcatggtggtgggcacctgtaatcccagctactctggaggctgaggcagagaactgcttgaaccttggaggcggaggttgcagcaagccaagattgccccactgcactccagcctgggtgacagagcaagactgtaaaaaaaaaaaaaaagaaaagaaaaaaa

SEQ ID NO: 40822 - DNA, 3853 bp, Homo sapiens
tagggcagtgatccaaaaaatgtggtccccatcagcatcatgtggaaacatatcagaagtgaaattatcagtccctaccctagactctgaatcagaaacttggtgaaggggcagtaatctgtgtcttaccaaacattgcaaataattctgaccacctccagctgactctgatgtatccacctccatggggttgttgtctaagaataaaaggagatggtccataaaattgttattttttttactatctactgaaatcagaaatttcaaaattctctcacagagatattttagagaaataatgttacagcctacattagttagataataacctcatttctgaatttcactttgaatgtgtagacgaggcacaagtcaaccagaggttatgcaattagcttggagtcaaagagaaagcaaggagtagagctgagaaggaaaccccagtgtgaacttgatttttattcaatcaaactgttaaggtaccaaccacgcactttcatctataatcacaatgaaccttttaataaacatgtttctatcctcttagcttaaaaaatataacagtagctttttggattttaaaacagattgacttctatacttctgggctaaaggcagctcaagagtcaataagaatcacaagctttccacagtgagaagaaagtgcaattgcccagtcctctctatctatgaagtgcagacagtattcctcttcctcacctcacactttcgattattgcaatggtggaaaccatgataaataaaagcgcttatctagtggtttggttttcactaaaattacagacttctgtaacattatttggataccataaaacacaaaccaaattttaggagatgctttagggtgttttttcccctgccctcctgtcggaagccctctatctttttactgtaatttatctgatatagctaccaagatgcttgatacttttacatgcaagggtgctgaaaaacaaagagcgagggaatgggttgttaatgaaattctctgattgtaaaaagcactctggaatgatcaggtggtaaataataataagaggaaataacataaagtgcttaggtgctacagcgatagtcaccatataaatgcagaagagatcagacatgaatagaatttgcattttatgcagctgctgtgtgtgtatatagaatatacagtagctaatttttcaataatgctggtaaaatattgttcaaaatctattcttgctgtcttctcactttaaaaggcattatatagaaaaacacccatctgtcctagtgcaatggtgaatgtgtgcaaagagcctagaaaaagagcctctttgcatacgtgaaaaaaaagaactcaaataaaaggagataatgaagaagagacaatagtaacactattagaacagctatgcagacaagcacaaaggtgatctttgaaaaacatcagggataaataactctgttaatgtgtggcagagaaactacagttaagacatacagtaatataccaaaaatatagacatgcttttattttgtctactgggctattgtgatagtgatggttgtttttgaatagaaaggaagaagagagtgggaagtaggatttcgttgtttgttgttactgttgctgctcagtttagaacaacaacatcaactacacaccagacccgtccaacagttccacaaacaatgcttaccatgaatctgccctcaattttcttgttgttattttcccttaatacttattgataacccaatgcccattcattagatatgctaaatcctcgtccatggttactctcctttggaagagactgagaagatgctaagagggagttcctcttacacataagggaagagtctgtttaggaatctgagaaagcagaggccaggataaagagaccactagtcaatcaatactaagcaccgaagactgaatcacccaaagatacaattatctcccttcctttgttctgtctcttagtcaaataaaggattgtttgtagaaccttttctgttcctgatctctaaaaagcaggactggacttgcacatccaactataattcaaaatatctcacacttccaacttgaaagaagacataaactgtttcaaagaaactcagagagagcaaatgcatattcacaaaacttacacttattcctagaataggaaaatggagagagaactaaccacataagaaagggctaatcataataataatagtaataatgatgatatcaatcaatactttggattctagagaatgatttatcacaaaaattcacctgtattaagggagactccaggacaaggaggtcattaagctacatttccatcttcaggattcagccaaactcagactctccggaaagctgtaaatgctctcagaacagactttagtaatgagattggaatgaacactgggcctatggcgtaaaagcatctccctgccccttgttctaaaagttaactattaaaccatgtgcggttcatcctgatttggtttactcaattctagaaacaaggacatgctgatcagattgccctgggcaattgaatacctactgaagcctttgggaagacagtgttcttcccaccacccctacttaaaaggcttctgttaccagactatcaattctgtgttactggtgaaggatagaaagtatcttcttttgaaggacaagtttttcactcactgagttttctgctttgggtatatactcaacatgttaagtgcttaatcttttttcccccattcccctttttctactgtagtgtgttttgtttgtttgttttttgtttttgtttttttttaattatttgaagagtcacttgtctggatgcttcgttctagtagaatttggctgatttttttcccaacaccttttagtggaatgcagtaacagatgcatggagggagaattggtcttaacagtatttttaggtttcatctgtgtcagagagagatctcttccctttattgatttcttgcatacactatccacactacagcttgaaacagctacaacagtgtttgaaaaattggttgttcctcactgttcaaaccatttttcaaaacagtcgttacaagcttcattttactttctgttataaggagggttttgtttgggttggtttcattttccttgtggcgtcatgctagcagagaaacacagtcaggaatatagcttttaaatgtggtatgattgggattataaccatatcagaatctatattgaaaatttattagattgagccatgtgcagttaaaaagaaagaagtcagaagtcttcgatatttttcacaaacatgaacaccatctcatgcaaacgttaaaattcaccaaacaaatgataccccactgttggaaagatattttctcatgtcaacaactcaggaaggagtggggagggaatgggacatatacatgtaaaatttttctctatatttttgataataactctctgtgaatatgttttactacctaggtaatgcttatatttgtaaaaacatatagttatatcagaaagtcaattttgaataaacctgagaatggcaaactataatttttaaaatactaaccttttagaactgttcattttcacttttatttccaggactcactatcttaaagagaagaataaaagttgaagatccttgggattaacagaaagggtggaaatagccaaatgtattcatatttttggccaggcgcagtggcttatgcctgtagtcccagcactttgagaggctgaggcaggcagatcacctaaggtcaggagctcgagaccagcctggccaacatggtgaaaccctctctctactaaaaatataaaaaattagccaggcatggtggt

SEQ ID NO: 40823 - DNA, 3279 bp, Homo sapiens
aaaacatttttatgtaaacaaatatagaagtatacatgatacatacacatacattttttacttagagtcttcaaaccaaatatttcagtcctttgcttccagtattattttcttttaagtaaatacttttcattaagcaacaaagagtgatagtcatctcaacaccaaaaacttgtattcaggctaagtttagtctactttgcatattttcctctgagaatgatccagccagtctcagtctgattctagtaaaactcaggtaatgtggaagaactctaattgagtattagacattttaacaattatattcatattgatatgtccttatacgaccactctaggtgaaatattactatgcttgggacttaaatatgatttttgttcttttattaatttctgaatctcatatccttccagataccaaaggaatacagtaccacctgggaataatgtcaattttcactttaaaaaaatattttgttgcttttcccctcagcatgggcaaccaatagctgattcatactttcattacatcacagttggattacagaagggctctttagtctggcctccgcatgtctcttgcaactcatttgtagacagcccagaaactagcagctggacttcatttttgttccagcagtcaccattttatagtgtttctctaagtcactgtgagtttcactgatgacaagtctaaaactccacaggtattcatatttagtgggttaaatcagagagaaaggattatgcttaactttctataggttcatgtcactcaactatactttgccattcacttaccatacgtcaaaaaggtggaataatactattcttacatagaggactaataagatatacttagcaaaagtaggtggttgcaaaacatttttttaaaaatcagagtgctgtatttttaaaatcttgcatagaactctggttcaatttttgagtccttccaatttctcataactctgtggtattcataataaagcaggcagatggttaagtctctgaacatatgctttaaatgccccctttgctatttctaaataatggaccaaattttgccctcaaatagtcacaggaaactttaaggaggctgcctcttgaaatctgaggacagaatgtgatccagtgggaattaaacctttaaaaaatatattttctaaactttcttatgagctctattccctataccaagacaaattacattttttaataaaataggatatagtaagagaaaaatcctaaccaatacaatattacttggctcaaggaatagattagaaggcaacatatgttttatttatttatattttaaaattctgattttctaaaacatgagagtcatctgattaatttctgtgtgattaccagattttccatttttattattattcctattactagtatcatgtagatgttatattgttaaaacatcttgcaattattaattagttaatttagtttaaattatgattatgcctttgttttaaatcaatgtttttcatagttattaaaagccaaaagcactatttttccagtcacttactttcatttcaaaaacagtttgttgtcgatgaaagcgcattttccaggttatcacagaatatgcaattcatctgcaatggatatatatattctggtaatgttgctcacataacctagctgtacttgtaagagtatctctgtttcttaatgtctatattttatacatggaattaaccttcatttgcacactcatatttctatgtatttaaatttattcctgaaagacctctgaactagtctctcctgtcttacgatgtccacaaaacttagcagtctgattaacattacagataaaaagaccacacaattgacaataaggacactttagttattatagacgtctgaagtttaagtattccaaaactataatgtccctttagaaattctcaataaggattagcttggtcctaatgaaaacagtgtttacttttaaaaataaatgcaatagttgtacccaaatatgttcgaaacactgtatgacgtgtcataatcaacaatgttgaaaataactaaagatctttaaatcaagtgataattttacacatatatccacaaatatctgaacaaaatttataattactattgggacaaaacattaacatattcttctgctaataaagacaaacaactttgagaaaatcctctctcattctcacgtctctaactttcacaataaatgcagcactgaaactaaatttccaactcagaaatacgctgagctccaataaacaagttgattttaaaaactcaccagactaacagttatgctttttcccttatctttcctttgctttcccttgttctttcactttccatgcacacacaatcacacttacctgcacaagtctgaaacatcagtctatgtattttttttgaaatgtactctgtaccgatgcatttttctgtgtttctttctaaccctcgagaatgttaagaatttaggaagagagccacagcttaagagtgcaattatttgccagtaaatactcaatttgcttgtcctgtgatttttcttctaacttgcatattcaataatccgtccctgactgcgtcacgagcacaaaaagtcttttctccaaaggagaagactttcgccaatcaaccttcagccatgccagggcacagcttgtcagggtgatttgttagctttaattaataattcctcacactggccattttcacaaataatgcagtgaggctgggaggctagattgctatgattcagacagataaaactacagtggaaaggggatggggaggggtgtgggggaattcagatgccgtttataaacacctctaatcatactctttcagtttacaatatagaggacatctcagttgaattaccacgttatgtccaccaatttgtattcagatggaaaccatatgttcctccactttatctgctagggactccctggtgccaacacagtcattgggcagacaacattcacaaaagaggtctctagcctctggattgcaaaagtttactgcagggtgaagttgagaaatcagacatatactgcacttctcagtgagcttgggtaacagtctggaaacacagaagtatgagttatgagtgtcagattttctcttatcctgctatgtgatactgggcatttcatttagccttaaaaaaaaaatctcatacctcatcctcaaatcagtttgcaacaatgactgatttgttcatgcattctatgaacatttattgactcccaaata

SEQ ID NO: 40824 - DNA, 853 bp, Homo sapiens
aaaatgtaatcaaacctctgaagctgattttcaaatatattagaggaattgattttaaaatatcaaagcgtaagaagtaaatgttttcaagcatattcagacacttatgaaggaagactattaaaagacagggagcaggactgccttttctttgtgtggctggctgcattttatgatggattcaaaaccccagtaatgagaaaatataatcagaaaaagtgatttttagcaggctgttgaatgacacataaaataaaatgtattcattaatgagtcagcaaaaatgttatgcatgagctttcagagccagaatttttaagcagctttttcatacttggtacagccatgttcctgaagtatcctctcacaacccccttctacctctctctctctctctttttttttttttttgtcctgtactgccaggttggaataatgaccaaagggaggggcaaaacaaacagatatgctcactgtggcagaagtcactccaaagatcaaagactcgattcagccgtggctgccaaaatcagaaccacagtgggtgctcatcagcacggtgccctcagaaccacatgggctacccttgataggttagcagcttggggtgcaggccccgcatcctgcttagaaccacctgctgagaactggatgtgcacattaccttacccactcacaacatttgatttcaactcaattctgctctagtattatgtttattgaatgacggaagtctaacagacactgtaaaaatccaatttcacatcttatagtacccaaaagggaactgtgattttcctatatcagtgagcaaaatcttgagcaattagtaaacaagatcaccaatttctag

SEQ ID NO: 40825 - DNA, 855 bp, Homo sapiens
attattttgaacatatttataatagtgctttcaactctttgtttgctaagtttaacatctgctatctccacttcaacccaaatataatttctttttttttcttcagacactttcttttaaccacttcttaaattgggtatgagtcacactcctgtttattacatgtctcatttttttcttgaaaattgacattttatatagcatattacagcaactctggcttctgacttttccctgttgagggttgttgctgttattgctgtgtttgtttatttaggacttgcctaacataactctgtgcagcctctcttccccatgctgtgccgctgctgatgtttctgctcagtttgtgtaatttccattttcgtttttgagctgggactttcccctgtgttaacacagtttagtggtcagccaacgatcagtcacaggttgtacttaaacacctagggccactatgctaacgcctctaattgatatatacgtgtgtgtgggttgtagaatgcactcaaagttcaggcagtttacaagtgtttttttgatttttactttccatttgttctctcttatcttctctctgtgtgtccaaagccttaggtcttccccagagtatgtgtgcagcctttcagacctctaggaatatgtggtagcttaccaaagttcactatgatagtatccttttccaattctccctgctaaatttctggccaatctgccagttcttttctactctgaattgtaacttcaggctacatatgatgtttattctccctgcttgtttgcccctgagattgtcactgttttgaccacacctaagggcatggggtttttctatgttctgctccatcaaattat

SEQ ID NO: 40826 - DNA, 2243 bp, Homo sapiens
agcttgctcctcaggccctcactcaaaggctctttattctttttagatacaattctaaagagtttgatatctacttttccatccacaacagactaaatgctgaaaactcgagagcataggtgagcttgtgtttgatgctagctgcaagcagcctgacacagggagaaatgagagctctcctagagccaatctggggagtgtcctggtgagggcactgagacctgctagttaggaggaggcctagtgcaaacaggcaaaattgcttggatgaagggtaatcaatctgagcctagttcttttggatgaaacctttgagaactcaatgacaagaggatatggatccaacaggagactagtagagaatacaaattcattattttgctatacaatgctagttgcattttaaacaattgtttctctatgaattttactaccaggcttttctgaaccattctgtgtgaattcaatactgcctggatttttaaaaccacttctgacactataaaccagagaaatctttcttaaaagataataagaagatggggccttgcatttctcataaaaggaaaatgactccaccataagtgtattcattacacactgttgaggcatgaattcagggaaaattagactgaatatgagattaccatcctaactttctgaaacactcccagcgctgtcaccagagttcttacttcaaatatttactcttgatctaaaaatatcttagtccaagaaacggaatgattactccacagttaaagtatatttagtgatctgagagaggagaagtttcatttcactcaagcaaatggttttagtaccacaaccaattaatagcttcatcatgtgtgagccatgattataaaggaatcggactaattttttaaacaaatctataggcttctcacaagggctatttttcacaatggtcaccttggaagaaagtcactccagggataccgtcattacttcagatttgggaccttacctttagaattggttcatgagaaaaaaaaaaaaagaaacactacatgcttcatagttaccctccccacctaacactacatatccctgatcaccaactttgaatatgcctcatttacactgatcaaccaaaagcctcctggaaatggtaacacggcctatttatcctgggctttactgggagggtgggggatgaagagggtttataggaattaagagagtctatttttaattatttcatctgtgaaacatatgaaattcctttggccaaaaatgcaatataaaactcagattatcaagggccttttcgtgggaccagtgaaatggagaaaaaagtctccatgacaaaatagaggacttttgggaatccttttttttctgaggtttgcatgtgtgtgtttctagcttggctctcacctgaactgctctttcataatctactgtagtcattgggtacctggaatctgggaaaactccaaccttactccagcacttgtgcaataacacagtaaggcacatggagtcaagtttaagcacttagtccagggttctttgcaccctgtgggccttcagtaagcacttgttgattgactgaatgcgtggctcactatcaatgtgaattaactatatacatactgcattaaaatccaacaacccaaatactttctagctttcaggaagtaatgcatctaattgacagaaccactcttatgcctcctaatccccacttcctacaaaccagctcaaaggaagagagagaatttgaagaaacaaaaatgaacataagaaaaacaattagctgatgcactctgcaaagcctgtaatattatctagaatgacagcatagccattgttcgtgctgccagagccccgcgtgtttgctagctcacccgaggtcctgagagaataataaactaagcagattagatgtagactgatgcctccatgccaccaccaactcacacaacacacacactgttctgagtgtctgaacacatgcgggcaggtaaacccagaaaatgggcactccatgttggcaggaggggaagaggctgccaacaaacagggcctgtttattatttaacagttggtactgctagaggcctggcaccgctatagagcactctctgtttcagtgcaagtcagcctgattatgagagcgtgtgagccaaatcatgtttaccatagtctgtgagaacctctgtgcccccaacagacatggaaattcttacaatagctctcgtccaaacagagaa

SEQ ID NO: 40827 - DNA, 1296 bp, Homo sapiens
tacctatctcactttattatttttcatagtatttatttttttccggaaattatgtactgcttattatctgtctcccctaataaaatttaacttctttgaaccaaatactttgtcttattccttagtttattgctagtgtccagtactgtgcctaatatatggtaggtgctcactatatatttgtcaaataaataatacttaaaatttaaaaatttattctcctttaagttgtacagtttaagcctcaccttattttctgctgataagagaaggtatcacctacaatgacccttcacattctagacaattaacaaagtctatgtggaagaataactattccaggaagaatgtgttcagacctggtttgaaatcacagcctgttgctgtggggcatttattacccaccatttagctagattactgaatagatggagttaaccaaaatgctgacaagacacacaccacacacacacacacacacacaaacacacacacacacacaccccccaaaaacgaaacctcagccctccaaaactctccttactcttgtaattggagtgcattgccactttgctccaagccaaagaacagataagaaagagaagcaaaaatcagaagaactttggaagccatttcactagagctgccacctgtcacttacgtaagaagatgcaatcatccatctgtccaaactggtgaatcataaggtcttaaatactatttactttccccaaaatagtgaatcccttgcaattttatatcacataataacaaagggacatgattcttatttgtttttcctttagatacacatagaacattttctttaatgtggcatacaactttaaaaatataaacaccaattcactgaggtatttttttggtagaaaaaagtgtctatcataattttagtagcaataatagttctgtacatttcttttagcaattacaacctcagatttctaagcactgtgcaaacattaatttactaagttctgctgtgttctctttgtgaattagaatattatcatatcttcattatttttaggtgagagtcacatggctatgacttgccagggccacacggtaaataattttttttaaagtggtaagatgcctctgttttgaaagtggatgcccagggaagattaataaaataggataagaacatacctaaaatggcatctgtttttttttttttaacctagtgcttccattcaaattttgttttgggatatgaagtcacctgatagctcagttcaaaactcgaataaacatccttgaaaatagtagggt

SEQ ID NO: 40828 - DNA, 992 bp, Homo sapiens
agttcaagaataatgccactacaataaaaaagaaataaagaagggcacaaagtattagaagataaattatctagagattaataaagtctttggtaagagtttgcaactctatcacatatgggctaattggaaatcactgcttccagggctaatgacctcatttgaggttaccctgtgggacaataacatggcctacctctgtccactaaacaaattctgtcaaaacataacttaccaaagtatagcttgttgaggggtatacatatctgaatttattttactctgataatctgcccgagaggttctgttacttgaaggcaatatcacttcctttgggttcacttgtaggacacaaaatgcagcttttacaagtatttctgcttgtaaactaattcttcagctatagtatataaacttcactctataagaaaaccaaagaggccaagggacattaagtttggtgtttaattgctatcagcaattaaaaattgctagcagcccacttaacattttcttcttcctctaaaaatgaaactgaaacgtatcttttagctgagagttctgtaatgctgagaaaacatcctaaatacatcttggcaaaggaagaaaagaaaaaaatgtgatattgatgtatttgctttcctagtatattgaaatcaagaactagatacaggtgacagatctgcttccacctgctggctcagtgaatttgtaaaactgaaatctgttatctaaaaatcactagtacattcagaattacttagcattccctttctgtttgtacatgttcatgacaatgataaaacagccccaggaattctgctaccaatcttcatatatatgtccattgacattgtctccatcaaattcaatccaataaaattaaatggagttaaataaagcagtctgcttgaacctcagtatctctcatttcttattgtattgtacctcttatcatttcttatttatttagccaaggttaaaaaaaatgg

SEQ ID NO: 40829 - DNA, 1611 bp, Homo sapiens
tatacttcattttcctgcacatagtaagtgttgaagaaatccacagtggttagtttagaccttattttagagagatagctccattttacattccgtcttgctaaggaagtgtattcatcatattccataacagctcacagtttgttatacattaactgcttattctctgtgccaataagactgtgctggaacagcaaataaatttggtgcattcatttaaatgattctgcaaaccacaggctacccagttgtctaatgataagagagccccaaagccacctgatcaccattatactcccttatttttttggatttgcatggtcagtactgtcaggatctgaatacagagaagaatgagaagtaaaagtatacctcagacctaatcatgaaaagggattttattaatttcggcaccagtgatgatgtggctaggttggaaggggaatgggatataagatctggagtgctttatctgctccaagaccaatgctggttttggcacttctctcactctagtgagttgcaaaaaaacaagcaggtgctagcaatctgagagaccacatgccagctacagctgcttcaaactgattcaattacatctgcctgaatagtcccaggacatcaaactagttgaagagatccataggttgcaaggagactttgtctatcctgatggacaactgtctctgagataatgacctgcaaatttccaggttgtgatataaagtgatcattccatcaccaggcataagagaaaagatgggggaatgcgatgttttattcactttaaaattaaaaattggttgtagaaagcacaaaggcctctttgaatttaaatctgaaagtcactgaggccttatggataccttgaaacagcccaattttgtgagaacatttcccaaatcattgggtacagcacatttacagaacatgctcttgggatccggacttcgctccaaaccttgtttgtacaaaaaggggccaagcagctgggaaattctggagtggagtgtgtcctcattagttcccatctgccaccagaactcagctcatggcaagtttggctaagtcctggtgtactcaggtccaaatgtgggtcagttttaattacactatacagaattcagtgtgcagttttaaaatccttattatacagcacagaggaatgggcagctctccagctaatcaattttttaaaagtacatatataaaaattttaaaccaggctagacagacagtgggtggaaaaaaatctttaaatgagtacaagggttacttaagagaattattagtgaaattgggtcatgaacaagttctgctttaaagcttcaaagtgagaaacaaactgttttcattggtaagttggaaaacttatgtaaggtacacaatgtgccttgctctttagtgtgaataacaataagcctgtggccagggtacacaacacacctacaagtgaactggctttcatgtaagcagaaatgttcccaattttgtgactcttcactccatccccttttgatgtttatcacttatggcaaagactggataaaagaaaaaaatcacaagctacctggtaaatagtgaaaaaaaaaagatgaggaaggggaggga

SEQ ID NO: 40830 - DNA, 2676 bp, Homo sapiens
atgttactaaataccgacggaaactcctcagcatttaaaagaatacattaaggagagtaatgcaagtcatttggatgttttcaatatgagaaatttgagcctactgaataaattaattaaatatctttaatattgagttgcagctttttattgcatttatagaactttacctattagtaaaatatacaatctataatagcttgtctatatcaaaaatatagatatctgtcagaaaacatacaaagccacaactaaaatacatttaatatcattaccagtaacatttgtgaaaaaataccaagcatctagcatttgttaaattaaagaataatattccataaaatctacatctggattttagcccctcttttagaattactatttaatcttcactttttttctctctcacttctaccccaacagcaacagaaacacatgcacaaattaaggaattatcttacaatatacccttaaattttctgaatatgccccatgtgtccactaatagccaaatgctttcaaatctgttcagctaaatggatcaataactacatccagcctcacatagtggggctgccaacacggtgaaattgagccaaacacaaaatgtctctaccaggacaaaaattattatcaacccagttatctgaagagatctactctcccagatattctttcgagaagttggcatacacattatctagggcagtcaacagctactaaaaaaaaaatatttgagtcataaaacagaggatttaaagaaaatattcagaagctaaaaccagtgagttttagaataaaccaatgtaacagttcaaggtctacatcaagtaagaatctttcagagtcagagtacacaaaacacgtaagagcacaagcacactgctaacaagcttctctgtgctctcactcatatgacacagctgcaagcaacaattgagcaggtgcaaccaagcttttgagaattcctgcctgttgcccaggaaccacaacactgcatggttgagattttaaacaggtgcaaacatttttttttcccattcgtctagtgcttgagacagtggagcagacagtacatctgcaaccactccatacctaaagcaaccatcacagaaaataaactcaaaagcagcaaaataaaaaaaagtttaaataaaacaataatggcaaaactgtggttttgcaatggtctgaccccacatcaccgttcactttaatagtacaattccataaaataatctcttcaccagatgaatgctttgtaattaaaattatttgccttatcaaatcttagaaatgtttacttgattcttacaatagaataaaataaaatatatgtataaaatgtactatcctttgaagctgtcattatctgtaagtaatcaagaattaacatttttacattatgaaatctataagcaattttaatacataaaaatattataacttgttagttaatatatagatttacatagttataggtaattcatatacatacctgtgcagctatggggcacaaacttgcaattcatcaattctgaaatgtaaaagaaatatataagtaaaaattaatttactaagttggaaccagtatttatgttgcaacaattcctgcagagaagtaggaaaagtttcagtgcataaagaggtaaattattttttatcaatattttccctataggatatttcatatatctgaaaatatatacacacacacacacacacacacacacacacacacacagagtcccttagcagtgtatcataagcactagcaagggactctgactcaccatggcctctgaaactcaaatgctttcactagaggacgaggcaaacactttaaaatgatttttttttttggtattcttccaagactattgccttcctaatacaaatatgactgctgctctctaaaatgaaactactcagattcatctgcactcagtttggatagaatgttgttaaggaagaaaggtgcttttgtagagcagtccacaaaaaaatgcatgaataaatgaaagtaaactttgaatgttcgttaactttgagttacaacagcaaatagaaatgaaattgattgctacaagaaggaatgctaacaccacgtcggatataatgcaaaatgcctcaactcaacacactttgacaaaactgccagcgaagtaggtattgatacagaagactatgtaagtccacattaaacaaaagtagcagtttacaattagacctgaaaaacatttggatttaggtggaaactgtattgcaacatacagcctgggaactactggtactcttaaaaatatttcctagttctagccaggagtggtggctcacgcctgtaatcccagcactatgggaggctgaggtgggctgatcacctgaggtcaggagttcgagactagcccgagattacgctattgcactccagcctgggtgacaagagagaggctccatctcaaaaaaaaaaaaaattctttttgaaagcaaacggacatgtttaatttatatagttcttctgagcacagtcgattacagcaacacattatagtcagtaagtccactttataatactgcttaaaagtatatagaggtaataattttgatgatggctcaataaaacaacatcttcgtatattctgatgggaatgtggattacaaaagactttctagaaa

SEQ ID NO: 40831 - DNA, 990 bp, Homo sapiens
catgtgtattagtatcacttattaatgcactagcaaattaagtatttaagttttttccttatgtgatctattttttgttaatggacagttacataataggagattaagtatgaaggaatagtgacccaatctggaatgcagatgtgtaagattgtctcagtttatctgaggccacataaaacacatgcacaattattaacaggctgcagttatttattggaaaccaaagcaaataagttagttactggttaatcctgctaaaagacactgttatgacaacaccaccagggaaagaaaagaagatagagcaaaccacttttgttatgcagataaaatgattcagcatagagattctctcaatagcagttcagtttcctgctggcctgtaaacataatcagcaatgcccttctgaggccagtgctgcaggattattccaatgtgaggtcaatggggtcaatctgtgtgaagtggtgacaaacactaagagaaggtaagaagctatttgtgtgatcagtgatccatagactggggctcagagttctgggaagcagtagagttatgaggtagggtggtagttaagcacttagcttttgccatcaaacaaacctggaatcaaattccagctccccatctttagttctgtgatcctaagcaatttaaattttctgtctgtaaaatggtgatcatgttactcaccctacgaggttgtctatgcaggttatatgttatagccatataaaggaactagcacagtgccagccatgaggtaagcatttgataaaagggaactgttagtactatcatagttgtatgaaaagggaaagcatgtctgtccctttaagctaaggaactaagctaggcaaggagtaaggagataaagaaggcttgttgaagacatcaccctacagtccagcagctcatccaaaagccagtcatgtgcttgatgttcacagaacatttctgaatcaggcaacactgcaacaatagta

SEQ ID NO: 40832 - DNA, 859 bp, Homo sapiens
gactcctacttcaggtttttaaaatgctttcaaatcaatagaattcatgatttgcaatgttttcctaaattctgttaaaacacacttaggaccgtaaattttcaccaaccataacagacacctggtaagcgggcatgtaataaacaattgagatgttagaaaaaaagatatgtctctgatgagcagggcaaaagtgaatgtaagtcaaaagatatctaaagactctatagcttctggaataataaattggtagttttctttatttttcatttgttgtttcagaaagtgtttaacttttgatactaccaccaatgtaaaatataatagattgttagtaacaataaatcaatctctacgttgtccaaataggtgtgtttacccaggtccacactgttcaagttttattaaaactgtttcgttttatccaggtttccagtattgcatctcctaagacaaacactgatatttatctgctgatgcttgttttactaaccaaatattacattacacatggtttatcacattacccagggaggtgacaatatttcaggaaaaaaattaacaaatcaaaataactttgaaaactgtttataccccatgtacaaaagtactgtctatgcctagttattcactactatcacaagatatacataaatcagagtttttaaataatactgacttccccttataaattcctttaccccttgtgaaaggaacctagcaccattatgacacagttaagcattagtcacagtttaataaataatttcgttatagcctcctagtctatcagtattatttggattctcagaatgcatgtaatcatgtaaattacaaaatttcctttgtatcagggata

SEQ ID NO: 40833 - DNA, 1305 bp, Homo sapiens
tacgttgaaacttaattgcaatgtgatagtattaagaagcagggcttttaggaggtgattaaatcatgaaggcagatcactcatgaatgggactagtaattttaaaaagagatgatgagctgtttgcccttccacaatgtgtgggcacagaggccaccatctatgaagaagaggcccttaccagatacaaaaactgccagtgccttgaccttggactttccagcctccagaactacgagtaataaatttctgttgttcataaattaccctgtatttccttagagcagcccagactaagagacacttgaataaagatttatttaaagtagacatacaaatggccaagagatatatttaaaaatatttaacatcacttatcatcatcagagtaattcaaattacaaccacaatgaggaattgcctcacacctgtcagggctgttattaataaaacaaaagacaagtgttgatgaggatgtagagaaatttgaatccttgtacactgttggtaggaatgcaaaatggtgaagcactatggaagatagtctgaagtttcctcaaaaaattaaaaatagaactgttatacaattcagaattctcacttttaggtatttatcaaaagaaactaaaattagtatcttgaaaagagcttaccacggtatttctctaaatgatgcacttgtaccaaatcatttaatcctcaggacaacccaataggtactacttttagcctcaatttgtagataaggaaactgaaacccaggctaaataacttgcctgaagtgaaataactagtgagtttcagagcaggaattcaaaacagaaaatctggctccaaagtccatgcacataacctcattgcttccctatctgaatcacctaatagacttcttaaatatagagacaattcatataactaatcttgttatttgtatatctcacactatctagaacaacgtgttattgctaatagatattctatgttgtttttgatatgaatgaatgaataaaagagcaatatgaagctatggaggaataatcacactgagtgctaagccagaactctggtaaaccataaactatatataaagtgtgcctaaaattctttatgagaaattattcttcatcctcacaactcctcagaaattttatccacaagtaactaaagttttcacatgtttcactcataggatcttcactcttagctaacttcaatattggaaaattacagacgattattttatgtctattcttaatgaccattatggcacatatttcatacattttagtctaagtatagaacaac

SEQ ID NO: 40834 - DNA, 1799 bp, Homo sapiens
gttgtcagagaagcctaatggaattaagggggaaaaaagtctgccacttctgttaaataaataatttattacaaaaagatgactgttattatcaaagatctctacagatcagcatccattttctaacattgctctgtatatgccgaaacatttgtgtatctatgtgacttaaattttatcaaatgaagagcagttttactttgacaaatctgaaataaaattccattaagaagtccatttcaaatggcccttattaaaataatcctttcaattttgaagaacactattctgggaaaactcttcaacaatgtctgctagtttgaaatgtaacttttcccactataaaaaagaaaaaaagaaataaaggaaaagaaagcaccacaaaactgaatttgaaataaaaattatattatttatgctccccaaaatgttaaatgaatacttacagttgttgtgcaagatggcctgatacacttcatagcttccactttgtaaaaagatggccagcccctcactccaccctccccaagcataaataaacagtaacatactaaaaggaaactgtcctaggataaaaactgcttgttaagaaagttcgcattcttactaaccaaagtgatattcctataaatgtaaaagcccatctgcaaaataaaagttagaaaacagaataccttatttgtttaaaaatacatcccccagatgcaatgtttctatgtgtgtgatgacaaaaataattactccattcttacccaccctcagcaactacccctcaccttatgtccaatggcattaaataaacatgctggcaaaaagtattcaacctgcttcaaggatttaaactgtaaatatggactttaaacttcaacataaaacaaagaacaagagtctcactttagtaatacccacactggcactgcagctaaaactcattggcaaataactaacaaaaccgagttagcaataaataaggacaacatgatatatagacagacagatggaattgcataaacagacaagaaaagcaaagagacaaacatacggaagggtctgttttaaaagagtgaaagattctgatttatttggtactttagtgagaaaaatagatttgtttgtaattatttttaaagtaacaaaactgaatcacaagggcacacccctaagtaagtaggaagaaaattagtaaagggtaggcctcctacagatgttctaaattttaagctagcactagctctgtcaaacttaaatctggaaattaaaattcaagcaggaaagaataaaggcattgggggctaaaggagatgacagagggggcattgaggaagcaggatttttttttttttaagaaagttgtctgccctaccttcttccccagcgctgagtttctcttcttataatcggtgtctccctggaagtacagtgtgagtggtaatgactgcctgcctccctaatgagtccattttcctgctcttgatgttgtgtatatacacacactgcaacctaccttacaaaccacagagacgggaagagagagagagagcaagagagaggagggaggggggaagagagggagagagagacagagacagagcaagcgagtaagagagagagaagaggagagagagagagagagaaagaaaaacagaaagaaacagagagaaaggcacagacaaagccctcctaccagacagcagacagctctccttcccctatccagcaaaatgcaactcgtctaatgcagcaacaggttcagtattgccagactaacagagtgaaaaaggtatattctctatatcatt

SEQ ID NO: 40835 - DNA, 819 bp, Homo sapiens
atatctgtgagctgacagtaaagacaggctggctgctttgtttgactatagttctgtttacctcatactgtcaagaatggattttgacacagtattaatattgctatttttattgatataattagcactgctataaataatttcttgtgctgccatatgtaagtatatcattacaatcagcagtatttagtgcttttcttatatgacaccttgaaaacagactgttggcccaaagaacaaaagtgacctcatgatatgggaatcactgaaaaaaacattgccctgtcaatagagactactgttttgtgtatgacttcactaaacaaactagtttatatttgtttgaaactaaagtttctcaccaatctgctgtttcaatttcacatcacaccatattgtacctaaaacaggcaatctggattcctgttgctactttttcttcccccaaacagctcaggaatgggtttgaaatacaaggcttgaatacataaagcaaaataattaagacacccaaaattcagaatgggtgggtgaaaacaagtacacttgaaaccatttgtgtaactactagtgggtggcccactgtgagtttttgattatatgaaagcaaaatcaaaacatattttatcttgcctctagatcacatcagctgtgacaataacctcatctggaccttgaatagtttgttcataaaacaaagtagggtgactgacccagtgcatattcaacacagagtatgaaggccaaaagaaaatgacaataccattcaaaacaagtttgtggaaattttagactagtatattaaaacctttctttgtc

SEQ ID NO: 40836 - DNA, 3004 bp, Homo sapiens
aatggcaacaagttacaacagtaacttcagaatagcgttcacttgaaaacattgggtgaatggcctctataatttttttagctgaaatgtatacaccgccacgcagtgaggaaacttgactttagcacccttttggtatttttaatagaaaaaacagtggagaagattttcacatgtctagaaaggtaacatgttcaacttaggtttggccaatgctgattctgaggacagtactacacccgcaagcttccaaactacttcctgattcattcagattttcattggagagctgtcatcctgctactgacctcattcaacccagttcggagtgagagatcagcggattaccgcgctaggtaccgtagctgtacgccatattgtgtttttcgctaatgtttagtttgtgtgtgtgcctagcatatgtttgtgcaagtgtgtttatcaatagaacttttagaaaatccctgcctcctgcctcttcagcatccttaaaaaggataacagctgggggcggggggtggggggaggacccaaaagccacacagacaggaatacattaaacagtgtacgagagacggcatttgttttaaactttcaagaaccttccaaccatttttatatcaggaatcaaaaagtgttaacatgttttaatgtttccgaagtggcccaaagaagagaaagaaggaaaggtgtgtcttcccttcccaagccccctcctctctagtcgtagaagcgaagcaggcgggggccgggagctccggcgtctggagagacatccagcggctgtggggccaggacacctcctgccccccagttctctgaagacgctccagagaccgcgagagccacggcaagcgggggagggcgaggagggagggggcagaagacaagcgggcgcctctagcagctcctgagccccggctagtccccctcagctcctcttcttggaagcagcggctccaggcgcagggagtagagagaagaaggcagaagacacgtttccagctgcgggacgtcccgcccgccccgccacccttcgaccctcccgcgcctccctcccacctccccgccgggtcgggcgaggcagccgccgggcgctaagaagggcgccgggggagggggcgcgggcggggcggggcggggcggggcgcgggggcgcgcgcgctcatccagctcagggcccgctggctcgccgctctgtaactcgctcccccaaccccaccccgctcccctccttcccagtcccgccgccccccactccaggcgcctcgcagacgcctcatccccctcggcacgcacacactcctccctctctcccgcccgtcccacaacaaattagagtttgtggcattacctcctcgcgctctttaatcttctttcctcaactcctaaacttccccccgcccctacttcttcggcagaaggcccacattggacgcttcactccgcgaaccctctatctctccccgctataggatagctctcacgccaatcttggcttcagtgagccaatgagaatgggacgcccctcgtgaggttgccgcccataaacaaaatgcactcttccttctcccctccgcccccccgtccccgcccctttcttcctcttccctcatctctgtcaccttcgattgggctaaaagaggcccaatccgctatctcaaacatccattgggacgcggaaacttcgctcagagaagtattaacaggcgattggtggacaatccttccacttcgcccacccccacaaccccctccccccgccgcaccttcaccctttctgaaaaggtcaatcgtatctcgttgttcagtgatccgggaggtggaaggctattggttcagggagcccgtcagaccggactggagtgagccatgattggtcgacacaggcgcaatcaggttaggttgcttactcctccgctcctccctccttttcctccacgccccatctcccccaccccctactgcttttactttctacgcatttctatttcctcctttatttatttatttgtgataaacttaaatgacccggcgacggaggcggtactctaggagaaggctgaggatgacgagcggcggcctggggccaattgccgagagggctgcggggtgaggggcagcggcggtggccagtgagaggcaggtgtctggagcgcgctgggcctgtggagccgggatgccccagcggaggcggcggttacccgctgtctggcgcggcgagctgcgccgggggagccgcgggagcggagaggggggtgtcgctgtcttggacagctgaggcagcgggatggaggctggatcccgggcggtgggtgggaaagccggagggagggtctggctggcggcagcgcgcaaggccgcaccgggtcacgcttgattcccgcggaatggggcgcaggttgccagaccgggtccccagtgctagggctcaaggaagaatttgttcatgcagaagatttagaaaaatactatgtaaaagagtttggagtaagcctcccttaatataaatgagatttattatcctgccggaaaaagcagattatgtttcttattactgaacgcctgaagtaccaacgactcaaccagagcccacagaattcaatatcctgggtggtaaaaggaacaaataaagcaacacggaaaattaagtgtggttcaaatgcttcaataaaatcttcgtcctcaaccatttgtcattcaacatagcactccccagagccaaattcttaccaaatattggtccagtactcaggcattggagaaaaaaatgaggctgaagtccagcaggaagcccaggatagattcctaaaaaggatttcttacaagggccaagatgggagggttggggaaatcgcttttcactatacaaagaaaaaaaaataattactgccaaactaagttgcacttttttaggcagctgatatagcaatattttgtcacaaaataagagactttatcaaaaataccatgcatgcaaagaatacactgtacttgggatttg

SEQ ID NO: 40837 - DNA, 1089 bp, Homo sapiens
ctctggaaaagtagacattaagtctccattgttggggtttctgacagctgtggcatggtggcatggtactaccatagttcttctactctaacactttcaaatacccttttaggttttttccctaagttctccctctttcctttttcccagataatcaatagatgattaaatgtctatgtgaattgcaactgtctgagttcattgtgttattgtattttttgttaaatgggtataatttgaaaacaagacctagaaatactgccatactttatctggagtcatcttagaagattattattatcagcataattatctactttccatacaacttgattgttcacattatatatatttttgacttgaggtggaaggatgacaaaagggtctcatttaaccttttctgtttttaaatagaagcaagattatttctaaaagtcaataaaggatatcccagaggaattgaggaaaaatgggatgaggacttcagtaaaacatactttggtgacaaacattttgatataaaattttgtaaaagcacacacatcctgatgggaagaggatgagtaatttctttttaattcagagcaagtgttctaatctggctgaaattctgggaagtgctggaaatccccaaagcaaagtgccagatgccatttctggatcctggatacgtgggcttggttgctaagatgatgatgcctcctccccttcaccacattcagctgacgcctgagcgacagggagttgatgtacgcagagcacggatctaacaatgtcaactgtgctgacatcatcctagctgtgcagggctgatgggaattcagaatatcaaacatcatatcaagggcagtgagcaggtgtgactcatttccctggagaagtgggagagaggaagggagagggcaggattatctcacactgacacacacacagcctttagactgagctatttgcgtggcttatttaaaagcagcaaaacaatgttctgtctctctcttcatttttctaccggaaacactttatattctagtcctatgtgtctcagcatagaatcgagcctttcaacatcatagtgtattaaaatacaca

SEQ ID NO: 40838 - DNA, 1433 bp, Homo sapiens
gtaacatttccatgttagctgttttctatttgttttttcttttccacaatggtgcggcctagaaacagttaaccttcttcggggtattacataccttagacatataaaaaagctatgagcattcaacactgaaataatcatataaaccaaacatactgcacactacttcagggatactctgaagcccatccttagaccccagactcaaacaaaacaaaatacgatgtaaagaactgacacaaatcatcagagtttagagaacaacgtgacgggcagcagaggagaggagagggttgaagcaaacttttttggtttttttttcctaagtagggctggttctggcttgtcttccttctccccactttgcttcttactcttgggcttacaaactgcctggtttcccttctccaagtcagggcttcgtttctctgccttggccttcctaccccaccttctgcgttctgactccatgaggcccttttcgcgtctcattttctgccttctttaggcgttccctcggcggctctgcagtgtgatctcatctctttgtttctccccggctgccgtcagtcaccggctctctgcgcccccacccgcgcgggctcgcggccgtgctgcgggcgtggcctcagccgctgagaccctggggaccgcagggcgtggcgcggcctccgcccgctgcacggagagccccccagaggcagcgacacggcgcttggggtccgcggggctcctcctccaactccgcagacctccggggaggcctcttgctccccgaacacccgggagttcgctttcatttttaacgaatctccacaatctcttgtttgggagataattgcttctttcaggggcttggagaacaaaagcgtcagcccagggccccaggtctctccgcgggaggagggcacccaggggcgatgcgccgggctctctccttcgcccttcttggcccgctcgccttcagctcccacccgcagcagcaaccgcagcctgcttccggggactgagcagccctgggtcagccaaggttaagcagcgggtggggaagaggagagaaagctgggtcaattggaagtaaccttcttgtaccgcccactttttccttgcttggaggcggcaaaaagcactttagcattcttcgggctgtttgcgcctctttctctaacagggccaggggagtggaagagcggccggcaggaaggtttctttgtcagcaaaagcggacctttggaaactaaacagcaatgctctgtctttagaagacagcacaggaaggaacaaacagctgaggagtgaaggccagagaccccatttggaaaacaatggcctttcatgattattactatttttaaaaagttttctaggctttttcatttgaactttccatttctcactatgaaatgcaggttctatagacaattgcacacaag

SEQ ID NO: 40839 - DNA, 1541 bp, Homo sapiens
gcacgcctgtagtaccagctactcaggaggctgaggcagcagaatcgcttgaacctgggaagcagaggttgcagtgagcctagattgcgccattgcactccagcctgggcaacaagagcgaaacgccgtctcaaaagaaaacaaaaaaaatgcacggagggaaaacagcccggaggctgaatcctgtccaacagtagttataaccctagtttttccaacacgagtaaatataaaggcatcttgctcctctggaaatagggagaaccagacctagctatcttcttgaaaaagaaaaaaaaatacttctgcatcctctcaacttaaaacgaaggaaataagatagttatcaatcagcatcatttgggcatattgttattatttactatcattttattaaaattaataatagatttactgtaaaaacagagcctgccttgcgcgtagcactcgataaacgctttttattattctgcttgttgacgctgttacctctcttttggagtaaaagggggcggaatcgcaacaagaccccaggaccccgtgtgcgcgcgcgtgtcgggggagctgacctatgacaaacatgtgcagagctctagtacccagccacgcggaggctgccggttgacagaagcgttgccgccccctgccgccgagttcaccctgccgtcactgctggaagccgcacccctaggaaaggctgcaaacccaccctgcccccaacacacccgcgctccctctctgcaggccggctccatccccgcccccaggtggccaagcaacaccgccttctagcttcctcccgaccgggcggcgcctgcagctgcctggggaaggagccccgcagcagcgcgagcgggtgggcggggggtgcgcgggccgcagggcaggagggagggcgcaggtaggcgggcggggagaagctaggcggccgggccgagcggtcgcgcccagccctgcctctctcccttctcgactcacaggcggcctgactcactcctttgtttctggaaaagatctatctgtactagcccgaggcggaattcaccccgcccgcactcatcagaaatcgtttgcttattctctgcgcccctccgtgctcgcctgggacgcgggcggaatcctgacgcaggctgtcagccgcggtgacgggtgacaccgggtgagcagccgtccgcgccgccttccctgcgccgacgggcagcgcggcgttcggcgcgcactgctgccccctcgtggcaggagcaagcatcgcagcagcgccgacaccaccgcccacctgcagcccggggagcgtcacttctgggtgtttttcaaagggagcatttttacagctccattcaactgctgggattaggagatgtggctcccaggttgattactaatgaatgagaaggggtgtggtctgtgcgtgtatgttcttgtgtgcgtgtacgcgtgtgagagagagagagggaaggggggagaacaactgtaagagcatgtttgtggtgacaggataatggagaagggaggaaggaaggggaaaaatgaaagagattaaa

SEQ ID NO: 40840 - DNA, 4957 bp, Homo sapiens
agagctttagccttctgtgaagatagaaaaagcattcatatactttcctttgcagatctatcatctcctttccattaaagcaatcccttgatataccacatactcgagtcttagtcatttctttcaatatgcaatgctgacttgttggcataatttcatctcacttacacattttcaaacacattcttctcaacctgaagtctgagtaagctggtagcaatgaagacaaaaacagtattcaccttcaatcaccatagtgtcccagcccctagctcagtgccagccaaataataagaacccacaaatatttgggtaatgaatgagtaaatgggctgtgtgttgacaagagagtagctgaaacgctaaactcatttgttttttagtgacagttactaagtggggagaattccagggggaataatgatggaggacagtgtggagtctaaagccaatgtgtgtgtgtgtgtgtgtgcgtgtttgcgtgcatgtgtgtgtgagagagagagagagatgttcagagattagcaggaagtacagttcagaatcaaatagcttaaaggaaaaggagggattgggacatcacccatggtaaagggttctgagaagctaccctattgattcatagagggtgttcagagtcccgtgttttagtgaccccagttccacctagacccagctccaggcataatatgtttgacaaaatggcaggacagtgaaagggtcattaaagtactttatttgtatcatgaaaagattgacttataaatcttcattaaatatttgccttcctagccagacataagctccataaagacaggcgctggccctcagggagcaagtgaactggcatggtgcctggcgcccagcagttccttcatgaagatttcagaatgaccaagtgagttgaatgcacagcccaggcatctgtgttttcacacctctccagggtctgttccattattcacgtagaaaaacctgttaactattgtgaagcagccttgtatctgtagctgccacacacttctcaatgaccttccctttccaagttgagttttgcaccatgtcaacaagtggcagctttctagcatcaaattgtttgtccagggttatcagcattactttcttttcttgtcctcactacaatacacatgcccatctcaaatcagttccattgttacttaggtaatagtattgtagggtgtctttacttcagaaagaatgatatatttagcaaatgttacagatataggaggttttaagtgggactaaatgcagcaattaatgctaatgagtctgctgttagcatgtaatattcttggtgttataatcatgcatcactgaatgcgaagcctcagtttgtgcaacagatgccgatcttaatggctatattctcttcccatggataagctagctttagttaaatgaatcattaagaataaccatttaaaatgttaatgaaaacagtgattataaccaccaagattttttttttaacttctggctctattactttttattttcgaaaggactttgggaaggtaagaaacttattgcctgtgtatgttgttttaaacagagaaggccgatacagtttctgttcacagcagccctgaggccgcatgcctgtattattaacaccaaccgtacttggagactaactctcttttgttctcatttgtcatttcttttaaatattcatttagggtataagacagaattgggtaagtaggatccttgacagtccaactagttggtaaacaaatattttgtcttcctgaaagtatcattatactatcgcaaattaagactgaaaaggaaaaaaataccaggatgttgatatttaagaataaatactttatcttttcagaacaacaataagaaggctggtttaggctttatcgctggaaaatggagtttgtgaaacaaagaagtaatagatgcatagcaagagctcagtgtccttccacattgtgtcaccggttgtaccctgagacagattctccaagtcttagaacatggatatgcagtgagagtgaggtttacgtagaaaagtctttgtgtcttgggagtgccatgtgtattgaatgtctatgactcatgtctccccttgactcacttcttggctgggctacatgactcatcaggcctggtaggttcagggcagtgtagctggtggggaagggctaagtgaagaggggctgtctagacctggggagcatggttataatgagctttttcaaacgtacaactcaactctcttgcacctaggaagtatcttcatccagaaggagttctcagtcctttttctggtgagttgtcttgattctggaaaatatgtttgtttttctttgagaattggcccaaatattaatatatctgggtaaatcaatgctgcttgaaggctctgtaatctcatgattgttaatatagagcctggggtttatatattaagaatagtaagtgcaggttgagttaattgtctaagagacagaaaataggaatgttcatagtccaaggacttaaagtccaagtgagaggtgacagcgtgctgtcagtcctcacagccctcgctcgctctctgctcctcctctgcccgggctcccactttggcagcacttgtggagcccttcagcccatgctgcactgtgggagcccctttctgggctggccaaggccggagccggctccctctgcttgcagggaggtgtggagggagaggcgcgagctggaaccccggctgcgcccggcgcttgcgggccagctggagttccgggtgggcgtgggcttggcggaccccgcactcggagcagccggccggccctgccagccccgggaaatgaggggcttagcacccgggccagcagttgcggagggtgtactgggtcccccagcagtgccagcccaccggcgctgcgctcgatttctcgccgggccttagctgccttcccgcggggcaggtctctggacctgcagcccgccatgcctgagcctcccaccccctccgtgggctcctgtgcgtcccgagcctccccgatgagcgccgccccctgctccaaggtgccccagtcccatctttttgcttttatgagctgtaacaccgcgaaggtctgcagcttcactgctgaagccagcgagaccacgagcccaccgggaggaacgaacaactccagacgcgccaccttaagagctgtaacactcactcgaaggtctgcaacactcactcgaaggtctgcagcttcactcccgaagccagcgagaccacgagcccaccgggaggaaggaacaactccagacgcgccgccttaagagctgtaacactcaccgcgaaggtctgcagcttcactcctgagccagcgagaccacgaacccaccagaaagaaactcagaacacatccgaacatcagaagaaacaaactccagacgcaccaccttaagagctgtaacactcacccgtgagtgtcccaggcttcattcttgaagtcagtgagaccaagaacccaccaattccggacacacaagggttaatacaataaagatttctgaatgaggtctgtggttgcagcagctgaggtagtgctatagcacttatttttcagtgacaattgcctggaagcttctgatgactcttacttagggctgcccagggttggaactgcactatttctcttaacctgacctgcatcctctcccacttcctgagtttctgatcaaagtccatctctgatgtttgttctgactagtagaaacatctcttttgggcaggcagaaactgagacagaggttttttgtttgtctgtttttgaaatagggggtctttgctgtaagattaattcctaatttgacctaggaaaccaggcaggggcagggtgagcaggtaaaacgataaagatagtaagtaaagataacaaggctaagtcaaatttgtatacttcctgtgatggttaatactgagtgtcaacttgattggattgaaagatacagaatattgatctgggtgtgtctgtgagggtgttgccaaaggagattaacatgtgagtcagtgggctgggaaaggcagacccaccctttatctgagtgggcacaatctaatcagctaccagtgcagctagaatataagcaggcagaaaaatgtgaaaagagagactggcctagcctcccagcctacctctttctctcatgctggatgcttcctgaccttgaacatcagactccaagttcttcagttttggaacttggactggctctccttgctcctcagcctgcagttggcctgttgtgggaccttgtgatcgtgtgagttaataataaccttccttgttttaaaagcacgtggcaaatcagcagcaccttacattctctggtagcacctgagaatggttgggtttgtaaaaggtgagttagaagatgtccctcaatgaacgttctcagacacagtccccagtgctcaccatagatcctcaacagtttgaaatccattgaccaggacatagctttgactgataaaaggatatcccaattggccagtagccagtctggagaagagtagagaataatttaaaaaggaaagtgaagagaaattcatttcctcttcatagcaacaaccagtaagacttcagtcttgggcttataggtttcatgcgcgtccgtgtgaagagaccaccaaacaggctttgtgtgagcaacatggctgtttatttcacctgggtgcaggcgggctgagtccgaaaagagagtcagcgaagggagataagggtggggccgttttataggatttgggtaggtaaaggaaaattacagtcaaagggggtttgttttctggtgggcatgagtgggggtcgcaaggtgctcagtgggggtgtttttgagccaggatgagccaggaaaaggactttcacaaggtaatgtcatcacttaaggcaaggaccagccatttacacttcttttgtggtggaatgtc

SEQ ID NO: 40841 - DNA, 650 bp, Homo sapiens
acaataagctgcaagcactcatcttgctaccacccttctgtcaagcatggatgaatatttatatcaggttattttaatcatgtttttcttgatgtgacataattctacataatttattttcccttctcgggtgttaagaaaaggtctctttttaatttttttccgctctgtcaagtcaaaaactttttctatttctcttctggccctgagacaaaacaggacacaggatgacacagagaggtgactgcactggcgtgtgttaccattgaaaatcaatgctcttgtccttggcacattctatggaatgtaatggtctggaacactaagctctgcaacaagaaatgaggaacctgagggaatctatggagttggaatgtcaggttacagcaagtctgtgtgggtctaacacacttgagtacgagagagacttccagggcagatgcactgtctgagctgggctcatggtggtgcttctagcagtgaattttgaattcagtataaattcaccaatctactctcatggtgggcggaaggtgggagaaatgatgggaagggtaggctgcagggcaaaaagagaccaagctgaaaagagacaggaatcaagatggatagagacataacataatcagatgcccaaagagacagggaca

SEQ ID NO: 40842 - DNA, 765 bp, Homo sapiens
taatgaacaaaattcaaaaccaaaaataggatgatatttttaagaaagacatctatttagctttaagaggaattgatacaattggaaagatattaaaaaacaccagcacagaaatcactagtctatcgcaaatgcagtttttctcccattccagaaacacaagctctccattttagttatgctctaacaagctttttgcaaaaaactaatgctcttcagaagcgaaacaagagcaatttcaggacctggcactctcctcctttaactgtcattatgaaatgactaaaaatcaaatgaagcaaagcaacatttgccggtcttttctaagcatggattaattattgccaaaggaatgtgcttgcttttccttttgtcagttgttagttttgacccttcttgtgtgtgtattttgtgtgtgtatgtgtgtgtgtgtgtgtttttttaactttttactgaaggtataaatagagaattcgggagcattatgcaaaagttgagctcagtcaggattataggaatttctactgtttacccagaggcattgaaatgtttggataaaatgaggtatcgaagatatgggtgtgggtgaagtgttggaggtgttccagtttggatcgaagtaccatctattgcatacttttagggctgggatgctattagagaagtctaggatatctggaagtggttttcaggaaccacaccttttcaccctaaagaatatcttttcttctgtacttatatgaagtttattacattcccactatt

SEQ ID NO: 40843 - DNA, 1264 bp, Homo sapiens
ggtgggggttaatgaaaaatggagagacttctttttgtctgataacataggatcattcattagtcagatctatgggcttcctgacctaaagtgagctccaaagctctgcctggccctgatgatgtgtttgggagaatatgtgccaagctctcttttcttgctgacactttaaactctgagtggtccttcagaagctgagtgaaatgaacttaaaccaaggcctggagtttgggatcatgggtagttgcattcatgcctgaagtgtgaacaacaatacaattatacttttcactttgcatttctctgacacatcttagcgtcagactattgtttgctaaatgagtcatgtttattagttttgtttcatccgtatgactgtaagctcccagaagtcagagccccaccagacattttgttgtatccttcatagcaggctgcacagaggttaaataaacattgacatttcacaaaagtggaacaacagaaaaagaaagaaaaaatatgaaagatacaagaaattgtaggccaaggagagtgtgagacataaaacaaaaaaaggcaatcttgggaaaggtaccaggaaagaagaaagacatgacagtcattggggttgagggtccctatagaaaatcatttagtgaaagatgtcttcctttagttcttcttcctttttattccctatccacatccttgttgtcctccctttctcagtttctctgtgtgtagccccaaaagaaagcttaaccatggacagcagctcaacaggccaggcacactgcaagttaggtgtcacctggacaggctaggcttgctaacagccaacagggatggggtttgaagtcctgagggagactggagagcagctgtgcagtactcaaaacccaaactcaggtcatggccactgatcctacccagacctctctctcttgagttatccattctaatttcttgtccttctctgaagccccttgaggttggtgaagagtgaaggaatgcatcctgagttattaaagacactcctaagaagctcattaagtccttttctccttaactccaagaaaagatcccattttccttccaacactttaaaaccattattcattggatggaaacatccttcctcccctcaacccttttcaaagggaatcatccagcccaggactatgaagtatccctatgtgtggcagttagatttggtgacaaaaagggctctagtctctccttgttacaaagaacaaagataaaattatgcagttcaggccat

SEQ ID NO: 40844 - DNA, 990 bp, Homo sapiens
ttcccaaagcgctgggattacaggcatgaaccaccaggactggctaattttttattttttattttatttttatttttttgatacacaacatcaagcatgctgttgatgagaggtaagggttaatttttccaaaaaagattccccagggtcttctgaaaagcttcctgaaagtgggctaagaccttgagtttaaagccctaaacttaaagtactccattctgaccaactacactcacaaggcttgatttccaggcccttctcattccaaaagaggggcctatgcttccccaaacaggaacattttaaagtggagaattctactgcttccttgtgacatcatatatttgtgaacctcagtgccaaatgacaggagaggttggtcctacctacaaccataaaatgctgactaggactgaggcccagtttctgcctcataatattactattgttttcctgctcctgcttacacagtgcttctgtaatcatgcagcttcaaagccccgcagatcaagggtaggggcttctcctgaagtctggtatctggcctagataaatctctgtcggctgttctagaatacaaatgcacctgctcctgatattgtctccattagttaaacttggggttaaactttaaccttaaaaatgctgttccagcaggtttggtgtccttgttcacattacagctagcagcttaaaactcttcagtggcaccacatcactcttaagataagcaccaagatacttactatggcctacaaggcccaccatgacctggctccagcctcttgttgcaggctcactttgcaccacgttcactgtgtttcaactggccttttagttttcagaaatgcaattctttctgcctcaaagctttcaaactgttgttccctatgttggaacattctctcccacttagccttctgatctaagaccagaagtcactttctcaaataagtcctcccagattttccagattagtgtggctgtcct
